United States Patent Application Publication US 2004/0253606 A1 - sequence listing, part 6

SEQ ID NO: 6076 - DNA, 7393 bp, Homo sapiens
  misc_feature (3819)..(3849): n is a, c, g, or t
tacagccccaaggtcgctccctctggggccctttcttccccattcttcccagcagcccaaagctctggtgggacaggggcagcccctggggagggaggagaggacccaggaacccggctaggagggtggcccacccatttccagtgtgacctgttcccattcccccatgtctcctcccatccctcccgccactcagctcaggctgatgagaagcagagcaacgggtgtatcggtgttttctttcctggtggggtagtggggtggggctgaggagagaaaagggtgattagcgtggggccccgccctcttttgtcctcttcccaggttccctggccccttcggagaaacgcacttggttcgggccagccgcctgaggggacgggctcacgtctgctcctcacactgcagctgctgggccgtggagcttccccgggagccagggggacttttgccgcagccatgaagggggcacgctggaggagggtcccctgggtgtccctgagctgcctgtgtctctgcctccttccgcatgtggtcccaggaaccacagaggacacattaataactggaagtaaaactcctgccccagtcacctcaacaggctcaacaacagcgacactagagggacaatcaactgcagcttcttcaaggacctctaatcaggacatatcagcttcatctcagaaccaccagactaagagcacggagaccaccagcaaagctcaaaccgacaccctcacgcagatgatgacatcaactcttttttcttccccaagtgtacacaatgtgatggagactgttacgcaggagacagctcctccagatgaaatgaccacatcatttccctccagtgtcaccaacacactcatgatgacatcaaagactataacaatgacaacctccacagactccactcttggaaacacagaagagacatcaacagcaggaactgaaagttctaccccagtgacctcagcagtctcaataacagctggacaggaaggacaatcacgaacaacttcctggaggacctctatccaagacacatcagcttcttctcagaaccactggactcggagcacgcagaccaccagggaatctcaaaccagcaccctaacacacagaaccacttcaactccttctttctctccaagtgtacacaatgtgacagggactgtttctcagaagacatctccttcaggtgaaacagctacctcatccctctgtagtgtcacaaacacatccatgatgacatcagagaagataacagtgacaacctccacaggctccactcttggaaacccaggggagacatcatcagtacctgttactggaagtcttatgccagtcacctcagcagccttagtaacagttgatccagaaggacaatcaccagcaactttctcaaggacttctactcaggacacaacagctttttctaagaaccaccagactcagagcgtggagaccaccagagtatctcaaatcaacaccctcaacaccctcacaccggttacaacatcaactgttttatcctcaccaagtggattcaacccaagtggaacagtttctcaggagacattcccttctggtgaaacaaccatctcatccccttccagtgtcagcaatacattcctggtaacatcaaaggtgttcagaatgccaatctccagagactctactcttggaaacacagaggagacatcactatctgtaagtggaaccatttctgcaatcacttccaaagtttcaaccatatggtggtcagacactctgtcaacagcactctcccccagttctctacctccaaaaatatccacagctttccacacccagcagagtgaaggtgcagagaccacaggacggcctcatgagaggagctcattctctccaggtgtgtctcaagaaatatttactctacatgaaacaacaacatggccttcctcattctccagcaaaggccacacaacttggtcacaaacagaactgccctcaacatcaacaggtgctgccactaggcttgtcacaggaaatccatctacaagggcagctggcactattccaagggtcccctctaaggtctcagcaataggggaaccaggagagcccaccacatactcctcccacagcacaactctcccaaaaacaacaggggcaggcgcccagacacaatggacacaagaaacggggaccactggagaggctcttctcagcagcccaagctatagtgtgattcagatgataaaaacggccacatccccatcttcttcacctatgctggatagacacacatcacaacaaattacaacggcaccatcaacaaatcattcaacaatacattccacaagcacctctcctcaggaatcaccagctgtttcccaaaggggtcacactcgagccccgcagaccacacaagaatcacaaaccacgaggtccgtctcccccatgactgacaccaagacagtcaccaccccaggttcttccttcacagccagtgggcactcgccctcagaaattgttcctcaggacgcacccaccataagtgcagcaacaacctttgccccagctcccaccgggaatggtcacacaacccaggccccgaccacagcactgcaggcagcacccagcagccatgatgccaccctggggccctcaggaggcacgtcactttccaaaacaggtgcccttactctggccaactctgtagtgtcaacaccagggggcccagaaggacaatggacatcagcctctgccagcacctcacctgacacagcagcagccatgacccatacccaccaggctgagagcacagaggcctctggacaaacacagaccagcgaaccggcctcctcagggtcacgaaccacctcagcgggcacagctaccccttcctcatccggggcgagtggcacaacaccttcaggaagcgaaggaatatccacctcaggagagacgacaaggttttcatcaaacccctccagggacagtcacacaacccagtcaacaaccgaattgctgtccgcctcagccagtcatggtgccatcccagtaagcacaggaatggcgtcttcgatcgtccccggcacctttcatcccaccctctctgaggcctccactgcagggagaccgacaggacagtcaagcccaacttctcccagtgcctctcctcaggagacagccgccatttcccggatggcccagactcagaggacaggaaccagcagagggtctgacactatcagcctggcgtcccaggcaaccgacaccttctcaacagtcccacccacacctccatcgatcacatccagtgggcttacatctccacaaacccagacccacactctgtcaccttcagggtctggtaaaaccttcaccacggccctcatcagcaacgccacccctcttcctgtcaccagcacctcctcagcctccacaggtcacgccacccctcttgctgtcagcagtgctacctcagcttccacagtatcctcggactcccctctgaagatggaaacatcaggaatgacaacaccgtcactgaagacagacggtgggagacgcacagccacatcaccaccccccacaacctcccagaccatcatttccaccattcccagcactgccatgcacacccgctccacagctgcccccatccccatcctgcctgagagaggagtttccctcttcccctatggggcagacgccggggacctggagttcgtcaggaggaccgtggacttcacctccccactcttcaagccggcgactggcttcccccttggctcctctctccgtgattccctctacttcacagacaannnnnnnnnnnnnnnnnnnnnnnnnnnnnnncagattttctcctaccccaacccactcccaacaggcttcacaggccgggaccctgtggccctggtggctccgttctgggacgatgctgacttctccactggtcgggggaccacattttatcaggaatacgagacgttctatggtgaacacagcctgctagtccagcaggccgagtcttggattagaaagatcacaaacaacgggggctacaaggccaggtgggccctaaaggtcacgtgggtcaatgcccacgcctatcctgcccagtggaccctcgggagcaacacctaccaagccatcctctccacggacgggagcaggtcctatgccctgtttctctaccagagcggtgggatgcagtgggacgtggcccagcgctcaggcaagccggtgctcatgggcttctctagtggagatggctttttcgaaaacagcccactgatgtcccagccagtgtgggagaggtatcgccctgatagattcctgaattccaactcaggcctccaagggctgcagttctacgggctacaccgggaagaaaggcccaactaccgtctcgagtgcctgcagtggctgaagagccagcctcggtggcccagctggggctggaaccaggtctcctgcccttgttcctggcagcagggacgacgggacttacgattccaacccgtcagcataggtcgctggggcctcggcagtaggcagctgtgcagcttcacctcttggcgaggaggcgtgtgctgcagctacgggccctggggagagtttcgtgaaggctggcacgtgcagcgtccttggcagttggcccaggaactggagccacagagctggtgctgccgctggaatgacaagccctacctctgtgccctgtaccagcagaggcggccccacgtgggctgtgctacatacaggcccccacagcccgcctggatgttcggggacccccacatcaccaccttggatggtgtcagttacaccttcaatgggctgggggacttcctgctggtcggggcccaagacgggaactcctccttcctgcttcagggccgcaccgcccagactggctcagcccaggccaccaacttcatcgcctttgcggctcagtaccgctccagcagcctgggccccgtcacggtccaatggctccttgagcctcacgacgcaatccgtgtcctgctggataaccagactgtgacatttcagcctgaccatgaagacggcggaggccaggagacgttcaacgccaccggagtcctcctgagccgcaacggctctgaggcctccgccagcttcgacggctgggccaccgtctcggtgatcgcgctctccaacatcctccactcctccgccagcctcccgcccgagtaccagaaccgcacggaggggctcctgggggtctggaataacaatccagaggacgacttcaggatgcccaatggctccaccattcccccagggagccctgaggagatgcttttccactttggaatgacctggcagatcaacgggacaggcctccttggcaagaggaatgaccagctgccttccaacttcacccctgttttctactcacaactgcaaaaaaacagctcctgggctgaacatttgatctccaactgtgacggagatagctcatgcatctatgacaccctggccctgcgcaacgcaagcatcggacttcacacgagggaagtcagtaaaaactacgagcaggcgaacgccaccctcaatcagtacccgccctccatcaatggtggtcgtgtgattgaagcctacaaggggcagaccacgctgattcagtacaccagcaatgctgaggatgccaacttcacgctcagagacagctgcaccgacttggagctctttgagaatgggacgttgctgtggacacccaagtcgctggagccattcactctggagattctagcaagaagtgccaagattggcttggcatctgcactccagcccaggactgtggtctgccattgcaatgcagagagccagtgtttgtacaatcagaccagcagggtgggcaactcctccctggaggtggctggctgcaagtgtgacgggggcaccttcggccgctactgcgagggctccgaggatgcctgtgaggagccgtgcttcccgagtgtccactgcgttcctgggaagggctgcgaggcctgccctccaaacctgactggggatgggcggcactgtgcggctctggggagctctttcctgtgtcagaaccagtcctgccctgtgaattactgctacaatcaaggccactgctacatctcccagactctgggctgtcagcccatgtgcacctgccccccagccttcactgacagccgctgcttcctggctgggaacaacttcagtccaactgtcaacctagaacttcccttaagagtcatccagctcttgctcagtgaagaggaaaatgcctccatggcagaggtcaacgcctcggtggcatacagactggggaccctggacatgcgggcctttctccgcaacagccaagtggaacgaatcgattctgcagcaccggcctcgggaagccccatccaacactggatggtcatctcggagttccagtaccgccctcggggcccggtcattgacttcctgaacaaccagctgctggccgcggtggtggaggcgttcttataccacgttccacggaggagtgaggagcccaggaacgacgtggtcttccagcccatttccggggaagacgtgcgcgatgtgacagccctgaacgtgagcacgctgaaggcttacttcagatgcgatggctacaagggctacgacctggtctacagcccccagagcggcttcacctgcgtgtccccgtgcagtaggggctactgtgaccatggaggccagtgccagcacctgcccagtgggccccgctgcagctgtgtgtccttctccatctacacggcctggggcgagcactgtgagcacctgagcatgaaactcgacgcgttcttcggcatcttctttggggccctgggcggcctcttgctgctgggggtcgggacgttcgtggtcctgcgcttctggggttgctccggggccaggttctcctatttcctgaactcagctgaggccttgccttgaaggggcagctgtggcctaggctacctcaagactcacctcatccttaccgcacatttaaggcgccattgcttttgggagactggaaaagggaaggtgactgaaggctgtcaggattcttcaaggagaatgaatactgggaatcaagacaagactataccttatccataggcgcaggtgcacagggggaggccataaagatcaaacatgcatggatgggtcctcacgcagacacacccacagaaggacactagcctgtgcacgcgcgcgtgcacacacacacacacacacacgagttcataatgtggtgatggccctaagttaagcaaaatgcttctgcacacaaaactctctggtttacttcaaattaactctatttaaataaagtctctctgactttttgtgtctccaaaaaaaaaaaaaaaaa

SEQ ID NO: 6077 - DNA, 1377 bp, Homo sapiens
taggtggcgggcgggtacttaaggcgcggccaccgggctggcagtgcgcccaacagcggactccgagaccagcggatctcggcaaaccctctttctcgaccacccacctaccattcttggaaccatggcggcagtggcggcggcctcggctgaactgctcatcatcggctggtacatcttccgcgtgctgctgcaggtgttcctggaatgctgcatttactgggtaggattcgcttttcgaaatcctccagggacacagcccattgcgagaagtgaggtgttcaggtactccctgcagaagctggcatacacggtgtcgcggaccgggcggcaggtgttgggggagcgcaggcagcgagcccccaactgaggccccagctcccagccctgggcggccgtatcatcaggtgctcctgtgcatctcggccagcacgggagccagtgccgcgcaggaatgtggggtcccctgtgttccctcgccagaggagcacttggcaaggtcagtgaggggccagtagacccccggagaagcagtaccgacaatgacgaagataccagatcccttcccaacccctttgcaccggtcccactaaggggcagggtcgagagaggaggggggatagggggagcagacccctgagatctgggcataggcaccgcattctgatctggacaaagtcgggacagcaccatcccagccccgaagccagggccatgccagcaggccccaccatggaaatcaaaacaccgcaccagccagcagaatggacattctgacatcgccagccgacgccctgaatcttggtgcagcaccaaccgcgtgcctgtgtggcgggactggagggcacagttgaggaaggagggtggttaagaaatacagtggggccctctcgctgtcccttgcccagggcacttgcattccagcctcgctgcatttgctctctcgattcccctttcctcctcactgcctcccaagcccaccctactccaaaataatgtgtcacttgatttggaactattcaagcagtaaaagtaaatgaatcccacctttactaaaacactttctctgaaccccccttgcccctcactgatcttgcttttccctggtctcatgcagttgtggtcaatattgtggtaatcgctaattgtactgattgtttaagtgtgcattagttgtgtctccccagctagattgtaagctcctggaggacagggaccacctctacaaaaaataaaaaaagtacctcccctgtctcgcacagtgtcccaggaccctgcggtgcagtagaggcgcaccaaaaaaaaaaaaaaaaaaaaaaaaaaaaaaaaaaaaaaaaaaaaaaaaaaaaaaaaaaaaaaaaaaaaaaaaaaaaaggg

SEQ ID NO: 6078 - DNA, 5829 bp, Homo sapiens
  misc_feature (942)..(967): n is a, c, g, or t
  misc_feature (2639)..(2653): n is a, c, g, or t
  misc_feature (3372)..(3450): n is a, c, g, or t
aataaacaaggtggagagaaagaaaagtgaacatttttgaaagatcactcagctttaacacaccttggctgggtctggataaaaaaaaagtgagcactgcaaatttctagaagaaaacatcaggagaagaaagagagagggggatttattcaaagttgtttccaattccttcaaaacctcaaaccaggtggctatggtatggatgtaaccaagaaaaacaaacgagatggaactgaagtcactgagagaattgtcactgaaacagtaaccacaagacttacatccttaccaccaaaaggcgggaccagcaatggctatgctaaaacagcctctcttggtggagggagccggctggagaaacaaagcctgactcatggcagcagcggctacataaactcaactggaagcacacgaggccatgcctccacctctagttacaggagggctcactcacctgcctccactctgcccaactccccaggctcaacctttgaaaggaaaactcacgttacccgccatgcgtatgaagggagctccagtggcaactcttctccggagtaccctcggaaggaatttgcatcttcttcaaccagaggacggagtcaaacacgagagagtgaaattcgagttcgactgcagagtgcgtccccatccacccgatggacagaattggatgatgttaagcgtttgctcaaggggagtcgatcggcaagtgtgagccccacccggaattcctccaacacactccccatccccaagaaaggcactgtggagaccaaaattgtgacagcgagctcccagtcggtgtcaggcacctacgatgcaacgatcctggatgccaaccttccctcccatgtgtggtcctccaccctgcccgcggggtcctccatggggacctatcacaacaacatgacaacccagagctcatccctcctcaacacnnnnnnnnnnnnnnnnnnnnnnnnnnttcggagttccaaacaacatggcgtcctgctcacccactttgcaccctggactcagcacatcctcctcagtgtttggcatgcagaacaatctggcccccagcttgaccaccctgtcccatggcaccaccaccacttccacagcatatggggtgaagaaaaacatgccccagagtcctgcggctgtgaacactggcgtttccacctccgccgcctgcaccacaagtgtgcagagcgatgaccttttgcacaaggactgcaagttcctgatcctagagaaagacaacacacctgctaagaaggagatggagctgctcatcatgaccaaggacagcgggaaggtctttacagcctcccctgccagcatcgctgcaacttctttttcagaagacaccctaaaaaaagaaaagcaagctgcctacaatgctgactcaggcctaaaagccgaagctaatggagacctgaagactgtgtccacaaagggcaagaccaccactgcagatatccacagctacagcagcagtggtggtggtggcagtggaggaggtggcggtgttggtggcgctggcggcggcccttggggaccagcgccagcctggtgcccctgcggctcctgctgcagctggtggaagtggctgctgggcctgctgctcacctggctgctactcctggggctgctcttcggcctcattgctctggcggaggaggtgaggaagctgaaggcgcgtgtggatgagctggagaggatcaggaggagcatactgccctatggggacagcatggatagaatagaaaaggaccgcctccagggcatggcacccgcggcgggagcagacctggacaaaattgggctgcacagtgacagccaggaggagctctggatgttcgtgaggaagaagctaatgatggaacaggaaaatggaaatctccgaggaagccctggccctaaaggtgacatgggaagtccaggccctaaaggagatcgagggttccctgggactccaggtatccctgggcccttgggccacccaggtccacaaggaccaaagggtcaaaaaggcagcgtgggagatcctggcatggaaggccccatgggccagagagggcgagaaggccccatgggacctcgtggtgaggcagggcctcctggatctggagagaaaggggaaagaggggctgctggtgaaccaggtcctcatggcccacctggtgtcccaggttctgtgggtcccaaaggttccagcggctctcctggcccacagggccctccaggtcctgtaggtctccaagggctccgaggtgaagtaggacttcctggtgtcaaaggtgacaaaggaccaatgggaccaccaggacccaaaggtgaccagggtgagaaaggacctcgaggcctcacaggcgagcctggcatgagaggtttgcctggtgctgttggtgagcccggggctaaaggagcaatgggtcctgctggcccagacggacaccaaggcccaagaggtgaacaaggtcttactgggatgcctggaatccgtggcccaccaggaccttctggagacccaggaaagccaggtctcacaggaccccagggacctcagggacttcccggtacccctggccgaccaggaataaaaggtgaaccaggagctccaggcaagatcgtgacttcggaggggnnnnnnnnnnnnnnngtcccaggccccccaggacctcctggagccatgggacccccaggacctccaggtgccccaggccctgccggcccagctggtctcccaggacatcaagaagttcttaatttacaaggtcccccaggcccacccggcccacgtgggccaccagggccttccattccaggcccaccaggaccccgaggcccaccaggggagggtttgccaggcccaccaggcccaccaggatcgttcctgtccaactcagaaaccttcctcttcggccccccaggcccacctggccccccaggtcccaagggagaccaaggtcccccaggccccagaggacaccaaggcgagcaaggcctcccaggtttctcaacctcagggtccagttctttcggactcaaccttcagggaccaccaggcccacctggcccccagggaccaaaaggtgacaaaggtgatccgggtgttccaggggctcttggcattcctagtggtccttctgaagggggatcatcaagtaccatgtacgtgtcaggcccgccagggccccctgggccccctgggcctccgggctctatcagcagctctggccaggagattcagcagtacatctctgagtacatgcagagtgacagtattagatcttacctatccggagttcagggtcccccaggcccacctggtcccccaggacctgtcaccaccatcacaggcgagactttcgactactnnnnnnnnnnnnnnnnnnnnnnnnnnnnnnnnnnnnnnnnnnnnnnnnnnnnnnnnnnnnnnnnnnnnnnnnnnnnnnnctgaagacatcctggctgtgctgcagcgggatgacgtgcgtcagtacctacgtcagtacttgatgggccctcggggtccgccagggccaccaggagccagtggagatgggtccctcctgtctttggactatgcagagctgagtagtcgcattctcagctacatgtcgagttctgggatcagcattgggcttcctggtcccccggggccccctggcttgccgggaacctcctatgaggagctcctctccttgctgcgagggtctgaattcagaggcatcgttggacccccaggtcccccgggtccaccagggatcccaggcaatgtgtggtccagcatcagcgtggaggacctctcgtcttacttacatactgccggcttgtcattcatcccaggccctccaggacctcctggtcccccagggcctcgagggcccccgggtgtctcaggagccctggcaacctatgcagctgaaaacagcgacagcttccggagcgagctgatcagctacctcacaagtcctgatgtgcgcagcttcattgttggccccccaggccctcctgggccgcagggaccccctggggacagccgcctcctgtccacggatgcctcccacagtcggggtagcagctcctcctcacacagctcatctgtcaggcggggcagctcctacagctcttccatgagcacaggaggaggtggtgcaggctccctgggtgcaggcggtgcctttggtgaagctgcaggagacaggggtccctatggcactgacatcggcccaggcggaggctatggggcagcagcagaaggcggcatgtatgctggcaatggcggactattgggagctgactttgctggagatctggattacaatgagctggctgtgagggtgtcagagagcatgcagcgtcagggcctactgcaagggatggcctacactgtccagggcccaccaggccagcctgggccacaggggccacccggcatcagcaaggtcttctctgcctacagcaacgtgactgcggacctcatggacttcttccaaacttatggagccattcaaggaccccctgggcaaaaaggagagatgggcactccaggacccaaaggtgacaggggccctgctgggccaccaggtcatcctgggccacctggccctcgaggacacaagggagaaaaaggagacaaaggtgaccaagtctatgctgggcggagaaggagaagaagtattgctgtcaagccgtgagctagccatggcaggacagctcctggaccaggtctcataatgcatgtggcacttaggtccaaggtctccagagggtgaaagctggagtctgtccatgtcctactgagacagcacagccaacctagctagcaacatttgttttagtctgaacaatatatacttatagaattcagtcaaagatacacaatctgaaacagcttcatggggtggactctaacagtagttgcaatgttttagaatgagacttacttctctgctatctagatctgaactccttggcttctttacttagttcaagcccccagcctaggaaagccagttacaataaaagttggctcaggagtcttagagctttacctaaatatgagcccagaaaacggaggatgggggtggggcgccttcctggaggtgacacttgatgggggtgtgttctggttactgttctaaggctgtgccatcagctccttcctcccctgttcattctgcattctctagtcagttggctaagaagtgactcttgcaactaaaaaaattaagaaattcacttcccctctaggaggtgatgatagggtttctaatggttatatgtatatcacattcccatttgcttagaaagtctgattgtagctatgattgtccgtaggcccatactagagttcatggatatgttatactgaaccaggccagagcaaacagaaaaagaaggttgagggcaatggacaaggaaggaataaagggagaagagggaaaacagaaaacctgatgctggggacacagcatcagctcaagacgtcaccctccattctgcactcagaaaatggcacttgggggactgggcgcagttggtctttaaccacttttcaatgtctaaaaacatttgtttgtggtctataagatgaaacatcatttcaatcgtaaaatttcccattaaagaagtttttttttctaaaaaaaaaaaaaaaaaaaacaaagagaaagagagaaagagagaaaaaaaaaagaagagagaaagaagacagaagaaaaaacaagggagagacagagcacaacggagagagcgagcgacgaggagagacgcaacagagagcaagcagcgagcaggcaggaggacgagaggtagacgcgggacgggagc

SEQ ID NO: 6079 - DNA, 2010 bp, Homo sapiens
  misc_feature (1136)..(1136): n is a, c, g, or t
  misc_feature (1147)..(1148): n is a, c, g, or t
  misc_feature (1152)..(1152): n is a, c, g, or t
  misc_feature (1658)..(1658): n is a, c, g, or t
  misc_feature (1668)..(1668): n is a, c, g, or t
  misc_feature (1768)..(1768): n is a, c, g, or t
  misc_feature (1844)..(1844): n is a, c, g, or t
ctggttgatatgaagattgaatttggtgttgatgtaaccacaaaggaaattgttcttgctgatgttattggcaaataattcctggagcctctggcccacaaggagacgaagcccaccaaaagagcaaccagtcttacggggcctcaaaagaagtaactcctgaagggctccaaatggtaaagaaaaactttgagtgggttgcagagagagtagagttgcttttgaaatcagaaagtcagtgcagggttgtagtgttgatgggctctacttctgatcttggtcactgtgaaaaaaatcaagaaggcctgtggaaattttggcattccatgtgaacttcgagtaacatctgcgcataaaggaccagatgaaactctgaggattaaagctgagtatgaaggggatggcattcctactgtatttgtggcagtggcaggcagaagtaatggtttgggaccagtgatgtctgggaacactgcatatccagttatcagctgtcctcccctcacaccagactggggagttcaggatgtgtggtcttctcttcgactacccagtggtcttggctgttcaaccgtactttctccagaaggatcagctcaatttgctgctcagatatttgggttaagcaaccatttggtatggagcaaactgcgagcaagcattttgaacacatggatttccttgaagcaggctgacaagaaaatcagagaatgtaatttataagaaagaatgccattgaattttttaggggaaaaactacaaatttctaatttagctgaaggaaaatcaagcaagatgaaaaggtaattttaaattagagaacacaaataaaatgtattagtgaataaatgcttctctagatccatattaataaacatgagcatctaacccctcctttcttaggctagacaccaagatatttcagccagcctttatcattcctcttactttatcctttttccttaagtattggtggtcactactattgagtttcttccttaacactgattaaatgatcttaactccctcagctaaaactggcattactgactcccagctatatttctccagacttgcattttttttttttttttttttgagacagggtctcactgtcgccccaggctggagtgcantggcctgatcnncctnccctggctgctttcctcctgggctcccgctgttcccccccccctgccccccgactaagagggtataacaatcttgcagcaccatggcgagcgaattattaatttttgaacaaaacagcctctccctatgtccccccagccctccttttcacacttcccttccacctttaggcgcatttccccacacccccacattgttgacaattccccagtgttcaccacacttgcaactctcaacgcccacctgggatatacgagccgcggccttctcttaacttgcgcccaatctctccaccccccttgagtctgtcgccccatggaggggcgcagctcgtaaccgcgcacgcacttccaatacaaattccctactctcaaacctttcgtattcgtgagaatctatcacccgttacgccacccgctacccctctacatccgagtcacatagcctccatccgtatcaactagtctcgtataccccgcgaccacccttcggactcctcgcccttnacactgcacnacgttctcttactcctatacaccatcccttaccgctcataacatctctccccagtccctactgttattccacctatatagcggtcccccacgtgcctctnatattaaacaacgccatcggaatcccatccccgtgactcccgatgtattccccacccttcgcctacttcccccctnatctattttagcccccccctattaactccactcatccatcctcctgtcttaacacaccccgccccttaacatcccttcctatgtcttgacctgtagggacgccttgacaaccctagtaccttccggtacatcaccacaacaagagcattgctgtaacacccaccca

SEQ ID NO: 6080 - DNA, 5005 bp, Homo sapiens
agagctgcctggaaagctgtatttgctgcacgtggaaatctccgttattttccagcacccaacagtagcgtaatgggagtaacggacttaacctcatttctctttcagagcatttagccttcatatgcccttccctgcatgcttcccccaggccgtcaagacttgagttctgcctcgcttcccggcgcggtcgcagccctcagcccacttaggataatggcgacagctgaggtactgaacattggtaaaaaattatatgagggtaaaacaaaagaagtctacgaatagttagacagtccaggaaaagtcctcctgcagtccaaggaccagattacagcaggaaatgcagctagaaaaaaccacctggaaggaaaagctgcaatctcaaataaaatcaccagttgtatttttcagttattacaggaagcaggtattaaaactgccttcaccagaaaatgtggggagacagctttcattgcaccgcagtgtgaaatgattccaattgaatgggtttgcagaagaatagcaactggttcttttctcaaaagaaatcctggtgtcaaggaaggatataagttttacccacctaaagtggagttgtttttcaaggatgatgccaataatgacccacagtggtctgaggaacagctgattgctgcaaaattttgctttgctggacttcttataggccagactgaagtggatatcatgagtcatgctacacaggctatatttgaaatactggagaaatcctggttgccccagaattgtacactggttgatatgaagattgaatttggtgttgatgtaaccaccaaagaaattgttcttgctgatgtattgacaatgattcctgggagactctggccatcaggagatcgaagccaacagaaagacaaacagtcttatcgggacctcaaagaagtaactcctgaagggctccaaatggtaaagaaaaactttgagtgggttgcagagagagtagagttgcttttgaaatcagaaagtcagtgcagggttgtagtgttgatgggctctacttctgatcttggtcactgtgaaaaaatcaagaaggcctgtggaaattttggcattccatgtgaacttcgagtaacatctgcgcataaaggaccagatgaaactctgaggattaaagctgagtatgaaggggatggcattcctactgtatttgtggcagtggcaggcagaagtaatggtttgggaccagtgatgtctgggaacactgcatatccagttatcagctgtcctcccctcacaccagactggggagttcaggatgtgtggtcttctcttcgactacccagtggtcttggctgttcaaccgtactttctccagaaggatcagctcaatttgctgctcagatatttgggttaagcaaccatttggtatggagcaaactgcgagcaagcattttgaacacatggatttccttgaagcaggctgacaagaaaatcagagaatgtaatttataagaaagaatgccattgaattttttaggggaaaaactacaaatttctaatttagctgaaggaaaatcaagcaagatgaaaaggtaattttaaattagagaacacaaataaaatgtattagtgaataaatgcttctctagatccatattaataaacatgagcatctaacccctcctttcttaggctagacaccaagatatttcagccagcctttatcattcctcttactttatcctttttccttaagtattggtggtcactactattgagtttcttccttaacactgattaaatgatcttaactccctcagctaaaactggcattactgactcccagctatatttctccagacttgcatttttttttttttttttgagacagggtctcactgtcgcccaggctggagtgcagtggcgtgatctcagttcactgctgctttccctcctgggctcaagcagttctcccacctcagcctctcgactaacagggactataatcttgcagcaccatgccgagctaattttattttttgtagagatgagctctcactatgtcacccaggttcgtctcaaactcctgaaccctagtaattctcctatctcagcctcccaaagtgctagggttacagacatgagccactgtgcctgtctagacttgtactttcaactgtccatttctccctgtctgtcccatgggcactcatgaaaaaacagaatgctcccaactttattcatcttccaagcctgtagctcttggtatactcactgttgcaagtcagaagcttgatttcatcattgatgtttttctcacgtttcacatctcactcatcaccaagtcatgttggtgttaatttctgattaacccttgaatttaccgtcttctcatcctctgtacaaaagcctcaagtgagggtcaaattcaacattatcctgatctagacagcccccattctcaatccacccttttccaagttgattgcccaaggacttctaacaataaactctcttttgcaccacagacttctttgaaaatatacatgctgttgaccctctctgtagaaaaccgcacacataaaacttaccaacagatttcattggttcttgggttctcccgaagcctatccatggtttatagattaagaattgatgaggtagctgggcacagtggctcacacctacgatcacagcacttcgggaggctgaagcaagcagatcacttgaggtcaggagtttgagaccagcctggccaacatggtgaaaccctgtctctactaaaaatacaaaaagtagccagccgtgatgacaggcacctgtaatcccagctactcgggaggctgaggcatgagaattgcttgaacccgggaggcggaggttgcagtgagcctggatcatgccactgcactccaacctgggcagcagagcaagactctgtctcaaaaggggaaaaaaaaaattgctgatgtgacccatgaagggaactcattttcctcgtaattttggactgccacacattggtacctttagttctctgaaggcccacgtttttatcattaagacctatttgttagctagtagagctttatgttcgctgtccatgaaaccttctgtaaccacagtgactacaagtagttctttctctattgaattattaggtccagaatagaagatgtcattgtacactttatttccctcacactgtgttatgctctgatgtgctatgcttagctatctgtcagagattagtaaattataaaactcatgtgtactacttaagtttatatcttatgctagtttataagaacaattaaaaggacttagaagattaaaaaaaaaaaaaaaaaactctgaagtcactgactgctatttcagcttgtttacccttacctagcattaagactccatctacttctgtgcagtatatgaaaatttttaaactttcatttagactggtggataggactgaccattacaaattgtcgttatcaattttttttcctttttttttttaagagccaagttctcactgtctcccaggctggagtgcagtggcatgattatggctccctgcagccttgaactcctggactcaagctgcagcctctcgagtagctgggtgcatgtgctaccacacccaattatgaatttcatcattagtttcttagtagagtccacatgtcctcagtagtaagttcatcagtgctaaatatttgaaggtatttctactgttttgtaaaagtaacttaagcctacctggtctgctatcttttgagtatttatactttctacgggcttgtaggtaaacataaaaagagaaaaaatatcccaataatacagtttttaaccttttatgataaagacatgcttagaattgctgttaagctttctgagatttaaccactgaaactaagtaaaagacaaagcacttaggtaaagcttcattcagtatccattcacccaatactggtttgattctagggcctaggaaaataggactgagcaaagcccttgtccagatggaacttatgttttagaggggaaaacaaaccataaaaaggtaaacagtataaaatcaggaaaggataaatgtatatgaagaatcaaaatgaggacggtgatggggataagaggggaaggtttttgaggagagcagagcaatgatgtaaaagcaagacacacagatagggaaatagctttccatactaagggaatgggaaataaagctgagttttgccttgaggacctccaaacatgagaattgctagagctctgtgaacaaggatgagagtggaagacaatataagcaaaggctacatcacttagggcctataggccacactgaagtgtgacaggaaaaactcagtttgagcagaggcttgacatacttaacatatttaaaggttctctggctgttgtgtggacaagaggagaagcagagattagttaagaggctattgtagcccaggtgagggatgatgtatgatcttcaacatgtctaatttttttgtgcctcaatttcatgaaatgaaaatgcgactaataccacctcataaagttgtgagaattacatgagtcaatatatgtaaggcccatcatggcacacaaatgtgttatgtaatatccatttggcagactgaagaacaacagtatgaatggaattcattcaccaatgagaattacctggaattctctgggcatggtaactcatgcctgtaatcccagcactttggggggggcgaggcaggtggatcacctgaaaatcaggaagttcgagaacagccctgaccaacatgggagaaacccaggcccctaataaaaataccaaaactagcccggggcatggcggggcacctttccctggtatcccccgacggactccaggaaggcttgaagccagggaaaaatccgcctttgaaccccggggaaaaaccggaaggtttgttgggtggaagccccaaagggtttgcgcccccctttggtgaacctcccggcccccggggggggaaaaccaaaaagc

SEQ ID NO: 6081 - DNA, 2201 bp, Homo sapiens
gaaaatgatgcaaacatgtagtaacaagttttaaaggtgtgtgattattactgcagttacttactagattcttatcccctgtcctgcaccccctccttttccatcactttattgacccaagggcaagaacatgtagattcccacagaacaccctaatgcagaaacagacactctagcacatgcacaaatactccaacccatcaattcattcccagctccgtctgatttctaaatagtccacactcttgtgaatactttttaaaattcctattattagctttcaacgttctcccctgagcagtccagagaattcccatgtttgagtctgtctcaggctttcagcatcccaaggaaagaagcacctcaccttctagcagagccaaaaccacagactttcttaaccaagggaccccttgggaattcctcctcaccagaaccccaccactccctccgctttgggcgcctggttcagtacagaggtacacagccccatagaacttcagcaacacggtttggagaagataactctgtttgatggactctttagagtcagtcttagaacatccaagtcctttcctctccctgtcaatttccccttttatggcattaaactctcttgaaaaacatagctatgccactcgacagtttctagtcaagaatgagacggaatgtgggagagggatattaaaagccctaatcccctcttctgatgttcgaagaaaggcaagaccagattcttgggagatgcagagattaggggcatctgcgttctatgcagcacagttacccagccctttgatgggctcttcatcgttttgtgactagctcttagaggggaagaaccttgccttagctgctaacagtggttgattcttgaaagcttatgtaatcctagagacatatccaggcatattgggattgccaataaagatgtcacttgtttccacgttggggttctccttattgactcatgagcaccacaatagagtctatacacagacttagtttggggttcttggttgggatttcagcattagaaatagatgcagcactcatggaaaaacatcatgagtgcatctgagccaattttagatgatttcattaattctgcataccttctctttgacccattgatgcaggcccacatctatccagccccaactgtcttatttgcctttaacccattctggaattacccagtatgacttatattatttctatgcacatgagaatccaaggttttagaaacctggcatgcttataactactgctgacagtccctcatagtcagggcttaaagcgccaaaatacacggaaacataagagaaaaagtcccccagtgagaaacctgattgatggaaggggaagaatgtgtggaatatgaatgttaccttccaaaagtgaaggcagagcaaaattaagcatgtttagccctggatttgagccaatccaacataaggaaattttgttttttttaagtagcattgcttttagaacctgtgaattttccttttgcatgaagatgagtgcagtactgtcttcaaaatgattgtagaatttcttggtagctttacaccgaaaaatgcgtgtaactaaataccagacatcttgaccattcagctagaaccctggcagcaacagagctatttaattgtacaaatgtgtgtaaggattatttttagtgtactaataaattaaaaacaaagctaccctgtcctcgttagtcattgctattcaatcattccagtcccaagttatttttgtgccacttggaatatgagtatttctattggtaactacaaactctatcctgtgtttgtaagaggagccgtgtaagatttttttcatttaaagggacaatttacttcattatttatctttcttttgttatagcgttgtaattcttctcagtttttctttgcacatttcaatatgcatggtttaaaaaccattaacttctctaccttttgtacagtaaggtttcattttcacactgtatagtttcattttattgttttgctttgtcagttatatacagtataaagttgctatgcacagagctttttgtaaagacagcttttttgtttactgtttttaatggtcttacttaaagaatatcttgtttgtaaaatgaatatgtctacttcagttttaaactttaaattatcctaacaaaaaaataaaatttttgtactgtaaaa

SEQ ID NO: 6082 - DNA, 1302 bp, Homo sapiens
ataaaggggtggcccgtagaagattccagcaccctcccctaactccaggccagactcctttcagctaaaggggagatctggatggcatctacttcgtatgactattgcagagtgcccatggaagacggggataagcgctgtaagcttctgctggggataggaattctggtgctcctgatcatcgtgattctgggggtgcccttgattatcttcaccatcaaggccaacagcgaggcctgccgggacggccttcgggcagtgatggagtgtcgcaatgtcacccatctcctgcaacaagagctgaccgaggcccagaagggctttcaggatgtggaggcccaggccgccacctgcaaccacactgtgatggccctaatggcttccctggatgcagagaaggcccaaggacaaaagaaagtggaggagcttgagggagagatcactacattaaaccataagcttcaggacgcgtctgcagaggtggagcgactgagaagagaaaaccaggtcttaagcgtgagaatcgcggacaagaagtactaccccagctcccaggactccagctccgctgcggcgccccagctgctgattgtgctgctgggcctcagcgctctgctgcagtgagatcccaggaagctggcacatcttggaaggtccgtcctgctcggcttttcgcttgaacattcccttgatctcatcagttctgagcgggtcatggggcaacacggttagcggggagagcacggggtagccggagaagggcctctggagcaggtctggaggggccatggggcagtcctgggtgtggggacacagtcgggttgacccagggctgtctccctccagagcctccctccggacaatgagtcccccctcttgtctcccaccctgagattgggcatggggtgcggtgtggggggcatgtgctgcctgttgttatgggttttttttgcggggggggttgcttttttctggggtctttgagctccaaaaaataaacacttcctttgagggagagcaaaaaaaaaaaaaaaaaaaaaaaaaaaaaaaaaaaaaaaaaaaaaaaaaaaaaaaaaaaaaaaaaaaaaaaaaaaaaaaaaaaacagagagccacgaaagagcagaggaggcaccagagagacgaaataacaaaaaagagcgagcacaaacagagaggagggagaacacagaagaggatgcgcgagaacccaacacgtggcgcacaaggggcaaacacagaaaaagaaccggcgaaaaacaggatgacagagacaagaacagagggaaaggacgagtataact

SEQ ID NO: 6083 - DNA, 2377 bp, Homo sapiens
  misc_feature (2234)..(2293): n is a, c, g, or t
  misc_feature (2313)..(2313): n is a, c, g, or t
atgccagatgcatcccagtcctcgtaacaaccaaaatgcgtcccttgtacatttctttttctttttttttttgagatggagtcttgctgtcactcaggctggagtgcagtgctgcgatcttggctcactgcaacctccgcctcccgggttcaagtgattctcctgcctcagccttctgagtagctgggactacaggcacgcaccaccacgcctggctaatttttgtattttttttttagtagagacggggtttcaccatgttggtcaggctggtctcgaactcctgacctcgtgatccactcacctcggtctcccaaagtgctaggattacaggcgtgagccaccacccccagcatccctgtacctttctaaatggtggtgagttgaggctgtctgaatcccagcccatccagcccaacatccaagtcagtcctagagaggtggccccccccaaaaaggggagtggaacccagctgtctgccttctgggttggagcttggagataggagagaaggtctgatctgttgactacttttcgccccgacctggtcttcctggggcctgctcgtatgttcccggcagctttctggtaaacttacagtaccgccgtctctaccgaagcatgaactcccagtatctgaagctgcttagctcacaggtgagtggggagagcacagctggatcaccagcagccttaggaccccagagtagcacagcaagctgggggcccttgagacttcctgtcaggacaagggaagctgaaactccgaaaggcgaagcccagggtcctgtgattggtggggtcagaatttgaacctgggtttgtccccacccatgctgtcctgctataggaggcctaggggtctgcatcagccacggagtcttaagggtgagaagagcttcattcatgccaaaaatgggccagcagaggtccagggtgggaggagaccttgcacaaggtgatataggaagcactggcagggccaagttaggactaggttctgtccagcacagtggttaatagcatgggctctggagtcacatggcctgggtgcaagtccctgtactagccacataatcttgggcaaatttcttaaatatgagcctcaggttctccatctgtaaaatggggataataatgatatctaccttcacagataaaacatttagtagaatactggacatgcagtaagtcgttagaaaacatgaaaattccctggttcgtgttatctagcttggccccttgaatttcctgaggggtaggccttgaactagggaagggctggggactgggcttgttccacacccctcatttttaccccatcctgctttagaaataccagatcctattatataatggagatgtagacatggcctgcaatttcatgggggatgagtggtttgtggattccctcaaccagaaggtaaggtagagattcctggccctgggataggggctgctgtggaggattgggagcgggtatgcctgggagtggccagctggctgcctggctctggcccacagagggcaagtgtggaggaattcccagccctaaggtcttgctggtagctgtgagcaaggatgcagctgctgtaggctgatgtctttcctggtggggcagatggaggtgcagcgccggccctggttagtgaagtacggggacagcggggagcagattgccggcttcgtgaaggagttctcccacatcgcctttctcacgatcaagggcgccggccacatggttcccaccgacaagcccctcgctgccttcaccatgttctcccgcttcctgaacaagcagccatactgatgaccacagcaaccagctccacggcctgatgcagcccctcccagcctctcccgctaggagagtcctcttctaagcaaagtgcccctgcaggccgggttctgccgccaggactgcccccttcccagagccctgtacatcccagactgggcccagggtctcccatagacagcctgggggcaagttagcactttattcccgcagcagttcctgaatggggtggcctggccccttctctgcttaaagaatgccctttatgatgcactgattccatcccaggaacccaacagagctcaggacagcccacagggaggtggtggacggactgtaattgatagattgattatggaattaaattgggtacagcttcaaaaaaaaaaaaaaaaaaaaaaaaaaaaaaaaaaaaaaaaaaaaaaaaaaaaaagnnnnnnnnnnnnnnnnnnnnnnnnnnnnnnnnnnnnnnnnnnnnnnnnnnnnnnnnnnnncgtataacgaagaggcccgnaccgacgcctttccacagttggcagcctgatgcgaatggaaattgaagccgtatactttgtaaa

SEQ ID NO: 6084 - DNA, 1839 bp, Homo sapiens
cagacacccagccactctgagcagaactgacagcatgaaggcactcctggccctgccgctgctgctgcttctctccacgcccccgtgtgccccccaggtctccgggatccgaggagatgctctggagaggttttgccttcagcaacccctggactgtgacgacatctatgcccagggctaccagtcagacggcgtgtacctaatcaacccctcgggccccagtgtgcctgtgcccgtcttctgtgacatgaccaccgagggcgggaagtggacggttttccagaagagattcaatggctcagtaagtttcttccgcggctggaatgactacaagctgggcttcggccgtgctgatggagagtactggctggggctgcagaacatgcacctcctgacactgaagcagaagtatgagctgcgagtggacttggaggactttgagaacaacacggcctatgccaagtacgctgacttctccatctccccgaacgcggtcagcgcagaggaggatggctacaccctctttgtggcaggctttgaggatggcggggcaggtgactccctgtcctaccacagtggccagaagttctctaccttcgaccgggaccaggacctctttgtgcagaactgcgcagctctctcctcaggagccttctggttccgcagctgccactttgccaacctcaatggcttctacctaggtggctcccacctctcttatgccaatggcatcaactgggcccagtggaagggcttctactactccctcaaacgcactgagatgaaaatccgccgggcctgaagggctggccccctcaggcacctttcctcccctggacacccatggtctccatgagtgctccctctgctgcccctgatgcatgcttctgctgattcccgagcaccaactccttacaagggggccttgtggctctcagccatgccacatccctgtcacacacccagggcatccattcctaagccagacccggctcccctacacctgaagttacactgccagcagttccccaggcctcttccgagaggcacatggttctagcctggacctggctgggctccatgagaatgagttgcctccaccctgtcccaacagctgacagccaggagccactctcccagctgcaggcctttgtggtccatcttgtcctgcttcctcactgtggacccctgtctgggccaccctagtgtgctaagctgagcagtgcagtgtgaacagggcccatggtgtattctaggccacagcccagcactcctctgggctgctctcaaaccatgtcccatcttcagcatccctcccaccaacttactcccctgtggtgagtaccgtggaaccccagcccacctcactatcatactcagcttcccctgatggcccatcccagcccctgaagctctatgccaagaacacagctaccgcacaccaccctgaaacagccacagccaaggtaggcatgcatatgaggtcttccccataccctctgggtgttgagaggtttagccacatgagggagcagaggacaatctctgcagggctgggagtgggtagggactgaaggtctcaataaaccttcagaacctgaatgaactggcttcatacacacaaacatatttgtttatcccccaaatgtaggcacctggctcctccttgctcccctgctgatggtgtcctaccccgaactccaaaaattacacctggagtcaggtgcagaagggaaccttgtatttcacaggcctcattttgatggcaaaaagacagtgtaataataacataataataataaaaatataatactgaaaaggaaaaaaaaaaaaaaaaaa

SEQ ID NO: 6085 - DNA, 2555 bp, Homo sapiens
  misc_feature (586)..(611): n is a, c, g, or t
  misc_feature (2329)..(2478): n is a, c, g, or t
attcccggcaccacagctacaaggacatgcgccagctcatgaaggtggtgaacgaggagtgccccaccatcacccgcacttacagcctgggcaagagctcacgaggcctcaagatctatgccatggagatctcagacaaccctggggagcatgaactgggtgagggtctgtgggggccagcagctggcctctgctgctgatgtgcagagctcactgcctcccgcctgttccggagcctctctggggattctggcttgtcttacagggccctaggagccccagctgtcccccagaccctcgggggagcccgagttccgctacactgctgggatccatggcaacgaggtgctgggccgagagctgttgctgctgctcatgcagtacctgtgccgagagtaccgcgatgggaacccacgtgtgcgcagcctggtgcaggacacacgcatccacctggtgccctcactgaaccctgatggctacgaggtggcagcgcagatgatttcccggatctcaactctgtgctctggggagctgaggagaggaaatgggtcccctaccgggtccccaacaataacttgcccatccnnnnnnnnnnnnnnnnnnnnnnnnnnccacggtatccacggaggtccgggccatcattgcctggatggagaagaaccccttcgtgctgggatcaaatctgaacggcggcgagcggctagtatcctacccctacgatatggcccgcacgcctacccaggagcagctgctggccgcagccatggcagcagcccggggggaggatgaggacgaggtctccgaggcccaggagactccagaccacgccatcttccggtggcttgccatctccttcgcctccgcacacctcaccttgaccgagccctaccgcggaggctgccaagcccaggactacaccggcggcatgggcatcgtcaacgggtccaagtggaacccccggaccgggactatcaatgacttcagttacctgcataccaactgcctggagctctccttctacctgggctgtgacaagttccctcatgagagtgagctgccccgcgagtgggagaacaacaaggaggcgctgctcaccttcatggagcaggtgcaccgcggcattaagggggtggtgacggacgagcaaggcatccccattgccaacgccaccatctctgtgagtggcattaatcacggcgtgaagacagccagtggtggtgattactggcgaatcttgaacccgggtgagtaccgcgtgacagcccacgcggagggctacaccccgagcgccaagacctgcaatgttgactatgacatcggggccactcagtgcaacttcatcctggctcgctccaactggaagcgcatccgggagatcatggccatgaacgggaaccggcctatcccacacatagacccatcgcgccctatgaccccccaacagcgacgcctgcagcagcgacgcctacaacaccgcctgcggcttcgggcacagatgcggctgcggcgcctcaacgccaccaccaccctaggcccccacactgtgcctcccacgctgccccctgcccctgccaccaccctgagcactaccatagagccctggggcctcataccgccaaccaccgctggctgggaggagtcggagactgagacctacacagaggtggtgacagagtttgggaccgaggtggagcccgagtttgggaccaaggtggagcccgagtttgagacccagttggagcctgagtttgagacccagctggaacccgagtttgaggaagaggaggaggaggagaaagaggaggagatagccactggccaggcattccccttcacaacagtagagacctacacagtgaactttggggacttctgagatcagcgtcctaccaagaccccagcccaactcaagctacagcagcagcacttcccaagcctgctgaccacagtcacatcacccatcagcacatggaaggcccctggtatggacactgaaaggaagggctggtcctgcccctttgagggggtgcaaacatgactgggacctaagagccagaggctgtgtagaggctcctgctccacctgccagtctcgtaagagatggggttgctgcagtgttggagtaggggcagagggagggagccaaggtcactccaataaaacaagctcatggcaaaaaaaaaaaaaaaaaaaaaaaaaaaaaattataagcttcaaaataaacaaaaaaaaaagaaccacaatataaaaaaagcatcaaaaaaaaaaaaaaactcgggggggggcccggtcccaaattcgccctatggggagggcgttaacaattaannnnnnnnnnnnnnnnnnnnnnnnnnnnnnnnnnnnnnnnnnnnnnnnnnnnnnnnnnnnnnnnnnnnnnnnnnnnnnnnnnnnnnnnnnnnnnnnnnnnnnnnnnnnnnnnnnnnnnnnnnnnnnnnnnnnnnnnnnnnnnnnnnnnnnaaattgaagcgtaaatatttggtaaaaacccgctaaaatttgtaaacaactcatttttaaccaaagggccaataggg

SEQ ID NO: 6086 - DNA, 1737 bp, Homo sapiens
  misc_feature (57)..(61): n is a, c, g, or t
tctcggatgtcgcaccggaatcgccagcctcttccccctcgggaggggggtatattnnnnnagaggggggtcgccacggactttcgttgtggtgcccgcgcggggggggtgttcgggggggccttttgttcggttgggcccaaccaaaaggcgtctcgtgaggccggcttttttacttgtggtacgcccacctcaagggggccggctatgggggggtttggggtaccccggggcgcctgtttcaaggttgcccgcggaatttttttgtccctttttcccaaagcactcgttcctttccccaagccccccccagggagaggctggggcccaagttccccaagccctgttcagtgggccctcccctgggtgcccggtccccggaaacccctgcttgggaaaggggaagctgtcggggtgggcttaggactgacccttgtggtgtttttttggggtggtggctggaaacagcccctctcccacgtggcagaggctcagcctggctcccttccctggagcggcagggcgtgacggccacagggtctgcccgctgcacgttctgccaaggtggtggtggcgggcgggtaggggtgtgggggccgtcttcctcctgtctctttcctttcaccctagcctgactggaagcagaaaatgaccaaatcagtattttttttaatgaaatattattgctggaggcgtcccaggcaagcctggctgtagtagcgagtgatctggcggggggcgtctcagcaccctccccagggggtgcatctcagccccctctttccgtccttcccgtccagccccagccctgggcctgggctgccgacacctgggccagagcccctgctgtgattggtgctccctgggcctcccgggtggatgaagccaggcgtcgccccctccgggagccctggggtgagccgccggggcccccctgctgccagcctcccccgtccccaacatgcatctcactctgggtgtcttggtcttttattttttgtaagtgtcatttgtataactctaaacgcccatgatagtagcttcaaactggaaatagcgaaataaaataactcagtctgcaaaaaaaaaaaaaaaaaaaaaaaaaaaaaaaatccggggccttaatgccgggggggggaacaaaggggtcacggaatgggcccggggccataggcggatacaacagaccaagttttctggacacacgggggacaacacacgccggaacaccaaaaacgggagcggaataaagccagaaaacaccaggtcaccggcttaatgagacgcgacaaaaggaagagagaacccagacacaacaagaacaacaagagacaaacaacaacgacacaacaaacacacacagaaaaacaaaacaacacacaacaagacaacaccacaaacacacacaaccaacagacacaatacaccaacacaaccctcaccacacaggacaagagaaaaaaagaacaaggaaagcagcagcacagaggaacccgaggcgacgagaacgacagacagagagaagacaaagcaaaagaagcaggagaagccagacgagaaacagacggacagtaacgagcacgacacggaggagagccagaggagaggagagagcaagcacaaggcagaccaagagaagagagacagaaaaggggacggaagagagcaaaagaacaaaaaggagcggaacggaggtacgaagaaaaaggacaaaaagaagagcaaggacgaaaggcg

SEQ ID NO: 6087 - DNA, 3376 bp, Homo sapiens
ttttttttttttttctttctagatggtttattgatgtcatttcagatcggtataaaggatgtgaagtgaataagaaaataggtacgtttctttttctttttttcccctttctaccgactaggaagagatccagtccaggttttgcctttgactcggcctgtgaatttcggctgtgcaatgtgtagcacgtttctttctcccccctcctttctccttccctctagcggccgagtgactgtctccaggatttctctcttcctatttcaggaggactctcacaggctcccacagcctgtgttaagctgaggtttcccctagatctcgtatatccccaacacatacctccacgcacacacatccccaagaacctcgagctcacaccaacagacacacgcgcgcatacacactcgctctcgcttgtccatctccctcccgggggagccggcgcgcgctcccacctttgccgcacactccggcgagccgagcccgcagcgctccaggattctgcggctcggaactcggattgcagctctgaacccccatggtggttttttaaacacttcttttccttctcttcctcgttttgattgcaccgtttccatctgggggctagaggagcaaggcagcagccttcccagccagcccttgttggcttgccatcgtccatctggcttataaaagtttgctgagcgcagtccagagggctgcgctgctcgtcccctcggctggcagaagggggtgacgctgggcagcggcgaggagcgcgccgctgcctctggcgggctttcggcttgaggggcaaggtgaagagcgcaccggccgtggggtttaccgagctggatttgtatgttgcaccatgccttcttggatcggggctgtgattcttcccctcttggggctgctgctctccctccccgccggggcggatgtgaaggctcggagctgcggagaggtccgccaggcgtacggtgccaagggattcagcctggcggacatcccctaccaggagatcgcaggggaacacttaagaatctgtcctcaggaatatacatgctgcaccacagaaatggaagacaagttaagccaacaaagcaaactcgaatttgaaaaccttgtggaagagacaagccattttgtgcgcaccacttttgtgtccaggcataagaaatttgacgaatttttccgagagctcctggagaatgcagaaaagtcactaaatgatatgtttgtacggacctatggcatgctgtacatgcagaattcagaagtcttccaggacctcttcacagagctgaaaaggtactacactgggggtaatgtgaatctggaggaaatgctcaatgacttttgggctcggctcctggaacggatgtttcagctgataaaccctcagtatcacttcagtgaagactacctggaatgtgtgagcaaatacactgaccagctcaagccatttggagacgtgccccggaaactgaagattcaggttacccgcgccttcattgctgccaggacctttgtccaggggctgactgtgggcagagaagttgcaaaccgagtttccaaggtcagcccaaccccagggtgtatccgtgccctcatgaagatgctgtactgcccatactgtcgggggcttcccactgtgaggccctgcaacaactactgtctcaacgtcatgaagggctgcttggcaaatcaggctgacctcgacacagagtggaatctgtttatagatgcaatgctcttggtggcagagcgactggaggggccattcaacattgagtcggtcatggacccgatagatgtcaagatttctgaagccattatgaacatgcaagaaaacagcatgcaggtgtctgcaaaggtctttcagggatgtggtcagcccaaacctgctccagccctcagatctgcccgctcagctcctgaaaattttaatacacgtttcaggccctacaatcctgaggaaagaccaacaactgctgcaggcacaagcttggaccggctggtcacagacataaaagagaaattgaagctctctaaaaaggtctggtcagcattaccctacactatctgcaaggacgagagcgtgacagcgggcacgtccaacgaggaggaatgctggaacgggcacagcaaagccagatacttgcctgagatcatgaatgatgggctcaccaaccagatcaataatcccgaggtggatgtggacatcactcggcctgacactttcatcagacagcagattatggctctccgtgtgatgaccaacaaactaaaaaacgcctacaatggcaatgatgtcaatttccaggacacaagtgatgaatccagtggctcagggagtggcagtgggtgcatggatgacgtgtgtcccacggagtttgagtttgtcaccacagaggcccccgcagtggatcccgaccggagagaggtggactcttctgcagcccagcgtggccactccctgctctcctggtctctcacctgcattgtcctggcactgcagagactgtgcagataatcttgggtttttggtcagatgaaactgcattttagctatctgaatggccaactcacttcttttcttacactcttggacaatggaccatgccacaaaaacttaccgttttctatgagaagagagcagtaatgcaatctgcctccctttttgttttcccaaagagtaccgggtgccagactgaactgcttcctctttccttcagctatctgtggggaccttgtttattctagagagaattcttactcaaatttttcgtaccaggagattttcttaccttcatttgcttttatgctgcagaagtaaaggaatctcacgttgtgagggtttttttttttctcatttaaaataaaaaaggaagaaagaaaataattttccttgtaaaatcgggccaaaccccaagacagctacattttcaacaaaaaagcaaacagagaaaaataaatgaactttaacactgtaagttcagcattgacagccaacttccagtgtaagctttttggtgacaaatccgggtttaaaaatgcttatggggagaaagcttaaagttggtctaaatgtagtgaaaatgcactgttgtcttggaggtatcatcttgcactctaaccaaacaacaccaaatttactctggagagtactgatactaacattgggaatcccgtcttcacacttgacgaaccaattcactacaactcagtacctctgtcttactctgcccaattccattctacgtcaatggcaccattaatctctattcccttaatgttggccagctgcatcaactggcacagattcccccttatcttcaattctaagagtaacccttaaatcactctaaaagtccattggaaaact

SEQ ID NO: 6088 - DNA, 1190 bp, Homo sapiens
ggagcggtggggtcggcgtgagctggttgagggtgcgggtgttgtcgtgcgggtgctctggtgtggcgcgcggtgcgcgccgggtgtggggtcgtgggggtcggtcgggtgtgtggcggctggggggtgtgtgtcggcgcgctggttgtttgattggccgactgtgtgggtccgttcggtaggagggtgtgggtctgggtggggtgctctctggggggttgttttgtgtcgccgccggtgtttgttgtggtttggtgggttgggtgtgtgtgggttttttttttttttttttttttttttaccatatgcttatgtttattgtacagtcacaagttacatgttgtaaatcaagcagaacactgtaccagttttcactaactcaaatcaagttagcaaattacaaattttagaacagattcattttctgtctcacccaatgtgggtgaccacaaagatatttactttctatgttattaggtagcaaattaatttgatatactacacagcttccaagttaccttaggatatttcaaagtgtttcaaaactggtaaagaataattcatttccagcctgaaatacaatgcagaatggaccatttaggggtaaataacctcacttaatcactctttcctgctaacaaaaataatacaaatatttgtttatattaggcttactaaattaatgacaactttgaaattatctagatttggttacattgttatattgcacttgagaacaatgacaaaaaacatcaaagattcagtacctctcccaagaagttcattatatatcagaaattaaaatgaaatataagcatatattgcatgctgcatatttctatcgttcaaaccagccaaccaacaaactaaaaggaatactctccaaaacactgagtattaagtaatttcatctgccttttttgatcctacaatcatttttcaaattttaggtgtttttctttaaattattcatcaaactactacatatacaagctatccaagaatgcaaacaaggtgacattgagatgggtagtggctgcacataggtattccaagaacgactcattcttctccaccaagcctcatcattacattttgcaacttaggaagatctgccaacttacaaattctgtttgccttacaaaaatcgctgatctattatatacaatacttttatcacacaaatctct

SEQ ID NO: 6089 - DNA, 2769 bp, Homo sapiens
attgtctgggaattgcagccgcggggcgggcggcggcggcggcggcggcggccgggacccagcgggccaggtggggacggcgcggagcgggtgcgggagatgccgtgcgggactggggccacctgagccgcccgcctcgtccccgccttctgtgggaaggatgtgcgcgcggatggccggtcgcacaagagcggcccctcgggggccctacggcccctggctctgcctcctggtggccctcgccctggacgtcgtgagagtggactgtggccaggctcccctggaccctgtctacctgcatgtgacagccgcccgcccagcccagcccacactctggactgccaagctagaccgcttcaagggctccaggcaccacaccaccctcatcacctgccaccgtgctgggctcacagagccagattccagcagtccccttgaactgtctgagttcctatgggtggactttgtggtggagaatagcactggtgggggcgtagcggtcactcgccccgtcacgtggcagctggagtacccaggccaggcccctgaagcagagaaggacaaaatggtgtgggaaatcctggtgtctgagcgggacatcagagcccttatcccactggccaaggctgaggagctggtgaatacagcaccactgactggagtgccccagcatgtccccgtgcgccttgtcactgtggacggcgggggggccttggtggaggtgacagagcatgtcggctgcgagtctgccaacacacaggtcctgcaggtgtctgaggcctgtgatgccgtgttcgtggctggcaaggagagccggggcgcccggggggtgcgagtggacttctggtggcgccggctccgcgcctcgctgcggctgaccgtgtgggccccgctgctaccgctgcgtatcgagctcaccgacaccaccctcgagcaggtccgcggctggagggtacctggccctgctgaagggcctgcggaacccgctgcagaggcgtcagatgaggccgagcggcgcgcccgtggctgccacctgcagtaccagcgggccggtgtgcgcttcctcgcccccttcgcggcccacccgctggacggcggccgccgcctcacgcacctgcttggccccgactggctgctagacgtgtcccacctcgtggcgccacacgcccgcgtgctggactcgcgtgtagcctctctggagggtggccgtgtcgtggtgggccgggagcccggtgtcacctccattgaggtgcgttccccactgtctgactccatcctgggggagcaggcgctggctgtgacggacgacaaggtctcagtgctggagctgagggtgcagccagtgatgggcatctcgctgaccttgagccggggcactgcccaccccggggaggtcacagctacgtgctgggcacagtcagcccttcccgccccaaagcaggaggtggccctctccctatggctgtccttctctgatcacactgtggccccagctgagctctacgaccgccgtgacctgggactgtccgtctcagccgaggagcctggtgccatcctgccagctgaggagcagggtgcccagctcggggtggtggtgagtggggcaggcgccgaggggctgccgctgcatgtggctctgcacccgcccgagccctgccgccggggccgccaccgtgtgcctctggcctctggcaccgcctggctggggctgccccctgcctccactccagcccctgctctcccatccagccctgcttggagcccaccagccacagaagccaccatgggtggtaaacggcaggtggcaggcagtgtcgggggcaacacaggtgtgaggggcaagtttgagcgggcagaggaggaggccaggaaggaggagaccgaagccagggaggaggaggaggaagaggaggaggagatggtccctgcccctcagcatgtcactgagctagagctgggcatgtacgccctgctgggagtcttctgcgtggccatcttcatcttcttggtcaatggtgtggtcttcgtcctgcgctatcagcgcaaagaacctcccgacagtgccactgaccccacctccccccagccccacaactgggtctggctgggcactgaccaggaggaactgagccgccagctggaccggcagtcccctggcccgcccaagggggaggggagctgcccctgtgagagtgggggaggaggggaggcccctaccctggcccctggccctcctgggggcaccaccagctcctcaagcaccctggcccgaaaggaggctggggggcggcggaagcgagtagagtttgtgacatttgtgccagcccctccagcccagtcacctgaggagcctgtaggggcccctgctgtgcagtccatccttgtggcaggcgaggaggacatccgctgggtgtgtgaggacatggggctgaaggaccctgaggagcttcgcaactacatggagaggatccggggcagctcctgaccctccacagccacctggtcagccaccagctggggcaacgagggtggaggtcccactgagcctctcgcctgcccccgccactcgtctggtgcttgttgatccaagtcccctgcctggtcccccacaaggactcccatccaggccccctctgccctgccccttgtcatggaccatggtcgtgaggaagggctcatgccccttatttatgggaaccatctcattctaacagaataaaccgagaaggaaaccagaaaaaaaaaaaaaaaaaaacgagtgctggatcg

SEQ ID NO: 6090 - DNA, 1764 bp, Homo sapiens
caggtgagcggttgctcgtcgtcggggcggccggcagcggcggctccagggcccagcatgcgcgggggaccccgcggccaccatgtatgtgggctatgtgctggacaaggattcgcccgtgtaccccggcccagccaggccagccagcctcggcctgggcccggcaaactacggccccccggccccgcccccggcgcccccgcagtaccccgacttctccagctactctcacgtggagccggcccccgcgcccccgacggcctggggggcgcccttccctgcgcccaaggacgactgggccgccgcctacggcccgggccccgcggcccctgccgccagcccagcttcgctggcattcgggccccctccagactttagcccggtgccggcgccccctgggcccggcccgggcctcctggcgcagcccctcgggggcccgggcacaccgtcctcgcccggagcgcagaggccgacgccctacgagtggatgcggcgcagcgtggcggccggaggcggcggtggcagcggtaagactcggaccaaggacaagtaccgcgtggtctacaccgaccaccaacgcctggagctggagaaggagtttcattacagccgttacatcacaatccggcggaaatcagagctggctgccaatctggggctcactgaacggcaggtgaagatctggttccaaaaccggcgggcaaaggagcgcaaagtgaacaagaagaaacagcagcagcaacagcccccacagccgccgatggcccacgacatcacggccaccccagccgggccatccctggggggcctgtgtcccagcaacaccagcctcctggccacctcctctccaatgcctgtgaaagaggagtttctgccatagccccatgcccagcctgtgcgccgggggacctggggactcgggtgctgggagtgtggctcctgtgggcccaggaggtctggtccgagtctcagccctgaccttctgggacatggtggacagtcacctatccaccctctgcatccccttggcccattgtgtgcagtaagcctgttggataaagaccttccagctcctgtgttctagacctctgggggataagggagtccagggtggatgatctcaatctcccgtgggcatctcaagccccaaatggttgggggaggggcctagacaaggctccaggccccacctcctcctccatacgttcagaggtgcagctggaggcctgtgtggggaccacactgatcctggagaaaagggatggagctgaaaaagatggaatgcttgcagagcatgacctgaggagggaggaacgtggtcaactcacacctgcctcttcctgcagcctcacctctacctgcccccatcataagggcactgagcccttcccaggctggatactaagcacaaagcccatagcactgggctctgatggctgctccactgggttacagaatcacagccctcatgatcattctcagtgagggctctggattgagagggaggccctgggaggagagaagggggcagagtcttccctaccaggtttctacacccccgccaggctgcccatcagggcccagggagcccccagaggactttattcggaccaagcagagctcacagctggacaggtgttgtatatagagtggaatctcttggatgcagcttcaagaataaatttttcttctcttttcaaaaatgtataaaaatcattatacatagcattaaagaaacatttttgagaagtacaaatcaaaaaa

SEQ ID NO: 6091 - DNA, 4850 bp, Homo sapiens
cgccctccgctcgcccggcgcggcaggcgggtgccggcgaccggagagcctggacaggctttccagatggctgcggcggtcggtcggtgaggctttcccggctgtggtttggctgcgggcggcttgggcagcccgcgggcgcctcaggtaggtgcggggcgcgaggggcgccccgcgggcggttgggcgggcgccgcggcctgcgcgagggcgcgcccttccctcccgcctccctccgggaccgaggccgcgggcggggcgggggcgcggagcccggcctttgtgaggcaacatggccgcgggcggtggagagcgcggggtggggacgcctccggggctggggggcgggccccggcccaggcgttgccgactctcgtcgctgtccgcccgggtaaagaggctcctctcccggagggcccgaagcctagcatcgccttcgggcgggtaaggtagaagaagaaaggtgccactccggcatgaagacagactcgcttagtcgccagtcacttaagctgagtgcattgtgatttccaataattgaggcagtggttctaaaagctgtctacattaatgaaaagagcaatgtggccagcttgactaagccgccagcgcacagcgcggcaggacgcgcccgggtctcagcggacttgtgcatgttagctgtgtagatttatgtgagggcttgtaaaactctggtcttgtaaactagtcttaagcgcttttaatatggagacagatgagagcccctctccgctcccgtgtgggcccgcaggagaagcggtgatggagagccgagctcgccccttccaagcgctgccccgtgagcagtctccagcacctcccctgcaaacgtccagtggtgcagaggtaatggacgttggctctggatggtgatggacagtccgaactccctgctgaggaccccttcaacttctacggagcttctcttctctccaaaggatccttctctaagggccgcctcctcatagacccgaactgtagttggccacagcccgcgcaccgcccggcacgcacctgcggtccggaagttctcccctgaccttaagttgcttaaggatgtaaagattagcgtgagctttaccgagagctgcaggagtaaggacaggaaggtgctgtacacaggagcagagcgcgacgtgcgggcggagtgcggtctgctccttagccctgtcagtggggacgtgcatgcttgtccctttggcgggagtgttggtgacggggtaggcatagggggtgagagtgctgataagaaggatgaggagaatgagctggatcaggaaaagagagtggagtatgcagtgctcgatgagttagaagattttactgacaatttggagctagatgaagaaggagcaggcgggttcacggctaaagcaatcgttcagagagacagagtggatgaagaggccttgaatttcccctacgaggatgactttgacaacgatgtggatgctctgctggaagaaggcctttgtgcccccaaaaagaggcgaacagaggaaaaatatggcggagacagcgaccatctgtccgatggagagacaagtgtgcagccgatgatgaccaagattaaaacagtgctcaaaagtcgtggccgcccacctacagagccgctgcccgacgggtggatcatgacattccataactctggagtcccggtgtacctacacagagagtctcgggtggtcacctggtccaggccatacttcttgggaacgggaagcatacggaaatacgaccctcctctgagtagcatcccttgtctgcattataagaaaatgaaggacaacgaggaacgggagcaaagcagtgacctcacccctagtggggatgtgtcccccgtcaagcccctgagccgatctgcagagctggagtttcccctggatgagcctgactctatgggtgctgacccggggcccccggacgagaaagacccactaggggctgaggcagcccctggggccctggggcaggtgaaggccaaagtcgaggtgtgcaaagatgaatccgttgatctcgaggaatttcgaagctacctggagaagcgttttgactttgagcaagttactgtgaaaaaattcaggacttgggctgagcggcggcaattcaatcgggaaatgaagcggaagcaggcggagtccgagaggcccatcttgccagccaatcagaagctcattactttatcagtgcaagatgcacccacaaagaaagagtttgttattaaccccaacgggaaatccgaggtctgcatcctgcacgagtacatgcagcgtgtcctcaaggtccgccctgtctataatttctttgaatgtgagaacccaagtgagccttttggtgcctcggtgaccattgatggtgtgacttacggatctggaactgcaagcagcaaaaaacttgcgaagaataaagctgcccgagctacactggaaatcctcatccctgactttgttaaacagacctctgaagagaagcccaaagacagtgaagaactcgagtattttaaccacatcagcatcgaggactcgcgggtctacgagctgaccagcaaggctgggctgttgtctccatatcagatcctccacgagtgccttaaaagaaaccatgggatgggtgacacgtctatcaagtttgaagtggttcctgggaaaaaccagaagagtgaatacgtcatggcgtgtggcaagcacacagtgcgcgggtggtgtaagaacaagagagttggaaagcagttagcctcacagaagatccttcagctgctgcacccacatgtcaagaactgggggtctttactgcgcatgtatggccgtgagagcagcaagatggtcaagcaggagacatcggacaagagtgtgattgagctgcagcagtatgccaagaagaacaagcccaacctgcacatcctcagcaagctccaagaggagatgaagaggctagctgaggaaagggaggagactcgaaagaagcccaagatgtccattgtggcgtccgcccagcctggcggtgagcccctgtgcaccgtggacgtgtgagggaggtggcacgggccagggcgcgggggccgccagccgcacttctgaggagaccagcagtcatgcatcgtgcaccacagtgtcaggcctccaacccacgctccttccctgtggccaacctgtgggcccggccttagggtggaggctttagtgtacagggacagccatggccacacagcacacatgtggagcagcggctctccctggaaagctccaggcctgaatggatggactcagcgactgcaccagtggcagctggtgactgtggacagtggtggaccctgcttctgtgcacctgctgcaggctctttttatgaaggctttcatgaattttagtatgtaatacgcactgacgacacatgatgcttggatgacagatgagaggggatggctgagtcctgtggctggcccgtgatgccaggtggcccatgtgcccagggcgcctgcagggctgctacagggacctggtcaggaggtgcacatggtgccctgccctcacccaccctctgtgtttccccttctttgaaaaggtagaagagaaaggaatattttaaacctttttggcttaaacagaattttagcatcagaactagctttctgggattggaggcaaaccatcaaggtggtccctctccagtctggacacgatgccagcaaggatgacgtcctgccacctcctggagttaccctggcctcctagggtccctttttctgatgaagtcttaattccctaaaagcgcctctttggacactgaggccctctctgcctttcctggcctccggcaacagttttttacaaagattttttgcagtcgagtccatatgtccacccattgatttttaaagcttttgtgatattttagcattttgaaagactttcacagtgagagtagaaggtagatttggaatcatgcattttagcaagtggacttgttgaaacaggaagcaagggccttcaaggtagcccattcttgatccagagctgttgcctgtgacagcggtttctctggatgtcaaaggcagctgcctggtgcccagcttgcttctcgactggtggcccctatgggtgggtgtgcgatggaaatgtgttcctgccggagtctgaggcaccagggtgtgctcaaaggctggccctggtggtggactggcacctgtgcagagtgccgtgtgcttgtggtgcgccatctgaagcaagagtccagcgttctgccgtgtctgtcccccaccatgccccctacaggcggtactgatggcgcttttttttttttttctgtcaggaaaacaatgttggcctgtgggccgcccacaacatatccttccctcactacctgtgtgaccaaggttggcttctgttgacctttaaaaaagaaaccctcaactcaaattgctataattagacacttgcttctgtcttgcctcctgtctgcagctgtgaatagtcatttgactgtgactgttgcccttagccagccagatgcgcctgtgaaccaaagcttcgtgcacatgtgttcccctaaaggttggggagcctcgctgtgtcttgctgttcccaggcaccaccacagcaggtgctgccatactcttgtggtctctgtgcgccccccccccccccacccgtctgccaagcatgggtatgaatcgtgcacacagccatgcttcaaggccggggcaggggagcctgtgctgatgccatccagggcactgggctgtgcctggaaggcgagccttgattgtctgaacacataaagcaaactgtccagaaaaaaaaaaaaaaaaaaaaaaaaaaaaaaaaaaaaaaaa

SEQ ID NO: 6092 - DNA, 1196 bp, Homo sapiens
  misc_feature (159)..(159): n is a, c, g, or t
  misc_feature (287)..(287): n is a, c, g, or t
gcgtgctgaatatcgcgtccagtggggttatggatataaaagggatagtgcagtacacgtcggggtttgtatgtgactcatggggagggcggtcgatagtattcgtgatgcgagggtgatagacaggcgtattgtgggagtcacgtatgtcatttatanttactggagagcctcggcgcgagtcggggcaagcaggggttggttgcgctggcttttcactggtggtggggacttaagatattgggccgccaggaaatagacacagcgtcgcggcggacgctggatcnaagcgcggggccaggggcatggcaggggtttgtggtagctatctggcgggtgaatcgaggactgtcgggggaaggatggaaggggcgttgggggttacgcggggcgacgaggaacaggggggcggtgctttggcgcgacgggcatcgtggggggccgaacccgaggggagcggcgggaacattgtggggcggggcttggggaggggtgtttgtcggagggggggcatcgcctgacgtgggggcctacatgggggcgggtaggaggggagattataaagcgttttgagcagaaaggattccgccttgttggtctgaaattcatgcaagcttccgaagatcttctcaaggaacactacgttgacctgaaggaccgtccattctttgccgggcctggtgaaatacatgcactcagggccggtagttgccatggtctgggaggggctgaatgtggtgaagacgggccgagtcatgctcggggagaccaaccctgcagactccaagcctgggaccatccgtggagacttctgcatacaagttggcaggaacattatacatggcagtgattctgtggagagtgcagagaaggagatcggcttgtggtttcaccctgaggaactggtagattacacgagctgtgctcagaactggatctatgaatgacaggagggcagaccacattgcttttcacatccatttcccctccttcccatgggcagaggaccaggctgtaggaaatctagttatttacaggaacttcatcataatttggagggaagctcttggagctgtgagttctccctgtacagtgttaccatccccgaccatctgattaaaatgcttcctcccagcataggaaaaaaaaaaaaaaaaaaaaaaaaaaaaaaaaaagggggggttttgggggggggg

SEQ ID NO: 6093 - DNA, 2031 bp, Homo sapiens
cgggaagcgcggcggggcctccagaccggggcgggcttaagggtgacatctgcgctttaaagggtccgggtcagctgactcccgactctgtggagtctagctgccagggtcgcggcagctgcggggagagatgactggggagcgacccagcacggcgctcccggacagacgctgggggccgcggattctgggcttctggggaggctgtagggtttgggtgtttgccgcgatcttcctgctgctgtctctggcagcctcctggtccaaggctgagaacgacttcggtctggtgcagccgctggtgaccatggagcaactgctgtgggtgagcgggagacagatcggctcagtggacaccttccgcatcccgctcatcacagccactccgcggggcactcttctcgcctttgctgaggcgaggaaaatgtcctcatccgatgagggggccaagttcatcgccctgcggaggtccatggaccagggcagcacatggtctcctacagcgttcattgtcaatgatggggatgtccccgatgggctgaaccttggggcagtagtgagcgatgttgagacaggagtagtatttcttttctactccctttgtgctcacaaggccggctgccaggtggcctctaccatgttggtatggagcaaggatgatggtgtttcctggagcacaccccggaatctctccctggatattggcactgaagtgtttgcccctggaccgggctctggtattcagaaacagcgggagccacggaagggccgcctcatcgtgtgtggccatgggacgctggagcgggacggagtcttctgtctcctcagcgatgatcatggtgcctcctggcgctacggaagtggggtcagcggcatcccctacggtcagcccaagcaggaaaatgatttcaatcctgatgaatgccagccctatgagctcccagatggctcagtcgtcatcaatgcccgaaaccagaacaactaccactgccactgccgaattgtcctccgcagctatgatgcctgtgatacactaaggccccgtgatgtgaccttcgaccctgagctcgtggaccctgtggtagctgcaggagctgtagtcaccagctccggcattgtcttcttctccaacccagcacatccagagttccgagtgaacctgaccctgcgatggagcttcagcaatggtacctcatggcggaaagagacagtccagctatggccaggccccagtggctattcatccctggcaaccctggagggcagcatggatggagaggagcaggccccccagctctacgtcctgtatgagaaaggccggaaccactacacagagagcatctccgtggccaaaatcagtgtctatgggacactctgagctgtgccactgccacaggggtattctgccttcaggactctgccttcaggaacacgggtctgtagagggtctgctggagacgcctgaaagacagttccatcttcctttagactccagccttggcaaaatcaccttccctttaccagggaaatcacttcctttaggactgaaagctaggcgtcctctcccacaaaaaagtcctgccctcatctgagaatactgtctttccatatggctaagtgtggccccaccaccctctctgccctcccgggacattgattggtcctgtcttgggcaggtctagtgagctgtagaattgaatcaatgtgaactcagggaactggggaaggctgagcctcctctttggtgttgcggtaagataaccgacagggctggtgaaagtccccagatggcaggatatttggtttcagagtaaggactaggtgcaccaccatgactgactatcaatcaaaatgtttgtaacttaaaatttttaatgaaggataatgaatatttataaaaaaaaaaaaaaaatgtcaatgcaaaaaaaaaaaaaaaaaaaaaagggggggggccgccccaaaaatccccccgcggggggccccccttttgccgcccccccccttttttgtgttcacaggggggcccccttg

SEQ ID NO: 6094 - DNA, 2821 bp, Homo sapiens
caaagggaaacaccggtgtttccctttgtctccccgcggaatggggccggcactgctcagggtcgcgcgccctggacccagctcgctctcggtctcgcgctgtcagcgactgcccggcttcgcgccgcagcgggctgtgcctcagtcagtggcgccgaaggctccgttaagcggcggcggcggttcctgtttccgtttcttcctctccgttcggtcgggagtagcatcctccactcagccacccttcccactcccccatcgtggggcagctgcggctgagggctgtggctttggcagctgcgacggggagcggcggagaccgcctctgctcccgcctggggttgctgcttttgctcagaggacatccatgaccctaatggtctttttgttcaagataaagtgattttttgcctttgttgattaactggacaaattcaggataccagaaggccctattgatcaggggccagctataggaagagtacgcgttttagaagagcagcttgttaaggccaaagaacagattgaaaattacaagaaacagaccagaaatggtctggggaaggatcatgaaatcctgaggaggaggattgaaaatggagctaaagagctctggtttttcctacagagtgaattgaagaaattaaagaacttagaaggaaatgaactccaaagacatgcagatgaatttcttttggatttaggacatcatgaaaggattctgatggcaattactgtctcattagtgaacaataaaagaaaaattgttgtattagcacaacctactactgtgaagaggaaaagaattaccccatacaagtctataatgacggatctatactacctcagtcagacagatggagcaggtgattggcgggaaaaagaggccaaagatctgacagaactggttcagcggagaataacatatcttcagaatcccaaggactgcagcaaagccaaaaagctggtgtgtaatatcaacaaaggctgtggctatggctgtcagctccatcatgtggtctactgcttcatgattgcatatggcacccagcgaacactcatcttggaatctcagaattggcgctatgctactggtggatgggagactgtatttaggcctgtaagtgagacatgcacagacagatctggcatctccactggacactggtcaggtgaagtgaaggacaaaaatgttcaagtggtcgagcttcccattgtagacagtcttcatccccgtcctccatatttacccttggctgtaccagaagacctcgcagatcgacttgtacgagtgcatggtgaccctgcagtgtggtgggtgtctcagtttgtcaaatacttgatccgcccacagccttggctagaaaaagaaatagaagaagccaccaagaagcttggcttcaaacatccagttattggagtccatgtcagacgcacagacaaagtgggaacagaagctgccttccatcccattgaagagtacatggtgcatgttgaagaacattttcagcttcttgcacgcagaatgcaagtggacaaaaaaagagtgtatttggccacagatgacccttctttattaaaggaggcaaaaacaaagtaccccaattatgaatttattagtgataactctatttcctggtcagctggactgcacaatcgatacacagaaaattcacttcgtggagtgatcctggatatacattttctctctcaggcagacttcctagtgtgtactttttcatcccaggtctgtcgagttgcttatgaaattatgcaaacactacatcctgatgcctctgcaaacttccattctttagatgacatctactattttgggggccagaatgcccacaatcaaattgccatttatgctcaccaaccccgaactgcagatgaaattcccatggaacctggagatatcattggtgtggctggaaatcattgggatggctattctaaaggtgtcaacaggaaattgggaaggacgggcctatatccctcctacaaagttcgagagaagatagaaacggtcaagtaccccacatatcctgaggctgagaaataaagctcagatggaagagataaacgaccaaactcagttcgaccaaactcagttcaaaccatttgagccaaactgtagatgaagagggctctgatctaacaaaataaggttatatgagtagatactctcagcaccaagagcagctgggaactgacataggcttcaattggtggaattcctctttaacaagggctgcaatgccctcatacccatgcacagtacaataatgtactcacatataacatgcaaacaggttgttttctactttgcccctttcagtatgtccccataagacaaacactgccatattgtgtaatttaagtgacacagacattttgtgtgagacttaaaacatggtgcctatatctgagagacctgtgtgaactattgagaagatcggaacagctccttactctgaggaagttgattcttatttgatggtggtattgtgaccactgaattcactccagtcaacagattcagaatgagaatggacgtttggtttttttttgtttttgtttttgttttttcctttataaggttgtctgtttttttttttttaaataattgcatcagttcattgacctcatcattaataagtgaagaatacatcagaaaataaaatattcactctccattagaaaattttgtaaaacaatgccatgaacaaattctttagtactcaatgtttctggacattctctttgataacaaaaaataaattttaaaaaggaaaaaaaaaaaaaaaaaaaaaaaaaa

SEQ ID NO: 6095 - DNA, 3056 bp, Homo sapiens
gtcgtcattggatgttgcggctgtcaatcgggggggttacaaaaataagggagtccggcggctcctctatcaggaagattgtgcatgccgtgggtctgacggcttgagtagcgctagggagaatccctgcaggtaatatttgacttttgcttcatattaatctgagtggaaaataaaagggccctcttctcctctcgcttccctgccgggcaggcgccatggcggaagcctcggcgacgggcgcctgcggagaggcgatggcagcggcggaaggctcctcgggcccggcgggcttgactctgggccggagcttctcgaactaccggcccttcgagccccaggcgttgggcctcagcccgagctggcggctgacgggcttctccggcatgaagggctgaggctgcaaggtcccgcaggaggcgctgctcaaactcctggcgggactgacgcggccggacgtgcggcccccgctgggccggggcctggtgggtggccaggaagaggcgtcccaggaagccggcctgccggcaggagcgggccccagccccacctttccagccctgggcatcgggatggactcctgcgtcatccccctgaggcacgggggcctgtcactggtgcagaccacggacttcttttaccccttggtagaagatccctacatgatggggcgcatagcttgtgccaacgtgctgagtgacctctacgccatggggattactgagtgtgacaacatgttgatgttactcagcgtcagccagagtatgagtgaggaggaacgcgaaaaggtaacgccactcatggtcaaaggctttcgggatgcggctgaggaaggagggacggcagtgaccggtgggcaaacggtggtcaacccttggattataatcggtggagttgccactgtagtatgccaaccaaatgagttcataatgccggacagcgccgtcgttggggacgtgctggtgttaaccaaaccgttaggaacccaggttgctgtcaatgcccaccaatggctggataatcctgaaagatggaataaagtaaagatggtggtctccagagaagaggtggagctggcctatcaggaagccatgttcaatatggctaccctcaacagaactgctgcaggtttaatgcacacatttaatgcccatgcggccacagatatcacaggctttggcattctaggacactcccagaaccttgcaaaacaacaaagaaatgaagtgtcctttgttattcataatctgccaataattgccaagatggctgccgtcagcaaggccagtggacggtttgggcttcttcaaggaacctcagctgaaacctctgggggattactgatttgtctgccaagagaacaggcggctcgcttttgttctgaaatcaaatcctccaagtacggagagggtcaccaagcgtggatcgttggcattgtggaaaagggaaaccgaacggcccggatcattgacaagccgcgagttattgaagtcctgcctcgtggggccacagctgctgttcttgctcctgacagttcaaatgcctcctctgagcctagctcgtgagatgaaagaacagaagttgtttggaccttagagccattgtccacaatcacggatggttctcaagagttgattgtaagaaatttccaaagaaggctgcctgcatagtggttccggctgccctttctaggtgattggaatcagcccatctaaagcagtctttatatgcattccgaggccagagtaacattttgaactttggggggatatttgttcatcacttgggtagaagaggagcaaaaatacctctgttttctcttgccaaagtaagatgaagctattccaggttgagggatttttctttgcacggggttgattaatttctgcacagggagtgagattattaaagtaacacacacacaaagtaaattgcaaaatgaaaaaaattagaagcaaatgagttttggaccaatattgttgataaatctaaattgttaagagagatcttataatgcaacatcaaattctttattcaattttactgaagtactggctctttcctgctctggacaagaattgagcaacttgtctgatgactgggaaaggaggacctgcaaccatctgacttggtctctgttaatgacgtctctccctctaaaccccattaaggactgggagaggcagagcaagcctcagagcccaggcctcagtggtcattaagatgttaagtcttttgcggcagattcctggtgatttgatcaataaagagtaatttcttgctaaataaataaaagaaaccttgttgaaaaactaaaaaaaaaaaaaaaaaaaaaaaaagcaaaaaaaaaaaaaaaaaaaaaaaaaaaaaaaaaaaaaaaaaaaaaaaaaaaaaaaaaaaaaccaccaaaaaacacacaaaaaaaaggggggcccgcctaaaaaatcccccggggggcccaaattttcccggaccccatttttttggaaaaaaggggccccaaaagggggccgccatttaaaaccttaggaactgcgcccccctttttaaaaaccccccggaacgtgggaaaaaccgcgtaactttgggaatcttttttggaaaaggaaaccttcctttttggggggggggccaacctattttgggccacaccccccccctcccacaaaatttttaaccgctctctcagggggaaaaaaaaataaaattttttttaaaggggataaaaagggggtgtaaaaaccaaaaccccccataatgtctttgccgcctttaaaaaaaaatttttctttttacttggggattatgtttttctgggaaaaattttttatcccccgcgggccgcgggggggtcttccacagggggggggggggtttttaaaaaatccacaggccccccagagggttttttttgggggcccccccagaacccccaaaagggtggtgtttagagactaaaaatccccccccacacccccctttttgagaaaggtttttttttgtgtttaaaaaaaaaatttccaacaacacttccccgtgtaactcggaaaaataaa

SEQ ID NO: 6096 - DNA, 3236 bp, Homo sapiens
  misc_feature (3126)..(3168): n is a, c, g, or t
ggggttcgccgttactctgcgcacatcgctattgcggttccgaggcagtgggaagagatgcggcccctggacatcgtcgagctggcggaaccggaggaagtggaggtgctggagcccgaggaggatttcgagcagtttctgctcccggtcatcaacgagatgcgcgaggacatcgcgtcgctgacgcgcgagcacgggcgggcgtacctgcggaaccggagcaagctgtgggagatggacaatatgcgcatcgaggcgccatcttcgccgcttcctctcaggggccgccgcctcctgagccgcccagccccggggccgccgcgctgcgccgaccgccaccgccgccgccgccatgaacattttccggctgactggggacctgtcccacctggcggccatcgtcatcctgctgctgaagatctggaagacgcgctcctgcgccggtatttctgggaaaagccagcttctgtttgcactggtcttcacaactcgttacctggatctttttacttcatttatttcattgtataacacatctatgaaggttatctaccttgcctgctcctatgccacagtgtacctgatctacctgaaatttaaggcaacctacgatggaaatcatgataccttccgagtggagtttctggtggtccctgtgggaggcctctcatttttagttaatcacgatttctctcctcttgagatcctctggaccttctccatctacctggagtccgtggctatccttccgcagctgtttatgatcagcaagactggggaggccgagaccatcaccacccactacctgttcttcctgggcctctatcgtgctttgtatcttgtcaactggatctggcgcttctactttgagggcttctttgacctcattgctgtggtggccggcgtagtccagaccatcctatactgtgacttcttctacttgtacattacaaaagtactcaagggaaagaagctcagtttgccagcataagtgccaaagaccatcaccagcatctgtccttcagggtgctcggacagaattcttaccacagcaaaggcataagatgcttgatacggaaaatcagaaacttaactcttttgttgcagatagtcatcagtggctctgtaaaaacgcagaggaaaagagccagaaggtttctgtttaatgcatcttgccttatctttttttattactgtgtacaaagatttttttacacaaagaaacttaatgctgtattaataaattcagtgtgtagcttcaattgggatagttccaaaagtgaagattttgtgaggaataagtgcaaattttttttttattttaaaaaattctttgaaactcttaagtctttgaaaaaaaaatgaaatgtgtactccttgacagttgatagattatatattcttccatccctcaaacttgcattccactatatttattttttggcaaaagatgagctgtatttgtttgaaatctgagacactatgttcaattggatgtatctgttcaaatttattcccacgtgacgtggaagtccttcgttggatgtcacaacactacatttaaggttggtaaggatgacttggaggtccatggttttcattaccaacattttaagattctgaatgtcgatggagtctcactgaagagtcaccaaaggtgcctgccctcctcccctgctgggaagtgtcagttggagactgtcccaagggtgctgaagaatccagtggcaggggttctggctgctttccatctgagtgtgggatgggaggggtgttcatgatcatttggatatagcaatctactctgagaaatggaacacaaggagttacctatcactttcacttataattccaaaagatgactacaaccatgtccatgctcagattcaaacagttttccatatcacttttgggtggtaagatgatttttacagttttttttttaattggcagcaccactaaccattccttacattcttttttgtatgtgtggttttctttttatttaacccgcagccgacatcgtagtttcttgttttgttttggttttacagagctgttgcatgacttatgttaccatcctaaaaaacactatattaaacatggaataaattgtctttttatgaattaggctttttgaacatcctgtgttgggatttttttgtttttcaattggcaacaaaagctctgtagggctgcagacatttaaagttcacataatcatctgtaagacattatgtattttgtggaaatactagaatttttttcctgattttgccattatatggatttgctattttttgattaatgcaaaagtatatgactttgttttttatgtgatacaccataaatattaaagtgttgaatactaacagtgctgactacaagaaggatgtagtattttggctttctgcattacaacgtcttctggaggaagggagcaggatgggtttcatttgtatctagtgtgtgtcttaacatctttctaaatcggcagtgtaactgcatagtttaacttcctgtctgtctccctcattttactcttccctccttgtcttatgttttggcttttgtgtatcagagcatctttctttgcagcatcctagtcttgcttcagtttctgtggtctcttttcatcctgcttgaagattcggagtgtggaaggaggctaggaagtctggtgcagtaggtgagcagacctcttgctgcccagcccagggtgggtggggcgcacacctgtctttgtgcatgcaaatctgatacacctggcgcatcctctggagagcacaacgcatggaaaggtctggaagctctgtgtagccattccttctgcagtcatcctacccaagtaaaagtaaccttggctatgttaccaccgttttggtcacccaggaggacatcttagcaagggtgcctgcgagggagtgtgggactgggcctcatcctcgccggcgttggaaaccaaggccttgtatgccacgccttatgaagcactgtttcacagttactttcacttcccgaataaaggttaccaggtaattaataattttaaaaaaaaaaaaaaaaaaaagatgttgtgccatagtggggccgattgacagtgtctgcacggcggcagtttgtagnnnnnnnnnnnnnnnnnnnnnnnnnnnnnnnnnnnnnnnnnnntagcgaaaggcccggaccgtcgcccttccaacagtgcgaacctgaatggcgattggaaactggaagcc

SEQ ID NO: 6097 - DNA, 1743 bp, Homo sapiens
ccgtgtttttgtttgtggttttgttggtttgcagaagaagaaggagagagcgagaaagacgtaaagggacaaatattgttgctatgcttcgtgaggtcctctttttgtgtcctctattgttttttgtcgggtcatgatttatgctactattttgtggtgtggtcatttcatggggtttcaatatgtcctccttagctttcgggccgctcaaagtcgtcactctggtatcccagattgccaacatcctgaaataccacattggtgatgaaatcctggtaccgagtcatcggggccctgtttcgctaattctttcacaggtaacaagctgaattcagcttaaaaacaatgtggtgagtgtcaacaaggagcctgttgccgagcctgacatcatggccacaaatggcgtggtccatgtcatcaccaatgttctgcagcctccagccaacagacctcaggaaagaggggatgaacttgcagactctgcgcttgagatcttcaaacaagcatcagcgttttccagggcttcccagaggtctgtgcgactagcccctgtctatcaaaagttattagagaggatgaagcattagcttgaagcactacaggaggaatgcaccacggcagctctccgccaatttctctcagatttccacagagactgtttgaatgttttcaaaaccaagtatcacactttaatgtacatgggccgcaccataatgagatgtgagccttgtgcatgtgggggaggagggagagagatgtactttttaaatcatgttccccctaaacatggctgttaacccactgcatgcagaaacttggatgtcactgcctgacattcacttccagagaggacctatcccaaatgtggaattgactgcctatgccaagtccctggaaaaggagcttcagtattgtggggctcataaaacatgaatcaagcaatccagcctcatgggaagtcctggcacagtttttgtaaagcccttgcacagctggagaaatggcatcattataagctatgagttgaaatgttctgtcaaatgtgtctcacatctacacgtggcttggaggcttttatggggccctgtccaggtagaaaagaaatggtatgtagagcttagatttccctattgtgacagagccatggtgtgtttgtaataataaaaccaaagaaacataaaaaaaaaaaaaaaaaaaaaaaaaaaaaaaaaaaaaaaaaaaaaaaaaaaagggggcggcgcgcgcgcgacaaaaaaagatatccccccggagggggcgcacacgaaatatagccgcgcggaccccaggttcttctgttgagcacaaggggggggcccaataatagggaggcggcgaactaattataacgcacgagacgcgaggcgggcggcggggtataaacaaccgcgggcgcgcgaggcggcgggggaacacacgcgtgccgctcaccggaagagaacactcgtggggaaaaaagagacacccctataacccgggcgggggggagcgcaacacaaactgcgggggcacaactcctccccatgcacgaggagatatttaaagacgctccccggaggggagcaaaatctattcacaaacttttcccaacacgggctaacaacacgggtggcgtcccacaccagcagcagcgacctaatggcgtggtgcgagtgctcagcaaaacatttttggcgcgccaaccgggagacatgttgatttcgggcaacaattttttcgcgcggg

SEQ ID NO: 6098 - DNA, 1688 bp, Homo sapiens
  misc_feature (1565)..(1565): n is a, c, g, or t
  misc_feature (1570)..(1570): n is a, c, g, or t
  misc_feature (1580)..(1580): n is a, c, g, or t
  misc_feature (1585)..(1677): n is a, c, g, or t
agggcgcagcctgagagggggtgagctgacactgtcccagctgccacctagactcggagctccatccaaagctccaggctgccacctagactcggagctccatccaaacctccagcgaaggtagtaaaggccatggccatgcagaaaatctttgcccgggaaatcttggactccaggggcaaccccacggtggaggtggacctgcacacggccaagggccgattccgagcagctgtgcccagtggggcttccacgggtatctatgaggctctggaactaagagacggagacaaaggccgctacctggggaaaggagtcctgaaggctgtggagaacatcaacaatactctgggccctgctctgctgcaaaagaaactaagcgttgcggatcaagaaaaagttgacaaatttatgattgagctagatgggaccgagaataagtccaagtttggggccaatgccatcctgggcgtgtccttggccgtgtgtaaggcgggagcagctgagaagggggtccccctgtaccgccacatcgcagatctcgctgggaaccctgacctcatactcccagtgccagccttcaatgtgatcaacgggggctcccatgctggaaacaagctggccatgcaggagttcatgattctgcctgtgggagccagctccttcaaggaagccatgcgcattggcgccgaggtctaccaccacctcaagggggtcatcaaggccaagtatgggaaggatgccaccaatgtgggtgatgaaggtggcttcgcacccaacatcctggagaacaatgaggccctggagctgctgaagacggccatccaggcggctggttacccagacaaggtggtgatcggcatggatgtggcagcatctgagttctatcgcaatgggaagtacgatcttgacttcaagtcgcctgatgatcccgcacggcacatcactggggagaagctcggagagctgtataagagctttatcaagaactatcctgtggtctccatcgaagacccctttgaccaggatgactgggccacttggacctccttcctctcgggggtgaacatccagattgtgggggatgacttgacagtcaccaaccccaagaggattgcccaggccgttgagaagaaggcctgcaactgtctgctgctgaaggtcaaccagatcggctcggtgaccgaatcgatccaggcgtgcaaactggctcagtctaatggctggggggtgatggtgagccaccgctctggggagactgaggacacattcattgctgaccttgtggtggggctctgcacaggacagatcaagactggcgccccctgccgctcggagcgtctggccaaatacaaccaactcatgaggatcgaggaggctcttggggacaaggcaatctttgctggacgcaagttccgtaacccgaaggccaagtgagaagctggaggctccaggactccactggacagacccaggtcttccagacctgcttcctgaaataaacactggtgccaaccaaaaaaaaaaaaaaaaaaaaaaaaaaaaaaaaaaaaaaattatgagtnttaantctatggaanatggnnnnnnnnnnnnnnnnnnnnnnnnnnnnnnnnnnnnnnnnnnnnnnnnnnnnnnnnnnnnnnnnnnnnnnnnnnnnnnnnnnnnnnnnnnnnntgggcatatgt

SEQ ID NO: 6099 - DNA, 1225 bp, Homo sapiens
cagctgtccttcgggccacccagcttgagtttcatcaggggccgaaagggcattgagtggtcactgactaatgttactgagggtcaccttggtcctgaagggggtgcccacctgtcaccctggcctgagcccagtcgcagtgaggccagctgggtcacgtcagggctttgggggcaggaagggaggactgagacctccactctgtggcctggaaatagcctgcctcctccagctccagccttctcacctgtggaatgggttggtttcctcagcagcaagctgtcctgtgagccgccagcatggatgacatctacaaggctgcggtagagcagctgacagaagagcagaaaaatgagttcaaggcagccttcgacatcttcgtgctgggcgctgaggatggctgcatcagccaccaaggagctgggcaaggtgatgaggatgctgggccagaaccccacccctgaggagctgcaggagatgatcgatgaggtggacgaggacggcagcggcacggtggactttgatgagttcctggtcatgatggttcggtgcatgaaggacgacagcaaagggaaatctgaggaggagctgtctgacctcttccgcatgtttgacaaaaatgctgatggctacatcgacctggatgagctgaagataatgctgcaggctacaggcgagaccatcacggaggacgacatcgaggagctcatgaaggacggagacaagaacaacgacggccgcatcgactatgatgagttcctggagttcatgaagggtgtggagtagatgctgaccttcacccagagctgcctatgcccagcctccaactccagctgagtcctggggttggggagggggtcggggtcccaggacctgagcctggccatgtcctcaaccccaaatcccccgactccctccccagatctgtcctgggggatgcaaataaagcctgctctcccaaaaaaaaaaaaaaaaaaaaaaaaaaaaaaaaaaaaaaaaaaaaaaaaaaaaaaaaaaaaaaaaaaaaaaaaaaaaaaaaaaaaaaaaaaaagaagagaacgacaagataaaaacaaggagcagaaaagagaagcgagcaggacaaagcacgggaaggaggaagagaagaaagaggagaaggacacaaaagagagaaaagacgagacaagagggaagagaacagacaaaggacagaacaaaaagagaaagaaagaaagcgccccca

SEQ ID NO: 6100 - DNA, 2248 bp, Homo sapiens
  misc_feature (1286)..(1303): n is a, c, g, or t
agcggacagctgggacgtgggccgcggccgggcgggcgcagtcgggagccggccgtggtggctccgtgcgtccgagcgtccgtccgcgccgtcggccatggccaagcgctccaggggccccgggcgccgctgcctgttggcgctcgtgctgttctgcgcctgggggacgctggccgtggtggcccagaagccgggcgcagggtgtccgagccgctgcctgtgcttccgcaccaccgtgcgctgcatgcatctgctgctggaggccgtgcccgccgtggcgccgcagacctccatcctaaattgccgcagctaccccagccttcagcagccaccaccctgatccgtcagcagccagcaacataaaagcaaggttctctaccagccaaaagaagaaaactctctgaaggctcagagatcttcgctttaacagaatcagagagatccaacctggggcattcaggcggctgaggaacttgaacacattgcttctcaataataatcagatcaagaggatacctagtggagcatttgaagacttggaaaatttaaaatatctatacctgcactttaatcagatagaaactttggacccagattcgttccagcatctcccgaagctcgagaggctatttttgcataacaaccggattacacatttagttccagggacatttaatcacttggaatctatgaagagattgcgactggactcaaacacacttcactgcgactgtgaaatcctgtggttggcggatttgctgaaaacctacgcggagtcggggaacgcgcaggcagcggccatctgtgaatatcccagacgcatccagggacgctcagtggcaaccatcaccccggaagagctgaactgtgaaaggccccggatcacctccgagccccaggacgcagatgtgacctcggggaacaccgtgtacttcacctgcagagccgaaggcaaccccaagcctgagatcatctggctgcgaaacaataatgagctgagcatgaagacagattcccgcctaaacttgctggacgatgggaccctgatgatccagaacacacaggagacagaccagggtatctaccagtgcatggcaaagaacgtggccggagaggtgaagacgcaagaggtgaccctcaggtacttcgggtctccagctcgacccacttttgtaatccagccacagaatacagaggtgctggttggggagagcgtcacgctggagtgcagcgccacaggccaccccccgccgcggatctcctggacgagaggtgaccgcacaccnnnnnnnnnnnnnnnnnnggtgaacatcacgccttctggcgggctttacatacagaacgtcgtacagggggacagcggagagtatgcgtgctctgcgaccaacaacattgacagcgtccatgccaccgctttcatcatcgtccaggctcttcctcagttcactgtgacgcctcaggacagagtcgttattgagacccagacccttccagcacgggccggccaagttgctgcggcggaggcagcatttcagctgtgaggaaggtcattggattcatgtgttttatctgtaaaaatggttgtcttaacttcttaacctcatattggtaagtgattgataaaaattggttggtgtttcatgacatgtggacttcttttgaaatagcaagtcaaatgtagtgaccaaattgtggaagagatttctgtcaaataggaaatgtgtaagttcgtctaaaagctgatggttatgtaagttgctcaggcactcagatgacagcagattctgggttctgggagtgttctgtgcctcttacatgccctggaggcctcatggtctcagtgctgaggcggcacacctgtagcacacctgcgtaatgtgcggtctgggccagtcacaaggaattgtgttgtctaagccaaagggggaagctgactgtgatttaccaaaaaaaattctgtaattcaaaccaaaatgtctgcggaatcaccagtttgatactctctgtaatcagaacagtgggcagtgcctgggtgaacgtgtctagcagccactgtgcgggatcgctgtaacaggagtggaatgtacatatttatttacttttctaactgctccaacagccaaatgccttttttatgaccattgtattcagttcattaccaaagaaatgtttgcactttgtaatgatgcctttcagttcaaataaatgggtcacattttcaaatggaaaaaaaaaaaaaaaaaaaaaa

SEQ ID NO: 6101 - DNA, 2941 bp, Homo sapiens
gactgcagagccggggctgggctaggcgcgcgcttggagagcattgcgcgcggctgggcccgcggccggcggctcctcctcccactctgctcctcctcttttttctcctcctccgcctcctcctccgcctcctcctcctcctcttcctcctcctcttcaattctcccggtggctcgactcggctcgcaggcttcggagaaacccctactccagtcgccgactcagcgcccaagagggtcgccttgggctgggggcgcaccccagggaggggaggggtccaggcagctgggccgccgcggacacctagcggcttcagggtgaaccccgaccgcagccgtcgccgcctcgggcagagtttgcgcccttgctttgcgccccgggcgctgaagccgggcgggcgatgcccgcggcgtgaaagcgcccgcggcgggcgccgacctctgtcctagtctcctgctccccccgccccgcttgtcccgtgcccttgtgaccctggctttggcgccgtcgcccaggcgccccgcaatgtagctgcccctgcgcctcggcgggaggcgtcctgccccgcgagcgcccggggcccggagcccggcctgggggctcagccgagctcgggcggggccggggccgcggtggcgatgcaccgggcccgttagcgccaggagcgccaggcagctgaggcggggggcaagccctccctcggaggagccgcgcccccggccccgccggtcccgccgcgatgctgttccacagtctgtcgggccccgaggtgcacggggtcatcgacgagatggaccgcagggccaagagcgaggctcccgccatcagctccgccatcgaccgcggcgacaccgagacgaccatgccgtccatcagcagtgaccgcgccgcgctgtgcgccggctgcgggggcaagatctcggaccgctactacctgctggcggtggacaagcagtggcacatgcgctgcctcaagtgctgcgagtgcaagctcaacctggagtcggagctcacctgtttcagcaaggacggtagcatctactgcaaggaagactactacaggcgcttctctgtgcagcgctgcgcccgctgccacctgggcatctcggcctcggagatggtgatgcgcgctcgggacttggtttatcacctcaactgcttcacgtgcaccacgtgtaacaagatgctgaccacgggcgaccacttcggcatgaaggacagcctggtctactgccgcttgcacttcgaggcgctgctgcagggcgagtaccccgcacacttcaaccatgccgacgtggcagcggcggccgctgcagccgcggcggccaagagcgcggggctgggcgcagcaggggccaaccctctgggtcttccctactacaatggcgtgggcactgtgcagaaggggcggccgaggaaacgtaagagcccgggccccggtgcggatctggcggcctacaacgctgcgctaagctgcaacgaaaacgacgcagagcacctggaccgtgaccagccataccccagcagccagaagaccaagcgcatgcgcacgtccttcaagcaccaccagcttcggaccatgaagtcttactttgccattaaccacaaccccgacgccaaggacttgaagcagctcgcgcaaaagacgggcctcaccaagcgggtcctccaggtctggttccagaacgcccgagccaagttcaggcgcaacctcttacggcaggaaaacacgggcgtggacaagtcgacagacgcggcgctgcagacagggacgccatcgggcccggcctcggagctctccaacgcctcgctcagcccctccagcacgcccaccaccctgacagacttgactagccccaccctgccaactgtgacgtccgtcttaacttctgtgcctggcaacctggagggccatgagcctcacagcccctcacaaacgactcttaccaaccttttctaatgactcgcaacccctcaccccacaatttctttaaaaaagaaattatctttagttgaattccaagtgtattttaaaatagaggctttgagcaactaactaaccacattttaggatctcgcctggaaacagaggtaaaaaaaagaagtgtgcgcccggctaatgcagcggtgtggaccgaggaacaacttggaagatctacctgcaacacaacatttgtgtcactgtacagttttgtggactgagcgaggaaaaacaacaaataatttaagttggctagagcttctgtattttcaaagactgccacgtgccttaggaatactgttttatctccatactttggatgacttgttcatttttctctccctctttttctctgtatatttatgaccagagcaaaaatgtaaaaaacaaaaaaaaacaacaaaaaaagtttgttactttgaatagtcctaaaaagaaaaaaagaaaaaaaaaaagggaaaattcaaaccccctccaagggtcgcttggtggttttagaatttcaagggggaagtcggtccgaattttcagaattggtaaaatctaaccagtaataaaaccacttatggaaactaaaaaaaaaaaaaaaaaaaaaaaaaaaaaaaaaaacaaaaaaaaaaaaaaaaacaaaaaaaaaatcatttaaaaaaaaaaaaacaaaaaaaataaaactacgacacaactaaaataaaacaaacatataaacgaacaggaagaaaaaatagaaaagaagagcaaagaacaacaaaaagaagagtataaagagaaacaaaataattgaaacaaaaaagaagagcgagaataaacaacaaggagaaaaaccactgagatgaagaagaagacaacacaatatggagagaagcacacagagagaacaaccataaaaaaacaaaagcgcaaaaataaaatttatgtattgcgacaaacacgaactggggagaaaaaagaaggtgaataagc

SEQ ID NO: 6102 - DNA, 2569 bp, Homo sapiens
  misc_feature (1930)..(1953): n is a, c, g, or t
ataaagaatttactaacagtttatcttatttatacccatacatctgctactttgggaggccctttacatagaaaacagcattctttttgccaaatatgaccaaattacttttatttataatttttgatttatatttcagctagatctaaaaagcatctgaaggaatttacaatgaaagatacctatgcaataacatttaggataatctttgacattttggaaaaataagaattgaggaaaaaaagtgtatctttcaagtagatgcaaagcattataatgactgacacttgtatctaactccagtcttacagataactaaggcaaaaagctaaataaacaatatgtaacctctaacatttggtaaaaggaagtatactggtctgttagcagagacaaactttttttagaattgaagtctgaaacaaacaaaagcaattcaatgtcaatagacattaagcaacataatagacaaacatctcctaagggaacatttgttacagctgctccttccctgaactgtgctttggaagataagctctgtcctgagtccaaaccaagcccttccaagagagaacaaaggtcagagatgttgaagattccagcaaatttctcctcttatttctaccaagcctttgtgaacattgctcttcattttggcctgtacttctccctcagggacgtagaacaatggaatgtcagtcagtctctgtagttaaaactttttctttaaaattcaattaaggtacttctccctcagggacgtagaacaatggaatgtcagtcagtctctgtagttaaaactttttctttaaaattcaattaagttacaccagaatttacaggcaagattttttttttcattgctcccataagcaaatttgttttaaaataattgtaaatgaggtatatacttagttcttggttaaaaaatatattgctttgttaagtattaaagattatttgtaagtcattgtattaataatactaataaaatttatcaagcctttatagcaagggtcagtgaattaccactgcctgtgggccaaatctagctcactatctgtttttgtaaataaaattttataatagtacacagccacactcattcatttattttctgtggttgctttcaagctacaattgtagagttgggtagtcgcaacagaatctctgtggcccacaaggctaaaatatttacattctcacccattacagaaaaagtttgataattcctgctttataatatgtaaggcattgtcccattttgcataacttgccttatttcatcattatcactacccatttagtagctatggttgttatcttacttctacagtggaagagattgaaaagcatttgtcaggttaatgctaaatcagtgcggaaatatagctccactaggaaaatattattaaatttatatccctaaaatttttagaaatctctcaaaatctttccaaatgttctggtatctttgaaaaatgtaaatagtttatttatagagaaccctacctctgaggttgactcaaaggttaaagaaggctcatcagtctatccttctgcctccatatatcctgaacatcaaactatcccaggaaaaccatctagagtagtttgtttcaaaatattagccacagaccacctacatcacaataactcagggagcttatagaagtgaagattcctgaatataaacatagtaataattcaacctactgaatggaaatctctgctgaaatccacagttttcataagctccccagatgattcctgtgtacattaaatctagaaaccattagtttgagatctctcaaaaataaaaataaaaattgctttcagagagtagcccatgaaatttcccattcttcaaggacaaattccttctgttcagccttggtcctccaactgcagtttacaatttttgttcttnnnnnnnnnnnnnnnnnnnnnnnnatcaccttcaatagtttcaatatgtcccccaaagttatgtgtttgaaacttgcaatagtattgggagatggggcctaatgaggtgattaggtgaagtctctgccctcatgaaaagattaatcccattatctcaggagtgtgttggttataaaagcaagtttggctccctcttttcctcacacactctttttcccttctgccttcacctttgccgtgggtggacacagcaagaaggccctcatcagatgctggccccttggtcttgaatttcctagcctctacaactaagccaaataaatttctgtttattataaataacaaaaaaaaacacaaagcaaacgacaacaacaccaaacagaagaaacaacaacaagccagagaagatacacaaataaaaaaaaggggggggggcccactaaagaataaccccgcggggggagccaacttagtgccgaccaccacctcttttttgagaaaaagagggggccccaaaatagggcgcttatattaaaacagggagggccggccgttaaaacagcgggctagcggaacaccgctcccgggcatcttgggaagaaagcccatccgggggcgcatcatgggacaccccccccag

SEQ ID NO: 6103 - DNA, 833 bp, Homo sapiens
tcagatatggagtcaaattggagcgatgtgacatcggtcagcgccaactactcccagccacgaccccgagtaaaatgtttatcggtggactgagctggcagacctcaccagatagccttagagactattttagcaaatttggagaaattagagaatgtatggtcatgagagatcccactacgaaacgctccagaggcttcggtttcgtcacgttcgcagacccagcaagtgtagataaagtattaggtcagccccaccatgagttagattccaagacgattgaccccaaagttgcatttcctcgtcgagcgcaacccaaggtgttctagctgagcgtttaagagcatggactctggaaccagactttgaatccttgctctgccactgcagctgtgtgaccttgagcaagctatctaaatattctgtgcctttgttttgtcatctgtacaatggagatgatgatggtatcaccttcatggggttgtcataaggattatgggacttaacataataaagtgtttagaatggtgtctgcaaaataaaaaaaaaaaaaggggaagaaaaaaaagaaaattttaaaaaaaaaagtcaagccgcacacaacgctcgtggtcgggccgacgcgagcaccccaggagaaaggtctccacaaccaacgtcggggcggggggcggccccgagtgtgatcaccaaccgtgccacagcggctccagagaaaacacgcgcggcgacaaaggggggggctccccacaaaaacccgcggcgaacccgcgtggtgcaaccaccgcagagtgcgggcgcaggcatccagagggccaggacggatataccag

SEQ ID NO: 6104 - DNA, 1909 bp, Homo sapiens
  misc_feature (1591)..(1624): n is a, c, g, or t
  misc_feature (1626)..(1636): n is a, c, g, or t
  misc_feature (1638)..(1638): n is a, c, g, or t
  misc_feature (1640)..(1652): n is a, c, g, or t
  misc_feature (1654)..(1659): n is a, c, g, or t
  misc_feature (1661)..(1669): n is a, c, g, or t
  misc_feature (1671)..(1671): n is a, c, g, or t
  misc_feature (1674)..(1674): n is a, c, g, or t
  misc_feature (1680)..(1681): n is a, c, g, or t
  misc_feature (1690)..(1690): n is a, c, g, or t
  misc_feature (1694)..(1694): n is a, c, g, or t
  misc_feature (1696)..(1697): n is a, c, g, or t
  misc_feature (1706)..(1706): n is a, c, g, or t
  misc_feature (1740)..(1741): n is a, c, g, or t
  misc_feature (1769)..(1771): n is a, c, g, or t
  misc_feature (1773)..(1774): n is a, c, g, or t
  misc_feature (1782)..(1782): n is a, c, g, or t
  misc_feature (1785)..(1785): n is a, c, g, or t
  misc_feature (1803)..(1804): n is a, c, g, or t
  misc_feature (1818)..(1820): n is a, c, g, or t
  misc_feature (1882)..(1882): n is a, c, g, or t
  misc_feature (1888)..(1888): n is a, c, g, or t
  misc_feature (1891)..(1891): n is a, c, g, or t
gggcggaggagatagatagcacgcttgcgcggctgtcatagggctgcttggttggtcagtggggagtcggcgcctgcgtactaagacccgtggcacgagggcggcggcggcggtagaggcggcggcggcggcggcagcgggctcggaggcagcggttgggctcgcggcgagcggacggggtcgagtcagtgcgttcgcgcgagttggaatcgaagcctcttaaaatggcagatgacttggacttcgagacaggagatgcaggggcctcagccaccttcccaatgcagtgctcagcattacgtaagaatggctttgtggtgctcaaaggccggccatgtaagatcgtcgagatgtctacttcgaagactggcaagcacggccacgccaaggtccatctggttggtattgacatctttactgggaagaaatatgaagatatctgcccgtcaactcataatatggatgtccccaacatcaaaaggaatgacttccagctgattggcatccaggatgggtacctatcactgctccaggacagcggggaggtacgagaggaccttcgtctccctgagggagaccttggcaaggagattgagcagaagtacgactgtggagaagagatcctgatcacggtgctgtctgccatgacagaggaggcagctgttgcaatcaaggccatggcaaaataactggctcccagggtggcggtggtggcagcagtgatcctctgaacctgcagaggccccctccccgagcctggcctggctctggcccggtcctaagctggactcctcctacacaatttatttgacgttttattttggttttccccaccccctcaatctgtcggggagcccctgcccttcacctagctcccttggccaggagcgagcgaagctgtggccttggtgaagctgccctcctcttctcccctcacactacagccctggtgggggagaagggggtgggtgctgcttgtggtttagtcttttttttttttttttttttttttttaaattcaatctggaatcagaaagcggtggattctggcaaatggtccttgtgccctccccactcatccctggtctggtcccctgttgcccatagccctttaccctgagcaccaccccaacagactggggaccagccccctcgcctgcctgtgtctctccccaaacccctttagatggggagggaagaggaggagaggggaggggacctgccccctcctcaggcatctgggagggccctgcccccatgggctttacccttccctgcgggctctctccccgacacatttgttaaaatcaaacctgaataaaactacaagtttaatatgaaaaaaaaaaaaaaaaaaaaaaaaaaaaaaaaaaaaaaaaaaaaaaaaaaaaaaaaaaaaaaaaaaaaaaaaaagaggaagttcatggacttgtttctgagcacccaggggacctttagcaaaagctttctggagtgagcctaagcaagagtgtattcgtcgaagcggccggccgtttcgtagcgactaactcggacccggggacccagaacggcagcctacgacgtcacgaagatgcccttatagaagggnnnnnnnnnnnnnnnnnnnnnnnnnnnnnnnnnngnnnnnnnnnnncncnnnnnnnnnnnnncnnnnnncnnnnnnnnngngcncccccnnccccgcccncccncnncccgcgcgnccccccgcccccccccgcgcggccggcggccccnngcggcgccgcgccgcgcgcggccgcggnnncnncccgcccngcnccgccgccgcgccggcgnncccgccccccccgnnngcgggcggcggtcgcgcgcgcgcccccccccccggccccgcgcgcgcgcccccgccgcccgngcccgnccngggggcgccttgcccccg

SEQ ID NO: 6105 - DNA, 1275 bp, Homo sapiens
  misc_feature (6)..(8): n is a, c, g, or t
  misc_feature (18)..(19): n is a, c, g, or t
  misc_feature (21)..(21): n is a, c, g, or t
  misc_feature (41)..(41): n is a, c, g, or t
gaggtnnnattcaggggnncnattactccttgaaacccccncattgaacacccgtgctatgagcaattcgcggccgcgattcgaacaagcggagtataaagggagcagggatggcgggagacagcgcagtttgaatcgcggtgcgacgaaggagtaggtggtgggatctcaccgtgggtccgattagccttttctctgccttgcttgcttgagcttcagcggaattcgaaatgggctggcggtaaggctggaaaggactccggaaaggccaagacaaaggcggtttcccgctcgcagagagccggcttgcagttcccagtgggccgtattcatcgacacctaaaatctaggacgaccagtcatggacgtgtgggcgcgactgccgctgtgtacagcgcagccatcctggagtacctcaccgcagaggtacttgaactggcaggaaatgcatcaaaagacttaaaggtaaagcgtattacccctcgtcacttgcaacttgctattcgtggagatgaagaattggattctctcatcaaggctacaattgctggtggtggtgtcattccacacatccacaaatctctgattgggaagaaaggacaacagaagactgtctaaaggatgcctggattccttgttatctcaggactctaaatactctaacagctgtccagtgttggtgattccagtggactgtatctctgtgaaaaacacaattttgcctttttgtaattctatttgagcaagttggaagtttaattagctttccaaccaaccaaatttctgcattcgagtcttaaccatatttaagtgttactgtggcttcaaagaagctattgattctgaagtagtgggttttgattgagttgactgtttttaaaaaactgtttggattttaattgtgatgcagaagttatagtaacaaacatttggttttgtacagacattatttccactctggtggataagttcaataaaggtcatatcccaaacaaaaaaaaaaaaaaaaaaaaaaaaaaaaaccgcctctaaaggaatcccctcgaaggggccccaagtttacgcggtaacccaacttttcttggtaacaaaggggcccccttaaagtggagtccgaatttataagccttagggcccctgggcccgtccgttttaacaaaccccccggggaccgggagacagcggtcactggggatcttgggggacgggcccttcttcttgggggagcaaatacttgggaccccattctctgtgagggcttgagctccctaggga

SEQ ID NO: 6106 - DNA, 4302 bp, Homo sapiens
cagggctccttcccgcccgccgccgccgagacccaggctgaagctggggaggacggtggagcccggcccaggccgttctcctgcccccgcggctggagcatcgtctgggactactggctgaaggcgagccccgcagcccaagcgcagcgcacacgcgcgcccccggccaccgccgttctctcttccctcccctcctctcccctcccctctcctccgcccccggcctcggctgcggcgggaggaagaacgcttcccaaccagccaggagagcccagatctattcccattcggggagaaagaagagaccccgcacttggatccgaccgacttctcgccccggggccacggaagtggctcgccgtccaccggagagtccccgccgagcgtagccctccaaccctcgcccaaccgcagccgcatagacagcgctccccagcgggcccccggccccgccgagcccactccccgcgcggggccggggccggggccggcgatgcctggcacggcagcggcggtggccgcggctgctgctgctgctactgccaccgctgccacggctgctggcccgggcccgggctgggggcttgagtctctgcagtggggctgagcccgcagtcccgccccccgatcctgaggccgctgctccgccgggcgccgggcctcctccgcccgcgcctccgccccaggagctggagccaagcggggagctcgggccccgcgcccaggcccggaccatgcatggccaccgagccccggggggcgccgggccttcggagcccgaacacccggccacgaacccgccgggcgccgctccgccggcctgtgccgactcggaccctggagcctcggaacccggactgctggcgcgcaggggctcaggttcggctcttggcggcccactggatccccagtttgtcggaccctcggacaccagcctgggcgctgctccaggccaccgggtcttgccctgcggtcccagtccacagcaccaccgggccctgcgcttctcttaccacctggagggctcgcagcctcggcctgggctgcaccagggaaaccggatcctggttaaaagtttgtcccttgaccctggccaaagcctagagcctcatccagaaggtccccagcggcttcgctcagacccaggtcccccgactgaaacccctagccagcgtccttcaccactgaagcgggcaccgggcccgaagccacaggtgcccccaaagcccagctacctgcagatgccccggatgccccccccactggagcccatcccccctccaccatcacgcccactgcctgccgacccccgagtggccaagggcctggctcccagggcagaggccagccccagttctgcagcagtatcctcactgattgagaagtttgaaagagagcctgtgattgtcgcctcggatagaccagtccctggccccagcccaggtcccccagagccagtcatgttgccacagccaacctcgcagccaccagtgccccagctccccgagggtgaggcctcccgctgcctgtttctgctggctcctgggccccgggacggtgagaaggtgcccaaccgggacagcggcattgatagcatcagctcgccatccaacagcgaggagacctgcttcgtcagtgatgacgggccccccagccacagcctctgccctgggccccctgccctggctagtgtgcctgttgccttggccgacccccaccggcctggctcccaagaggttgacagtgacctggaggaggaggacgacgaggaggaggaggaagagaaggacagagaaatcccagtgcccctgatggagagacaggagtctgtggagttgactgtgcagcaaaaggtgtttcacattgccaatgagctcctgcaaactgagaaggcctacgtttccaggctccatctcctggatcaggtgttctgtgcccggctgctggaagaagctcggaaccgcagttccttcccggccgacgttgtccacggcatcttctctaacatctgctccatctattgcttccaccagcagttcctgctgcctgagctagagaagcgcatggaggaatgggaccgctatccacgcattggagacatcctgcagaaactggcccccttcctcaagatgtatggtgagtatgtgaagaactttgaccgggccgtggagctggtcaacacctggacagagcgctccacccagtttaaagtcatcatccatgaggtgcagaaggaggaagcctgtggcaacctgacattgcagcaccacatgctggagcctgtgcagcgcatcccccgctatgagcttcttctcaaggactatctgttaaagctgccccatggctccccggacagcaaggatgcccaaaagtctctggagctgatcgccacagcagcagagcactcgaatgctgccatccgcaaaatggagcgaatgcataagctgctgaaggtatatgagctgttagggggcgaggaggacattgtcagccccaccaaagagctcataaaagaaggccacatccttaagctgtcagcaaagaatgggaccactcaagaccgatacctcatactattcaacgaccgcctcctttactgcgtgcccaggctgcggctccttggccagaagtttagcgtgcgggcacgcattgatgtagatggcatggagctaaaggagagctccaacctcaatctgcctcgaaccttcctggtgtcaggaaagcagcgctccctcgagctccaggccaggactgaggaggagaagaaagactgggtccaggccatcaactccaccctcctgaagcatgaacagacgctggagactttcaaactgttgaactcaacaaacagggaagatgaagacaccccacccaactctccaaacgtggatcttgggaagcgggcacctacgcccatccgggaaaaggaagtcaccatgtgcatgcgctgccaggagcccttcaattctatcaccaaacgcaggcaccactgcaaggcctgcgggcatgtggtttgtgggaagtgctccgagttccgggcccgcctcgtctatgacaacaaccgctccaaccgtgtgtgcactgattgctatgtggccttgcacggggtgcctgggagcagtccagcctgcagccagcatacaccccagcgccggaggtccatcctggagaaacaggcctcagtggctgcagagaacagcgtcatctgcagcttcctgcactacatggagaagggtggcaaaggatggcacaaggcatggttcgtggtccctgaaaatgaacccttggtgctgtatatctacggagcccctcaggatgtgaaagcccagcgcagcctgcccctcattggcttcgaggtgggaccgcccgaggcaggggagcggcctgacagaaggcatgtcttcaagatcacccagagccacctcagctggtacttcagccctgagacagaggaactacagcgacgctggatggctgtgcttggccgggcgggccgaggggacacgttctgcccggggcccacactgtctgaggacagggagatggaggaggcaccggtggctgctttaggagccactgctgaaccccccgaatccccccagacccgagacaagacctagagggtttgggacaaactgggagcccccaccccacactctagttgcccatgtctgattgggggctctagccccttccctcccagctcagtcaatacttgaactcccatcacgggcactttcaatcccgaatgctgggtcttgggttttttaattcatcttttcacaaaacgtgggcttttaaaaaatatattcctacagtgatgtcaatttttattaatccctgtccccagggagggtgggagccgttgccagtcctacctgaattaggtcgtttttctccctcatccctcaataccctaccacagatcctgcctccacccagttccccacaaagcaccagaggtaggagacctggattcaagtgccagctctgccactgaccctggggccccgacccagccctgcctcctcagccagtgtcttcacacgtacaactccacgtggggtggcaactagacctctcctgcctctcccatggcttacagcttctacccggccccaaggctacccagtattttatcgtccagacccatggcagggccagcgggcaggacagggaaacaggggggaggacaatggatactcagttttttgtgtttttttgtgtgtttttttttttttaagaaaaatacagtttatttcaggcttacagtaaaaaaaaaaaaaaaaaaaaaaaaaaaaa

SEQ ID NO: 6107 - DNA, 2658 bp, Homo sapiens
  misc_feature (456)..(473): n is a, c, g, or t
tgagacggagtctcgctctgtctcccaggccggactgcggactggcaatgctttttattttgaaaggagaagctaaatactttcggatatttttaaagaaagagctaaaaataactaccatttctgcctttacaatgtgatccccaaaagcctttctaaacaaacagtagctggaaaatgctgaaaatgaataaatggaatccctgtccttaaagacatcccagcctggcagaaagatggataagtaaacaacagtggggtgcaggaactgatactgaccattgatgggcacaaagtattatgggaacacagacagcaggcactaacctgctttaggaatgcctgggatgatttactaagagaactgccgtgaaggatggcaacttggatcggcccagaagccttccctggtactcacccagggcctgatgtagatgtcactcggtggtcccagcnnnnnnnnnnnnnnnnnngcacactgcttattattggtttacttgttcacctttctccacaaaatggtaagctccttaaaagtagaaactttgtcattgtatctacagtgcctgctgatgcataagaactatctgacaagtaaatataaggagtctaggatgatgaaaatacttcttctctaagacgggctgatgtttaaagacagtattttatgtctgtaccatgatatgtttaaagaatgtgtattcgtgtttgaaatgccaataccaaatattagatgcaagcacagggtcgggaaccatgggagacaaacaagacacaatcactgctctccagaaacttacagtgtaaactggaggcttcacggtccccaccaggatctaaacaggcatatctttcatgtgtttttattttggagttccacaaaacactttttttgaatacagagctccatttcgttaaaaaaattgacaactctgatcaagtaaataagaaagctgcttataggtaatagagtttccccttcctttttaagattagaaggaaatttagatgaaaggaattgagaatttacatttttagatgatgtgttcatatttctttggatttcatcttagttttccctcaccagttgccttttagcacctttctaataggcaatctgtagcaatgtacagatgtttacaataatgaaagtgctcattctttcctatatactgcaatatcacgtatttgctactatccagaaaaaggttctacatatatcctttctaaagttactgtgaagtatcttcaagaactatacttcatgacggttattctaaggtgtttaattcaaaaccactacctaatttctctatagcatgtggaatttaacatcccattttcaaaatagaatggtttaaaattaattgacttaaggagctgcagacccacatacagtgaatcttctatgaggtttacaggaaaaatgagccaaaagacatataagtacagtattctttattataaacaatcagataacagtataagtgtgcatttgatggataaccgaagccaagttattataatagaaagcatgacttcactcaaatagacagtttctttgttgttgttaatctgttttacattaatttgaatttaacatatgctaggatcacctaaacttgtcatacagttctgctattaaaatcgtaacagggaaagacaaaatgtgaaatgcatgttatattttgctttatttgttgaatatatatgtgtgtgtgtgtgtatatatatatatatatatacacactaaatatttgggacacaaagttaagcaggtgcttacagtctatcaagtgatatttatgaaatgtttttgttgctgttttgttgctgttatgggaacatccatatccttagaagacaataaaaaagaggattctaaatgctagatggttggctaacttctcctgatttatattgagtgtaaaacaaaacaaaacaaaacataaggtatatgtgttaagtagtgacatctttatagttccaaagcactcgcagctattaaaatatcatctagctaaaacaaacttttcacaattttttaacagaaaaataataaaccaacaacaaaaactgatcaatgttctgggtcttgtgagcagaccgaaatgttactacagtgttctctattgtgtgatccttgtccgtggcaaccttaaacgtgtgctgcagtgctgatgtatttataggcttagcatgtctgctttattagttatcctggaaagaatgctattcagttttttttttaatgtctacatcaaggaatgaatgctaaatgagcccatttagcagcctgaaatcaaatactgcatttattttttgaaactcttggtagcaaaagaaaaagctgattaaaatatgattgtgttacaatgactaaagggttaacttctcattaattctaaattcttcaaaatgtacaagcatcataataaaggcttttgatgagacatgaaaaaaaaaaaaaatatgtgccaatttaataatttatttgtcacagaaaattcagattcactgcaatattgtgttctggcttcccaaagctgcagggaaatacaagttttttgtttcttgatttttgtttagagacagggtgtcactttgtcacccaggctagaatgaagttgtatgatcattagcctcactacagcccca

SEQ ID NO: 6108 - DNA, 5755 bp, Homo sapiens
ggctgagttttatgacgggcccggtgctgaagggcagggaacaacttgatggtgctactttgaactgcttttcttttctcctttttgcacaaagagtctcatgtctgatatttagacatgatgagctttgtgcaaaaggggagctggctacttctcgctctgcttcatcccactattattttggcacaacaggaagctgttgaaggaggatgttcccatcttggtcagtcctatgcggatagagatgtctggaagccagaaccatgccaaatatgtgtctgtgactcaggatccgttctctgcgatgacataatatgtgacgatcaagaattagactgccccaacccagaaattccatttggagaatgttgtgcagtttgcccacagcctccaactgctcctactcgccctcctaatggtcaaggacctcaaggccccaagggagatccaggccctcctggtattcctgggagaaatggtgaccctggtattccaggacaaccagggtcccctggttctcctggcccccctggaatctgtgaatcatgccctactggtcctcagaactattctccccagtatgattcatatgatgtcaagtctggagtagcagtaggaggactcgcaggctatcctggaccagctggccccccaggccctcccggtccccctggtacatctggtcatcctggttcccctggatctccaggataccaaggaccccctggtgaacctgggcaagctggtccttcaggccctccaggacctcctggtgctataggtccatctggtcctgctggaaaagatggagaatcaggtagacccggacgacctggagagcgaggattgcctggacctccaggtatcaaaggtccagctgggatacctggattccctggtatgaaaggacacagaggcttcgatggacgaaatggagaaaagggtgaaacaggtgctcctggattaaagggtgaaaatggtcttccaggcgaaaatggagctcctggacccatgggtccaagaggggctcctggtgagcgaggacggccaggacttcctggggctgcaggtgctcggggtaatgacggtgctcgaggcagtgatggtcaaccaggccctcctggtcctcctggaactgccggattccctggatcccctggtgctaagggtgaagttggacctgcagggtctcctggttcaaatggtgcccctggacaaagaggagaacctggacctcagggacacgctggtgctcaaggtcctcctggccctcctgggattaatggtagtcctggtggtaaaggcgaaatgggtcccgctggcattcctggagctcctggactgatgggagcccggggtcctccaggaccagccggtgctaatggtgctcctggactgcgaggtggtgcaggtgagcctggtaagaatggtgccaaaggagagcccggaccacgtggtgaacgcggtgaggctggtattccaggtgttccaggagctaaaggcgaagatggcaaggatggatcacctggagaacctggtgcaaatgggcttccaggagctgcaggagaaaggggtgcccctgggttccgaggacctgctggaccaaatggcatcccaggagaaaagggtcctgctggagagcgtggtgctccaggccctgcagggcccagaggagctgctggagaacctggcagagatggcgtccctggaggtccaggaatgaggggcatgcccggaagtccaggaggaccaggaagtgatgggaaaccagggcctcccggaagtcaaggagaaagtggtcgaccaggtcctcctgggccatctggtccccgaggtcagcctggtgtcatgggcttccccggtcctaaaggaaatgatggtgctcctggtaagaatggagaacgaggtggccctggaggacctggccctcagggtcctcctggaaagaatggtgaaactggacctcaaggacccccagggcctactgggcctggtggtgacaaaggagacacaggaccccctggtccacaaggattacaaggcttgcctggtacaggtggtcctccaggagaaaatggaaaacctggggaaccaggtccaaagggtgatgccggtgcacctggagctccaggaggcaagggtgatgctggtgcccctggtgaacgtggacctcctggattggcaggggccccaggacttagaggtggagctggtccccctggtcccgaaggaggaaagggtgctgctggtcctcctgggccacctggtgctgctggtactcctggtctgcaaggaatgcctggagaaagaggaggtcttggaagtcctggtccaaagggtgacaagggtgaaccaggcggcccaggtgctgatggtgtcccagggaaagatggcccaaggggtcctactggtcctattggtcctcctggcccagctggccagcctggagataagggtgaaggtggtgcccccggacttccaggtatagctggacctcgtggtagccctggtgagagaggtgaaactggccctccaggacctgctggtttccctggtgctcctggacagaatggtgaacctggtggtaaaggagaaagaggggctccgggtgagaaaggtgaaggaggccctcctggagttgcaggaccccctggaggttctggacctgctggtcctcctggtccccaaggtgtcaaaggtgaacgtggcagtcctggtggacctggtgctgctggcttccctggtgctcgtggtcttcctggtcctcctggtagtaatggtaacccaggacccccaggtcccagcggttctccaggcaaggatgggcccccaggtcctgcgggtaacactggtgctcctggcagccctggagtgtctggaccaaaaggtgatgctggccaaccaggagagaagggatcgcctggtgcccagggcccaccaggagctccaggcccacttgggattgctgggatcactggagcacggggtcttgcaggaccaccaggcatgccaggtcctaggggaagccctggccctcagggtgtcaagggtgaaagtgggaaaccaggagctaacggtctcagtggagaacgtggtccccctggaccccagggtcttcctggtctggctggtacagctggtgaacctggaagagatggaaaccctggatcagatggtcttccaggccgagatggatctcctggtggcaagggtgatcgtggtgaaaatggctctcctggtgcccctggcgctcctggtcatccaggcccacctggtcctgtcggtccagctggaaagagtggtgacagaggagaaagtggccctgctggccctgctggtgctcccggtcctgctggttcccgaggtgctcctggtcctcaaggcccacgtggtgacaaaggtgaaacaggtgaacgtggagctgctggcatcaaaggacatcgaggattccctggtaatccaggtgccccaggttctccaggccctgctggtcagcagggtgcaatcggcagtccaggacctgcaggccccagaggacctgttggacccagtggacctcctggcaaagatggaaccagtggacatccaggtcccattggaccaccagggcctcgaggtaacagaggtgaaagaggatctgagggctccccaggccacccagggcaaccaggccctcctggacctcctggtgcccctggtccttgctgtggtggtgttggagccgctgccattgctgggattggaggtgaaaaagctggcggttttgccccgtattatggagatgaaccaatggatttcaaaatcaacaccgatgagattatgacttcactcaagtctgttaatggacaaatagaaagcctcattagtcctgatggttctcgtaaaaaccccgctagaaactgcagagacctgaaattctgccatcctgaactcaagagtggagaatactgggttgaccctaaccaaggatgcaaattggatgctatcaaggtattctgtaatatggaaactggggaaacatgcataagtgccaatcctttgaatgttccacggaaacactggtggacagattctagtgctgagaagaaacacgtttggtttggagagtccatggatggtggttttcagtttagctacggcaatcctgaacttcctgaagatgtccttgatgtgcagctggcattccttcgacttctctccagccgagcttcccagaacatcacatatcactgcaaaaatagcattgcatacatggatcaggccagtggaaatgtaaagaaggccctgaagctgatggggtcaaatgaaggtgaattcaaggctgaaggaaatagcaaattcacctacacagttctggaggatggttgcacgaaacacactggggaatggagcaaaacagtctttgaatatcgaacacgcaaggctgtgagactacctattgtagatattgcaccctatgacattggtggtcctgatcaagaatttggtgtggacgttggccctgtttgctttttataaaccaaactctatctgaaatcccaacaaaaaaaatttaactccatatgtgttcctcttgttctaatcttgtcaaccagtgcaagtgaccgacaaaattccagttatttatttccaaaatgtttggaaacagtataatttgacaaagaaaaatgatacttctctttttttgctgttccaccaaatacaattcaaatgctttttgttttatttttttaccaattccaatttcaaaatgtctcaatggtgctataataaataaacttcaacactctttatgataacaacactgtgttatattctttgaatcctagcccatctgcagagcaatgactgtgctcaccagtaaaagataacctttctttctgaaatagtcaaatacgaaattagaaaagccctccctattttaactacctcaactggtcagaaacacagattgtattctatgagtcccagaagatgaaaaaaattttatacgttgataaaacttataaatttcattgattaatctcctggaagattggtttaaaaagaaaagtgtaatgcaagaatttaaagaaatatttttaaagccacaattattttaatattggatatcaactgcttgtaaaggtgctcctcttttttcttgtcattgctggtcaagattactaatatttgggaaggctttaaagacgcatgttatggtgctaatgtactttcacttttaaactctagatcagaattgttgacttgcattcagaacataaatgcacaaaatctgtacatgtctcccatcagaaagattcattggcatgccacagggattctcctccttcatcctgtaaaggtcaacaataaaaaccaaattatggggctgcttttgtcacactagcatagagaatgtgttgaaatttaactttgtaagcttgtatgtggttgttgatcttttttttccttacagacacccataataaaatatcatattaaaattcaaaaaagagagagcgagaaagaaaaagacaaaaaagaagaagagaaagagagagagaaaaggaagagagagagccaaaggcatcagacgcgagcacgagcaagacacacgaagcgcacgacgagagcgagaacgaaagaggagaagaggggggaggcagggccgcggggaagaggaggagaacacacaacgagtgggggagagggcgccagcgaagcgagaagaggaaggggggagcggggagagaagagaggctgcagcagaaac

SEQ ID NO: 6109 - DNA, 2432 bp, Homo sapiens
  misc_feature (2429)..(2431): n is a, c, g, or t
ctcggaactgttccctgccccgcgccgccaagcggttcccgccctcgcccagcgcccaggtagctgcgaggaaacttttgcagcggctgggtagcagcacgtctcttgctcctcagggccactgccaggcttgccgagtcctgggactgctctcgctccggctgccactctcccgcgctctcctagctccctgcgaagcaggatggccgggaccgtgcgcaccgcgtgcttggtggtggcgatgctgctcagcttggacttcccgggacaggcgcagcccccgccgccgccgccggacgccacctgtcaccaagtccgctccttcttccagagactgcagcccggactcaagtgggtgccagaaactcccgtgccaggatcagatttgcaagtatgtctccctaagggcccaacatgctgctcaagaaagatggaagaaaaataccaactaacagcacgattgaacatggaacagctgcttcagtctgcaagtatggagctcaagttcttaattattcagaatgctgcggttttccaagaggcctttgaaattgttgttcgccatgccaagaactacaccaatgccatgttcaagaacaactacccaagcctgactccacaagcttttgagtttgtgggtgaatttttcacagatgtgtctctctacatcttgggttctgacatcaatgtagatgacatggtcaatgaattgtttgacagcctgtttccagtcatctatacccagctaatgaacccaggcctgcctgattcagccttggacatcaatgagtgcctccgaggagcaagacgtgacctgaaagtatttgggaatttccccaagcttattatgacccaggtttccaagtcactgcaagtcactaggatcttccttcaggctctgaatcttggaattgaagtgatcaacacaactgatcacctgaagttcagtaaggactgtggccgaatgctcaccagaatgtggtactgctcttactgccagggactgatgatggttaaaccctgtggcggttactgcaatgtggtcatgcaaggctgtatggcaggtgtggtggagattgacaagtactggagagaatacattctgtcccttgaagaacttgtgaatggcatgtacagaatctatgacatggagaacgtactgcttggtctcttttcaacaatccatgattctatccagtatgtccagaagaatgcaggaaagctgaccaccactattggcaagttatgtgcccattctcaacaacgccaatatagatctgcttattatcctgaagatctctttattgacaagaaagtattaaaagttgctcatgtagaacatgaagaaaccttatccagccgaagaagggaactaattcagaagttgaagtctttcatcagcttctatagtgctttgcctggctacatctgcagccatagccctgtggcggaaaacgacaccctttgctggaatggacaagaactcgtggagagatacagccaaaaggcagcaaggaatggaatgaaaaaccagttcaatctccatgagctgaaaatgaagggccctgagccagtggtcagtcaaattattgacaaactgaagcacattaaccagctcctgagaaccatgtctatgcccaaaggtagagttctggataaaaacctggatgaggaagggtttgaaagtggagactgcggtgatgatgaagatgagtgcattggaggctctggtgatggaatgataaaagtgaagaatcagctccgcttccttgcagaactggcctatgatctggatgtggatgatgcgcctggaaacagtcagcaggcaactccgaaggacaacgagataagcacctttcacaacctcgggaacgttcattccccgctgaagcttctcaccagcatggccatctcggtggtgtgcttcttcttcctggtgcactgactgcctggtgcccagcacatgtgctgccctacagcaccctgtggtcttcctcgataaagggaaccactttcttatttttttctatttttttttttttgttatcctgtatacctcctccagccatgaagtagaggactaaccatgtgttatgttttcgaaaatcaaatggtatcttttggaggaagatacattttagtggtagcatatagattgtccttttgcaaagaaagaaaaaaaaccatcaagttgtgccaaattattctcctatgtttggctgctagaacatggttaccatgtctttctctctcactccctccctttctatcgttctctctttgcatggatttctttgaaaaaaaataaattgctcaaataaaaaaaaaaaaaaaaaaaaaaaaaaaaaaaaaaaaaaaaaaaaaaaaaaaaaaaaaaaaaaaaaaaaaaaaaaacattcttttgggaacatgctgcagtccattttcgnnnc

SEQ ID NO: 6110 - DNA, 2296 bp, Homo sapiens
  misc_feature (2156)..(2156): n is a, c, g, or t
  misc_feature (2221)..(2221): n is a, c, g, or t
aaaaaaaaacccgacatgccccgcggcgcgccgattaaccgccagatttgaatcgcgggacccgttggcagaggtggcggcggcggcatgggtgccccgacgttgccccctgcctggcagccctttctcaaggaccaccgcatctctacattcaagaactggcccttcttggagggctgcgcctgcaccccggagcggatggccgaggctggcttcatccactgccccactgagaacgagccagacttggcccagtgtttcttctgcttcaaggagctggaaggctgggagccagatgacgaccccatagaggaacataaaaagcattcgtccggttgcgctttcctttctgtcaagaagcagtttgaagaattaacccttggtgaatttttgaaactggacagagaaagagccaagaacaaaattgcaaaggaaaccaacaataagaagaaagaatttgaggaaactgcgaagaaagtgcgccgtgccatcgagcagctggctgccatggattgaggcctctggccggagctgcctggtcccagagtggctgcaccacttccagggtttattccctggtgccaccagccttcctgtgggccccttagcaatgtcttaggaaaggagatcaacattttcaaattagatgtttcaactgtgctcttgttttgtcttgaaagtggcaccagaggtgcttctgcctgtgcagcgggtgctgctggtaacagtggctgcttctctctctctctctcttttttgggggctcatttttgctgttttgattcccgggcttaccaggtgagaagtgagggaggaagaaggcagtgtcccttttgctagagctgacagctttgttcgcgtgggcagagccttccacagtgaatgtgtctggacctcatgttgttgaggctgtcacagtcctgagtgtggacttggcaggtgcctgttgaatctgagctgcaggttccttatctgtcacacctgtgcctcctcagaggacagtttttttgttgttgtgttttttttttttttttttttggtagatgcatgacttgtgtgtgatgagagaatggagacagagtccctggctcctctactgtttaacaacatggctttcttattttgtttgaattgttaattcacagaatagcacaaactacaattaaaactaagcacaaagccattctaagtcattggggaaacggggtgaacttcaggtggatgaggagacagaatagagtgataggaagcgtctggcagatactccttttgccactgctgtgtgattagacaggcccagtgagccgcggggcacatgctggccgctcctccctcagaaaaaggcagtggcctaaatcctttttaaatgacttggctcgatgctgtgggggactggctgggctgctgcaggccgtgtgtctgtcagcccaaccttcacatctgtcacgttctccacacgggggagagacgcagtccgcccaggtccccgctttctttggaggcagcagctcccgcagggctgaagtctggcgtaagatgatggatttgattcgccctcctccctgtcatagagctgcagggtggattgttacagcttcgctggaaacctctggaggtcatctcggctgttcctgagaaataaaaagcctgtcatttcaaacaaaaaaaaaaaaaaaaaaaaaaaaaaaaaatctcaaaaaaaaaaagtcgtccctagcctgccaacagccatctgcccagacagccgcagtgaggatgagcgtcctggcagagacgcagttgtctctgggcgcttgccagagccacgaaccccagacctgtttgtatcatccgggctccttccgggcagaaacaactgaaaatgcacttcagacccacttatttatgccacatctgagtcggcctgagatagactttttcctctaaactgggagaatatcacagtggttttttgttagcagaaaatgcactcccggcctctgtactcatctaagctgcttattttttgataatttgggtcagacctgtaaaatgggatacttcacttttaataactggttggcttaaaaattggcctttgcaaaaaaactgggaaaaaaatgggttttttcctcccaccccctttgcccccccacagcgggaagttgcatcccccnctttcttgggaacctctgtccctcgggccgacccgttgaaaccgtgaaagctaccccccttaacncccgcggcgggcacggaggccttttacccgccaaagcgcccttcccttcccgacgacctccacccaccactctaa

SEQ ID NO: 6111 - DNA, 3581 bp, Homo sapiens
  misc_feature (1541)..(1557): n is a, c, g, or t
agttcgcctctgcagcctctgcggggaagtgccggggctgctcgaggctcagttcttaggactgcaaggaggcagccccggcgtgcggcggtgcgcacagtctagagtggccagggcgcgagagtgcaacgtcctcctggccccgagcgcgtcgtcgcgccccgggagcagaccctcgcccagcagttaccgccgtcccgactttccgttccagttgcagctcctgccgggcaacatgtcaagagccgccgccgctacagctgccgccgccacctggggaagagcagcagcagcagtggcggccgcgggcacacgggggcaataaaccgagccacccgggcgtccagcgtgccggggaaccctctctgcgctcactgcccggcgggacccacgccatgtgctgagccatgtccctggccgcgcccgcgggcagcgcatggggcagcgcctgagtggcggcagatcttgcctcgatgtccccggccggctcctaccgcagccgccgccgcccccgccgccggtgaggaggaagctcgcgctgctcttcgccatgctctgcgtctggctctatatgttcctgtactcgtgcgccggctcctgcgccgccgcgccggggctgctgctcctgggctctgggtcccgcgccgcacacgacccgccagccctggccacagctccggacgggacgccccccaggctgccgttccgggcgccgccagccaccccactggcttcaggcaaggagatggccgagggcgctgcgagcccggaggagcagagtcccgaggtgccggactccccaagccccatctccagctttttcagtgggtctgggagcaagcagctgccgcaggccatcatcatcggcgtgaagaagggcggcacgcgggcgctgctggagtttctgcgcgtgcaccccgacgtgcgcgccgtgggcgccgagccccatttcttcgatcgcagctacgacaagggcctcgcttggtaccgggacctgatgcccagaaccctggacgggcagatcaccatggagaagacgcccagttacttcgtcacgcgggaggcccccgcgcgcatctcggccatgtccaaggacaccaagctcatcgtggtggtgcgggacccggtgaccagggccatctcggactacacgcagacgctgtccaagcggcccgacatccccaccttcgagagcttgacgttcaaaaacaggacagcgggcctcatcgacacgtcgtggagcgccatccagatcggcatctacgccaagcacctggagcactggctgcgccacttccccatccgccagatgctcttcgtgagcggcgagcggctcatcagcgacccggccggggagctgggccgcgtgcaagacttcctgggcctcaagaggatcatcacggacaagcacttctacttcaacaagaccaagggcttcccctgcctgaagaaggcggagggcagcagccggccccattgcctgggcaagaccaagggcaggacccatcctgagatcgaccgcgaggtggtccgcaggctgnnnnnnnnnnnnnnnnnctttcaacctcaagttctaccagatgaccgggcacgactttggctgggattgagcagacccgggctatgtaccttacccacgtggcttatctattgacagagattatatcataacatggcttgaagtaaaaggcagtatccaagtccttcacctggtcttgccctgtctactttctgatcattctgatggtctgatgtggctgttgatgtggaactgcagaagagttcagagaagagtatgcaacaaagccataggaaaacacacaggagcttttccctccccttcaggtccccgccctctttccaagctggacaattttttattaagttgtttattccctgccttaaaactgaaacaggaaattttctggtagaaggagggtcatttagtcacgaacactgaagtgggtcaaaattctattctgggtcaaatccttgaattcaaacagatgtccataatcagtactgatggaatagagcaagtttttctatgtaagacaaataaatcaaacatcatgtgcatctcctcataagggtctgcaagggtctgatggtttaaagttcctaacagatctggttgcagcatctgccggagcttgcaccccatcatcggacggtcatcttcctgctgcagaagttaggtaacataagacttagatttcttcctgttctagcaatctgcaagaccaccaggcttaactttttagctgccagaagacaaacccccttttctgtttcggcaatttgtcctggcacgtgttttggacttcctccgatttacacgaaaagctctgatattcattggagtactttattttttttcctcagttttgtttcttttctcatgtaaaaacaaacaaaaaggtcaacaaaaaaaaattgaggtttttcttgtttctatctagttcatgctttctttgcggtgtttgaacagtagtctgttaacttagtaggtggtacctggaaaggtattttaagtatagtgactgtttaataaatacttaattggatgatggaggaggagaaattgttttcttcccaggattctctttgggggtcattttgtgtgacagatatattttagacatttggagaaacagtttcagatcctgccaggatatttttgtaaaaaaggaaaatggaagattccaataaactagaaacagtacgtatctaagatgctgacacagaagctaatgtgacttttcagcttatcaagaggatggccaataaaacttaaaggtgtggttagatgttttctcacttttgtgacattaatttatcactgagtctcattcaaccaagtaatctaaaatactgtgcaaattctagcagtatgtcttcgataacttggatgttaggatagccaatatgtacaaaaaattaaatcaagtattttgtcctatgtataacacaaattaattttacacagagaaagatgtttctaggcaagtgaaattctggtaattcatactatttctttgtatgaacaaataaaatatattttgccaaaaaaaaaaaaaaaaaatgttttcttaagtattacaggaggacaaggtagcaatattttgtttaataatcccatgtgcgtgcatgcgcacatacacacacacacacacacacacacacacacacacacacacacagagtcattctgagggcaagctgatctttcagattttaaagggtccaatccaatatacaactaatccacaagcatttagggtggattttttttttataaatgactctgaagacaagatcggcgagaggggctcgtgtgtcttggtggagcttccccgcagcccccaggaagtgctgtctattacacaggattccaagaatactgaagccgctgcctgccccggtctttcagtgccacaggttcgtgtgcatgggcagccacatgtcacacgacaggtgcaatgtgagcacagcacctatggctggatggattttgataataggtgccttctcttctcacttttgcagagtgtctcctattaggtggagatccttcctag

SEQ ID NO: 6112 - DNA, 5853 bp, Homo sapiens
  misc_feature (5776)..(5825): n is a, c, g, or t
cttttttttttttttttaacatgtgagtaagatcagtaacgtgtattcgtgtcaatatcctggagtgatcatttaccagagttttctgagatgttaaccacaggcacaagctgggtgtgtgggtatgaatggtccccaggaccaaactgcggtcccacaactgcatgtggttgtaggattatctcaaggtgcaggtgtttgacatccataaaccctcctccccaccactctgaaaggctgggctgtagacgaagacagggctcagaagccctggcctgtgggcccccaccacccggccactatgtctctgaggggccggagtctggccccatctgtggaacgggctggcgctctgggtgctgctttccaggttcccgctgctcacaggaggccgaggcccggctgtgaccctgtcctccgcctccccttcaggctcagggtctgagtcctccacctcaaggccggctccattcagcttcacgtcctgctgtaaaggccccggggccacagaagccaggtcatccccgtaggtggaggacgacgaggccggcagccgctgctcgagggcgcagcagctgggaggcgcgggctccaggggcgcggcctggcggcaggcggcctcccgcaggcggcaggcgctggcgtagaccaccccgtcggagccgcacaccgggttcccctgggcgccgcagtcgtggtcgcagccgcatcgcgcgatcgccgccccctcctcaggggccacggcagggcccgactcgccggggaaccagcccgggccccgggcaggggcgcgctccacttcgttgcacgcgggtccggcgcacagttcccgggcgagtgggctgtgcgtgctgacgttgtagaagcgagtggcctcgaaggcgggttcgtagtagtcgtacacggagactggcagcgccgacgtcctgcccaccacgcactcccggagagcacggaaccgcacgcacgtcaggcaccggctggggatctcatcaaagtagaagagcactcggcgtccagccacttcatacctcttcatccccatgtgcttgtcaaggagcagctgctccaggctctcgatgtctgcccggaagcctgacagcaggggcacctccaggacagccatattggaagaccctgcatgcagccacctggtgcacacctccagcatcaccttgtattcctggtgatgctgatcggccgctgggtcatcatcgtcagctgggggccagtctcctcgggaaccctcagctgcggaggcaggcatggggggcgggcgtccctgggcctcaggctcctggaggcttacgagcagctggaaagctggcttggccaccgggtcaggcacattgtaggtgacatcaatctgcatcaggcagcagccgtcccccttggcactcacaaacagccccgtggggaggctggggatcgctgctgtctgcagaaccttctggttggtcctgtgcagctcgaaggtttcctggtagtccaggttggtggaggccagggagacagtgaggttgatgcctccagcataggacaagatggcatattcagccaaggcctgcagagccacgcaggtgtcctgagtggaggagaagcccccaagtgcatttcgctgctgggacagccacttcaccacaggcagggcggcagccacgtcacccagcagagtgtaggtcagaagggcgtaggctgtcatttccacctcggccgagaccactgactgagagaccctgtcactgaagctcaagaatgtgcccttgtccacgtcccaggaatttgacaggctccagtgggtgaccccatctcgcatgatggccaggctacggagcttgcgcagtgcctcaggggctgccgggctgcggagcagggtcagcgcgtaggtagtcagggcacagctataagggtccatggccaggggcgcagcagactccaggaagtgcctcgctttgtcagtggagcctctctcctcctctgaggctgtgcctgtttccaggagagcaaccaccacgtaggctgtcagcgggacaatgccgtggatcccaccctggatgtccttgttcaggaccctgcccacggccaggaaggagccatcggcctgctgctgctggatgatccagctcttggcggcagccagctcccgggggtccacgaagataaagctgcgagcctgtgcgaaggacttcaggacaaaggctgtgagccacatgctccccgatgcgtcccgctccccaaacgcgctgtaggagccatcctggcgcttgtaggtcagctggcgctggtagccttgtactaggtagtcggtggtctctctctccacctcagggctgagctgctgggttttctgaagatacttcaagacaaagacgttgggtgcaaagtggatcatgttctgctctccacagccaaacggcagccgcaggaggttgttgaggtggttcagggttggccccatgacgtccccgatgatggaggcggtggctcgctcagacccagggatggcgccgtgtgggacccccagggtgaaggcctcgctgtagctctcgtccacctccatcttcctccagattcggaattcacccatggagccccagccggtggaaaagccaatgaactggacctctggtggcctcgggagggtccaggccacaatgacagactcattggatggctctggaccatggccaacctggataaggccaccacgccagctgatccagaatgttctgaattcatcccaggagaggatcttggccgtgtgtgcactggccacgggctctcccatcttgctggtggagatccatgacctggtgttctgatgcccccccaggacgatctcgatcatgcctgctgtgtcctggggcccagaagacaaggccacacgggcatcattgtgagctcgcacagccacatcaaagcgggtgaggcgcagtggccgctgcacatactggaactcatacttgttgggggtggagatgtggactctctcactgggacagaagaatgcgctgtaggtgtacgcccgggggactccttccgcctcaaccatcacactgcgcctgacgtgatccaccccgatggggaccctcctgtcggcgtgattctcctcagggtgtttgctggacctcccatcccggcagcaatttgtgtctccgtaagcaagggctttggccgtgatgttgttgagtcccaggtcgctgaaggacagaacgacccagatgggctcagcctccccgggggccacacacatcttcttggtcacatggcgtttgccaggatgcccaacaaactggatgcccttgggaaccgagagcttcatgtacacctcagcgcaggtgcccatgtagttgtagacactgagcgggatcttgacctgctccccacggatgatgagagcggggagcatgaagtccacgaagaagggcttgaaggtcttcagcagggagggctcggcgatgcctaagccctgagaggtggacagggccacggcctcacccacccagctggtgatggagtccgggaccttcacactgagtgtcccctcaccagatgggtcactgatgttgagacaatgccaaatccatgtttcggggaagaaagtcctttttctcttctctgttctgggggggtgcctggaaggagccactgccaccaggctccctgtgtggggctggaaagcggggacagcctcatcggtgtagaggccaccgtcctgccggtggttcaggctcactcggtcggtcatcaccaccagtcccgtttcggtgaaggcaaacccagagtccttggtgatgccccaaggccacgggaagacagaggagcgccggcgtcgttgtgccgtcagcccagcccaccaaaaaggaccatcctccctggacacgccaaaggaatcagaaacatcataatcttccagttcctggaaaacctgggcaggagtcagccggaacccagacctgagcaggtagacactcttatcaactgcggcgacgcacacacagctgccccttgcagccctgatccgcaggtcgacaacctccccaggttgggtctcatttgctgaatacgtcactgaaacctggttttcgaagaaggtctcgactgcaaactgaaggctgtcggcgaccccttctccattctccctgacgtagaagaccagcaggcgaccaagggggaccatgctgggggtcacggccagatgaagagaggtcacacacacgtcgacctcagcttctggggctggtgggggctctgtctcagaaaggtgtgttaaacgaatcggtttctccagggcaggggccgcccgcttgcttcgctgctgggtggtgtgggcaggctgctggcccgatagcacaatattgccccgtgcagccacctcgtagtacagggtaaagttgcagggacatgtggacttcacagaaaaataggcttcttccccaacctgcagtgggtgggagggtggctgcagctgcaggtagcactggctgggggagtaccagctgccgagggagaggtagctgggcaggtactgagcccccacgggcttcccgttcagtgccatcaccttggtctccagccacacgtgctgggctgacgtggggatggaggggatttcaaaccccactagtccacgctgggacacaacttcactggtgtagatgttatcctttggtgtcagctctgccttaatctggaccgtcaccccctcagctgggctgccatcggggtaggatagctccaccttccccacgtaggccaggcccggcttgaactgcttcctcgtgtccttggagtaccggatgtccaccagctgcctctgcacgggggtggagtcatcgaacgcgacctgctggctcccgtccacactggtcaccatggcccagatgctgaccctgccccggaagtgctcagggacgtccgctgggatcatgtccctcacgcagatgtcgaagtcctgggagccgaggatcttggttgttctgaggacagggcgtcccacctcgtggctgtagtaccctacaccattaacagtcatgttgatcgttaaggcaccagccacaggtttcccaaaggtatacctggcccgcacagtgcctgtctcacaggcgtccaggtcttggatataccggggcgggtcaatcagaagctcaaacttgggcaacacatacttctgaacttcaaaagacttgttgtacgcgtggccttgcatttcaacaaaaatgaaccattctcccaacacaggctggtcggacaaggggaagctcatgttggtgatgccgcagcagaacggctttaagtgtctccactctatcatccgagagcctcgggggtccaggatgtaggcttccagcttctcgttgacaggcctcagatttggagagacggtgaagatgcttatgagcactcggtgctggggtctgtacacaggcttgtccgtctggatgaatacagaagcgccccggccgtccacggtcaccgaggtctggttgtgaaagaggggcccctcctccgcctgccagccgcggccccacactttcagaagcgcttggccccggaggcccgtgggcaccttgagtttgattgtccctttatccaggatggctccctggctctgcaccaccggctcaccctgggccaccagctgagcctggaccgtgacttcccttggagagttaaagatggtcacgctgatgacttcctccacgcccgcgcgaaaaacagagggagctgcaatcaagtaacccggggcctgaggctgcgcggcgcgcacgccgtnnnnnnnnnnnnnnnnnnnnnnnnnnnnnnnnnnnnnnnnnnnnnnnnnngcgccgctcatttttcggctcctggggg

SEQ ID NO: 6113 - DNA, 2060 bp, Homo sapiens
  misc_feature (327)..(341): n is a, c, g, or t
agtccgcgggccgcgccgccgctcccgccgctcccgccgctcccgcagccgccccgccgcccgcccggagccccgcgtccctaggcctggctcccgcctgcccgagacccgcccagcctgccccgctcagccgccagagaagatgcggctgctcccggaatggttcctcttgctctttggcccgtggctccttaggaagcccaggcctggactgtcccttcctccggccagatcctgggagcaccctgcctgacccaggtggtaggggaaaagcaacgggccagcctggaggcccaggggaggtgcaccctgcaatgcggctggggnnnnnnnnnnnnnnncctcccccaatcccagcagtgtcatccccaaagagccactccccgaagtggagtttgttgcccccagcagcaggaggccacctcaactccctgcaggccgtcagtgcccagataccagagtccggaaggccgcagtacctggggctgcgccccgccgcggccggagcgggtgcccccggccagcagctcccagagccaaggtcttcggacggcctaggcgtgggccgcgcctggagctgggcctggccgaccaaccacacgggggcgctggcccgggcaggggcagccggggcgttgcccgcgcagcgcaccaagaggaagccgtccatcaaggcggcgcgcgccaaaaagatcttcggctggggggacttctactttcgggtgcataccctcaagttttcgctgctggtgaccggcaagatcgtggaccatgtgaacggtaccttcagtgtgtatttccgccacaactcgtccagcctgggcaacctcagtgtcagcatcgtgccgccctccaagcgtgtcgagttcggaggagtctggctgcccgggcctgtcccccaccctctgcagtctacgctcgccctggagggggtgcttcctgggctggggcccccgctggggatggcagcagcagcggcggggccggggcttgggggctccctcgggggcgcactggcggggccgcttgggggcgcgttgggagtgcctggggccaaagagtcacgcgctttcaattgccacgtggagtatgagaagacaaaccgcgcgcgcaagcaccgaccgtgcctgtacgacccgtcgcaggtgtgcttcaccgagcacacgcagagccaggccgcctggctctgtgccaagcccttcaaagtcatctgtatcttcgtctctttcctcagctttgactacaaactggtgcagaaggtgtgcccagactataacttccagagtgagcacccctacttcggatagcgcccctccccagccagtcctgagcctcccgccaaatcccagcctcactaggtgggacccccttcccagtgttctgccgctcctgtggccatgtcgcccactccttccactctgggggcggaggggaatggcttctcgggaccctcagctagcgtgggtgcccttttccttatgcggagtgcccgcaaggctggggtagccccctccagtacaccccaaagtgaaagggataagagtgcagccccagaataggcggggcttggaggcggtcccaatgtcccctgggtccacagtgggtccccttttcacccttggcgctaggctgcgcactccctttccccgcagctttaataactcctggcctggcaccctcaccccaccctgactttcccatcccccagcgcttgtcctgcttcaccctaccccgcctaagactgtaaaggcctaaaaacctcggcctgtcctcccaccattctgcctgccatatgcctgtccccttttcctccaaaccctattagggtaccggaagcagaacccctgggctgaggccctggccctgcccccggcccctgcccctgcccgcccccctccagtccaggcagtcgagctccacctgccctctcctgctgcttcctctcggtgatattttttctacgccaaaacagacgggaaagggaacaaaataaagtgaaatccaatacaaaaaaaaaaaaaaaaaaaaaaaaaaaaaaaaaaaaaaaaaaaaaaaaaaaa

SEQ ID NO: 6114 - DNA, 9079 bp, Homo sapiens
ggcttgttggcgcagaatgaagttttttttttttttttttttggagtataattcgctttttaattagaacgacgtgtgtaaatgacagaataccaccaccctgcgcagatggcggccacagaatacgcatcgaattcattctgcccaaggaagggagggagggaggacacagcggggcgtgagccagcagtccccgcccccttggtcctgcgagtgatggggtcaccgactgtcggcctgcacacgcctcttgaacggtaagcagagatcaaaagcacagcagcagtaatactgggtaagtccttccttgcgtaaaacatctgaattaattcattgaaggtatcaaaaatataccctgtaaaccaacacatcatttacatctgcctttccttcccaccgctgcggcaacgatgtgtgaaaaaaacagtccagtcctcggagcatccgttccccccaggccgcacctggcccttttgtccgcccacctggcctgacttggtttccagcaatctcgttggctggggcagtctgtggggaccggaacgagcgcactgggggctggacagggcctgcgtccatctgtccagagcgctaagcgggatgggaggcggagggagggcgcgggggctgcgagctcagtttagactttggttccaaatgcattcgggggaggcagtggcgtggaggtgcgtggtcatcctgctttgggtccctggccgccctggccgcctgtgtgtggctgccacacgcctgccgtgccccctccccggccccttcccctcccttcccgagcaccaggtaaacatcccctgagtaaggtctgcacagggccagcccggggcgggagtcttagttaaggctttagacaggcaaggatgccggctctggacggacagatggatggaggcgcaggcggactcaggggctccttccttggttgggggagtcggcagccgccccgctcctgcagggccgttcctgtggctcgctgggacctgacaccgcccgcccccccccgccctgttctgagtcactcgctgtcggagagtgtctcgtactgcgagcagagcagtggcttgggctcctcgtcccaggcgtggtgggggccagcgaggggcccgctgcccgcggggaggcccggtgggggtggggaagccatgacacccgcctgcagccgcatgatcagggggttgtaggggaatggcgtggaacctgcggacgagggcctgtcctcccacacgcggttggtgagcggcgtccggcggttgcagtctccctccgagtgcactgaggagacagagggtggccggtccccagatgccaggcccggggccggggacttggcttttcggctgctgggtctgccagagaccttggccttcccgccgccacctggcgaggtgagtgtgtggtcactccgtccgtcagcagcggttatgggcatagcagcgggcaggctggcactggcattcagagggttaaaagcattggcgctgagcggcggggactcttcccactggtcatatttacccatgagtgcctttctaattatggcctccagccccatgttggtgctggcatgttcctgcaccgcctggcttctataggtcataaggcctgttccggtgatggcgggcatattgaagatctccgtcccaggctggctgatattgtattcaggctcattccggttgtgggtgttcagcttcttgttgatctcttgcttcttggacttgaccatggcggagttgctctcggtcagcttgctgaagaaggctggcggctggctggtgttgcctggagacttggagcccatcctgctgggctccgtctgttccccatcccggtacagcagcgggtacacagcactccgggagtgccctggctccgtcatgccctccggtggggacacaggttcaataccgtcctcaccaccacccaagaccgacgtcttgtttggctctggagacctcttgcccccttcgctgtggggggagccacgggccggggcaccatggtccgggggcgggaggtagaggtcactgggtgggcggcggaggtccaggacggggcagctggccccagggaaggagtagaggggggcgggcaggggtgcgctgagctgctgtgggtggtgccgggtgtagtcctgtgtgatgacctcactgatgtgctgggccagggtgaccacccgctggtgacctttgacccctggggcggtctggagcagcgggctggacgagggctggctctcaggcagcggccgcaggtgtgggaggtgggcggcctccccgccaagcttcacggggcctggctgcttgggccgcagctccccctccaggtggctcttgtcgagctcttccaggtgcttggggagccccttgtcgtgggtcagactgggtgagctcacagggctgacgggctccaccccttcggggctgtagctgctgccgtggtaacccagagaacggagttccagttcctggatggaaaagggtttactttgagtcttttcccggtgcgggtccgaggccgaggcaggtggcgccggcgggtccgggctggcgtggtgaggtgcgaggttcttcgcaggggtgcgggcgatggtggcgtggccagagacaggaggcactaggggccggggctccgagcccttgctgggggaggaggcgggctccagcccggagcgggctgggggcttggcgaggaaggcatggccggtgtctgctcggggccgctctggccgggcgacccggggggcctccttgggcagcaagacgggctccatgagggtagggtagaccccatcgagggtgccgcccagtgggcagtgggtggcaggtgggaatgtggcagctgggcgaacgggtgaggaggtggaggtggacctcaggaccgtgggcttgctgggctccacagcggtgatgatacccttcatgcctgtgttgtgaagcacactgggtctctgctggagggcatcctgggtccgaggggagatgggcgagtgctggtgggcatgggagtgggaggcggggcggctgctgctgcccccacccccgccgctgctgccgctgctgccgctgctctgctctgtaccaggtctccagatgggtgcgtgctccaccgtcgtggtggacgtgaggatggacttttcccgctcccgatcccggtcccgctctcgatcccggtctcgctcccgctcggacgaggacgtggtggttggttttgtcaagtgtgttggacctcctggggagagtggggagctgctgtggcggctgctgaagggctggggcgcggtggggaggtaggcaaggcggtccatggcggtggctggggtgcctggtgtcgggggcacgagcacaggcaggtgtggcacttgggacaggtcgatgatgcctcggggacccgcagcgtagttgagtgccagcgaggactcgcggggcgagaggcccctcagcatatcagctcgctgggccatggcggtggccgtgttgtggtgcatctgctgcgaggtgatgtagtcattgatgatggtctgccggttctccagcgccgccgtgtcggggtagccgcggatgaggtagggtgggtacaggtgcgggtaggtggggttgggggccaggtgtcggggcaggtagtaggcagcggctgcgtccagagggatgccgcggggtatggaggtggggtcgaaggccagggggatgtggctgcgatacaggtccacgccactcacgccccgaagcaggtgctcatagggcgagatggggtgtgggtggtgctcgggcacggtgctgtgcggggacttggcgatctcacgaggcgtcgacgtcagctttcggtcctgggatgccttgctggacgaaaggctgccctcctgcaggcgcggcgtgggctcccgcatggtcacgggcgaacctcgtgggaggtggccggcaaagggtgccccgtggtcctcataggtcagggggctctgccgcggcttacccagctcaggcacaatgaccggggcgccgcgcgcaatggagccccccgagctgctggcggtccctggccggctcttcaggctctcctcgtagcaggcacgttccagtgcccgggcgtcggccatcacatccagcgggtgcacgggtgggaacgtccggccggggctgccgatgagggagcgtacgtcgtgctttttggagccagtggtggacgcgccggtgtcgtacttgagcggggtgccctgcgtgatggagccctccttgagcggccgcggggccaggggcagctcgggcgtgtgccgcagctcctcgcgcgggatctcatggatggagcggcccgcctccttcaccgtggccaccaggccctcatgggccggcttcagcttcagggggcccagggcctgcgtcttgtaggcctcggtcaggtcccgtgagggcggtgggggcggaggcgtgccctcccgctttaggagcttggcctcccgacgcaggtagtcctcctgtgcctccacgtaggaccgagggatcccttgtgtgatggacccgcggatgtggtgctgctctttgaggtggtgggggctgtgtcgctccggcgggatggcacggcccatgagaccttcgatgctggctgaggagatggctctgcccacgcggccctccatcatgtcataggtgcgcttgggggcggccgtctcatgggggggtcctgagctgcttctgccgtcctccttggagcactgggtcacagacatgccaccctcataggacaagacgtggcccttcttgccttcgtagatgacgtggcccttgggcaggctgtcctcccggccgcggtccaagcgactcgggctgtcctcgccgatgatcctggtgatggtgcccttgtacaggacgtcagctggcgtgccgtgggtgatggagccgcggtatgtgatggcgctgtccgagggcacccgtgtgctgggaatgcctttggtgatgcttccgcccggaactgagcccagagctgtccctctcagcacggacgcctcctgggctgtgggcacccccaggctctccggtggcccagcctggccccgtggggacagctgctcctgcttcactccgctgaagggtgccagctttttggggtccatgggcaggggcagccccatggtgacagggcccaccggggccttggcatgctctgagtacgggacgtggagctggaccgacattccttgggagatggcacctatttgcctctcgaggacgctggggtgcttggcagaggagatgaggggaggcgggttggagatggtgggtgggcgcggcaggacgggccgggcagtgtcatggaggcccaggggcagtgggtgaccaggtggagcgtaggagaaggctgaggggtccggggcatgcggggaggccttgatcacctcacgggggggcacggggaagggcaggccggaagtccagcaaggggggtccccaggcagcttctgggcctcggctgcgaaggctgggaagaacacaggcttctctgcctccttgtcggcggggggtgccgggctcctgctcttgccccgggggctgctgccaggctgctgaggggcgtcgctctccggctgcaggttttgcggtggcggtggggctgggggagctggcttggtgggagctgcgtcctcccgggggggctcatggactttggtgacctggatgggggggatggcagccgctcgctgcttcagctgcttcaggtccagtggcttctggggtgaggcattggcccgggggtcgccagtcggggtgaggaggctgggccttggggacagcagccggttcttgtcgccgccctcggcctcatccacctcgtctgcactgcaggtggcactggagtcgctgtcctggggggcgcccgagctcttggctgtggtggccctgccgctcccgccctccttcttctctgccttgagcgccctctcggccgtggcctcagcggcctccgcgtccttgcccttggccggcccctcctcggcttcctccgtgcactcgctcttgacgggctcctcggccttccctgtgtccactgccagctcctcagccgcggggggcttctgctcctccccctcctccactgggggcgctgctgcggtctcctcctccttctcctccttggggaccacaggaggaggtgaagagggaaatgggggtgctggtgggggcgtaggggctaaggtggcttcagaggccggggtggactcagtgggggccgggatgtcctccggtggtggggtgggtggccctgggggtggcccgtcggcgcccagggtggctgggggcttgggcccattctgccctgtgtccttggcggcctcagtgtgaggagaggggatgctctcggtgtctgagctgttgttgacagtggcttcagcctcctccaccatctcctcctcatttcccgtcacgcccgacgcctccatctcctcatcctccaccacgggcgggaatgcagcctcctcgctggccgccgccggcgctttcttcttcttcctccgcgcgttcctctccttctccatcttcagcttgtgctgctgcaagatctcatcgaggttctgcctcttcttgtagttgaagtagaagttcttacactgcgacacagtcttggagcccaccatccgggcgatggccgaccagttgcggccgtgttccaggagacctttcttggctgtttccatttcttcttctgtccagcgagaactctcattcagctccatggaggccagctcggcgctctgctggggggtgatggcctcctcgctgttggcctcattagccattgagcgggtgatgcggcctttgcgtcttccctggctgttggcagttttgcggcctttggaggccacagcctccttctcgtcgttgtcctcccctgaggtgtcgtctgtcttctccttgaggaggtcttccttgtcgttctccacctccggcttctcctcctccttctccgcctccttttccttctccttctcatctttctcctcctggctgctgcggggcatgggctgctggctgctggtggctgctgcctgccggccttttgtttgctgctgggttcttgccgcggcgccgatagctccgtctcaccaggctcttatagttctcattcttcttagtcaggtagtaatagaggacgcactcagccactgtcttcctctccaggaatgatgcgatcaggccaaagttcttgggatgctgcatgaacttctcccggaaggtctccttctcctgctcactccacatgttcatgacctggcggtctttgtacaccttcatggggtcggccataagcccgttcatgttgatgaacgtgatgcgctgctggtcagcgtcgtacagcatgggcgggatcacggccagctggcgcatctgcttctccaggttctcctgctctgagaggccatcgatgatctctgacacctcgtgctcgctgcgggcgggcgacatggacagcccactgccccgctggcccaccctctgcatgcgctcctgcagctcgcgctgcttgcggatctcagggaactgcttctcgtagtactcgcgaaccttgctctccttggcccgccgccgggggttgttctcgatgcgctccaccttcttctcccaggcctccatgagctggtcatagcgctggcagaacttctgctcccattgtttccgagcgtgattcctcctcttgaagtacaagattagcttcttccgcatcgcctggtttattttgatgttctcatgatactgccgggtgtcggagggctggttgtacagcggcagctccacctggggccccaggccttccagaatccgatgtgcagcttcagccttcttccggttctcgtcgtagatgatctgcaccaggctgcggtgcttcgactcgatgggcggcggtgacacgggtttctcaggctcgggcggcttggcagcctcctcctccagctgttgctgcttcttcttcagcttagagatctgctgctctaccatggtgatctctcggtccacgcggtccatgttctggatcagctcctccttggacagccgtggcggcaccagctccagctcagggtcagtgtgcggggggctgggtgggagacaccggttccagcttgcccgtcagggccggtccttggtgaggtcttcagatcccgcaggctggcccgtggccagcaggggtgacggtcgcagcagggggtcaggcagcagctctagccgagggcgcttgctttcaatgaactccatctctgacttccccagctcgggcaggtatgagtgggactctggccgcaggtggagctcctgggaccgttcattcccgggctggaactcagacagcagggagggcctccgccgctggggctggatgatggagccgggcgacaggtgggaggcatagtcgcgggagtggtgctggtactccaggagcccgacgtccgtgtgcgtccgggcgatctgcactgggtaggaaaggctgtggggcgggtagcggggctcagtggccctccacgtctgtgccacaggctgtgtggagcccgacatggtggtgggggtcggcggggagctgctcccaggccccaataagctttctcttaatcaccaccaaggattaaaagccagtcctcgtcatcagctcacgggccaccccgtcactggcaccagaaactgcctccagcgaggctgtgtcctcaaagactcaacttgaagtaactctctcacaagaaaaaaaaagaaaaagaaaaaaagtgccagccagcgggccagcagagtccacacacacaggctgtgctgccggcttccaggaggcacaccacagccaacatcagacccatccttcctccaggatgacacccgcagaggggcggccccagagggcggcctcaccttcccgcgagactacgactcccatcccggccctggaggccctgcagggccaggccaggccccccaggctcccagcccgatgccccccaaacccgggcaggccaaggcccaccggcgacaagtgcggggccgcctgaccccacggctgggccgtgaacgagacgtcgggcctccagcgatccgtt

SEQ ID NO: 6115 - DNA, 10853 bp, Homo sapiens
  misc_feature (3203)..(3220): n is a, c, g, or t
  misc_feature (5277)..(5314): n is a, c, g, or t
  misc_feature (6105)..(6127): n is a, c, g, or t
  misc_feature (9358)..(9398): n is a, c, g, or t
  misc_feature (10011)..(10024): n is a, c, g, or t
  misc_feature (10028)..(10028): n is a, c, g, or t
tttttttttttttaatttgcgagtttattgggcttgttttctgttttctagggagtaggttagtggaaaagaaaaagggccgaattcactcccacgacctcggacgcgtgggtcctgaggggaagcggtcagcgtaagtcccggatccccgctccggagccgcctcgtgggagcggggcaaggagatccaggaggggtctcgaatctgccatggcgaaccggcgagtggggcgaggctgctgggaagtgagcccgaccgagcggaggccgcccgcggggctgcggggccccgcggccgaggaggaggcgtcttccccgccggtcctgtctctcagccacttctgcaggtctcctttcctttgcttcggggacgttctcctgggagcctcacggacgctgtctctggccctagacaaccctaacgaggaggtggcagaagtgaagatctcccacttcccggccgcggacctgggcttcagtgtgtcgcagcgctgtttcgtgttgcagcctaaagagaaaattgttatttctgttaactggacaccactcaaagaaggccgagtaagagagattatgacatttcttgtaaatgatgttctgaaacaccaagctatattactaggaaatgcagaagagcagaaaaagaaaaagaggagtctttgggataccattaaaaagaagaaaatttcagcctctacaagtcacaacagaagggtttcaaatattcagaatgttaataaaacatttagtgtttcccaaaaagttgacagagttaggagcccactacaagcttgtgaaaacttggctatgaatgaaggcggtcccccaacagaaaacaattctttaatacttgaagaaaataaaatacccatatcacctattagccctgctttcaatgaatgccatggtgcaacttgcttgccactctctgtacgtcgatctactacctactcatctcttcatgcatcagaaaatagggaactattaaatgtacacagtgccaacgtttcaaaagtttcttttaatgagaaagctgtaactgaaacttcctttaattctgtaaatgttaatggccaaagaggagagaatagtaaacttagtcttacccccaactgttcttcaactttgaacattacacaaagccaaatacattttctaagtccagattcttttgtaaataatagtcatggagctaataatgaactagaattagtaacatgtctttcatcagatatgtttatgaaagataattcacagcctgtgcatttggaatcaacaattgcacatgaaatttatcagaaaattttaagtccagattctttcataaaagataattatggactaaatcaggatctagaatcagagtcagttaatcctattttatcccctaatcaatttttaaaagataacatggcatatatgtgtacatctcagcaaacatgtaaagtaccattatcaaatgaaaattctcaagtcccacagtctcctgaagattggagaaaaagtgaagtttcgccacgtattcctgaatgtcagggttcaaaatctcccaaagctatttttgaagaactagtagaaatgaagtcaaattactacagttttataaaacaaaataatcctaaattttctgcagttcaggatatttctagtcatagccacaataaacaacctaagagacgtccaatactttctgccactgttactaaaaggaaggccacctgtaccagagaaaaccaaactgagattaataaaccaaaagcaaaaagatgtctcaacagtgcagtgggtgaacatgaaaaagtaataaataatcaaaaggaaaaagaagattttcattcttatcttccaattatagatccaatattaagtaaatctaagagttataaaaacgaggtaacaccctcttcgacaacagcttcagttgctcggaaaagaaagagcgatggaagcatggaagatgcaaatgtgagagttgcaattacagaacatacagaagtgcgagaaatcaaaagaatccatttttctccctcagagcctaaaacatcagctgttaagaaaacaaaaaatgtgacaacacccatctcaaaacgtattagcaacagagagaaattaaacctgaagaagaaaactgatttatcaatattcagaactccaatttctaaaacaaacaaaaggacaaaacccattatcgctgtggcacagtccagtttgaccttcataaaaccattaaaaacagatattcccagacacccgatgccatttgctgcaaaaaacatgttttatgatgaacgctggaaggaaaagcaggaacagggcttcacttggtggttaaattttatattaacccctgatgacttcactgtaaaaacaaatatttctgaagtaaatgctgctactcttcttttgggaatagagaatcaacataaaataagtgttcctagagcacctacaaaagaggaaatgtctctcagagcttatactgctcggtgtaggttaaacagactacgtcgtgcagcatgccgtttgtttacttctgaaaaaatggttaaagctattaaaaagcttgaaattgaaattgaagctaggcggttaattgttcgaaaagatagacacctatggaaagatgtgggagaacgtcagaaagtcctgaattggctgttgtcctacaatcctttgtggcttcgaattggtctagagacaacttatggagaactcatatctttggaagataacagtgatgtcacagggttggctatgtttattctgaatcgcctactttggaatcctgatatagcagctgagtatagacaccccactgttcctcacctgtatagagatggtcatgaagaagctttgtccaagtttacattgaaaaagttattgttgttggtctgttttcttgattatgctaaaatttccagactcattgatcatgatccttgtctcttctgtaaagatgccgaattcaaggctagtaaagaaatcctttaggctttttcacgagatttcctaagtggtgaaggtgacctttcccgtcgccttggcttattgggattacctgttaaccatgttcagacaccatttgatgaatttgattttgccgttacaaatcttgccgtagacttgcaatgtggagtgcgccttgtgcgaaccatggaacttctcacacagaactgggacctctcaaagaaactcaggattcnnnnnnnnnnnnnnnnnnaaaagatgcacaatgttgacattgttcttcaagttcttaaatcacgaggaattgaattaagtgatgagcatggaaatacaattctatctaaggatattgtggataggcacagagaaaaaactctcaggttgctttggaaaatagcgtttgcttttcaggtggatatttcccttaacttagatcaattaaaggaagaaattgcctttctaaaacacacaaagagtataaagaaaacaatatctctactatcatgccattctgatgatcttattaataagaaaaaaggcaaaagggatagtggttcctttgaacaatatagtgaaaacataaagttattgatggattgggtaaatgctgtttgtgccttctataataaaaaggtggagaattttacagtgtctttctcagacggccgtgtgttatgttacctgatccaccattaccatccttgctatgtgccatttgacgctatatgtcagcgtactactcaaactgtggaatgtacgcaaactggttcagtggtattaaattcatcatctgaatctgatgacagttctctggatatgtcacttaaagcatttgatcatgaaaatacttcagagctatacaaagagctcctagaaaatgaaaagaaaaattttcacttggttaggtctgcagttagagaccttggtggaatacctgctatgattaatcattcagatatgtcaaatacaattccagatgaaaaggtggttattacctatttgtcatttctttgtgcaaggcttttggatcttcgtaaagaaataagagctgctcgactcatacaaacaacatggagaaaatataaactaaaaacagatctcaaacgccatcaggagagagagaaagctgcaagaattattcaattggctgtaatcaattttctagcaaaacaaagattgagaaaaagagttaatgcagcactcgtcattcagaaatattggcgaagagtcttagcacagagaaaattattaatgttaaaaaaggaaaagctggaaaaagttcaaaataaagcagcatcacttattcagggatattggagaagatattccactagacaaagatttctgaaattgaaatattattcaatcatcctgcaatctaggataagaatgataattgctgttacatcttataaacgatatctttgggctacagttacaattcagaggcattggcgtgcttatttaagaagaaaacaagatcaacaaagatatgaaatgctaaaatcatcaactcttataatccaatctatgttcagaaaatggaagcaacgtaaaatgcaatcacaagtaaaagctacagtaatattgcaaagagcttttagagaatggcatttaagaaaacaagctaaagaagaaaattctgctattatcatacaatcatggtatagaatgcataaagaattacggaagtatatttatattagatcttgtgttgttatcattcagaaaagatttcggtgctttcaagcccaaaagttatataaaagaagaaaagagtccatactaaccatccagaagtactacaaagcatatctgaaaggaaagattgagcgcaccaactatttgcagaaacgagctgcagccattcaattacaagctgcttttaggagactgaaagctcataatttatgtagacaaattagagctgcttgtgttattcagtcatactggagaatgagacaagacagagttcgatttttaaaccttaagaagactattatcaaatttcaggcacatgtaagaaaacatcaacaacgacagaaatataagaagatgaagaaagcagctgttataattcagactcatttccgagcttatatttttgccatgaaagttctagcatcttaccagaaaacacgctctgctgtcattgtgctgcagtctgcatatagagggatgcaagccaggaaaatgtatattcacatcctcacatctgttataaagattcaatcatattatcgtgcttatgtttctaaaaaggaatttttgagcctaaaaaatgctacaataaaattgcagtcaactgtnnnnnnnnnnnnnnnnnnnnnnnnnnnnnnnnnnnnnnagagcagctgcactatttatccagcaatgttaccgttccaaaaaaatagctgcacaaaagagagaagagtatatgcagatgcgggaatcttgtatcaaactgcaagcatttgttagaggataccttgtccgaaagcagatgaggttacaaagaaaagctgttatttcactacagtcttatttcagaatgagaaaggctcggcagtattatctgaaaatgtataaagcaattattgtcattcagaattactatcatgcatacaaagcacaggtcaatcagaggaagaacttcttgcaagtcaaaaaagcagctacttgcttgcaagcagcttacagaggttataaagtacgccagctaatcaaacaacaatctatagctgctcttaaaattcagtctgcttttagaggctataataaaagggtaaaatatcaatctgtgcttcaatctataataaagattcagagatggtacagggcgtacaagactcttcatgatacaagaacacattttttgaagacaaaggcagctgtgatttccctccagtctgcttatcgtggctggaaggttcggaaacagattagaagggaacatcaagctgccttgaagattcagtctgcttttagaatggccaaggcccagaaacagtttagattgtttaaaacagcagcattagtcatccagcaaaatttcagagcatggactgcaggaaggaagcaatgtatggagtatattgaactccgtcatgcggtactggtgcttcaatctatgtggaagggaaaaacactgagaannnnnnnnnnnnnnnnnnnnnnntgtgctatcatcatacagtcatactatagaatgcatgtgcaacaaaagaagtggaaaatcatgaaaaaagctgctcttctgattcaaaagtattatagggcttacagtattggaagagaacagaatcatttatatttgaaaacaaaagcagctgtagtaactttacagtcagcttatcgtggtatgaaagtgagaaaaagaataaaggattgcaacaaagcagcagtcactatacagtctaaatacagagcttacaaaaccaaaaagaaatatgcaacctatagagcttcagctattataattcagagatggtatcgaggtattaaaattacaaaccatcagcataaggagtatcttaatttgaagaagacagcaattaaaatccaatctgtttatagaggtattagagttagaagacatattcaacacatgcacagggcagccacttttattaaagccatgtttaaaatgcatcagtcaagaataagttaccatacaatgagaaaagcagctattgttattcaagtaagatgtagagcatattatcaaggtaaaatgcagcgtgaaaagtacctgacaattttgaaagctgttaaagtccttcaggcaagttttagaggagtaagagttagacggactcttagaaagatgcagactgcagcaacactcattcagtcaaactacagaagatacagacagcaaacatactttaataagttaaagaaaataacaaaaacagtacagcaaagatactgggcaatgaaagaaagaaacatacaatttcaaaggtataacaaactgaggcattctgtaatatacattcaggctatttttaggggaaagaaagctagaagacatttaaaaatgatgcatatagccgcaactctcattcagaggagatttagaactctaatgatgagaagaagattcctctctctcaagaaaactgctattttgattcagagaaaatatcgggcacatctttgtacaaagcatcacttacagttccttcaggtacaaaatgcagttattaaaatccagtcatcatacagaagatggatgataaggaaaaggatgcgagagatgcacagggctgctactttcatccagtctactttcagaatgcacagattacatatgagatatcaggctttgaaacaggcctccgttgtgatccaacagcaataccaagcaaatagagctgcaaaactgcagaggcagcattatctcagacaaagacactctgctgtgatccttcaggctgcattcaggggtatgaaaactagaagacatttgaagagtatgcattcctctgcaacccttattcagagtaggtttagatcattactggtgaggagaagattcatttccctcaaaaaagctactatttttgttcagaggaaatatcgagccaccatttgtgccaaacataaattgtaccaattcttgcacttaagaaaggcagccattacaatacagtcatcttacagaagactgatggtaaagaagaagttacaagaaatgcaaagggctgcagttctcattcaggctactttcaggatgcacagaacatatattacatttcagacttggaaacatgcttcaattctaattcagcaacattatcgaacatatagagctgcaaaattgcaaagagaaaattatatcagacaatggcattctgctgtggttattcaggctgcatataaaggaatgaaagcaagacaacttttaagggaaaaacacaaagcttctatcgtaatacaaagcacctacagaatgtataggcagtattgtttctaccaaaagcttcagtgggctacaaaaatcatacaagaaaaatatagagcaaataaaaagaaacagaaagtatttcaacacaatgaacttaagaaagagacttgtgttcaggcaggttttcaggacatgaacataaaaaaacagattcaggaacagcaccaggctgccattattattcagaagcattgtaaagcctttaaaataaggaagcattatctccacattagagcaacagtagtttctattcaaagaagatacagaaaactaactgcagtgcgtacccaagcagttatttgtatacagtcttattacagaggctttaaagtacgaaaggatattcaaaatatgcaccgggctgccacactaattcagtcattctatcgaatgcacagggccaaagttgattatgaaacaaagaaaactgcaattgtggttatacagaattattataggttgtatgttagagtaaaaacagaaagaaaaaactttttagcagttcagaaatctgtacgaactattcaggctgcttttagaggcatgaaagttagacaaaaattgaaaaatgtatcagaggaaaagatggcagccatttgttaaccaatctgcactctgctgttacagaagtaaaactcagtatgaagctgttcaaagtgaaggtgttatgattcaagagtggtataaagcttctggccttgcttgttcacaggaagcagagtatcattctcaaagtagggctgcagtaacaattcaaaaagctttttgtagaatggtcacaagaaaactggaaacacagaaatgtgctgccctacggattcagttcttccttcagatggctgtgtatcggagaagatttgttcagcagaaaagagctgctatcactttacagcattattttaggacgtggcaaaccagaaaacagtttttactatatagaaaagcagcagtggttttacaaaatcactacagagcatttctgtctgcaaaacatcaaagacaagtctatttacagatcagaagcagtgttatcattattcaagctagaagtaaaggatttatacagaaacggaagtttcaggaaattaaaaatagcaccataaaaattcaggctatgtggaggagatatagagccaagaaatatttatgtaaagtgaaagctgcctgcaagattcaagcctggtatagatgttggagagcacacaaagaatatctagctatattaaaagctgttaaaattattcaaggttgcttctataccaaactagagagaacacggtttttgaatgtgagagcatcagcaattatcattcagagaaaatggagagctatacttcctgcaaagatagctcatgaacacttcttaatgataaaaagacatcgagctgcttgtttgatccaagcacattatagaggatataaaggaaggcaggtctnnnnnnnnnnnnnnnnnnnnnnnnnnnnnnnnnnnnnnnnnatatacgagccagggaggctggaaagcatgaaaggataaaatatattgaatttaaaaaatctacagttatcctacaagcactggtgcgtggttggctagtacgaaaaagatttttagaacagagagccaaaattcgacttcttcacttcactgcagctgcatattatcacctgaatgctgttagaattcaaagagcctataaactttacctggctgtgaagaatgctaacaagcaggttaattcagtcatctgtattcagagatggtttcgagcaagattacaagaaaagagatttattcagaaatatcatagcatcaaaaagattgagcatgaaggtcaagaatgtctgagccagcgaaatagggctgcatcagtaatacagaaagcagtgcgccattttctcctccgtaaaaagcaggaaaaattcactagtggaatcattaaaattcaggcattatggagaggctattcttggaggaagaaaaatgattgtacaaaaattaaagctatacgactaagtcttcaagttgttaatagggagattcgagaagaaaacaaactctacaaaagaactgcacttgcacttcattaccttttgacatataagcaccnnnnnnnnnnnnnngagngcttaaaacactagagggtagttactagattgtctccactttgttgtgagaacatggcccagagtggagcaatttctaaaatatttgttttgatccgaagttgtaatcgcagtattccttgtatggaagtcatcagatatgctgtgcaagtcttgcttaatgtatctaagtatgagaaaactacttcagcagtttatgatgtagaaaattgtatagatatactattggagcttttgcagatataccgagaaaagcctggtaataaagttgcagacaaaggcggaagcatttttacaaaaacttgttgtttgttggctattttactgaagacaacaaatagagcctctgatgtacgaagtaggtccaaagttgttgaccgtatttacagtctctacaaacttacagctcataaacataaaatgaatactgaaagaatactttacaagcaaaagaagaattcttctataagcattccttttatcccagaaacacctgtaaggaccagaatagtttcaagacttaagccagattgggttttgagaagagataacatggaagaaatcacaaatcccctgcaagctattcaaatggtgatggatacgcttggcattccttattagtaaatgtaaacattttcagtatgtatagtgtaaagaaatattaaagccaatcatgagtacgtaaagtgatttttgctctctgtgtacaacttttaaaatctgactttgttttaaaaaaacataaactgttcattacattcttcatttttatcatttatagttttatgcatgtaataaactaatatgtcataagatgaaaaaaaaa

SEQ ID NO: 6116 - DNA, 1234 bp, Homo sapiens
ggaagcaggtggtaccggtcttttgtgttagcgccctttaaagggtgactcgtcccacttgtgttctctctcctggtgcagagttgcaagcaagtttatcagagtatcgccatgaagttcgtcccctgcctcctgctggtgaccttgtcctgcctggggactttgggtcaggccccgaggcaaaagcaaggaagcactggggaggaattccatttccagactggagggagagattcctgcactatgcgtcccagcagcttggggcaaggtgctggagaagtctggcttcgcgtcgactgccgcaacacagaccagacctactggtgtgagtacagggggcagcccagcatgtgccaggcttttgctgctgaccccaaatcttactggaatcaagccctgcaggagctgaggcgccttcaccatgcgtgccagggggccccggtgcttaggccatccgtgtgcagggaggctggaccccaggcccatatgcagcaggtgacttccagcctcaagggcagcccagagcccaaccagcagcctgaggctgggacgccatctctgaggcccaaggccacagtgaaactcacagaagcaacacagctgggaaaggactcgatggaagagctgggaaaagccaaacccaccacccgacccacagccaaacctacccagcctggacccaggcccggagggaatgaggaagcaaagaagaaggcctgggaacattgttggaaacccttccaggccctgtgcgcctttctcatcagcttcttccgagggtgacaggtgaaagacccctacagatctgacctctccctgacagacaaccatctctttttatattatgccgctttcaatccaacgttctcacactggtagaagagagtttctaatcagatgcaacggcccaaattcttgatctgcagcttctctgaagtttggaaaagaaaccttcctttctggagtttgcagagttcagcaatatgatagggaacaggtgctgatgggcccaagagtgacaagcatacacaactacttattatctgtagaagttttgctttgttgatctgagccttctatgaaagtttaaatatgtaacgcattcatgaatttccagtgttcagtaaatagcagctatgtgtgtgcaaaataaaagaatgatttcagaaataaaaaaaaaaaaaaaaaaaaaaaaaaaaaaaaaaaaaaaaaaaaaaaaaaaaaaaaaaaaaaa

SEQ ID NO: 6117 - DNA, 1337 bp, Homo sapiens
caccaaaaagcttaaaaaaataaagctgtgtctttagggagacccaataaagaatgcaatccatgccataagcaggagttgatacaccaccttattagctaaaaatatatataacacaatatgagtaatgtttaagatctgttttaaatttaaaacaatgaattgaatgctctaagaggctcctacaggcgctccaggccactctcagagactcccagggagttgttgaactatatttggagaaaacagccactgaatattatcatttctcctttaaagagagtttgtaaggggggaacatgcattttatcagacaatttatccaaagcattgcagaacatgagtgctgatgagggcacctcttgtgctgagtcccctcagctatcagtgttcttctcaaggacacatttggaaggttttaacattgaaagtgagcggaggacttgggggcagagcagcacaaagaaacagccttacactgggcacatggaggagacgtccaccctgcagccaggactggggttcacgtcactgccagagctacactcgccttctgcttccacggtcctgttaattctagatcagagagcaagaaaaaagtacagaacatatcctctacggttatttcctgctttctaattaaaaaaataataaccatggcaagagagaaagaaagagaaagtactcagaggctgacactgacatttcacttcctcgctctcctaagtttaattacaacagcacgtgcagccacgtcagccaaatgacttcatttctgatgtgaaaacgcttaggccatgatgtcgttcattttctgtaattgctgccttttctcattctgttaatagtcccggcaaccagatttcagtggggcatgacgtgaatgtgtatatggtgattcaaatgcaaaatttgtttatggggcttttaatcgaacgcgtgtgtgcctgaacattcttgctcaagttgatgaatcatggggtggaataaaggctgagtttagtttttcactttagcaaaggggcaatggggtgcctactatgtgcgagacattgggaggggcttctgaattatcctggatatcgtcattttgcagtgtgcataattttgccaaccgttgctttcgtagcccctgctaagtgttgactttttaaaatataagtttattgtaaaagtgacatgaaaattacaacagatattccagaccaaaataatacaacaatcccagcaactgattgagtcagtgtttgctgtttcccctgcactttcctagttcttaagcatttgcgtatgtaaacattcatatttgcaataaaaaagtgagcttttatattcta

SEQ ID NO: 6118 - DNA, 3400 bp, Homo sapiens
  misc_feature (47)..(74): n is a, c, g, or t
  misc_feature (3389)..(3393): n is a, c, g, or t
gtacagcatcacttgccccatcattgtgccttttgggttgctctacnnnnnnnnnnnnnnnnnnnnnnnnnnnnataacatgtactactcctttgcacccaccaaactgaacgagcagatccacatggctgccgtctcccaggccatctttgcgccactcttgggtctgttctggatgctgttcttctccatcctgcggttgggttctctccacgccatcaccatcttttccctgtccaccctcctcattgccatggtgattgcctttgttggcatttttctggggaagcttcggatggttgccgactacgagcccgaggaggaggagatccagacagtgtttgacatggagccaagcagcacctcctccacgcccacctccctcctgtatgtggccaccgtgctgcaagaaccggagttgaatctgacccccgcctcctccccagccaggcacacctatggcaccatgaacaaccagccggaagagggagaagaagagagtggtctgaggggctttgcgagggagctagactcggcccagttccaggaagggctggaactggagggccagaaccagtaccactgaccgggacctgaggcctccactggcgacttgttgaggggtcaggggagggcctggcaaggggaggcaggagggtggcctggacctccccactacctcctgcagactttgagaagcccacagtggagacatccaccaccccagccatgggccatacgggggtcctgacctgctgcccggctggaactgggggtgctcggcagtgctgaaggagcctgggaagggatgggaggatacaggcaagcacatgtcttgagagaggtggctggagccccggcacagagactgaacgctggggtcccttcctgggaccaagatggagaaggtgttcctaagggaggagacagaaggaggctgccgaaggctctgtggggtcatcaccactctgcatcagctgcccttccaaggagcttctgctgctgctcctcctcccagccccggcccattcctcccctgcagtctgaggaggcaaaggtatgtgcacggggcacattgacaggacacggaggaccacctcatcacagggttccctgcatggggatctgtaaagagaaagtttctgcacccaccagagcaagagccaactgaaagcgtagacctgagaagaggtaactcagccccttcctgctcctctgccctcatcagatgtccccaggagcagcagggcagaggcccttctttctattcttacaagggtagctagagcgtgatcactcagggctcatcaaatgagactcgtgtgcatttttcagaaggaaaccttggttagtccttgctgggtaacacaaagtggggtgagacgacagaagccgaattcatggaaggggggtcttctccccaaaactctgtgtggtgggaaaccagctatacctccccaagccccagggcctaaagagaagaccccctaagccaaagatgtggccacttaaaagcgtctcctgcctcctacccaactgagtgcctgggcccccagcttggccaagatgggcagtacgttagggtaagaaccccatgcttcaaacttaaggactgaccatcacctgcgtcccaagtaggacccttcctcccttctcggggctgcccctgcaccctgccttgaagaccacccaagcggcctccagtgtgggcctggtccagacattgcagatgcttcaaccgtgatgtcgccccaggcctgccaggggtgtggtggaggggaaggccacgtgctccagggagaagccctttctggagaagcaaggctgtcctcccagggctgccactaccagagacctgggggagctgaattccgaacagtgatggtgacactcagcacctttgccacagccggggggaaccggcttctgcctctgggatgggctctcatcaggaccaccgtgcagcccagccagggaggacatgagaagggccagtgggggcctcaatgaaccagaacaagccaagctgaatggggtctgtgtgctccagggccctcttcagccccctcccccaaaggtctgggtccctgccaccaacctactgaaggccggcccccggctcacctcacctgagcacctgcaccaggccccaggcacatggctgccctgaactcagatcacctagaccttgtccctgccccacctttgccccatcctagccccagaagctccaagcttcaccgcaggtgagaaattgtgctcaatgggcagaaactgctatacccccagggcatggcccacattttggcatgagggtgtctttccagagagcttgggttggctggagagaggctgtctttcccattccttgtccagctaggaataaaggggaaatggtcctagcctggcccctacacacccaggtcccacaggccccctccccactggaatttcaccaaccaacaaggggaaagtacgctgttacagcatagcggtcaggcccagcaggagcttggcacatgatggggaggtggccagctccaggccctgcccgaccccatcatgtgtatttggtgtatggggtgtggggggtcacaccagaagctggcctggggtctcttctttgctggacacagctccctggcccctgcccccagcccctgcagcccctgccggactgtggagaccaaatatggaggaaggccatggcagacaatgtggcgggatgactgggggcttctccctctgaacctgggtccagtgtagcctggctctgagagaaggtggtgagcatgtggagaaggttccatagtccactcttaggggaaccagcaaagcctcatggcagttggctccatctggacctcccatggtcactacaggatggtggagcagggggcatcttttagcctccccccgccaccacatccaggccctctcaggcacctcctgcctcagcccacacctgcctcacccattgcccccctccccccacctactgccatcccactcctctgccagccacttcccagccgccccaccccactccatccaccaaatcacctcctgacttaatcctttctggaaggagctgccgcccaggaaccggtattgcctagagcctccaggaggggccctcctcaggcctccagtggccccatgcccacctgcctgaccctccactgcccctggaagcaaagtgcctatcagcagcgttgcgtcctctggggcccccggtcgggggggagggggtgtgggctaaccttggccaccaccacaaaaggaatgtgccagaatgctgaaccttcttgttaatgctatgaccgtgccttgaataaacaagtcctcccaacctcaaaaaaaaaaaaaaaaaaaaaaaaaaaaaaaannnnnagtagta

SEQ ID NO: 6119 - DNA, 1130 bp, Homo sapiens
  misc_feature (440)..(466): n is a, c, g, or t
tagcacttcatagactgctatcacgcattcatttttactagtacctattgaacactaagttccaggcactgggctaggcactgggatggtgtggtgagcaaaaactgaccagtcctgccgtggagtttgctgggggagacacatgttactcaaagaatcacactaaggatagcaatttatctcaaagctgcaagttcctgccatctacatgtgcccagagtccccaaaattgagtgtcaaacagaggctgggtgacctcctgtccaggattgctctcatcgtatgaatcgaagttttcatcttaacgtgtttttttctcctgagaataggccaaccaatcaatggctcagacagataagccaacatgcatcccgccggagctgccgaagatgctgaaggagtttgccaaagccgccattagggtgcagccgcaggacctnnnnnnnnnnnnnnnnnnnnnnnnnnnggccctgtcccgtggagagacgcctccggtgagagagcggtctgagcgagtcgctttgtgtaaccgggcagagctaacacctgagctgttaaagatcctgcattctcaggttgctggcagactgatcatccgtgcagaggagctggcccagatgtggaaagtggtgaatctcccaacagatctgtttaatagtgtgatgaatgtgggtcgcttcacggaggagatcgagtggctgaagtttttagcccttgcttgcagcgctctgggagttactattaccaaaactctcaagatagtgtgtgaggtcttatcatgtgaccataatggtgggtcgccccggatcccgttcagcaccttccagtttctctacacgtatattgccaaagtggatggggagatctctgcatcacatgtcagcaggatgctaaactacatggaacaggaagtaattggccctgatggtataatcacagtgaatgactttacccaaaaccccagggttcagctggagtaaaagcacaattttggcaattttaaaggaagatacagagatgattgtacttcagaatgactgaaacccatataccacccaaaatccattttcttgtacaactggtacacactaataaacaattaaaaaaaaaaaatcagaaaaaaaaaaaaa

SEQ ID NO: 6120 - DNA, 1744 bp, Homo sapiens
ggcacgaggcgacttcctctttccagtgcatttaaggcgcagcctggaagtgccagggagcactggaggccacccagtcatgggggacaccttcatccgtcacatcgccctgctgggctttgagaagcgcttcgtacccagccagcactatgtgtacatgttcctggtgaaatggcaggacctgtcggagaaggtggtctaccggcgcttcaccgagatctacgagttccataaaaccttaaaagaaatgttccctattgaggcaggggcgatcaatccagagaacaggatcatcccccacctcccagctcccaagtggtttgacgggcagcgggccgccgagaaccgccagggcacacttaccgagtactgcagcacgctcatgagcctgcccaccaagatctcccgctgtccccacctcctcgacttcttcaaggtgcgccctgatgacctcaagctccccacggacaaccagacaaaaaagccagagacatacttgatgcccaaagatggcaagagtaccgcgacagacatcaccggccccatcatcctgcagacgtaccgcgccattgccgactacgagaagacctcgggctccgagatggctctgtccacgggggacgtggtggaggtcgtggagaagagcgagagcggttggtggttctgtcagatgaaagcaaagcgaggctggatcccagcatccttcctcgagcccctggacagtcctgacgagacggaagaccctgagcccaactatgcaggtgagccatacgtcgccatcaaggcctacactgctgtggagggggacgaggtgtccctgctcgagggtgaagctgttgaggtcattcacaagctcctggacggctggtgggtcatcaggaaagacgacgtcacaggctactttccgtccatgtacctgcaaaagtcggggcaagacgtgtcccaggcccaacgccagatcaagcggggggcgccgccccgcaggtcgtccatccgcaacgcgcacagcatccatcagcggtcgcggaagcgcctcagccaggacgcctatcgccgcaacagcgtccgttttctgcagcagcgacgccgccaggcgcggccgggaccgcagagccccgggagcccgctcgaggaggagcggcagacgcagcgctctaaaccgcagccggcggtgcccccgcggccgagcgccgacctcatcctgaaccgctgcagcgagagcaccaagcggaagctggcgtctgccgtctgaggctggagcgcagtccccagctagcgtctcggcccttgccgccccgtgcctgtacatacgtgttctatagagcctggcgtctggacgccgagggcagccccgacccctgtccagcgcggctcccgccaccctcaataaatgttgcttggagtggaaaaaaaaaaaaaaaaaaaaaaaaaaaaaaaaaaaaaaaaaaaaaaaaaaaaaacagaagtacacaagactggggcgcggacgcgacagcagaagtagcacacgaccggagggcgggcacaacacagaaacacacgccgacaacgcgagcgcggtacgcgagagaccagaacggtgggccccactcagcggagagacggagataacataacaaagacgacgagacacagagcaaaagcaaccgacagggcgaggcggcaccacgcggcgagacgagacactcgaagaccggaaaaccacaagcggacgggggaggacataggcgagccagaaacccac

SEQ ID NO: 6121 - DNA, 1942 bp, Homo sapiens
  misc_feature (1706)..(1732): n is a, c, g, or t
ttttctgtatttttaacttttatttagaacagaggtctcttggactctcagccccagcttgactactttgtgccactgggagtactccctttcctcttcttcacaccatcaggaaaggcaggctgagagttacgctgcttgactctgcctcggtctatcccacaggtgatcacttactccagtcatcatgtctacaataacttgactgaggaacagaagggccgagtggctttgcttccaatttcctggcaggagatgcctccttgcagattgaacctctgaagcccagtgatgagggccggtacacctgtaaggttaagaattcagggcgctacgtgtggagccatgtcatcttaaaagtcttagtgagaccatccaagcccaagtgtgagttggaaggagagctgacagaaggaagtgacctgactttgcagtgtgagtcatcctctggcacagagcccattgtgtattactggcagcgaatccgagagaaagagggagaggatgaacgtctgcctcccaaatctaggattgactacaaccaccctggacgagttctgctgcagaatcttaccatgtcctactctggactgtaccagtgcacagcaggcaacgaagctgggaaggaaagctgtgtggtgcgagtaactgtacagtatgtacaaagcatcggcatggttgcaggagcagtgacaggcatagtggctggagccctgctgattttcctcttggtgtggctgctaatccgaaggaaagacaaagaaagatatgaggaagaagagagacctaatgaaattcgagaagatgctgaagctccaaaagcccgtcttgtgaaacccagctcctcttcctcaggctctcggagctcacgctctggttcttcctccactcgctccacagcaaatagtgcctcacgcagccagcggacaactgtcaactgacgcagcaccccagccagggctggccacccaggcatacagcctagtggggccagaggtgagaggttctgaaccaaagaaagtccaccatgctaatctgaccaaagcagaaaccacacccagcatgatccccagccagagcagagccttccaaacggtctgaattacaatggacttgactcccacgctttcctaggagtcagggtctttggactcttctcgtcattggagctcaagtcaccagccacacaaccagatgagaggtcatctaagtagcagtgagcattgcacggaacagattcagatgagcattttccttatacaataccaaacaagcaaaaggatgtaagctgattcatctgtaaaaaggcatcttattgtgcctttagaccagagtaagggaaagcaggagtccaaatctatttgttgaccaggacctgtggtgagaaggttggggaaaggtgaggtgaatatacctaaaacttttaatgtgggatattttgtatcagtgctttgattcacaattttcaagaggaaatgggatgctgtttgtaaattttctatgcatttctgcaaacttattggattattagttattcagacagtcaagcagaacccacagccttattacacctgtctacaccatgtactgagctaaccacttttaagaacttcaaaagattctccttcctcagtcccccaagtagcttggattataggtgtgcgccaccacgtacagctaatttttgtatttttagtagagatggnnnnnnnnnnnnnnnnnnnnnnnnnnnctcaaaacgcctgacctcaggtgatccacccacctcggccccacaaagtgctaggattacaggtgtgagccaccatgcccggcccagaatactttttaaaagaagagcaggttagaggaaagaaaaaaattgatgctgaatgtggtgatgaaagcatgtttctaaaatgggaagcagatgcttaaagaggaaagataatctgggattttg

SEQ ID NO: 6122 - DNA, 2733 bp, Homo sapiens
  misc_feature (680)..(700): n is a, c, g, or t
  misc_feature (2725)..(2725): n is a, c, g, or t
  misc_feature (2729)..(2729): n is a, c, g, or t
  misc_feature (2731)..(2731): n is a, c, g, or t
ccgccatggtccccgacaccgcctgcgttcttctgctcaccctggctgccctcggcgcgtccggacagggccagagcccgttgggtaagccgcgttagcacccgcgccgtgcccacggccccacaacggactgtaggacccgtgagaggcccgggatccaggctgtttggggctcacggactgttcgtaggggacgtgccgggcgcagaaagcaggtggcgggaccgagactagaggagcgcagtggggcctcggaggtccgggttcgctgcaacggtgggagttggtggtgggattccccggccccatgacgcctcaccaggtcccctgccgccgcaggctcagacctgggcccgcagatgcttcgggaactgcaggaaaccaacgcggcgctgcaggacgtgcgggagctgctgcggcagcaggtcagggagatcacgttcctgaaaaacacggtgatggagtgtgacgcgtgcgggatgcagcagtcagtacgcaccggcctacccagcgtgcggcccctgctccactgcgcgcccggcttctgcttccccggcgtggcctgcatccagacggagagcggcgcgcgctgcggcccctgccccgcgggcttcacgggcaacggctcgcactgcaccgacgtcaacgagtgcaacgcccacccctgcttcccccgagtnnnnnnnnnnnnnnnnnnnnncggggttccgctgcgaggcttgcccgccggggtacagcggccccacccaccagggcgtggggctggctttcgccaaggccaacaagcaggtttgcacggacatcaacgagtgtgagaccgggcaacataactgcgtccccaactccgtgtgcatcaacacccggggctccttccagtgcggcccgtgccagcccggcttcgtgggcgaccaggcgtccggctgccagcggcgcgcacagcgcttctgccccgacggctcgcccagcgagtgccacgagcatgcagactgcgtcctagagcgcgatggctcgcggtcgtgcgtgtgtgccgttggctgggccggcaacgggatcctctgtggtcgcgacactgacctagacggcttcccggacgagaagctgcgctgcccggagcgccagtgccgtaaggacaactgcgtgactgtgcccaactcagggcaggaggatgtggaccgcgatggcatcggagacgcctgcgatccggatgccgacggggacggggtccccaatgaaaaggacaactgcccgctggtgcggaacccagaccagcgcaacacggacgaggacaagtggggcgatgcgtgcgacaactgccggtcccagaagaacgacgaccaaaaggacacagaccaggacggccggggcgatgcgtgcgacgacgacatcgacggcgaccggatccgcaaccaggccgacaactgccctagggtacccaactcagaccagaaggacagtgatggcgatggtataggggatgcctgtgacaactgtccccagaagagcaacccggatcaggcggatgtggaccacgactttgtgggagatgcttgtgacagcgatcaagaccaggatggagacggacatcaggactctcgggacaactgtcccacggtgcctaacagtgcccaggaggactcagaccacgatggccagggtgatgcctgcgacgacgacgacgacaatgacggagtccctgacagtcgggacaactgccgcctggtgcctaaccccggccaggaggacgcggacagggacggcgtgggcgacgtgtgccaggacgactttgatgcagacaaggtggtagacaagatcgacgtgtgtccggagaacgctgaagtcacgctcaccgacttcagggccttccagacagtcgtgctggacccggagggtgacgcgcagattgaccccaactgggtggtgctcaaccagggaagggagatcgtgcagacaatgaacagcgacccaggcctggctgtgggttacactgccttcaatggcgtggacttcgagggcacgttccatgtgaacacggtcacggatgacgactatgcgggcttcatctttggctaccaggacagctccagcttctacgtggtcatgtggaagcagatggagcaaacgtattggcaggcgaaccccttccgtgctgtggccgagcctggcatccaactcaaggctgtgaagtcttccacaggccccggggaacagctgcggaacgctctgtggcatacaggagacacagagtcccaggtgcggctgctgtggaaggacccgcgaaacgtgggttggaaggacaagaagtcctatcgttggttcctgcagcaccggccccaagtgggctacatcagggtgcgattctatgagggccctgagctggtggccgacagcaacgtggtcttggacacaaccatgcggggtggccgcctgggggtcttctgcttctcccaggagaacatcatctgggccaacctgcgttaccgctgcaatgacaccatcccagaggactatgagacccatcagctgcggcaagcctagggaccagggtgaggacccgccggatgacagccaccctcaccgcggctggatgggggctctgcacccagccccaaaggggtggccgtcctgagggggaagtgagaagggctcagagaggacaaaataaagtgtgtgtgcagggaaaaaaaaaaaaaaaaaaaaaaaaaaaaaaaaaaaaaaaaagaaaganaaananaa

SEQ ID NO: 6123 - DNA, 6451 bp, Homo sapiens
  misc_feature (4308)..(4344): n is a, c, g, or t
cacacagaagcggcagccaccgaggagggagcagtgccgggagccccgacggcgccttgctgcatggagctgggccgctgacagctgtcgtgcccgcagcctctgacctccctgggaccccggcgtctgaggctcatagtctgctccctgtcttctgtcagcctcagggcatccagcgtctcaggccgacctgtccctgggacccggcgtttcgcttctcagccatggagcggtgcagccgctgccatcgcctcctcctcctcctacctctggtgctggggctgagcgcggccccaggctgggcaggtgcaccccctgtggatgtgctccgggccctgaggttcccctccctccctgatggtgtccggagagcgaaaggcatctgtccagctgatgtggcctaccgagtggcacgacctgcccagctcagtgcacccactcgccagcttttcccaggaggatttcccaaagatttctctctgctgactgttgtccggacccgccctggtctccaagctcccctcctgactctctacagtgcccagggtgtccgacagctgggcctggagctgggccgacctgtccgcttcctgtatgaagaccagacagggcggcctcaacctccctctcagccagtcttccgaggcctcagcctagcagatggcaagtggcaccgtgtggctgtggctgtgaagggccagtctgtcaccctcattgttgactgcaagaagcgagtcacccggcctctcccccgaagtgctcgtccagtattggacacccatggagtgatcatctttggtgcccgtattctggatgaagaagtctttgagggtgatgtccaggagctggccattgtcccaggggtccaggcagcctatgaatcatgtgaacagaaggagctggaatgcgaggggggccagagggaaagaccccaaaaccaacagcctcacagagcccagagatctccacagcagcaaccatcaagacttcacaggccacaaaatcaggaaccccagagccagcccactgagtctctctactatgactacgagcccccctattatgatgtgatgactacggggacaacccctgattatcaggaccccaccccaggtgaagaggaagaaatcctggagtcgagcctcttgccaccccttgaggaggagcagacagatctccaggtcccccccacagccgacaggttccaggcagaggaatatggggagggtggcacagacccccctgaagggccctacgattacacctatggctatggggatgattatcgtgaggagacagagcttggccctgccctctctgcggagacagcccactcaggagccgctgcccatggaccccgagggctgaagggagagaaaggagagcctgcagtgttggaacctggtatgctcgtggaggggccccctggcccagaagggcctgcgggattgattggtccccctggcatccaggggaacccaggcccagttggagaccctggagagaggggcccccctggccgagcagggctccctggatcagatggggctcctggtcctcctggcacatctctcatgctcccattccggtttggcagtggtgggggtgacaagggccctgtggtggcggcccaggaggctcaggcccaggcgatcctgcagcaggcgaggctggcgctccgtggaccccctggccccatgggatacacagggcgccctggacccttgggccaacctgggagccctggcctgaaaggagagtctggagacttaggacctcagggccccagaggacctcagggcctcacaggctccctgggcaaggctgggcgaaggggccgggcaggtgctgatggagcccgagggatgcctggagatcctggagtgaagggtgaccgaggttttgatggactcccagggctccctggagagaagggccataggggtgatactggtgcccagggccttcctggtccccctggtgaggatggagagaggggagatgacggggagattgggcctcgagggctgcctggagagtcgggacctcgaggtctccttggccccaaaggcccacctggtattcctggaccccctggcgtccgaggcatggatggtccccagggccccaaagggagcttgggaccccagggagagccaggacctcctggacaacagggcacccctgggacccagggtcttcccgggccccagggtgccatcggccctcatggagagaagggtcctcaagggaagccagggctccccggcatgcctggctcagacggacccccgggtcacccagggaaggaaggtccccctggaaccaaaggaaaccagggtccctctggacctcagggacctctaggatacccaggacctcgaggggtcaagggtgtggacggaattcggggtctgaagggtcataagggtgagaagggtgaggatggctttcctgggttcaaaggtgacataggcgtgaaaggtgacaggggcgaagttggagtccctggttccaggggagaggatggtcctgaggggccaaagggacgcactggaccgactggagaccctgggcccccagggctcatgggcgagaagggcaagctgggtgttcctggtctgcctggctatcctggacgtcagggacccaaggggtccctaggatttcctggctttcctggtgccagtggagagaagggagcccggggcctgtcggggaagtcagggcctcggggagaacggggcccccacgggtccacggggtcagcggggaccccgaggtgccactgggaagtctggagctaagggaacatctggtggtgatggcccccatggcccccctggagagaggggcctccctggaccctcagggtcccaacgggtttcctggaccgaaaggacccccggggccccctgggaaggacgggctgccgggacacccaggccaaagaggagaagtgggtttccaagggaagaccggcccccctggtcctccaggagtggtgggacctcagggagcagcaggagaaaccggccctatgggggagagaggtcacccaggccccccggggccccctggagagcagggactacctgggacagctggaaaagaaggaacaaagggtgaccctggtccccctggggccccagggaaggatggtcctgctggtctgaggggattcccaggagagagaggcctcccaggcactgctggtggacctggtttgaaggggaatgaaggtccgtctggcccccctggccctgcaggctcccctggggaacgaggtgcagcaggatcagggggacccattggtcgccaggggcgcccaggcccgcagggtccccctggagcagcaggagagaaaggtgtcccaggtgagaagggccccattggcccgactggccgagatggagtgcagggtcctgtggggcttcctggtcctgctgggcctccaggtgtggctggagaggatggagacaagggtgaggtgggggtacccggacagaagggcaccaaagggaacaagggtgaacatggccctcctggaccccctggacccattggtcctgtggggcagcctggagcagcgggaggagatgggggagcccggaggcctcggggaccccagggacactttggagccaaaggtgatgaaggaacaagaggattcaatgggcccccaggacccattggcctacagggtttgccaggcccctctggggagaagggagaaacaggagatgtgggtcctatgggaccacctggccccccaggacctcgaggtccagctggacccaatggcgctgatggcccacaaggtcccccaggaggtgttgggaacctgggtccccctggagagaagggggaaccaggagagtcaggatctccagggatccagggcgagccaggtgtcaagggtccacgcggggaacgtggagagaaaggagagtcggggcagccaggagagccagggccaccaggcgctaaaggcccacagggcgatgatggccccaaagggaaccctggtcctgttggttttcctggtgaccctggcccccctggagaaggtggccctcggggccaggatggtgctaagggtgaccgaggcgaggatggtgagccaggacagcctggatcccctggtcccaccggggagaatggacccccagggccacttggaaagcgaggtcctgctggctcgcctggttccgaggggcgacaaggagggaagggagccaagggagatcctggcgctataggtgccccggggaagacaggcccggtgggtcctgcaggcccagcagnnnnnnnnnnnnnnnnnnnnnnnnnnnnnnnnnnnnnctcagtgggtcagcaaggccgacctggagctacaggccaggctgggcccccaggtcctgtgggacccccagggctgcctggtctccggggcgatgctggagccaagggagagaagggccacccaggtctcattggactgattgggcccccgggtgagcagggagagaagggagatcggggacttcctgggcctcagggctcccctgggcagaagggtgagatgggtatcccaggagcatccggccccattggtcctggaggtccccccggcctccccggacctgctggccccaaaggagccaaaggagccacaggcccaggcggacccaagggagagaagggtgtgcagggccctccaggacacccgggtcccccaggcgaggtgatccagccactgcccattcagatgcccaagaagactcggcgctcggtggatggaagccgtctgatgcaggaagatgaggccataccgaccgggggagcccccggcagtcctggggggctggaggagatctttggctcactcgactccctgcgggaggagatcgagcagatgaggcggccaacagggacccaggacagccctgctcgcacctgccaggacctgaagctgtgccacccagagcttcccgatggagagtactgggtcgaccccaaccagggctgtgctcgggatgccttccgagttttctgcaacttcacagcagggggtgagacctgtgtgacgcctagggatgacgtcacgcagttctcttacgtggactcagagggctccccagtgggtgtggtccagctcaccttcctgcggctgctcagcgtctcagcccaccaggacgtctcctacccctgctctggagcagcccgtgacggtcccctgagactccgtggggccaatgaggatgagctgagcccggagactagcccctatgtcaaagaattcagagatggctgccagacacagcaaggccggacggtgctggaggtgcgaacgcctgtgctggagcagctgccagtgctggatgcctccttctcagacctgggagccccaccgaggcggggaggggtgctgctggggcctgtctgcttcatgggataggaccgtctctgtctgatcctgtccattcggtaccaggcccacctggaatcccacaacatcagctctgtgccacctcccaagagggctcctcactatctagggagccctgggccagggctggagagccctcagtcggggcaggccaggggaggggtgaagtggttgcctggacaccccacgggaggagtggcatctgggctcttggccctcccacctggagcctgttacccgttagagagctgagagcccttatttaaaactcacctcccaatcaccccaaacaaatggaagagaagagaaaggacatggcgtattttgtatttaaaagtaattgtattaattatttaaagtgtggaaagcaaaataacaaaaaagagaaacgccaacaaaaaatcagcagatgttgaagacaggggtctcgggggtgggctccggcacccacatctgagtcaggactttcctcagtgactgtgtgtaggggggttcagggctgaacccacctccctcccaccttcctcccacctcacctgtcgcacccactgtgaaagttggaatatgtggtctccctggcctcagggctctgactctgccagggtggggctctctaacccacaggtgttggctgcctggcccatgtgcccactgtctcttccacttggtctgggtttggcaggcactgcctgctacttgagggccaggatgctcccccagggaagaaacggaatagtgtggggtgtgtgcagggctgcatcccgcagatggctggaatattaaaattcttctatattggctggtaaattgccatggccctgagccactgagtatgttcattgccacccctgtccctcccctgggcacccctcactttccctgatcctgcaattaaagggttaatgtgtggcatatggaagggactcccaggaccctgtgcccagcttccatgctgactgatggttaaataatgtgattgtctcctcccaggaaaaaaaaaaaaaaaaaaaaaaaaaaaaa

SEQ ID NO: 6124 - DNA, 1641 bp, Homo sapiens
gagtgagtgagagggcagaggaaatactcaatctgtgccactcactgccttgagcctgcttcctcactccaggacttctctgccctctcactcccttgagcctgcttcctcactccaggactgccagaggaagcaatcaccaaaatgaagactgctttaattttgctccacattttcggaatggcctgtgctttctcaatgaaaaatttgcatcgaagagtcaaaatagaggattctgaagaaaatggggtctttaagtacaggccacgatattatctttacaagcatgcctacttttatcctcatttaaaacgatttccagttcagggcagtagtgactcatccgaagaaaatggagatgacagttcagaagaggaggaggaagaagaggagacttcaaatgaaggagaaaacaatgaagaatcgaatgaagatgaagactctgaggctgagaataccacactttctgctacaacactgggctatggagaggacgccacgcctggcacagggtatacagggttagctgcaatccagcttcccaagaaggctggggatataacaaacaaagctacaaaagagaaggaaagtgatgaagaagaagaggaggaagaggaaggaaatgaaaacgaagaaagcgaagcagaagtggatgaaaacgaacaaggcataaacggcaccagtaccaacagcacagaggcagaaaacggcaacggcagcagcggaggagacaatggagaagaaggggaagaagaaagtgtcactggagccaatgcagaaggcaccacagagaccggagggcagggcaagggcacctcgaagacaacaacctctccaaatggtgggtttgaacctacaaccccaccacaagtctatagaaccacttccccaccttttgggaaaaccaccaccgttgaatacgagggggagtacgaatacacgggcgtcaatgaatacgacaatggatatgaaatctatgaaagtgagaacggggaacctcgtggggacaattaccgagcctatgaagatgagtacagctactttaaaggacaaggctacgatggctatgatggtcagaattactaccaccaccagtgaagctccagcctgggatgaattcatccattctggctttgcatccggctaccattttcgaagttcaactcaggaaggtgcaatataacaaatgtgcatattataatgaggaatggtactaccgttccagattttctgtaattgcttctgcaaagtaataggcttcttgtcccttttttttctggcatgttatggaatgatcattgtaaatcaggaccatttatcaagcagtacaccaactcataagatcaaatttcattgaatggtttgaggttgtagctctataaatagtagtttttaacatgcctgtagtattgctaactgcaaaaacatactctttgtacaagaagtgcttctaagaatttcattgacattaatgacactgtatacaataaatgtgtagtttcttaatcgcactacctatgcaacactgtgtattaggtttatcatcctcatgtatttttatgtgacctgtatgtatattctaatctacgagttttatcacaaataaaaatgcaatccttcaaaaaaaaaaaaaaaaaaaaa

SEQ ID NO: 6125 - DNA, 4127 bp, Homo sapiens
  misc_feature (10)..(10): n is a, c, g, or t
  misc_feature (612)..(655): n is a, c, g, or t
  misc_feature (2343)..(2393): n is a, c, g, or t
gcggcactgngtccgcgcggcgcgccagcaacactgcacgcaggtggcacgcggtggttcatgaaggagctgcaggacatcgcgcgccttagcagccgcttcatctccgtggagctggtggacgagagcctgttcgactggaacgtgaagctgcaccaggtggacaaggactcggtgctgtggcaggacatgaaggagaccaacaccgagttcatcctgctcaacctcaccttccccgacaacttccccttctcgccgcccttcatgcgggtgctcagcccgcgcctggagaacggctacgtgctggacggcggcgccatctgcatggagctgctcacgccgcgcggctggtccagcgcctacaccgtggaggccgtcatgcgccagttcgcagccagcctggtcaagggccagggacggatctgtagaaaagctggcaaatcaaaaaagtccttcagtcgcaaggaagctgaagctacccttaagagtttggtgaagacgcatgaaaaatatggttgggtcaccccgcccgtgtccgacggctgatgtctgccacgtgcagtagacgctcgagcgcctgtccacacacacaccagtaccctgacatcttcnnnnnnnnnnnnnnnnnnnnnnnnnnnnnnnnnnnnnnnnnnnngcatcctgaatgcccaggagacgtttaagttatttatgaaaagatgtgtgtacagagaggaagagggagcaaatgccgttcggattatgtttcgattataaatgaatgatcacctcgaagtcactttagaacacatgttgagatggtgacatttcccagcctgcctgcccctctgcccaccccggtcacattgccctgagcttctttccatgacagcagctccgacgagccggcaggaaactcaatgcccctgctggctccatttccatgtaaatggcgccgttcatatttcacagggacgccgtgcatctccgccgtgcgtccccggcacgtgtttgctgtgctctgtatctctgtttttcttcctggaaggtcaacataacttgaaaatgtgtctttctgtggcccatggtccgctgtgatgacatttagacctcatttgtgctatgacctttggctcatgaaaacacaaatttaacattgccaggttctagtgatttaaaaccacaactgcccacttggtgaaaacgtgctctcgatgctgatttgtggtgtgctgctgtccacagataaaccagtgccattagatggaaggcagaggatactgcgaccacccctggcagacggtggcgtagacaccaggtgcgccctctggggctcagagcaacggatggtcaagctgcgaacagtctcgtccgatgttaggaaatggtcctacggccgcgcctttgtgttcctgtcttctctccaccaccaaaagcaaaagatgatttcccattcactgcagtcatctgactcattttaatatctgtgctagtgacaatgaatgtcagaactgccaaaggataccaagtgatcatacgatgatttgcatgatcgggtctatttcacccaatagtcacttgtgtgtcccccgaaattgggatgggtgagcacccttgctgtggtgtaaacttcctgttatttaatctcccccacggtttcatttttctcttctgttaatacttagaactttctaagaaactccatgaaatgaggaaatactgtttctaataatatgaggaaagaagtaaaaatgttcattccaagtggcaagtcttattggacacattttaaataaaatcatgcatacctgatacactgcctcaaggatccagtcattgtgggctatccttccatttaaaatatttcagatattcttaaattttttaaatattgcaaatactacaacatgtaattccagagcagcgttctaagtcaggtaccagaaatgagtcttaggaacccatagtctttgcaaaaattcagtagattgaaatagtccccagaagcagccagggagctgaagggatgattcgatcaagttcagatgttgccaattgtatcttactgctgtgaaggaggaaaagtcttccgggataatgtattcaattcttcaggcagttttgtctacttggggacctgcccattggttcaaggttttcagagatccaagaggccttgcctcaaagaacaaggattggcgcctttcagcagggctgcccattcaccaaacttattgttacttttgtttttctttaccactttcttatttgcccccaagtgcacacaggcagctctgccagaccaaaatgacagtgtattaagaatgcagggcctgctcagcttccctgtgagtcataatagtnnnnnnnnnnnnnnnnnnnnnnnnnnnnnnnnnnnnnnnnnnnnnnnnnnngtcattcatccaaccctctatggtggcattctccatcctggaaacctgacatttggctgacggtctttggaccctggagctagtggtcatcatggaattacactgtggagatgaaagacctaggacagaaacatcttgctagggaaagcacctgagtttattcctttctaaatattttcctcttctaatgaaaactaaaagcagctttactttagggggaaaaatatatccaaaggcaggtcatttcagtagtgtttattagctgattgaaaaacaggttcacggtgctctctgagaactgcaccaaggggtgcagccaagagactggtctgaccccgggttgggctgggtggcagccggcgacagagcagagagacactcagctcagtgtcgctccttccatacactcagagtttgatttttcttgcatggcatttccattaggtttgttagaaacttatagaagaaatcaattctttagtgaacgaaataccatttttcactcaattggtaagaatttttcattttaaaagcagtaggaagtgatgtaaaactctaccattgcttggactgttaggagtgcggactccctttctggtagactcccttcgtaggcaagcacggtggtgcccagccatggaggcacccttaggacactgagcacaggcctggctgcctgtgccttggccacagcctccttccaccccactgaagtggacacctgcctctggagcccagggtgagaaggagaggcctgaagcctggggccacgttcccacacaagccaaggaacctattcctctttggacagacagcgagggaataatcagacagtgggtgcaaatgttcatgtcccgatagctccacacacccatgtatctgtgggaactcaaaccaagccagagcccacagagccaaacaaacagaaaatcacaaacccatctgtcctcttctcaatgcagaactccttcccgtccaataattttcctgaaccaatcacccttgttattgggtatcttctccactgctgggtaaggcctgcacatggtctgtctgtaactttctagaagactgagaactgcttatgccttagggagttctatgtgagcagcaaggttattccccctagttacacacacacgcacatgtgccaatactcctgcaaagacttgctgtttctaaaatccactactcagaaaaaccagggtgtcggcttaaagttttcagctccatctatcaaaatttgacctttttttaagagaaaaatatgtagatgagtgaaaaagacctaggattgaaagacaaaaagccatgtgtccatgtaaccctggccagtcactccacctgcctgagccttggtttcctcagctgtgagctcctaccaggtcagtgtgggaattggccaaaatgacgcagcagaagtgctttggagactaaagattgtcaacgaaatgtaagtgtcattttcgtagtattaggacgtttacattacagcaggctttaattagaacccacttagatatcgactcagaatgatcaattacagtggttaaaatacacatacctggtaatcatatacttgctttctgtccccagttcttacattaagtcaaccaactgacccaaaaatcaaccaataactaactggccatctctccactcactcagcattctcctcttaaatgcagggcatgcagaagattaaggtacagccccttccctggataggaactc

SEQ ID NO: 6126 - DNA, 1721 bp, Homo sapiens
cggtgcgtcgtcgtaattcatcagaagcgctagcgtatgtggctctgtacggttgtgtgcggtgacactctaggtgtgtaggatcacaagggggggccagacgcggatgtgcgtcgccatgagacattattatcgcccctatttcgtaatctaagtttacttggagctctcttgacagctcgtgctggtgcatgtatgcgtccccgctgtaattgtttagcagccgactgtgtttcatgacgtctattgtgttcgtatctgtcatcatcaggggtttgatagcgcgagttctttttttttttaaggtttctaattccttagttctgtaatgaaggccattgtgtgatgtcctgtaatgctcttgtcttctattatctctatctgtacagctttgtcaccatttttgttaatttctcacttgaagtagttccaggaaatacccttaacctcagaactgttaacttgaccttataatttcctttctctttctttctttctttctttgttctgtctttcacacaaggtaagacctataaccacaaattgacaattacaaccaagttaaatcgaacctggaagggaggtagctgaaatctgtctcaaagaattattttcaaccaaatagtatttaagcattggccaggatgggaataagaccaagagaaccgtctaggcagtgactcaatgtgttgaagccaggagtggcagctgataccctgcattttcaaagccctaccatctatgacaatctttcccttccttaacaccccaattcaccatcaaaactcatttcccaaggactgtatttccttaaaaggttgttggcacagaatctgggggtaatgcaaatcctttgggtaggtagttaagattgtggcttggaaaagcttccctaaatagggcttagaggactgtccacctcatctttcatattttgctgctaacaatctaatacttcagatgcagaaccttcagtgttttagggcctttgagctgctgacacacaatagtgcatcagagctgcctctcagtgctccggtcacctacacagaagatgactgaaggaatgaaatgacgagttaattcccaggaagaaaatgaaactgggaacaaatgcattgcccaaattgagctgaccctcctccactaaggtttgaaaagaccctattaaagataccttccatgtgggcacgaggttggccaccaatcaagtagcctcttttgcctaaatatcccttggcaatataaatttgttagcaacaggtctgaatgaaagagactgggtgggtcttgattcagaagagctgaattcactctgtgagtctgaagatacaagtcagcctccaggaatctttgcttagctggatagtgtgaaaatagatgatgatgggagtgaagatagaaagaggataaggactgatttgagggaagctggtaaggttcttctgtggctcctgaaatcacatcattagtaatgtcatctttgggtcttcagagctttttgtattacctatgggtataattaagcaactgggagggttgatactgttacatttcttagcttgtaccttctaaggtagttaacaccacacaggctgataactcagggcaagagagaggcctggagagttgacaagagtgtgaagatactcggagaaggcttcccactaggatcaattcttctaatagtattcttatttcgcccggataatccgtccccc

SEQ ID NO: 6127 - DNA, 1067 bp, Homo sapiens
agcccaagatttcggcacgagggtcagtctttcagagcacaggatggaacaagaactcccagccactgactgtctcatgtatctgcaagggccgaggaaattaatgacccaaggaggctatgatatggtccaaaaacttttcctggattttttccgtaggcggctgagccagaggccaactgcagaggaactggaacagaggaacattttgaaacctcggaatgaacaagaggaacaggaggagaagagagagatcaagaggaggctaacccgaaagctcagtcaaaggcccacggtggaagagcttcgggaaagaaagatcctcatccgcttcagtgactacgtggaggtggctgacgctcaggactatgaccgcagggcagataagccgtggacccgcctcaccgctgcagacaaagctgccatccgaaaggagctcaatgaattcaaaagcactgagatggaagttcatgaattgagtagacacttaacaaggtttcaccgaccttaacagtcgaattcctcttgagtgctatgctgtcttcaaaacataaatttataagaaccataagtgctggtatttattcacttccccattacgatgtaaatcttctgaactgccttttttttaaaaagaagaaaaatcaaggaaacacaatcaggattttatgtgtgaaaacgcaaaagtgatggctcggcggtccgagctgctggtcccacttctgacaccaaaatgcatcccaacccccggcagtgccaagggcacaagcagggccctgactgaagactgtctggcaggtggaacgggtccttgtcctctccagccaggcccagcaggcacttaccttcatggaagtctccaggcaaacctcttcctcacaagtgtctgtcatctgagtccaaaggaaaggctggaatggggtggcaagtatgattgtggattaccgggccagtcggtccgaatgatggtgggctgattggcaagggaccagcggttgctgacacagaaagggtgggggctgagggaccctggagcgggaggcaaatgggggtcgtgtaggagaacg

SEQ ID NO: 6128 - DNA, 1803 bp, Homo sapiens
  misc_feature (1568)..(1568): n is a, c, g, or t
  misc_feature (1698)..(1698): n is a, c, g, or t
gggcggaggagcgatttgaacgcgagcggcgcggacttctgccaagcaccggctcatgtgaggctcgcggcacagcgttctctgggctccccagaagccagcctttcgctcccggacccggcagcccgagcaggagccgtgggaccgggcgccagcaccctctgcggcgtgtcatgggcccgcgccgccggagccgaaagcccgaggccccgaggaggcgcagcccgagcccgaccccgacccccggcccctcccggcggggcccctccttaggcgcttcctcccatcaacacagtcggcggagacaaggttggctaaaggagatccgaaagcttcagaagagcacacacctcttgataaggaagctgcccttcagccgcctggcaagagaaatatgtgttaaattcactcgtggtgtggacttcaattggcaagcccaggccctattggccctacaagaggcagcagaagcatttctagttcatctctttgaggacgcctatctcctcaccttacatgcaggccgagttactctcttcccaaaggatgtgcaactggcccggaggatccggggccttgaggagggactcggctgagctcctgcacccagtgtttctgtcagtctttcctgctcagccaggggggatgataccggggactctccagagccatgactagatccaatggattctgcgatgctgtctggactttgctgtctctgaacagtatgtgtgtgttgctttaaatatttttcttttttttgagaaggagaagactgcatgactttcctctgtaacagaggtaatatatgagacaatcaacaccgttccaaaggcctgaaaataattttcagataaagagactccaaggttgactttagtttgtgagttactcatgtgactatttgaggattttgaaaacatcagatttgctgtggtatgggagaaaaggttatgtacttattattttagctctttctgtaatatttacattttttaccatatgtacatttgtacttttattttacacataagggaaaaaataagaccactttgagcagttgcctggaaggctgggcatttccatcatatagacctctgcccttcagagtagcctcaccattagtggcagcatcatgtaactgagtggactgtgcttgtcaacggatgtgtagcttttcagaaacttaattggggatgaatagaaaacctgtaagctttgatgttctggttacttctagtaaattcctgtcaaaatcaattcagaaattctaacttggagaatttaacattttactcttgtaaatcatagaagatgtatcataacagttcagaattttaaagtacattttcgatgcttttatgggtatttttgtagtttctttgtagagagataataaaaatcaaaatatttaatgaaaaaaaaaaaaaagttacagcatagagattatactgtactttttgtgtgttaaaaataagttctttatttgtttgcaaacagccacaattttttttttcttttttttttttttgagatggagtctttttttttattgatcattcttgggngtttctcgcagagggggatttggcagggtcataggacaatagtggagggaaggtcagcagataaacaagtgaacaaaggtctctggttttccgaggcagaggaccctgcggccttccgcagtgtttgtgnccctgggtacttgagattagggagtggtgatgactcttaaggagcatgctgccttcaagcatctgtttaacaaagcacatcttgcaccgcccttaatccatttaa

SEQ ID NO: 6129 - DNA, 2442 bp, Homo sapiens
cgaggtacagaaatacattaatgggtggtaaataaagatgtaaaagaaggcaatgcgatcgatggtggcaaaagatcatcacagattaagggctatggctggtccacttctagaaaaccacaggctgtccattaaataatgaacatctaagtgaacaagtcagtgagtacctaaatagacaaggatgaggtgaatgagaagacatggccccatgggtcctcctgatgagggtgttggggtcccccctgggcaccccagctgcatgaaaatgaaggacaggaggtatggaaagctatgacagaagagagaaaggaacggtaaaaagaaataacaaccaaatggataaatgggtagatccacgagaagagttaggctaggacttgtcataagggcacctgactccactaatagaggaataaatgcctaataaaaagagagcaagcaggaaggaaggatgctatgaatgcaggaaggaagtaatgagtgagacgtggaaccgcacggccaaggatggacgtttgcgggtggctttttgatgcgtacagccaagccactccatggcaatgagctccgaagacaaagtgcaagagagaatgagtgagagagtgagagagagagaaacaataaaaaatgggaagaaatgtaaaaaggaagaaaggaagagaggtaatatattaaggaataaatacatgcatgcagatttaagacagagccatgctagaacaggaatgaaaggctgtgtgaaccaagcagaccgcttaattggcaccagtgctgctggtatggtcaatcacctactcaactaaggaacggctcaaagcatacacatgggagggaggagtggggccacagagagagggcccattagttgcagattacgatgtatccagttaggtgcacctgccttcgagaagtgtaaaaataagtatttacatagaaagaaagactgaatggatgcacggtgaatgcatgaatgattgaacgacagaaaagatttgcattgaccgatgaggagggcattgtagacagggatgagggtcattgatcctgggtgcagatctccaaaagaatgacagaaagaaagagggagtggtggaaagaaacaataggatgggaaaaaatgaaaatagaaaaaaggaagtgaaagagataataaataattagatcaaataagttgatgaaaggggactggtttagcacaagccatccacattaattcaaacctgtggctctgaagtttgttttttaaatgaccacaagtgtaagactgaatgaaagaataaatgcgtgcattccataggatgcaagaaaaggagtgaggaatgggaaaattggaagaacgagagagggagagatgtaagaaaagaaaggaaaagtgaagtaggcatatgaaagaaaaggcacttcttggacaagcactgaaatataatgagacagttttacccattaaatataataaacagtaaacgttgaggttcatcaataaaagcacagatacctgaatagaggagtgacctgaatagaattcgttcagccgaacgaatgagaatggatgattttcactatcctgtgcactcaaggcccaaaagagaaagcaagagaggagagaatatggaaacgtatgacaggatgtatataagcaatacaaacatattgaatgaataaataaagacataaatatgtgggagagtggaccacgcaaggacaaaaagaggagagaaggcagcaagaattatgactaattcaaaactgggttcctgagatagttaaataaatcctgcaccaaatccccagggggagaaattaacaaacaaaagacagccccacacggaccagtgtgcagaaggctccaggaaccgcagattatggttaatccaattctgtgcacctgaggtccataaataaaagaataagtattgaaatgaaagaatgacagaaagaatgaatggacacatgaacgactgaattagaaatggaaatgcctggcacagccaggaaggagctgcccatgggattgtcattcatctcactctgggcacctgaggtccataagcgtgaaaagaggcaggaagagaagtgtcagggagtcaaagatagagctaaggaaaggcaaaaatgaaactaaatgaaagcgaaagggaaaataaagaaaaaccaataaaaaagagaacgaatacgtgggtgtatctgtaagagtaggatctgttaggattagtcataagactgtcagtaatcctgaagatggatgagataatccaggcccaggttcccagggggagggaaaatggagaaaatataaaaagatgtgaaaaaggaaaaaggaaaggtaataaacaaacaaccaaagtgataaatggatagttaagggaggttgtctgaacagggattataattagtttacatacatactccttaaacagataaatacattacacctttcaa

SEQ ID NO: 6130 - DNA, 1878 bp, Homo sapiens
catgggcgctgcagcagctacaaagacgacgccggctgcgctcgcgggaccagagggagggaggctgcggacgagtgcggggaggagtttgagatgggaggcgcttgcaggggctccccctgttctgcgctgtgagccggggcacaaagagccctctgcactagcgccgcaggaccgcggacccgagttggaggcatctgtccacccatgtggttccagacacgttcatgtggccaccatgaccccgtcggcatcacaggggtaaccaaggtccacagaacgaggggaaagggtcactgtggatcaagccaggctcctctgagcagtccagggtctatttacagagagcagcaagttcctaggacagaggagacagaagggaatttccaggttcttcaggacgttcacaaccacactgagaagcatctttgcagataagtatttaaacttaccagcccatagcctaccagcctgccctcttctggtctgtgcaggaaagtgtagtatcctagaatgccaaagtgggaggggaaatgggtgatgtagctcattctcttttctacctctatggaagaaagaaagagcctgtccccattttgtggggtcccagaaagggtgattttcacacttcacatttggcattagggctagtatttcacaaacattaccgtctggaacttttgaaggctgagttaaatgacttcatcttgtgtacttgtagaactgctattagaaggaggctggggactccctgatgatgtgaaccagcccttctcttctcagttttagcactttgtgatcatatttataaaccttggacagggctccttggccttagagttaagtgaagagttaacactgtgactttagatgcatttttctcagtgcaagtgtctgagctcatctccagttctggactcgtgcccccactcccgggtgctgacagcaagctctgaagatatgctgagagagctccctgactctcctgactcaggtctgccagttgatgaagacagcacagttgttaccaaaaacaaaacctggcagatggtcctaggtcaggatcgggggaaacacagtcataggctgcaagtctataagataattccattggggagggagcccatttgtcatgcatggctgcaaggggcagatacaagtgtggagtaagcttgcaagagctgatcctggtcccagagagggaaaaatatgccttggtgggtaatgaaccttttgttcccagaggcagaaggattgggactaggccaacatagagattggcgatggttgtgagattctaagagtgtgtgtgcatcttgacaatattagaggaggctgagcccaagcaggcacattctcttcgacccctccctcattcagtctgctttggagtctactgaacatcaagcttgctatgagcaggatcttagagctgaggaattggcctcccaatccgaacaggtgttataatcctttcttaataggttgtgctgtggacccaatgtgagggctgtgctggtgtaaatggtgacatattgagctggggggatgctttcggggtggggggactggttccattccatcaaaggccctcttgagagtctatccagggacccattgttttactttaacagaccagaaaagatgtttgttttccatgtcattacccccaggggataccgaatgtgtgggtagaaatttctctgtagattaaaaatcagatttttacatggattcaacaaaggagcgtcacttggatttttgttttcatccatgaatgtagctgcttctgtgtaaaatgccattttgctattaaaaatcaattcacgctggaaaaaaaaaaaaaaaaaaaaaaaaaaaaaaaaaaaaaaaaaaaaa

SEQ ID NO: 6131 - DNA, 6444 bp, Homo sapiens
  misc_feature (1355)..(1403): n is a, c, g, or t
  misc_feature (3242)..(3260): n is a, c, g, or t
  misc_feature (6355)..(6439): n is a, c, g, or t
cttccatgtgtgaaagctacttggcatgaatgcctgggccgtaccaagtgtcaccgcagcaagagggggagtcagaagaaaaacagatcagaccaagcagacaataggcccctaaagtgttccccctaagttgctttgatgttgtcctggtgtcttgataccaggaggccagggattgcgggaaaagggtcttttttgtcttcattcactttcccccctcagtttctgaaatgattctccagaatttctcctcataaaaaaggactgaatgtgggcccagttggcgtcattctgctttgacctaaacattcccatctgattgggtggcagagatcatttttggaaagttcttccgtgtcccgatgtagaagaaatagcaaattggacatattgaaagacaagggtcatctttgagaagggggttcctggactcctcacctccaggatgagcactgcagtgtcgtgacccttggggttttgtatgccctggagatgcgagattttcctctggcagcaggaggcacgcacccagagaatgctggagctgcaaggggaaaggacccacttccacagcagagaaaaacaaagaggaaaaaggcatacaggcagcgagcgctaagggacgcacccagcaagcagtgggccagtgccactgcccccagcagctgtttctgctgcaacccgagaggaactcggtgagcctgtcccgtttgtgactgcaagctcaggatttcaatcaatgcattccagtaaccctaaagtgaggagctctccatcaggaaacacacagagtagccctaagtcaaagcaggaggtgatggtccgtccccctacagtgatgtccccatctggaaacccccagctggattccaaattctccaatcagggtaaacaggggggctcagccagccaatcccagccatccccctgtgactccaagagtgggggccatacccctaaagcactccctggcccaggtgggagcatggggctgaagaatggggctggaaatggtgccaagggcaaggggaaaagggagcgaagtatttccgccgactcctttgatcagagagatcctgggactccaaacgatgactctgacattaaagaatgtaattctgctgaccacataaagtcccaggattcccagcacacaccacactcgatgaccccatcaaatgctacagcccccaggtcttctaccccctcccatggccaaactactgccacagagcccacacctgctcagaagactccagccaaagtggtgtacgtgttttctactgagatggccaataaagctgcagaagctgttttgaagggccaggttgaaactatcgtctctttccacatcnnnnnnnnnnnnnnnnnnnnnnnnnnnnnnnnnnnnnnnnnnnnnnnnncacagatatctgcccttcggaatgatccgaaacctctcccacaacagcccccagttccggccaaccaggaccagaattcttcccagaataccagactgcagccaactccacccattccggcaccagcacccaagcctgccgcacccccacgtcccctggaccgggagagtcctggggtagaaaacaaactgattccttctgtaggaagtcctgccagctccactccactgcccccagatggtactgggcccaactcaactcccaacaatagggcagtgacccctgtctcccaggggagcaatagctcttcagcagatcccaaagcccctccgcctccaccagtgtccagtggcgagccccccacactgggagagaatcccgatggcttatctcaggagcagctggagcaccgggagcgctccttacaaactctcagagatatccagcgcatgctttttcctgatgagaaagaattcacaggagcacaaagtgggggaccgcagcagaatcctggggtattagatgggcctcagaaaaaaccagaagggccaatacaggccatgatggcccaatcccaaagcctaggtaagggacctgggccccggacagacgtgggagctccatttggccctcaaggacatagagatgtacccttttctccagatgaaatggttccaccttctatgaactcccagtctgggaccataggacccgaccaccttgaccatatgactcccgagcagatagcgtggctgaaactgcagcaggagttttatgaagagaagaggaggaagccggaacaagtggttgtccagcagtgttccctccaggacatgatggtccatcagcacgggcctcggggagtggtccgaggacccccccctccataccagatgacccctagtgaaggctgggcacctgggggtacagagccattttctgatggtatcaacatgccacattctctgcccccgaggggcatggctccccaccccaacatgccagggagccagatgcgcctccctggatttgcaggcatgataaactctgaaatggaagggccgaatgtccccaaccctgcatctagaccaggtctttctggagtcagttggccagatgatgtgccaaaaatcccagatggtcgaaattttcctcctggccggggcattttcagcggccctggccgaggggaacgcttcccaaacccccaaggattgtctgaagagatgtttcagcagcagctggcagagaaacagctgggtctccccccagggatggccatggaaggcatcaggcccagcatggagatgaacaggatgattccaggctcccagcgccacatggagcctgggaataaccccattttccctcgaataccagttgagggccctctgagtccttctaggggtgactttccaaaaggaattcccccacagatgggccctggtcgggaacttgagtttgggatggttcctagtgggatgaagggagatgtcaatctaaatgtcaacatgggatccaactctcagatgatacctcagaagatgagagaggctggggcgggccctgaggagatgctgaaattacgcccaggtggctcagacatgctgcctgctcagcagaagatggtgccactgccatttggtgagcacccccagcaggagtatggcatgggccccagaccattccttcccatgtctcagggtccaggcagcaacagtggcttgcggaatctcagagaaccaattgggcccgaccagaggactaacagccggctcagtcatatgccaccactacctctcaacccttccagtaaccccaccagcctcaacacagctnnnnnnnnnnnnnnnnnnnctggggcggaagcccttggatatatctgtggcaggcagccaggtgcattccccaggcattaaccctctgaagtctcccacgatgcaccaagtccagtcaccaatgctgggctcgccctcggggaacctcaagtccccccagactccatcgcagctggcaggcatgctggcgggcccagctgctgctgcttccattaagtccccccctgttttggggtctgctgctgcttcacctgtccacctcaagtctccatcacttcctgccccgtcacctggatggacctcttctccaaaacctccccttcagagtcctgggatccctccaaaccataaagcacccctcaccatggcctccccagccatgctgggaaatgtagagtcaggtggccccccacctcctacagccagccagcctgcctctgtgaatatccctggaagtcttccctctagtacaccttataccatgcctccagagccaaccctttcccagaacccactctctattatgatgtctcgaatgtccaagtttgcaatgcccagttccaccccgttataccatgatgctatcaagactgtggccagctcagatgacgactcccctccagctcgttctcccaacttgccatcaatgaataatatgccaggaatgggcattaatacacagaatcctcgaatttcaggtccaaaccccgtggttccgatgccaaccctcagcccaatgggaatgacccagccactttctcactccaatcagatgccctctccaaatgccgtgggacccaacatacctcctcatggggtcccaatggggcctggcttgatgtcacacaatcctatcatggggcatgggtcccaagagccaccgatggtacctcaaggacggatgggcttcccccagggcttccctccagtacagtctcccccacagcaggttccattccctcacaatggccccagtggggggcagggcagcttcccaggagggatgggtttcccaggagaaggcccccttggccgccccagcaacctgccccaaagttcagcagatgcagcactttgcaagcctggaggccccgggggtcctgactccttcactgtcctggggaacagcatgccttcggtgtttacagacccagatctgcaggaggtcatccgacctggagccaccggaatacctgagtttgatctatcccgcattattccatctgagaagcccagccagacgctgcaatatttccctcgaggggaagttccaggccgtaaacagccccagggtcctggacctgggttttcacacatgcaggggatgatgggcgaacaagcccccagaatgggactagcattacctggcatgggaggtccagggccagtgggaactccggacatccctcttggtacagctccatccatgccaggccacaaccccatgagaccaccagcctttctccaacaaggcatgatgggacctcaccatcggatgatgtcaccagcacaatctacaatgcccggccagcccaccctgatgagcaatccagctgctgccgtgggcatgattcctggcaaggatcgggggcctgccgggctctacacccaccctgggcctgtgggctctccaggcatgatgatgtccatgcagggcatgatgggacccaacagaacatcatgatccccccacagatgaggccccggggcatggctgctgacgtgggcatgggtggatttagccaaggacctggcaacccaggaaacatgatgttttaagctgctaagatgggatgtgccgatccttgtcaaaatgagattccaggtcctgagagctgctttgagggagttccaggagtacttactattggtcatgcaataggagaacagagacccgagggctgctttgggggaggggggaactcgagaatgtatggatttacctgaaaacaaattattcatttaatcaacaggtgtgttttttttaagatttattttttaaaaattatttttgtggacttgggtatcaatgatggcacctacttttgggaatctgtagctgtgctttgagaattgccatcggtcatgtgttgcaccgttctctgtatgtttacgtcctttggactggcttctcccaggattcttttctgtttttgtttttttgatttgggctttatttttttctgtgtactgtactatattgtaaaagggattttagcagagactttagtctttggggcaagaggagaacaggaatgctgggctgtttactttaggtggagaatccatcttcagacctttggactattttctttcaactgcagtgtatagaaaaaccaaactacgacctcagagcagagtattaatgaaaagcacaaaaaaaggaactaagttcagcgaggggtggggggaggggggagatttttcttttgaaaaataatgactcttaggacatttgtttttaagttcaagtgctcttcagcactgtcttgtctcccaatataccaacccactggcacattttctctgtttctctctccgattttgctctgtctcctcagttaagtgtttccttcctttgtgccccccgctggtgaccctctgcttccctctctctttccctttggcagctgcaatacacagtgttattttggggaaataaatctagcaaagcctcgccttccatgccgagcgtcctcttggctctgagagggaaaggtctgtccttgggatgctctctggtcttttttccccctaagtctttctctttcccatcatacccttccctgcccaccttgttttctgttctccttttattaggaattcccaagtgaattttattaatgtgggagtggaacagatgctaaaagctatccaggattttgtttctgtttgttttaaattttgtggttccttccctttcctccccctcccatgcgtaagacgttctgtgtaacctccattaaatttggtacaaaaccactcgccagagctgtggtgtcagaaaaataaaatatattgtttcttacaaaaaaaaaaaaaaaaaaaaaaaaaaaaaaaaaaaaaaaaggtataagcgggcacaaagcaaacaaaaagaggggggggggaaannnnnnnnnnnnnnnnnnnnnnnnnnnnnnnnnnnnnnnnnnnnnnnnnnnnnnnnnnnnnnnnnnnnnnnnnnnnnnnnnnnnnagtgc

SEQ ID NO: 6132 - DNA, 2872 bp, Homo sapiens
taagtctgcaaatatcagagtgaatccaaacttatcaattcaacactggtttgtaaaacagctcaaaaaaaaaaaaaaaaaaaaaaaaaaatttgaattagctgggtgtggtggtataagcctgtggttccagcttctcgggaggctgaggtgagaggattgcttgagcctggaaggtgaggctgcagtgagctctgatcacaccactgcattccagcctaggtgatagagtgagaccctgtcttaaaaaaacaaacaaacaaacaaaaaacaaaaacagctctaaacgaatgtggctagaaaagtagctcaagttgttcctgtctggtgaaatacaaacataaatgaattatttatgtgccagtggcttcctgatgctgagagcaaagccagttgttctggcaggttctggaaaaatttatcacctcatggggttcaatgccaatgtcaaatcataaatataataatcaaatctgaaagtgaacccagtttcagagacatccagaagccactgtgtatgaagctcctttcagataaagagaagatattatttgacttcttatctctgttgtctagcacaatgtccagaacacaacagatattccatatgcacagtcacatcctatgtatgtgtgtttcttttccagcaaggactagaggtcctaagctttgtttgtatgacgagccagtgcccagatgagcaggagggtcttagcacagtcacctacacactcatttcgatgctctgaccccttatcttggctagtcaaagcgtggtctatgagtttgcattttgataggatcccctggtgaatcttgtgcatgtcaaaggaagagaagaactgccctcaaaatatagagcaggtgaactaaattattaacttatagaggtaggctggctatttatttatgtatcttgttgatgggaagattcaaattgatatacataatcacccccataaggatttcaggtaaaaaacaaacaaacaaaggtttagatgttagatatattttacaattaccacaccagtctttttactacagcatctagtaacacatttaccatagatttagatggaaattttcatcccataagcctttgttagtatttttaaaattgaatactcaataaatagtggccaagttgaatctcttagaggaatctcactcaaactacagtcatattttccaataggccccataaaaatcattgctctagagtaatttaatatatttatccacctctttagacacttaggtaagtataataatacaagttttgtgcgtgtgtgtgtattgtgtaccttgtggcttcttgcccagtttctgcaacacctgaagctgatgcatgtttaatgtaaataatgtccagcaatgttacaaatgttgacttttatgtgcccatcaggaaaaaaaagatgaatgttattgtagaggaaattttcattctggaaaaaatgcatactatttgaatattatttttcatgatttccacagatattatacacagatattatattccaaggattatgtttcaaagtcatcaaaaatagaaaataccttttatatttctaacctgaaaataataatcagtaagtagcccagctttggggaaatgtgattaaaatattaatgaccatcacaactcattaaaagcataaattgtgcaatgatttaaactacatgttcttcatatgaactgtgtgtagaaatatagacacattggataaatgctatttaaagtctgagtgcgttggtaactgattcagtcatctgtaggttgaagtgattacttttatctgccttcatagtgagaattagatttctattctttgtaaagcagggaatatagattgtgcatggagtaaaagaattcaatccttattaataatgatggtagctgcgctgcagaaaagaaagcctgtcagagtaacttattcagttttacatcataatcagaggtgtgtccatctctggttgaaggcagaattaaaaaccccttcaacatttttaaaataatagatgaaaaacatctcaaagtctcctttaaaatttgaattgacgattccacataaaaggaagggaccaaaaatatcttaaagaaatacttcccgatggaagtgatgtttttagtgaaattccctcagggagaaggttcttcccaaaaaggcccttttttacccctccgccaaagaagcccccccttaagcttaacccttgtaacaacaattgcgcagccgaacctccgcaaccaacctttcccctccttccggatctcctagagcgccccccccctccggggtcccgcgccaccgcgactccctttttgcccccccgtcgcccgcccgccccggcccctgttccccttgtctccccccccggcgctcttgccgggcccccaccctgatgcttatcccccccccggttatgtatacaagcccgccgctccctccttccgcacccccccctgccttccccccccccgctccgccccgcccccatcctcccccgcctagcttatcacccccccttcccccctcccctttttacgcccccccccctctctttttccgcgccttcccccgcccctttttcgcttttttgtatcccactttttgccctactgcctcccccgccatcaatgtacattctgcttattcctcccctctcccgccgtcttgttcgttatcagcaccatcctctctgtctctccgtaccactctctctctctctcctgcttctctgacattgaggcgcgcacgctcctctctctccgtgttcttcgtgcccgcactcctcctacgacctctagtctgttacccgccattcctgtccccccgcgccctttcgtcttcgctactgcgcccgtggc

SEQ ID NO: 6133 - DNA, 2767 bp, Homo sapiens
  misc_feature (538)..(554): n is a, c, g, or t
cccgcctcttcctcccttccttctttccttgctttcgccgcgcactccgccgccatggagcagcgccgcgtcaccgacttcttcgcgcgccgccgccccgggcccccccgcatcgcgccgcccaagctggcctgccgcacccccagccccgccaggcccgcactccgcgccccggcctccgctaccagtggcagccgcaagcgcgcccgcccgcccgccgcccccggacgcgaccaggccaggccaccggcccgcaggagactgcggctgtcggtggacgaggtttccagccccagtacccccgaggccccagacatcccagcctgcccttctccgggccagaagataaagaaatccaccccggcagcaggtcagccgccccacctgacatccgcgcaggaccaggacaccatctctgagcttgcgtcatgcctgcaacgggcccgggagctgggggcaagagtccgggcgctgaaggccagtgcccaggatgctggggagtcctgcaccccagaggccgagggccgccctgaggagnnnnnnnnnnnnnnnnngcgcccgcctaccagcgcttccatgccctggcccagcccggcctgccgggactcgtgctgccctacaagtaccaggtgctggcggagatgttccgcagcatggacaccatcgtgggcatgctccacaaccgctccgagacgcccacctttgccaaggtccagcggggcgtccaggacatgatgcgtaggcgttttgaggagcgcaatgttggccagatcaaaaccgtgtacccggcctcctaccgcttccgccaggagcgcagtgtccccaccttcaaggatggcgccaggaggtcagattaccagctcaccatcgagccactgctggagcaggaggctgacggagcagccccccagctcacggcctcgcgcctcctgcagcgacggcagatcttcagccagaagctggtggagcacgtcaaggagcaccacaaggccttcctggcctccctgagccccgccatggtggtgccggaggaccagctgacccgctggcacccgcgcttcaacgtggatgaagtacccgacatcgagccggccgcgctgccccagccacccgccacggagaagctcaccactgctcaggaggtgctggcccgggcccgcaacctgatttcacccaggatggagaaggccttgagtcaattggccctgcgctctgctgcgcccagcagccccgggtctcccaggccagcactgccggctaccccaccagccaccccgcctgcagcctctcccagtgctctgaagggggtgtcccaggatctgctggagcggatccgagccaaggaggcacagaagcagctggcacagatgacgcggtgcccggagcaggagcagcggctgcagcgcttagaacggctgcctgagctggcccgcgtgctgcggagcgtctttgtgtccgaacgcaagcctgcgctcagcatggaggtggcctgtgccaggatggtgggcagctgttgtactatcatgagccctggggaaatggagaagcacctgctgctcctctccgagctgctgccggactggctcagcctccaccgcatccgcaccgacacctacgtcaagctggacaaggccgcggacctggcccacatcactgcacgcctggcccaccagacacgtgctgaggaggggctgtgagcctgggggccactgtggacagacgtgggcttcagaagctcgctggcctgggcccaccagcattttcttttatgaacatgatacactttggccttcctttccccagcgcccctgagggccagaggcagatgtgggctgcaggctgcacagcccgagggtctctggctgcgggcggtgggccccttcatggggctcacctggtggattcacattaaaccggtttctgtgggcaaaaaaaaaaaaaaaaaaaaaaaaaaagggaagccagatccagcaccccctggggggccatcgggagtgtggctgggggtgaagggggctctgtggcaatatggggttgggtagtgtgggtggcaggccatcccctctaatcttggaacctctgaatatgggacctcccacagcaaagggtgacttttgtcattaagaaagactggggtgggtgtggtggctcacgcctgtaaccccagcactttgggaggccaaggtgggcagatcacgaggtcaagagatcgagaccatcctggcgaacatggtgaaaccccatctctactaaaaatacaaaaaattagccgggtgtggtggtgggcacctgtcgtcccagctactagggaggctgaggcaggagaatggtgtgaacccaggaggcacagcttgcagtgagcgaagattgcaccacggcacgcactccagcctgggtgacagagcgagactccgtctcaaaaaaaaaaatttcaagactggagaggtgatcctgaattgtccagctacgccccatgtcatcacagggccttcatgacagggccagagccagccagctttgaagacgcggccctgccccgacacaggcagcctggagaagctgggcaggacaagtaggacatccctggagcctccagaagggactggcctctgcccacaccttgacttcagtatttctgacctcctaaactctaataaagtcatgcttacagccactaaaaaaaaaaaaaaaaaaaaaaaaaaaaaaaaaaaaaaaaaaaaaaaaaaaaaaaaaaaaaaaaaaaatagaaaaaaaaaagtcgtatcga

SEQ ID NO: 6134 - DNA, 2847 bp, Homo sapiens
  misc_feature (1068)..(1138): n is a, c, g, or t
  misc_feature (1934)..(1934): n is a, c, g, or t
ctgcaggcggccctggagggggcgccctcgccgagcgcgcgccccgcgccgccgccccggactcctccccggcgccgcgcgggcaggttcgaccaggcggccgcgggctccggttcccggccagctccccagggcccgcggcgccccgccccgcgcgcccgccccgctgcgctaactcgacccaagttggaagccgatcgcaggcggccgcactcgcgcccagcgagggcggcggcggcggcggcggcgcagctccggcgagcgaggcggcggccgcacggcaagcgtggaccgcggggggcgcccgcgccgggagcagccggaggactcgcggcggcgccggcgccccgcccgggaaagtaaagttggagacggagggagcgcgcggggcgggcccggaggagcggcggccggcgccccggcgcgcgcagccctagccgccggatgggaggcggacggcccgggccgccgccgccttgtcgcctgcgccccggctgggctccgggaccgcggggccgctacggcaccgccgctcggcccgcgtcgcgtgggctcgccgccggggcgctcccgtgagccgggccgaggcggggcgcgcgaggaccccgggacctgcccccctccccccgcagccgcgtcgccgctcgctccgggcgcctcctgctctgcacttacacgctcggcagctgcggggagcccggcagccacgctctccggcgcgccgcccgcggagccaccacggccgagggccggctgctgggcgccgcggtccccggcgggcgcgcccgagcagcaggcggcgatgcgggcgccgaccccggctggggggcgcccgagctgccgcggctgcgccccggctccaggaggggcggcgtagcccgcgggaggaccatggcgtccccggcgctggcggcggcgctggcggtggcggcagcggcgggccccaatgcgagcggcgcgggcgagaggggcagcggcggggttgccaatgcctcgggggcttcctgggggccgccgcgcggccagtactcggcgggcgcggtggcagggctggctgccgtggtgggnnnnnnnnnnnnnnnnnnnnnnnnnnnnnnnnnnnnnnnnnnnnnnnnnnnnnnnnnnnnnnnnnnnnnnngcgcgccacagaacctcttcctggtgtcgctggcctcggccgacatcctggtggccacgctggtcatgcccttctcgttggccaacgagctcatggcctactggtacttcgggcaggtgtggtgcggcgtgtacctggcgctcgatgtgctgttttgcacctcgtcgatcgtgcatctgtgtgccatcagcctggaccgctactggtcggtgacgcaggccgtcgagtacaacctgaagcgcacaccacgccgcgtcaaggccaccatcgtcgccgtgtggctcatctcggccgtcatctccttcccgccgctggtctcgctctaccgccagcccgacggcgccgcctacccgcagtgcggcctcaacgacgagacctggtacatcctgtcctcctgcatcggctccttcttcgcgccctgcctcatcatgggcctggtctacgcgcgcatctaccgagtggccaagcgtcgcacgcgcacgctcagcgagaagcgcgcccccgtgggccccgacggtgcgtccccgactaccgaaaacgggctgggcgcggcggcaggcgaggcgagaacgggcactgcgcgcccccgcccgccgacgtggagccggacgagagcagcgcagcggccgagaggcggcgcgccggggccgttgcggcggggcgggcggcggcgagcgggcgcggaggggggcgcgggcggtgcggacgggcagggggcggggccgggggcggctcagtcgggggcgctgaccgcctccaggtccccggggcccggtggccgcctctcgcgcgcccngtcgcgctccgtcgagttctccctgtcgcgccggcgccgggcgcgcagcagcgtgtgccgccgcaaggtggcccaggcgcgcgagaagcgcttcacctttgtgctggctgtggtcatgggcgtgttcgtgctctgctggttccccttcttcttcatctacagcctgtacggcatctgccgcgaggcctgccaggtgcccggcccgctcttcaagttcttcttctggatcggctactgcaacagctcgctcaacccggtcatctacacggtcttcaaccaggatttccggccatccttcaagcacatcctcttccgacggaggagaaggggcttcaggcagtgactcgcacccgtctgggaatcctggacagctccgcgctcggggctgggcagaaggggcggcccggacgcgggggagctttcccagagacccggggagctttcccagagacccggggatggattggcctccagggcgcaggggagggtgcggcagggcaggagcttggcagagagatagccgggctccagggagtggggaggagagagggggagacccctttgccttcccccctcagcaaggggctgcttctggggctccctgcctggatccagctctgggagccctgccgaggtgtggctgtgaggtcagggttttagagagcagtggcagaggtagccccctaaatgggcaagcaaggagccccccaaagacactaccactccccatccccgtctgaccaagggctgacttctccaggacctagtcggggggtggctgccagggggcaaggagaaagcaccgacaatctttgattactgaaagtatttaaatgtttgccaaaaacaacagccaaaacaaccaaactattttctaaataaacctttgtaatctaaaaaaaaaaaaaaaaaa

SEQ ID NO: 6135 - DNA, 3526 bp, Homo sapiens
  misc_feature (1454)..(1454): n is a, c, g, or t
  misc_feature (1456)..(1459): n is a, c, g, or t
agcgggtatttgacaggagccacgcgtccgagaacgcggaggacctctgggtgcctgcaggggagctgctccagccgggccgccgggagcggtggggagagcatcgcggagccgcccctccacgcgcccgcccagccgcgctcgcccactgggctctcccggctgcagtgccagggcgcaggacgcggccgatctcccgctcccgccacctccgccaccatgctgctcccccagctctgctggctgccgctgctcgctgggctgctcccgccggtgcccgctcagaagttctcggcgctcacgtttttgagagtggatcaagataaagacaaggattgtagcttggactgtgcgggttcgccccagaaacctctctgcgcatctgacggaaggaccttcctttcccgttgtgaatttcaacgtgccaagtgcaaagatccccagctagagattgcatatcgaggaaactgcaaagacgtgtccaggtgtgtggccgaaaggaagtatacccaggagcaagcccggaaggagtttcagcaagtgttcattcctgagtgcaatgacgacggcacctacagtcaggtccagtgtcacagctacacgggatactgctggtgcgtcacgcccaacgggaggcccatcagcggcactgccgtggcccacaagacgccccggtgcccgggttccgtaaatgaaaagttaccccaacgcgaaggcacaggaaaaacagatgctgaattcagatgatgccgcagctccagcgttggagactcagcctcaaggagatgaagaagatattgcatcacgttaccctaccctttggactgaacaggttaaaagtcggcagaacaaaaccaataagaattcagtgtcatcctgtgaccaagagcaccagtctgccctggaggaagccaagcagcccaagaacgacaatgtggtgatccctgagtgtgcgcacggcggcctctacaagccagtgcagtgccacccctccacggggtactgctggtgcgtcctggtggacacggggcgccccattcccggcacatccacaaggtacgagcagccgaaatgtgacaacacggccagggcccacccagccaaagcccgggacctgtacaagggccgccagctacaaggttgtccgggtgccaaaaagcatgagtttctgaccagcgttctggacgcgctgtccacggacatggtccacgccgcctccgacccctcctcctcgtcaggcaggctctcagaacccgaccccagccataccctagaggagcgggtggtgcactggtacttcaaactactggataaaaactccagtggagacatcggcaaaaaggaaatcaaacccttcaagaggttccttcgcaaaaaatcaaagcccaaaaaatgtgtgaagaagtttgttgaatactgtgacgtgaataatgacaaatccatctccgtacaanannnnatgggctgcctgggcgtggcgaaagaggacggcaaagcggacaccaagaaacgccacacccccagaggtcatgctgaaagtacgtctaatagacagccaaggaaacaaggataaatggctcataccccgaaggcagttcctagacacatgggaaatttccctcaccaaagagcaattaagaaaacaaaaacagaaacacatagtatttgcactttgtactttaaatgtaaattcactttgtagaaatgagctatttaaacagactgttttaatctgtgaaaatggagagctggcttcagaaaattaatcacatacaatgtatgtgtcctcttttgaccttggaaatctgtatgtggtggagaagtatttgaatgcatttaggcttaatttcttcgccttccacatgttaacagtagagctctatgcactccggctgcaatcgtatggctttctctaacccctgcagtcacttccagatgcctgtgcttacagcattgtggaatcatgttggaagctccacatgtccatggaagtttgtgatgtacggccgaccctacaggcagttaacatgcatgggctggtttgtttcttgggattttctgttagtttgtcttgttttgctttccagagatcttgctcatacaatgaatcacgcaaccactaaagctatccagttaagtgcaggtagttcccctggaggaaataatattttcaaactgtcgttggtgtgatactttggctcaaaggatctttgcttttccattttaagcttctgttttgagttttgccctggggcttgaatgagtcccagagagtcgttcggatggtgggaggctgcctaggaggcagtaaatccagtcacagtgcctgggaggggcccatccttccaaaatgtaaatccagtcgcggtgtgaccgagctggctaacaggcttgtctgcctggttttcctcctacacgtggacattattctcctgatcctcctacctggtccaccccagggctaccggaaggtaaaatcttcacctgaaccaattatgagcagtctccttactgaaggtacagccggatacgtggtgcccccggggctggtgttggcagccggggggaggtgcctgagggtccccacggttcctttctgcttttctgaatgcatcaagggtacgagaacttgccaatgggaaattcatccgagtggcactggcagagaaggataggagtggaatgcccacacagtgaccaacagaactggtctgcgtgcataaccagctgccaccctcaggcctgggccccagagctcagggcacccagtgtcttaaggaaccatttggaggacagtctgagagcaggaacttcaagctgtgattctatctcggctcagacttttggttggaaaaagatcttcatggccccaaatcccctgagacatgccttgtagaatgattttgtgatgttgtgatgcttgtggagcatcgcgtaaggcttcttgcttatttaaactgtgcaaggtaaaaatcaagcctttggagccacagaaccagctcaagtacatgccaatgttgtttaagaaacagttatgatcctaaactttttggataatcttttatatttctgacctttgaatttaatcattgttcttagattaaaataaaatatgctattgaaactaaaaaaaaaaaaaaaaaaaaaaaaaaaaaaaaaaaaaaaaaaaaaaaaaaaaaaaaaacaaatggtgaggggcgccggcaccacaagaaatagacctcccgagggaggccgccacaactgtagactccacaacgaactaacagccagagaagaaaagaaggaggcgcccagagaatgaggaacacagtatgccaatcagcagaggcaacgataccacgcagcggaaaacaaaccctactcgacgatgggaatacaaaccgagggtacaaggtaggaataccttcgggaacgcgaaaacaacctaccgcggaaggggggcaaacaccaggcacgcacacaagaccccacagaacaaaacaacgactataggtcggagacaaaacaaacagcacgatcccta

SEQ ID NO: 6136 - DNA, 1470 bp, Homo sapiens; identical to SEQ ID NO: 6035

SEQ ID NO: 6137 - DNA, 1012 bp, Homo sapiens
gtagattttaacagtcggcagaaacccagagctgaaatggtttccagccagaggcatacaaaggaggactgtcttaaagggacagagccctctttccaagccagaggacgatacatgagcacacggcgggctctagtctaaaatcctgcaacccgcactccaccggccacaggcagatgcccggggatatgccataaagttccacggaaaacgcagctctctgacagcaggttctgcttggcagacacatagcagctgccaggaccacactgtcctaaatctaccgtcagggtggtgccattcatcagtgccatcgcaagcgcggaggtgaagcggacccaggaccccaaaaccatgttccgaggaaactcactggcgtacaagtgcatcgacgagaccatgaagctggcggggatgcattacctgcatgtcaccctgaagcccgccatcgagaagaaactctgagtttgaggtacaggggcttcggggtgcagacgtccttccagggcccatggtcagtattgcacctgtgttatgaacccccagatgctgtgcagggcaggggcgggggctgctgttttattggggaggggagcatcctaaaaatggggtccaggcagacccctccagacctcacactgccgaggaggcctttcccaaagggcgtcctcccgggatgcagacggcaggtgtgtgggaagcgccgtttaaatacacagcacgacgtatccttgtaccgacttctcccggttcttgtttgaaaatactgtagttcaggctcttgatctagatggcagataggaactttcttgtcacaaaaatactggaggaaaatgttgtaaaaatagacttttggacacacagctgttggggctgcactgagctgcaatttttaacatggatttataacttaatgtttctgtttataaaatactaatgatttgcaatgtattttactggccaattaaaacagatgttttattcttaaaaaaaaaaaaaaaaaaaggatgct

SEQ ID NO: 6138 - DNA, 5387 bp, Homo sapiens
  misc_feature (2554)..(2568): n is a, c, g, or t
  misc_feature (2970)..(2998): n is a, c, g, or t
cggacgcgtgggtcgacccacgcgtccggaatcgctcaggaaagacacactgcagactccaccggcaccctgcaatagatggattccgactacacaagggagaaaacgcggaggtgacactctcctgcctggaaagaggacgaacgaccaaacaaacgcaaggactggactccatgccgaaggtatctggaagtcgtgacacgagcatctgcagctagccatattgaagttgaagtgctggatattaatgacaattctccccagttttcaagatctctcatacctattgagatatctgagagtgcagcagttgggactcgcattcccctggacagtgcatttgatccagatgttggggaaaattccctccacacatactcgctctctgccaatgatttttttaatatcgaggttcggaccaggactgatggagccaagtatgcagaactcatagtggtcagagagttagatcgggagctgaagtcaagctacgagcttcagctcactgcctcagacatgggagtacctcagaggtctggctcatccatactaaaaataagcatttcagactccaatgacaacagccctgcttttgagcagcaatcttatataatacaactcttagaaaactccccggttggcactttgctcttagatctgaatgccacggatccagatgagggcgctaatgggaaaattgtatattccttcagcagtcatgtgtctcccaaaattatggagacttttaaaattgattctgaaagaggacatttgactcttttcaagcaagtggattatgaaatcaccaaatcctatgagattgatgttcaggctcaagatttgggtccaaattcaatcccagcccattgcaaaattataattaaggttgtggatgttaatgacaataaacctgaaattaacatcaacctcatgtcccctggaaaagaagaaatatcttatatttttgaaggggatcctattgatacatttgttgctttggtcagagttcaggacaaggattctgggctgaatggagaaatagtttgtaagcttcatggtcatggtcactttaaacttcagaagacatatgaaaacaattatttaatcttaactaatgccacactggatagagaaaagagatctgagtatagtttgactgtaatcgctgaggacagggggacacccagtctctctacagtgaaacattttacagttcaaatcaatgatatcaatgacaatccaccccacttccagagaagccgatatgaatttgtaatttcagaaaataactcaccaggggcatatatcaccactgttacagccacagatcctgatcttggagaaaatgggcaagtgacatacaccatcttggagagttttattctaggaagttccataactacatatgtaaccattgacccatctaatggagccatctatgccctcagaatctttgatcatgaagaagtgagtcagatcacttttgtggtagaagcaagagatggaggaagcccgaagcaactggtaagcaataccacagttgtgctcaccatcattgacgaaaatgacaacgttcctgtggttatagggcctgcattgcgtaataatacggcagaaatcaccattcccaaaggggctgaaagtggctttcatgtcacaagaataagggcaattgacagagactctggtgtgaatgctgaactcagctgcgccatagtagcaggtaatgaggagaatatcttcataattgatccacgatcatgtgacatccataccaacgttagcatggattctgttccctacacagaatgggagctgtcagttatcattcaggacaaaggcaatcctcagctacataccaaagtccttctgaagtgcatgatctttgaatatgcagagtcggtgacaagtacagcaatgacttcagtaagccaggcatccttggatgtctccatgataataattatttccttaggagcaatttgtgcagtgttgctggttattatggtgctatttgcaactaggtgtaaccgcgagaagaaagacactagatcctataactgcagggtggccgaatcaacttaccagcaccacccaaaaaggccatcccggcagattcacaaaggggacatcacattggtgcctaccataaatggcactctgcccatcagatctcatcacagatcgtctccatcttcatctcctaccttagaaagagggcagatgggcagccggcagagtcacaacagtcaccagtcactcaacagtttggtgacaatctcatcaaaccacgtgccagagaatttctcattagaactcacccacgccactcctgctgttgaggtctctcagcttctttcaatgcttcaccaggggcaatatcagccaagaccaagttttcgaggaaacaaatattccaggagctacagatatgcccttcaagacatggacaaatttagcttgaaagacagtggccgtggtgacagtgaggcaggagacagtgattatgatttggggcgagattctccaatagataggctgctgggtgaaggannnnnnnnnnnnnnnctcacagatggaagaattccagcagctatgagactctgcacggaggagtgcagggtcctgggacactctgaccagtgctggatgccaccactgccctcaccgtcttctgattataggagtaacatgttcattccaggggaagaattcccaacgcaaccccagcagcagcatccacatcagagtcttgaggatgacgctcagcctgcagattccggtgaaaagaagaagagtttttccacctttggaaaggactccccaaacgatgaggacactggggataccagcacatcatctctgctctcggaaatgagcagtgtgttccagcgtctcttaccgccttccctggacacctattctgaatgcagtgaggtggatcggtccaactccctggagcgcaggaannnnnnnnnnnnnnnnnnnnnnnnnnnnnacccacagggggtagcggcatgggcagccagtacgcattttcaaaatcccaccaccaactgtgggccgccacttggaactcactccagtgtgcagccttcttcaaaatggctgccagccatggaggagatccctgaaaattatgaggaagatgattttgacaatgtgctcaaccacctcaatgatgggaaacacgaactcatggatgccagtgaactggtggcagagattaacaaactgcttcaagatgtccgccagagctaggagattttagcgaagcatttttgtttccatgtatatggaaatagggaacaacaacaacaacaaaaaaccctgaaagaactggcattgccaaatagttgcatttatcataaatgtgtctgtgtatattgaatattaaatactgtattttcgtatgtacacaatgcaagtgtgattattttaatctgtattttaaaaatacatttgtaccttatatttatgtgtaatttaacaaacaaattttatttttttactcccatgacagacatgtttttcctagtcgtgtagaaactagccactgttcaaatctgatacactattcaaccacaaagtgtaaaggcactgcttagattagttttgttggggaagaattattatgttgtatgaacaaccccactgaagcattatacaattcttaattccattaagtgatcccactttttttcaataactttttagaaattaagaatcattaaaattgttaagctattttattgttattttctctactttctactagccccagtagttgaactcttataggaaaatcgaaagataaagtgaaagtttatttcaggactgagaaatatcttgaaggttatttattagatgactatctcaaatgaactttttatagacaatgatgaaaacagaactaaagtcaatgtttcctgactcccaggcccctactattccaggccatcacactggcctgttccggagaatatttctctcacaatattattatctacttataattatggtaaacaataaattttattccatccttgtagtatgaaacatgctccaaggaaatggaatctgtcctttaaatggataacagtatgtgttctaatggcataaaatattactggataaaaacagttgtgtcagtgtctctcctaaggtagtaaatataattgacttattctgaacccattctattttgaatcttcccctttcctctcacaatacttgaacattttaatcttttggaatattgtctttctttgttataactattcatttttagcttttgtctccagtgcatgatctcatatttttgcttttatttttagtataagaacatttataaaatcatatttttgttactgcaattgttttatttgttgtgtggcaaatgagaaatcctttatttattgtgctgtgatctctctgtgtggaatgccttggtgagagagatgcttattatgactattatcatttctgaccaagcttctattaatgttatttctaataatacactatcttgattgtactctccagaaaatttttctgtcagtgaaaataaaagaaaaattaaagtaaaaaaaaaaaaaaatctataagtcagagtcctgttcctacatatttgttcaaaagcttggcatgcagcaggcccttcctgagcgggtgattcagtgttgagtttcaaataataaacaggcagcattcagttggctgggcgaacaagaaaaacacaatggaaaaggaatgagtttgagacttgtaatgggaatgaaagtagtaagccatattccagctaaataagttaaatgcatttggggaataaagaaaaaagagtaagcaagcaataattgcttgaaatattctttcaaattacaacaaaaaaaaatactttcttaggacattttgtattaaatggtgcaggataaaaaggtatccttacaatgtttccaggaggcaagaatattatcgtccctggcttgctagtcaggaattgaaacactgggaaagttaagtaactgaaaagtgactaaaattcagatatttgaattctcaaatgagtaccacattaaatagaatatattacctctttcaacaggcacattttcctttataggagagattgcaattacaagtgaaatttcagtatatttttcagtagattacacacacaaacgctaaccatatttaaatgcattctgcctttcaacttcacttcctttcagtatatattaccattaagaaaaagacttttatatcctcactgttcttaatttaaagcaccagcagtaatatgggaagctatgctgaaaaccgctattttgaataatgtgaaataaataaaatgcaatatttcattcaacacaaaaaaaaaaaaaaaa

SEQ ID NO: 6139 - DNA, 1114 bp, Homo sapiens
  misc_feature (125)..(125): n is a, c, g, or t
acaagagggcaaagatctcccttctccaaaagagaaaaaaaaaggggtttgggggttcctcctggggaggttaataaccagtaagaggccttttttccagggaccaccatggaacatgtgtgaanctgatgaagcaggaaatttgtatttgattttttacaagttccaggcatagggggataagaagcacaaacggctttattttggcagacaagaggaatattgccagttttgccctatgaagaccaaaaactagggcaaagcctctctgtcagagaaatctcatcatttttcaataccaccaatgcaattgtgaaatgatttgacctaaggtttatctataattcctcagttcacaggtacaacaaatattggctcctccttttaaaggcagtgtgtgtgtatgtatgtgtgtgtgtgttgtgttgattgattttttttttttttttgaattctggaaaactcttaacataaagatttggtctaagggtcagaactttgttctagcctgcaagggatccctaagttctgtcattctaccactaaagccaagcttcttggttctcctcagaagcctacatcatagacagaaacggaaaggcaaaaatgaaaaagaggaatatgaaaaagtgggagagaaaaagaaaaacatgaaaaatttctctataattctattaagtgagaatatgtcagctgggcacagtggctcatgcctgtagtcccagtactttgggaggccaaggcaggtggatcacttgagctcaggagtttgagaccagcctggccaacatggtgaaatcccatctctactaaacattcaaaaattagctgggcatggtggtgcacacctgtagtcccagctactcggaagcctgaggcatgagaatcgtttgaacctgggaggcggaggctgcagtgagccgagactgtgccactgcactccagcctaggtgacagacggagactccatctcaaaaaaaaaaaaaaaaagagagaatatgtcctgtgttagcttgcttaggaaataaagaaagagagagagagagagggagggagggaaagagagaaagagagagagagaaagagagtgagagaaagagagagcaagagagca

SEQ ID NO: 6140 - DNA, 1967 bp, Homo sapiens
  misc_feature (25)..(46): n is a, c, g, or t
ggcgcgctccggctcggccatggannnnnnnnnnnnnnnnnnnnnncgtcttcgcggtggagagcatcgagaagaagcggatccgcaagggcagagtggagtatctggtgaaatggagaggctggtcgcccaaatataacacgtgggaaccggaggagaacatcctggaccccaggctgctgatcgccttccagaacagggaacggcaggagcagctgatgggatatcggaagagagggccgaagcccaaaccgctagtggtgcaggtgcctacctttgcccgtcgttccaatgtcctgaccggcctccaggactcctccactgacaaccgtgccaagctggatttgggcgcgcaggggaagggccaggggcatcagtacgagctcaacagcaagaagcaccaccaccacgccgtcggcctgaatctctcccacgtgcgcaagcgctgcctctccgagacccacggcgagcgcgagccctgcaagaagcggctgactgcgcgcagcatcagcacccccacctgcctggggggcagcccagccgctgagcgcccggccgacctgccaccagccgccgccctcccgcagcccgaggtcatcctgctagactcagacctggatgaacccatagacttgcgctgcgtcaagacgcgcagcgaggccggggagccgcccagctccctccaggtgaagcccgagacaccggcgtcggcggcggtggcggtggcggcggcagcggcacccaccacgacggcggagaagcctccagccgaggcccaggacgaacctgcagagtcgctgagcgagttcaagcccttctttgggaatataattatcaccgacgtcaccgcgaactgcctcaccgttactttcaaggagtacgtgacggtgtagccggagggcgtcggaaggggaagcgccattcccgcgggggggcggggagctgagcacctggggcctcggggcgggctcccctctcgccaacccgccaaccgcgagagacccaggctggcccccagggtgaggacgcccggagcggaggtaaccatgttccccctgcggcggctgtcagacctgggcggaggccccttccacgcggtgccggcggggctcgccctctcctgcccttccccgctggagatggacccccggaacggacagggcagctctgcgcccggcctcagagttctagtattatattttaaccgtgctaacttgtcaagtgctgactctactcccgtttgtacgtggtgttattattgaaatgtattgtttgagctcaaaaggcccgaccaccccccttcgggctgctatatatatatttatttgtaggtatttatatattgaaatataaaaacctagatttatggagtttcctctagatcatgttatattctatatcagacaaactattttcttttgacctttcttcccctccatccagtatttcggttgatttcattttctcccctctcttccccttccacgaactgcaataccagtaaccttggtatatattttttgatactgtacacatggatgtcttgtttctatgtgcaaaaaaaaaaaaaaaaaaaaaattgttaaaaggctacacgagctcttaaaaaggggggctactagaaatgtctaaactataagcttccaactataaccggctggaatggtacatctcaggggcccgcggtgagaggcgccaacaacgacacgacatcacacacaaacaccacctgtgtgtggccgcaccgtcgcccctgaaaaaaacgttcagaacacaccttcgggtgtggccccggcggcccacatggtaagcgagaaccgtggcaccacagggggctcaaaaaagaacactgggcaccgaacaacggcgtggtctccaccaaaaaaacagcccgggggcaccggccgctctgaaccaccagaggggcccgcagccacgggcacacacgggccacgaagcaaaaatga

SEQ ID NO: 6141 - DNA, 4709 bp, Homo sapiens
gaagaaggctccttggtgctttgaagaacatcctgaagattatatcggagacaatatatcaagaatctatttattgaatcatctagaacaaaagccaggagctccctaatggaagcacattagtgtttattttgatgaagaaatatatagattttttaaaacaaccacaaagtagatagctcagtaaaaaatcaattttggaagatgtcactgaacaactcttccaatgtatttctggattcagtgcccagtaataccaatcgctttcaagttagtgtcataaatgagaaccatgagagcagtgcagctgcagatgacaatactgacccaccacattatgaagaaacctcttttggggatgaagctcagaaaagactcagaatcagctttaggcctgggaatcaggagtgctatgacaatttcctccacagtggagaaactgctaaaacagatgccagttttcacgcttatgattctcacacaaacacatactatctacaaacttttggccacaacaccatggatgccgttcccaagatagagtactatcgtaacaccggcagcatcagtgggcccaaggtcaaccgacccagcctgcttgagattcacgagcaactcgcaaagaatgtggcagtcaccccaagttcagctgacagagttgctaacggtgatgggatacctggagatgaacaagctgaaaataaggaagatgatcaagctggtgttgtgaagtttggatgggtgaaaggtgtgctggtaagatgcatgctgaacatctggggagtcatgctcttcattcgcctctcctggattgttggagaagctggaattggtcttggagttatcatcattggcctatccaccatagtaacgacaatcacaggtatgtccacgtctgctattgccacgaacggagttgttagaggaggtggggcctactatcttatttccagaagtttagggcccgagttcggtgggtcaataggcctgatctttgcttttgctaatgcagtggctgttgctatgtatgtggtgggattcgctgaaactgtagtagatctacttaaggagagtgattcgatgatggtggatccaaccaatgacatccggattataggctccatcacagtggtgattcttctaggaatttcagtagctggaatggaatgggaggcaaaggcccaagtcattcttctggtcattcttctaattgctattgcaaacttcttcattggaactgtcattccatccaacaatgagaaaaagtccagaggtttctttaattaccaagcatcaatatttgcagaaaactttgggccacgcttcacaaagggtgaaggcttcttctctgtctttgccatttttttcccagcagctactgggattcttgctggtgccaatatctcaggagatttggaggatccccaagatgccatccccagaggaaccatgctggccattttcatcaccactgttgcctacttaggggttgcaatttgtgtaggggcctgtgtggtccgagatgccaccgggaacatgaatgacaccatcatttctgggatgaactgcaatggttcagcagcatgtgggttgggctatgacttctcaagatgtcgacatgaaccatgtcagtacgggctgatgaacaatttccaggtcatgagcatggtatcagggttcggccccctcatcactgcgggaatcttttctgcaacactctcctccgccctggcctcccttgtcagcgcacccaaagtgttccaggctctgtgcaaggacaacatctacaaagccctgcagttttttgcaaagggatatgggaaaaacaatgaacccctgagaggatatattctcacttttcttatagccatggcatttattcttattgcggaactgaacaccattgctcccatcatctccaactttttcctggcctcatatgcacttattaatttctcctgcttccatgcctcttatgccaaatctccaggatggagacctgcgtatggaatttacaacatgtgggtatctctttttggagctgttttgtgctgtgcagtcatgtttgtcatcaactggtgggcagctgtcatcacctatgtcattgaattcttcctttacgtctatgtgacttgtaagaagccagatgtgaactggggctcctccacacaggctctttcctacgtgagtgctttagacaatgctctggaattaaccacagtggaagaccacgtaaaaaacttcaggccccagtgcattgtcttaacagggggacccatgacaagacctgctctcctggacataactcacgcctttaccaagaacagtggcctttgcatctgctgtgaagtctttgtgggaccgcgcaaactgtgtgttaaggagatgaacagtggcatggcgaaaaaacaggcctggcttataaagaacaaaatcaaggctttttatgctgcagtggcggcagactgtttcagggatggtgtccgaagtcttcttcaggcctcaggcttaggaagaatgaaaccaaacactctggtgattggatataagaaaaactggaggaaagctcccttgacagagattgagaactacgtgggaatcatacatgatgcatttgattttgagattggcgtggttatagtcagaatcagccaaggatttgacatctctcaggttcttcaggtgcaagaggaattagagagattagaacaggagagactagcattggaagcgactatcaaagataatgagtgtgaagaggaaagtggaggcatccgaggcttgtttaaaaaagctggcaagttgaacattactaagacaacgcctaaaaaagatggcagcattaacacaagccagtcgatgcatgtgggagagttcaaccagaaactggtggaagccagcactcaatttaaaaagaaacaagaaaaaggcacaattgatgtttggtggttgtttgatgatggagggttaacacttcttatcccctatatcttaactctcagaaaaaaatggaaagactgtaaattaagaatctatgtgggagggaagatcaaccgcattgaagaagaaaaaattgcaatggcttcccttctgagcaaatttaggataaaatttgcagacatccatatcatcggtgacatcaacattaggccaaacaaagagagctggaaagtctttgaagagatgattgaaccatatcgtctccatgaaagctgcaaagatttaacaactgctgagaaattaaaaagagaaactccgtggaaaattacagatgcagaactggaagcagtcaaggaaaagagttaccgccaagttcgactgaatgaactcttacaggagcactccagagctgctaatctcattgtcctgagccttcccgtggcaagaaagggatccatatcggatttgttgtatatggcttggttggaaatcctcacaaagaacctcccacctgtcttactagttagaggaaatcacaaaaatgtcttgacattttactcttaaaacatgaaagattggaatacattttaacttaatgtaatgcataattaagaaacatgttccagtactttatgttgtaaatctgatctatggatatgcaaacctctggagatgatcctaccagattctacatacattgcataatttttatcagttaatgcgagcttttttttctcttctcagcttaaggggttgtcaaagccaatgttatccctagaaaaacatttttgtcactgctgttgataaacaagaaaatcaaggaaactcatgttggcttatgctcatggaaaccaccaatgtgattgtaaacttctccagacaaacttaaccttttgtttcttaatttttgttttgagtgtttgcttctcagccctggtataggtctcagccccacagcaggatctcaataaatgcttattgacaggctggcatagtaaccacaggtggttatcaaaggaaaagaccaataggctggggaacataattatgcttggccccctcagaggcttatacctccaaagcagatttaaaaatcagtaactcaaaactttaagaagtagttgagtctacaaaatattcaaagcagttacctaaataaggttatttaatgtaacagattatatacttaaagtgatctgagcaatcattgataacatatggcttaaatttgctgctgcctgaaaagtatattaactagattagaagacaccatatactccaataaaatgaaatatattctattctcaatatataaactttaattgtactccctatcaaatattttgaaatttccatcacggcattactttgcatatttttttctaattaaatggttagtacagatgaaatctttatagatgactacttgaaaactaagtgctacaaattttcaaaccattattaagaaatatatcctgaatcatatatttagttactttctatagtgattgtatggatttaaaagaataattaaaatgtgaagttgaaaaacttgtaaaatttggaatatacagatactgatttttttcatttttgttagtatacctataatacataatcacattgacaaaccaatgaaaatattgtttttctgatgaatggcttgatttttctccttgacatgttttgactgttcattctaactgaaaacatatatgggaaaatatgaacctgaaataaaagcactcaaattcaaaaaaaaaaaaaaa

SEQ ID NO: 6142 - DNA, 2051 bp, Homo sapiens
  misc_feature (1593)..(1610): n is a, c, g, or t
gcaacttgaattggtcccagctgctcccagaagaacgggcgggttggtccctatgccacccctggagagctactcgccgcccactttgccgtgaagggctgtgcggttcccgtgcgcgccggagcctgctgtggcctcttatgcactccaccacccccatcagctccctcttctccttcaccagccccgcagtgaagagactgctaggctggaagcaaggagatgaagaggaaaagtgggcagagaaggcagtggactctctagtgaagaagttaaagaagaagaagggagccatggacgagctggagagggctctcagctgcccggggcagcccagcaaatgcgtcacgattccccgctccctggacgggcggctgcaggtgtcccaccgcaagggcctgccccatgtgatttactgtcgcgtgtggcgctggccggatctgcagtcccaccacgagctgaagccgctggagtgctgtgagttcccatttggctccaagcagaaagaagtgtgcattaacccttaccactaccgccgggtggagactccagtactgcctcctgtgctcgtgccaagacacagtgaatataacccccagctcagcctcctggccaagttccgcagcgcctccctgcacagtgagccactcatgccacacaacgccacctatcctgactctttccagcagcctccgtgctctgcactccctccctcacccagccacgcgttctcccagtccccgtgcacggccagctaccctcactccccaggaagtccttctgagccagagagtccctatcaacactcagactttcgaccagtttgttacgaggagccccagcactggtgctcggtcgcctactatgaactgaacaaccgagttggggagacattccaggcttcctcccgaagtgtgctcatagatgggttcaccgacccttcaaataacaggaacagattctgtcttggacttctttctaatgtaaacagaaactcaacgatagaaaataccaggagacatataggaaagggtgtgcacttgtactacgtcgggggagaggtgtatgccgagtgcgtgagtgacagcagcatctttgtgcagagccggaactgcaactatcaacacggcttccacccagctaccgtctgcaagatccccagcggctgcagcctcaaggtcttcaacaaccagctcttcgctcagctcctggcccagtcagttcaccacggctttgaagtcgtgtatgaactgaccaagatgtgtactatccggatgagttttgttaagggttggggtgctgagtatcatcgccaggatgtcaccagcaccccctgctggattgagattcatcttcatgggccactgcagtggctggacaaagttctgactcagatgggctctccacataaccccatttcttcagtgtcttaacagtcatgtcttaagctgcatttccataggatagaggctattgcagggagtggcttgtatcatttcagatttgcaactgaagtttctaaaaacatgtgtaaatacatagaatgtatactgttcttattttttttaatcaccgtttgttttgtgctttctnnnnnnnnnnnnnnnnnntacagtgcaattggaaaagcaggactttggtgcctgtgctataagcagcagattttgtgggaggaaacacttgagaggcgatattgtcaacagtatttgaagggtgttagcagaataaaagacagctttagtcagccgtgtcattataaagcatgttgtgtggcctcacagaaacattgaaactgtttatacagcaaaagtcaggtattagcagcactaaagcaaatatcactcagatgaaacaaagcagtgaaaccctacagtttaaatgatgtcacttttagtgctgttggcaagaaaaaaaaaaaaaaaaaccaaaaaaaaaaaaaaaaaagataggccatagaaactttatttctaaggttgacatacctatagctgggctcctgtgctcatattcagtggtacattttaaacaaactgtgatcggaaaaaaaaaaa

SEQ ID NO: 6143 - DNA, 2545 bp, Homo sapiens
  misc_feature (2066)..(2081): n is a, c, g, or t
acagcaatctcgggaaattggagactgacgcggctgctcctgcatgttatttatttttcctctttccctcccgtggagaccctcctgttggaaagagagctgcagcacgggacagagacaggcaggaagaagcagagaggactcggtgacgcccccaccgagcagcccctggcccactcctccagcaggggccatgagcaccaagcaggaggccaggagagatgagggagaagccaggacgagggggcaggaggcacagcttcgagaccgagcccacctgagccagcagcgccggctcaaacaggccacccagttcctgcacaaggactcggccgacctgctcccgctggacagcctcaagaggctcggcacctccaaggacttgcagccgcgcagtgtgatccaaagacgcctggtggagggaaacccgaattggcttcagggggagcctccccggatgcaggacctgattcatggccaggagagcaggaggaagaccagcaggacagagattccagctcttctggtcaactgcaagtgccaggaccagctgcttagagtggccgttgacacaggcacccaatacaatcggatctctgctggatgtctcagccgcctggggttagagaaaagggtcctaaaagcctcagctggggacctggcccctgggcccccaacccaggtggagcagttggagctacagctggggcaggagactgtggtgtgctcggcacaggtggtggatgctgagagtcctgaattctgcctgggcctgcagactctgctttctctcaagtgctgcatcgacctggagcacggagtgctgcggctgaaagccccgttctcagagctacccttcctgcctttgtaccaagagcctggccagtgactgctgtctcagtcagtccccagagggaaagaccttgccttagaagaagaggcgtgtggggaacgggggctcttgaagccaggtagctggggactatggtgtctgcccttccaatcacctccctgacccctgctgtcccattttccccagctggccgcattcctctctgcttctcagcagctgtcctactccccaggacgagttttcactagagggcccacgatgccaggattctgattcatcttcctcccaagaaaagcaaagccaaatcaagaccacagataggaacctaagcacaatggggtgcctgcttgggctgggtcgaaggctctgctgactgctgtccttgtccatcacccaataccaccccagacacaactcaacttcccacaccaccatgtctctcaccacaccttctgggcctcattatctcccacaactagaccgccatgcctcaccaacctatgtccctggacctcctggtgtctgcctctcggagtctgtgcacatctgctcacagttgagtgggggaagaaacagccagaattcaatacaacaaagagcgggagttagtataggaatgtccatctcataaggctgagagctattttttcctgtggctgcaaatgtctgaagccagttagtttgattaccctgtgcaaaaccttggacatacttctgctattaacgctataggtatttatccgtttccactggctttttgtacccaccgagcccctgagccttgcgtgtgtgtgtggaagagccttgtagagaactgctcctgtgaggcagacaggacagtgaggttgtcaccactcagacttcacctattcagcattctttctgatttctagaactatccctgagagtctttctggctggtttgagtctctcaaatcatggattaggagtaaagaaagaggccaggcgcaatggctcatgcctgtaatcccagcactttgggaggctgaggtgggtggatcacttgaggtcaggagtttgagaccagcctgggtaatatggcaaaaccccatctctactaaaaaatacaaaaattagccaggtatggtggtgaacacctgtaatcccagctacttggaaggctgaggcataggagttgcttgaacctgggagatgggggttgtagtgagccaagttcgtgccatcggactcnnnnnnnnnnnnnnnngtgagaccctgtctccaaaaacaaacaaaaaaggagcagagaaagacagtggtacagctaacctgaacaagggaactgggaccgttgggctgaaacagtcttgagcctggggttgactgggttagagaagaaccgggatgcaaggagctgcctgtgacacctggcctgccctttctcagctgcctcccctgccctttctcagctgcctcccctgccctcagaaggaaaggagagggctcacttatcacttgtgccatagcacctggtctcaaaatcctaaaagctttcctcgccctcactgccttgctccacaaggtccactttcctgggtcttgtgctgtgcctttccttgtctgcctcctgctgcttctgtaactgcagaccccaggcccaatggcaagccctcggctcagctgcttctccattggaataaactcttgtttctctaaaaaaaaaaaaaaaaa

SEQ ID NO: 6144 - DNA, 488 bp, Homo sapiens
ttttttttttttttttttggtgtgagctccctggaagccccaggatgtgatctttaatcgatgctcctggccctgcctccccacccccagcccaggtggcgtatgtacaggatgctgtgtggaggcccaggcagaggcagcctccactcctccctgggttctgccagggtaggcactcgccagggcggggcaggaggatacagacagctgggagccagggtggactggtcacaggaagtctcatgttccccaccccatatacacgagcacacacagatacacccatatgtgcagaggtattcacacttgtgcagaggtgtggatccaaaagctgtgcccagatgcactgtacctgtgtgcacgggtgcaccaaccagaggacagatgccttaaggcagcgcagcaatagtgcaacacccagcccttcccccgccctgcatcagcttgcatggctggtggagcatatctggccggagggggccctccac

SEQ ID NO: 6145 - DNA, 1740 bp, Homo sapiens
  misc_feature (45)..(45): n is a, c, g, or t
  misc_feature (63)..(63): n is a, c, g, or t
  misc_feature (66)..(67): n is a, c, g, or t
  misc_feature (93)..(93): n is a, c, g, or t
  misc_feature (96)..(97): n is a, c, g, or t
  misc_feature (100)..(100): n is a, c, g, or t
  misc_feature (125)..(126): n is a, c, g, or t
  misc_feature (132)..(133): n is a, c, g, or t
  misc_feature (135)..(135): n is a, c, g, or t
  misc_feature (195)..(195): n is a, c, g, or t
  misc_feature (1019)..(1115): n is a, c, g, or t
tataggagccacagtcaggaaagcacttgaggcagcattttttgngccacccccggttcagtnttnnaattttgcattttagttttcccaggnaannggnttgggggtaggtgggctccacaggnngggggnngnccatgtccactgagtatctcccttatgttgctgtgatattgatagcttttattttctaanttttaaaaaatggtcatattatgagtcaaagagtatcaaatcagtgttggatggaccacccaagggtgaggagaggggctggaagccctgggcattaggagaagggagtgggtgctggcatggacatgactggatagaattttctcaggagggagcttggtggattttgaaggtaaaactttctgggtttatcatgttttaattttagagacagggagcgcatgaatcatcaccggttgtccccttatctaactccataaaagtgggaatttcaaaagaacacctcatccaaggagctggggcagacttcattgattctagagagacctgtttcagtgcctactcatccctgccctctggtgccagcctccttaccatcacggcttcactgaggtgtaggtgggtttttcttaaacaggagacagtctctcccctcttacctcaacttcttggggtgggaatcagtgatactggagatggctagttgctgtgttacgggtttgagttacatttggctataaaacaatcttgttgggaaaaatgtgggggagaggacttcttcctacacgcgcattgagacagattccaactggttaatgatattgtttgtaagaaagagattctgttggttgactgcctaaagagaaaggtgggatggccttcagattataccagcttagctagcattactaaccaactgttggaagctctgaaaataaaagatcttgaacccaaaaaaaaaaaaaaaaaagagaaagaaacagaaacaaaaaaataataaaatacaaaaaaaacacaaagagaggggacggcggtacccagtnnnnnnnnnnnnnnnnnnnnnnnnnnnnnnnnnnnnnnnnnnnnnnnnnnnnnnnnnnnnnnnnnnnnnnnnnnnnnnnnnnnnnnnnnnnnnnnnnctgggaaaaacgtggctacgcctggggaatacaaaggtgaagggacagcgcttaccttctggtggccgtggagcataattgggaacaaggcatacctaacaggaggaggggagagagacatcataaggggtgaaaaataatcaaaaacttttagaaagaatttattaaagggctggtataagggtgtaaacttgcaataatgtcttgacatgggatagaaggagggttttggactaaacatggaggaaattaaattctacgtgcaaacccattaattaagtatctgcgaggggagccctgcgtgatataaaactttgaggaaccacacactttctttatatcaacagcggggagccattggaattcacaaaaacaccaacccctaccaaaaaccagacgctgcactaacaacacatagcacgacccggaggagagcgagacagaaacggagacgaaagtgatgcaagaataagaggagtgatgtcggaaagaccatgacgaagaccgagggagccggcgaaaaaatcagacaccgtcacatgagaggtgacgaacacaacgtcgcagatgatactagaaggaactaccgaacccaagacacagcgagaaccaacacgggagaacc

SEQ ID NO: 6146 - DNA, 4416 bp, Homo sapiens
  misc_feature (1591)..(1606): n is a, c, g, or t
  misc_feature (2276)..(2330): n is a, c, g, or t
ccgcgctctctgatcagaggcgaagctcggaggtcctacaggtatggatctctggcagctgctgttgaccttggcactggcaggatcaagtgatgctttttctggaagtgaggccacagcagctatccttagcagagcaccctggagtctgcaaagtgttaatccaggcctaaagacaaattcttctaaggagcctaaattcaccaagtgccgttcacctgagcgagagactttttcatgccactggacagatgaggttcatcatggtacaaagaacctaggacccatacagctgttctataccagaaggaacactcaagaatggactcaagaatggaaagaatgccctgattatgtttctgctggggaaaacagctgttactttaattcatcgtttacctccatctggataccttattgtatcaagctaactagcaatggtggtacagtggatgaaaagtgtttctctgttgatgaaatagtgcaaccagatccacccattgccctcaactggactttactgaacgtcagtttaactgggattcatgcagatatccaagtgagatgggaagcaccacgcaatgcagatattcagaaaggatggatggttctggagtatgaacttcaatacaaagaagtaaatgaaactaaatggaaaatgatggaccctatattgacaacatcagttccagtgtactcattgaaagtggataaggaatatgaagtgcgtgtgagatccaaacaacgaaactctggaaattatggcgagttcagtgaggtgctctatgtaacacttcctcagatgagccaatttacatgtgaagaagatttctactttccatggctcttaattattatctttggaatatttgggctaacagtgatgctatttgtattcttattttctaaacagcaaaggattaaaatgctgattctgcccccagttccagttccaaagattaaaggaatcgatccagatctcctcaaggaaggaaaattagaggaggtgaacacaatcttagccattcatgatagctataaacccgaattccacagtgatgactcttgggttgaatttattgagctagatattgatgagccagatgaaaagactgaggaatcagacacagacagacttctaagcagtgaccatgagaaatcacatagtaacctaggggtgaaggatggcgactctggacgtaccagctgttgtgaacctgacattctggagactgatttcaatgccaatgacatacatgagggtacctcagaggttgctcagccacagaggttaaaaggggaagcagatctcttatgccttgaccagaagaatcaaaataactcaccttatcatgatgcttgccctgctactcagcagcccagtgttatccaagcagagaaaaacaaaccacaaccacttcctactgaaggagctgagtcaactcaccaagctgcccatattcagctaagcaatccaagttcactgtcaaacatcgacttttatgcccaggtgagcgacattacaccagcaggtagtgtggtcctttccccgggccaaaagaataaggcagggatgtcccaatgtgacatnnnnnnnnnnnnnnnntcactctgccaagaaaacttccttatggacaatgcctacttctgtgaggcagatgccaaaaagtgcatccctgtggctcctcacatcaaggttgaatcacacatacagccaagcttaaaccaagaggacatttacatcaccacagaaagccttaccactgctgctgggaggcctgggacaggagaacatgttccaggttctgagatgcctgtcccagactatacctccattcatatagtacagtccccacagggcctcatactcaatgcgactgccttgcccttgcctgacaaagagtttctctcatcatgtggctatgtgagcacagaccaactgaacaaaatcatgccttagcctttctttggtttcccaagagctacgtatttaatagcaaagaattgactggggcaataacgtttaagccaaaacaatgtttaaaccttttttgggggagtgacaggatggggtatggattctaaaatgccttttcccaaaatgttgaaatatgatgttaaaaaaataagaagaatgcttaatcagatagatattcctattgtgcaatgtaaatattttaaagaattgtgtcagactgtttagtagcagtgattgtcttaatattgtgggtgttaatttttgatactaagcattgaatggctatgtttttaatgtnnnnnnnnnnnnnnnnnnnnnnnnnnnnnnnnnnnnnnnnnnnnnnnnnnnnnnncaggaaaattgaatgcaaaccatagcacaggctaattttttgttgtttcttaaataagaaacttttttatttaaaaaactaaaaactagaggtgagaaatttaaactataagcaagaaggcaaaaatagtttggatatgtaaaacatttactttgacataaagttgataaagattttttaataatttagacttcaagcatggctattttatattacactacacactgtgtactgcagttggtatgacccctctaaggagtgtagcaactacagtctaaagctggtttaatgttttggccaatgcacctaaagaaaaacaaactcgttttttacaaagcccttttatacctccccagactccttcaacaattctaaaatgattgtagtaatctgcattattggaatataattgttttatctgaatttttaaacaagtatttgttaatttagaaaactttaaagcgtttgcacagatcaacttaccaggcaccaaaagaagtaaaagcaaaaaagaaaacctttcttcaccaaatcttggttgatgccaaaaaaaaatacatgctaagagaagtagaaatcatagctggttcacactgaccaagatacttaagtgctgcaattgcacgcggagtgagttttttagtgcgtgcagatggtgagagataagatctatagcctctgcagcggaatctgttcacacccaacttggttttgctacataattatccaggaagggaataaggtacaagaagcattttgtaagttgaagcaaatcgaatgaaattaactgggtaatgaaacaaagagttcaagaaataagtttttgtttcacagcctataaccagacacatactcatttttcatgataatgaacagaacatagacagaagaaacaaggttttcagtccccacagataactgaaaattatttaaaccgctaaaagaaactttctttctcactaaatcttttataggatttatttaaaatagcaaaagaagaagtttcatcattttttacttcctctctgagtggactggcctcaaagcaagcattcagaagaaaaagaagcaacctcagtaatttagaaatcattttgcaatcccttaatatcctaaacatcattcatttttgttgttgttgttgttgttgagacagagtctcgctctgtcgccaggctagagtgcggtggcgcgatcttgactcactgcaatctccacctcccacaggttcaggcgattcccgtgcctcagcctcctgagtagctgggactacaggcacgcaccaccatgccaggctaatttttttgtattttagcagagacggggtttcaccatgttggccaggatggtctcgagtctcctgacctcgtgatccacccgactcggcctcccaaagtgctgggattacaggtgtaagccaccgtgcccagccctaaacatcattcttgagagcattgggatatctcctgaaaaggtttatgaaaaagaagaatctcatctcagtgaagaatacttctcattttttaaaaaagcttaaaactttgaagttagctttaacttaaatagtatttcccatttatcgcagaccttttttaggaagcaagcttaatggctgataattttaaattctctctcttgcaggaaggactatgaaaagctagaattgagtgtttaaagttcaacatgttatttgtaatagatgtttgatagattttctgctactttgctgctatggttttctccaagagctacataatttagtttcatataaagtatcatcagtgtagaacctaattcaattcaaagctgtgtgtttggaagactatcttactatttcacaacagcctgacaacatttctatagccaaaaatagctaaatacctcaatcagtctcagaatgtcattttggtactttggtggccacataagccattattcactagtatgactagttgtgtctggcagtttatatttaactctctttatgtctgtggattttttccttcaaagtttaataaatttattttcttggattcctgataatgtgcttctgttatcaaacaccaacataaaaatgatctaaacc

SEQ ID NO: 6147 - DNA, 9456 bp, Homo sapiens
  misc_feature (1985)..(1999): n is a, c, g, or t
gcaacaccaggactcgggctggaggggcgctgggctcggacctgccaaggccaccgcaggggggagcaagggacagaggcgggggtcctagctgacggcttttactgcctaggatgacgctgcggcttctggtggccgcgctctgcgccgggatcctggcagaggcgccccgagtgcgagcccagcacagggagagagtgacctgcacgcgcctttacgccgctgacattgtgttcttactggatggctcctcatccattggccgcagcaatttccgcgaggtccgcagctttctcgaagggctggtgctgcctttctctggagcagccagtgcacagggtgtgcgctttgccacagtgcagtacagcgatgacccacggacagagttcggcctggatgcacttggctctgggggtgatgtgatccgcgccatccgtgagcttagctacaaggggggcaacactcgcacaggggctgcaattctccatgtggctgaccatgtcttcctgccccagctggcccgacctggtgtccccaaggtctgcatcctgatcacagacgggaagtcccaggacctggtggacacagctgcccaaaggctgaaggggcagggggtcaagctatttgctgtggggatcaagaatgctgaccctgaggagctgaagcgagttgcctcacagccaacctccgacttcttcttcttcgtcaatgacttcagcatcttgaggacactactgcccctcgtttcccggagagtgtgcacgactgctggtggcgtgcctgtgacccgacctccggatgactcgacctctgctccacgagacctggtgctgtctgagccaagcagccaatccttgagagtacagtggacagcggccagtggccctgtgactggctacaaggtccagtacactcctctgacggggctgggacagccactgccgagtgagcggcaggaggtgaacgtcccagctggtgagaccagtgtgcggctgcggggtctccggccactgaccgagtaccaagtgactgtgattgccctctacgccaacagcatcggggaggctgtgagcgggacagctcggaccactgccctagaagggccggaactgaccatccagaataccacagcccacagcctcctggtggcctggcggagtgtgccaggtgccactggctaccgtgtgacatggcgggtcctcagtggtgggcccacacagcagcaggagctgggccctgggcagggttcagtgttgctgcgtgacttggagcctggcacggactatgaggtgaccgtgagcaccctatttggccgcagtgtggggcccgccacttccctgatggctcgcactgacgcttctgttgagcagaccctgcgcccggtcatcctgggccccacatccatcctcctttcctggaacttggtgcctgaggcccgtggctaccggttggaatggcggcgtgagactggcttggagccaccgcagaaggtggtactgccctctgatgtgacccgctaccagttggatgggctgcagccgggcactgagtaccgcctcacactctacactctgctggagggccacgaggtggccacccctgcaaccgtggttcccactggaccagagctgcctgtgagccctgtaacagacctgcaagccaccgagctgcccgggcagcgggtgcgagtgtcctggagcccagtccctggtgccacccagtaccgcatcattttgcgcagcacccagggggttgagcggaccctggtgcttcctgggagtcagacagcattcgacttggatgacgttcaggctgggcttagctacactgtgcgggtgtctgctcgagtgggtccccgtgagggcagtgccagtgtcctcactgtccgccgggagccggaaactccacttgctgttccagggctgcgggttgtggtgtcagatgcaacgcgagtgagggtggcctggggacccgtccctggagcnnnnnnnnnnnnnnntagctggagcacaggcagtggtccggagtccagccagacactgcccccagactctactgccacagacatcacagggctgcagcctggaaccacctaccaggtggctgtgtcggtactgcgaggcagagaggagggccctgctgcagtcatcgtggctcgaacggacccactgggcccagtgaggacggtccatgtgactcaggccagcagctcatctgtcaccattacctggaccagggttcctggcgccacaggatacagggtttcctggcactcagcccacggcccagagaaatcccagttggtttctggggaggccacggtggctgagctggatggactggagccagatactgagtatacggtgcatgtgagggcccatgtggctggcgtggatgggccccctgcctctgtggttgtgaggactgcccctgagcctgtgggtcgtgtgtcgaggctgcagatcctcaatgcttccagcgacgttctacggatcacctgggtaggggtcactggagccacagcttacagactggcctggggccggagtgaaggcggccccatgaggcaccagatactcccaggaaacacagactctgcagagatccggggtctcgaaggtggagtcagctactcagtgcgagtgactgcacttgtcggggaccgcgagggcacacctgtctccattgttgtcactacgccgcctgaggctccgccagccctggggacgcttcacgtggtgcagcgcggggagcactcgctgaggctgcgctgggagccggtgcccagagcgcagggcttccttctgcactggcaacctgagggtggccaggaacagtcccgggtcctggggcccgagctcagcagctatcacctggacgggctggagccagcgacacagtaccgcgtgaggctgagtgtcctagggccggctggagaagggccctctgcagaggtgactgcgcgcactgagtcacctcgtgttccaagcattgaactacgtgtggtggacacctcgatcgactcggtgactttggcctggactccagtgtccagggcatccagctacatcctatcctggcggccactcagaggccctggccaggaagtgcctgggtccccgcagacacttccagggatctcaagctcccagcgggtgacagggctagagcctggcgtctcttacatcttctccctgacgcctgtcctggatggtgtgcggggtcctgaggcatctgtcacacagacgccagtgtgcccccgtggcctggcggatgtggtgttcctaccacatgccactcaagacaatgctcaccgtgcggaggctacgaggagggtcctggagcgtctggtgttggcacttgggcctcttgggccacaggcagttcaggttggcctgctgtcttacagtcatcggccctccccactgttcccactgaatggctcccatgaccttggcattatcttgcaaaggatccgtgacatgccctacatggacccaagtgggaacaacctgggcacagccgtggtcacagctcacagatacatgttggcaccagatgctcctgggcgccgccagcacgtaccaggggtgatggttctgctagtggatgaacccttgagaggtgacatattcagccccatccgtgaggcccaggcttctgggcttaatgtggtgatgttgggaatggctggagcggacccagagcagctgcgtcgcttggcgccgggtatggactctgtccagaccttcttcgccgtggatgatgggccaagcctggaccaggcagtcagtggtctggccacagccctgtgtcaggcatccttcactactcagccccggccagagccctgcccagtgtattgtccaaagggccagaagggggaacctggagagatgggcctgagaggacaagttgggcctcctggcgaccctggcctcccgggcaggaccggtgctcccggcccccaggggccccctggaagtgccactgccaagggcgagaggggcttccctggagcagatgggcgtccaggcagccctggccgcgccgggaatcctgggacccctggagcccctggcctaaagggctctccagggttgcctggccctcgtggggacccgggagagcgaggacctcgaggcccaaagggggagccgggggctcccggacaagtcatcggaggtgaaggacctgggcttcctgggcggaaaggggaccctggaccatcgggcccccctggacctcgtggaccactgggggacccaggaccccgtggccccccagggcttcctggaacagccatgaagggtgacaaaggcgatcgtggggagcggggtccccctggaccaggtgaaggtggcattgctcctggggagcctgggctgccgggtcttcccggaagccctggaccccaaggccccgttggcccccctggaaagaaaggagaaaaaggtgactctgaggatggagctccaggcctcccaggacaacctgggtctccgggtgagcagggcccacggggacctcctggagctattggccccaaaggtgaccggggctttccagggcccctgggtgaggctggagagaagggcgaacgtggacccccaggcccagcgggatcccgggggctgccaggggttgctggacgtcctggagccaagggtcctgaagggccaccaggacccactggccgccaaggagagaagggggagcctggtcgccctggggaccctgcagtggtgggacctgctgttgctggacccaaaggagaaaagggagatgtggggcccgctgggcccagaggagctaccggagtccaaggggaacggggcccacccggcttggttcttcctggagaccctggccccaagggagaccctggagaccggggtcccattggccttactggcagagcaggacccccaggtgactcagggcctcctggagagaagggagaccctgggcggcctggccccccaggacctgttggcccccgaggacgagatggtgaagttggagagaaaggtgacgagggtcctccgggtgacccgggtttgcctggaaaagcaggcgagcgtggccttcggggggcacctggagttcgggggcctgtgggtgaaaagggagaccagggagatcctggagaggatggacgaaatggcagccctggatcatctggacccaagggtgaccgtggggagccgggtcccccaggacccccgggacggctggtagacacaggacctggagccagagagaagggagagcctggggaccgcggacaagagggtcctcgagggcccaagggtgatcctggcctccctggagcccctggggaaaggggcattgaagggtttcggggacccccaggcccacagggggacccaggtgtccgaggcccagcaggagaaaagggtgaccggggtccccctgggctggatggccggagcggactggatgggaaaccaggagccgctgggccctctgggccgaatggtgctgcaggcaaagctggggacccagggagagacgggcttccaggcctccgtggagaacaaggcctccctggcccctctggtccccctggattaccgggaaagccaggcgaggatgggaaacctggcctgaatggaaaaaacggagaacctggggaccctggagaagacgggaggaagggagagaaaggagattcaggcgcctctgggagagaaggtcgtgatggccccaagggtgagcgtggagctcctggtatccttggaccccaggggcctccaggcctcccagggccagtgggccctcctggccagggttttcctggtgtcccaggaggcacgggccccaagggtgaccgtggggagactggatccaaaggggagcagggcctccctggagagcgtggcctgcgaggagagcctggaagtgtgccgaatgtggatcggttgctggaaactgctggcatcaaggcatctgccctgcgggagatcgtggagacctgggatgagagctctggtagcttcctgcctgtgcccgaacggcgtcgaggccccaagggggactcaggcgaacagggccccccaggcaaggagggccccatcggctttcctggagaacgcgggctgaagggcgaccgtggagaccctggccctcaggggccacctggtctggcccttggggagaggggcccccccgggccttccggccttgccggggagcctggaaagcctggtattcccgggctcccaggcagggctgggggtgtgggagaggcaggaaggccaggagagaggggagaacggggagagaaaggagaacgtggagaacagggcagagatggccctcctggactccctggaacccctgggccccccggaccccctggccccaaggtgtctgtggatgagccaggtcctggactctctggagaacagggaccccctggactcaagggtgctaagggggagccgggcagcaatggtgaccaaggtcccaaaggagacaggggtgtgccaggcatcaaaggagaccggggagagcctggaccgaggggtcaggacggcaacccgggtctaccaggagagcgtggtatggctgggcctgaagggaagccgggtctgcagggtccaagaggcccccctggcccagtgggtggtcatggagaccctggaccacctggtgccccgggtcttgctggccctgcaggaccccaaggaccttctggcctgaagggggagcctggagagacaggacctccaggacggggcctgactggacctactggagctgtgggacttcctggaccccccggcccttcaggccttgtgggtccacaggggtctccaggtttgcctggacaagtgggggagacagggaagccgggagccccaggtcgagatggtgccagtggaaaagatggagacagagggagccctggtgtgccagggtcaccaggtctgcctggccctgtcggacctaaaggagaacctggccccacgggggcccctggacaggctgtggtcgggctccctggagcaaagggagagaagggagcccctggaggccttgctggagacctggtgggtgagccgggagccaaaggtgaccgaggactgccagggccgcgaggcgagaagggtgaagctggccgtgcaggggagcccggagaccctggggaagatggtcagaaaggggctccaggacccaaaggtttcaagggtgacccaggagtcggggtcccgggctcccctgggcctcctggccctccaggtgtgaagggagatctgggcctccctggcctgcccggtgctcctggtgttgttgggttcccgggtcagacaggccctcgaggagagatgggtcagccaggccctagtggagagcggggtctggcaggccccccagggagagaaggaatcccaggacccctggggccacctggaccaccggggtcagtgggaccacctggggcctctggactcaaaggagacaagggagaccctggagtagggctgcctgggccccgaggcgagcgtggggagccaggcatccggggtgaagatggccgccccggccaggagggaccccgaggactcacggggccccctggcagcaggggagagcgtggggagaagggtgatgttgggagtgcaggactaaagggtgacaagggagactcagctgtgatcctggggcctccaggcccacggggtgccaagggggacatgggtgaacgagggcctcggggcttggatggtgacaaaggacctcggggagacaatggggaccctggtgacaagggcagcaagggagagcctggtgacaagggctcagccgggttgccaggactgcgtggactcctgggaccccagggtcaacctggtgcagcagggatccctggtgacccgggatccccaggaaaggatggagtgcctggtatccgaggagaaaaaggagatgttggcttcatgggtccccggggcctcaagggtgaacggggagtgaagggagcctgtggccttgatggagagaagggagacaagggagaagctggtcccccaggccgccccgggctggcaggacacaaaggagagatgggggagcctggtgtgccgggccagtcgggggcccctggcaaggagggcctgatcggtcccaagggtgaccgaggctttgacgggcagccaggccccaagggtgaccagggcgagaaaggggagcggggaaccccaggaattgggggcttcccaggccccagtggaaatgatggctctgctggtcccccagggccacctggcagtgttggtcccagaggccccgaaggacttcagggccagaagggtgagcgaggtccccccggagagagagtggtgggggctcctggggtccctggagctcctggcgagagaggggagcaggggcggccagggcctgccggtcctcgaggcgagaagggagaagctgcactgacggaggatgacatccggggctttgtgcgccaagagatgagtcagcactgtgcctgccagggccagttcatcgcatctggatcacgacccctccctagttatgctgcagacactgccggctcccagctccatgctgtgcctgtgctccgcgtctctcatgcagaggaggaagagcgggtaccccctgaggatgatgagtactctgaatactccgagtattctgtggaggagtaccaggaccctgaagctccttgggatagtgatgacccctgttccctgccactggatgagggctcctgcactgcctacaccctgcgctggtaccatcgggctgtgacaggcagcacagaggcctgtcacccttttgtctatggtggctgtggagggaatgccaaccgttttgggacccgtgaggcctgcgagcgccgctgcccaccccgggtggtccagagccaggggacaggtactgcccaggactgaggcccagataatgagctgagattcagcatcccctggaggagtcggggtctcagcagaaccccactgtccctccccttggtgctagaggcttgtgtgcacgtgagcgtgcgtgtgcacgtccgttatttcagtgacttggtcccgtgggtctagccttcccccctgtggacaaacccccattgtggctcctgccaccctggcagatgactcactgtgggggggtggctgtgggcagtgagcggatgtgactggcgtctgacccgccccttgacccaagcctgtgatgacatggtgctgattctggggggcattaaagctgctgttttaaaaggcaaaaaaaaaaaaaaaaaaacgaggtcccatcgtctcccagggcattcatgttgcgggtggcgggacaaaaagaggtatatgaaatgggggccacttgggcccttaacgcgtgttttcctggaacccaaatttttttttggtaacaaaagggggggacaaaatctcgcccccgcga

SEQ ID NO: 6148 - DNA, 2206 bp, Homo sapiens
  misc_feature (1499)..(1502): n is a, c, g, or t
  misc_feature (1512)..(1512): n is a, c, g, or t
  misc_feature (1557)..(1557): n is a, c, g, or t
  misc_feature (1578)..(1578): n is a, c, g, or t
  misc_feature (1657)..(1657): n is a, c, g, or t
  misc_feature (1893)..(1911): n is a, c, g, or t
  misc_feature (2090)..(2090): n is a, c, g, or t
ggaggaggctgcagcagcggaagaccccagtccagatccaggactgagatcccagaaccatgaacctggccatcagcatcgctctcctgctaacagtcttgcaggtctcccgagggcagaaggtgaccagcctaacggcctgcctagtggaccagagccttcgtctggactgccgccatgagaataccagcagttcacccatccagtacgagttcagcctgacccgtgagacaaagaagcacgtgctctttggcactgtgggggtgcctgagcacacataccgctcccgaaccaacttcaccatgcaaattaccaacattgaagggtcctcttactttatccgccttcactagcaaggacgagggcacctacacgtgtgcactccaccactctggccattccccacccatctcctcccagaacgtcacagtgctcagagacaaactggtcaagtgtgagggcatcagcctgctggctcagaacacctcgtggctgctgctgctcctgctctccctctccctcctccaggccacggatttcatgtccctgtgactggtggggcccatggaggagacaggaagcctcaagttccagtgcagagatcctacttctctgagtcagctgaccccctccccgcaatccctcaaaccttgaggagaagtggggaccccacccctcatcaggagttccagtgctgcatgcgattatctacccacgtccacgcggccacctcaccctctccgcacacctctggctgtctttttgtactttttgttccagagctgcttctgtctggtttatttaggttttatccttccttttctttgagagttcgtgaagagggaagccaggattggggacctgatggagagtgagagcatgtgaggggtagtgggatggtggggtaccagccactggaggggtcatccttgcccatcgggaccagaaacctgggagagacttggatgaggagtggttgggctgtgcctgggcctagcacggacatggtctgtcctgacagcactcctcggcaggcatggctggtgcctgaagaccccagatgtgagggcaccaccaagaatttgtggcctaccttgtgagggagagaactgagcatctccagcattctcagccacaaccaaaaaaaaaaaaaaaaaacagccctccttaccactgtggaagtccctcagaggccttggggcatgacccagtgaagatgcaggtttgaccaggaaaagcatcgctagtggagggttggagaaggaggtaaaggatgagggttcatcatccctccctgcctaaggaagctaaaaccatggccctgctgcccctccctgcctccacccacagtggagagggctacaacggaggaccagaccctctcacggtgccccacgctgccccgagctctccaagctctgacccccagccctcccaactcgcgcggcgcggagccccgaagcctggacccggtttcggcccaagttcctcacggacgnnnnacctcctccnccccgacgatgagtcgccccccccggccggactgggcgcccgcgnccccccagaccgaacccctgnccccgacgcgctccccccctccggggaccccccgccgggcgactccggaaaagccatcgggaatcgaaaccccgggctnccggacaactcttttcggggaaaggcggtcctctccccaaaccctccagaccccccaacccgggcggtattctccccctcggtccccgtgaacccggggtaataaacggcccccctaccaggccgtactggggacctctccctttgaaggggaccataaaaaaaaccctcggccccaaattaaaagacccaaagtcgtcctcggggagagaatactactcattggacggagcgtcnnnnnnnnnnnnnnnnnnncctacctctctcgacagccctcgctctattgtctcgcgggaggtccgcttagtaaagagtgactcactctcgaaatgtggggacaccgttgatctctatcacctttgttgtcccgcgtggacccacgcgctcttatgcctatcggccacaaaagaaggagataacaatctccgtaccanctgaactattcctataatatctaagcgcactcccccatacactcacctctcccccgttatacccaccccacacggtattcaacctccgacgtctatagacagtgctgactacggcg

SEQ ID NO: 6149 - DNA, 4687 bp, Homo sapiens
  misc_feature (3894)..(3916): n is a, c, g, or t
  misc_feature (4453)..(4685): n is a, c, g, or t
ctgcaggtcattctgctggacagcaaccctctgcagagtccacctgcccaggtctgcctgaaggggaaacttcacatcttcaagtatttgttccacagaggccgggcagcgtgggtcggccctgggggacctggccccttctcggcccccgagtttcagtccctgccctgcagaggatctatttccgggacatcggtacgatggtgggctggactcaggcttccacagcgttgatagtggcagcaagaggtggtctggaaatgagtcaacagatgaattttcagagctgtcattccggatctcagagctggcccgggagccccgggggcccagagaacgcaaggaggatggctcagcggacggagaccctgtgcagattgacttcatcgacagccatgtccccggggaggatgaagagcgaggcactgtggaggagcagcgaccacccgaattaagccctggggcaggggacagggagagggcaccaagcagcaggcgggaggagccggcaggggaggagcggcggcgcccggacaccttgcagctgtggcaggagcgggaacggcggcagcagcagcagagcggggcgtggggggccccgaggaaggatagcctcttgaagccagggctcagggctgttgtgggaggggccgccgccgtgtccactcaagccatgcacaacggctcgcctaagtccagtgcctcccaagcaggggctgcagcggggcagggagcccccgcccctgcccctgcctcccaagagccccttcccatagctggaccaggtgggacagggattttgggaggaggatggggcctgtgttggtgagggctggttgggagagagggacacagaggggatgcctgtctcacctgcccctgtcgctgtgtccctggttccggccccagcgacagcacctgctccacggccacttggctccattcagagaccaaacagcttcctcttccgttcctcctctcagagtggctcaggcccttcctcaccagactctgtcctgagacctcggcggtacccccaggttccagatgagaaggacttaatgactcagctgcgccaggtccttgagtcccggctgcagcggcccctgcctgaggacctggccgaggctctggccagtggggtcatcctgtgccagctggccaaccagctacggccgcgctccgtgcccttcatccatgtgccctcccctgctgtgccaaaactcagtgccctcaaggctcggaagaatgtggagggttttctagaagcctgtcgaaaaatgggggtgcctgaggtatgggggctgctttctaaagagtggtggcatgccggactcagccgagcatgtggcatggatggtgggcttccatttgcagcggatgtctgctctcagatgaaggcacaggctgcccctgccctgcccagcatgccccctgccctgcatgccccctgccctgcatgtcacctgtcctacacatcccctgccctgcaggccccatcttgtcctgcatgtcacctgtcctgcacatgccctgccctgcactcctcctgcactgcactccccctgcccagcacgtcagcatgtgggcgtggttctggccccagcacgtgagggcaggggtgggagggactgtcctgctgctgctgctgacgtctgtcccttgtccttgtccacctgctctcctctcccccaggctgacctgtgctcgccctcggatctcctccagggcactgcccgggggctgcggaccgcgctggaggccgtgaagcgggtggggggcaaggccctaccgcccctctggcccccctctggtctgggcggcttcgtcgtcttctacgtggtcctcatgctgctgctctatgtcacctacactcggctcctgggttcctaggccccaaaatcggccctccctcacccctttcccttcctctctatttataaggtccctgctccacccgaccccacctgcggtgccttcagccccaaccaaagacactagtgcacccccttcacagacactgacctcagaggccccactctggtgcccccagaccctgggcctccagcctctggcctccctccagtagccccacgagtccccacctctcagtgctgacggtgcctttatgtccccgccggccctgcccctgccctctgtaccccgtgaggggtggcaggagctggagtctcccccttcctcctgtgccctccccttccccccccaacagctgctatgggggggctaaattatctctattttgtagagaggatctatatttgtaggggttcggggcccaggccgggtccctatctctgtgtataaactgtacagaccgtggccgccctgcctgtgtgtgtgtgtgtgtgtgtgtgtgtgtgtgtgcgcgcgcgcgcgcgcgcgcgtctgctccgcgtgttggtggctgtggccatggctctgtgcccaccagcatctccctcctgagatgccggcctctcatgctcccggagcgtccgccaaccccccgtgtcacctcccttctgttatcgctgacagctttcttgcgtctcatttgtcgccgagccccgagcgcacggtgatgctcgggtctgcccccgaccccctgccacaggccggaagccgcagggggcaccgtggggaagctaacccggccccttcccccaggagtcactgtgccagccccaccacatcctggaagaggagggggccccgggaaggggcctcccctacatcgctgctgtcgtccacgccctgctggaccggccttaggggtgaaggtgggggcacagggcccaccccgcccgggaccccgggagcagaagacgcgcctgggctccgcgctctcagagaagcacttggtgagggtggcctgggcctgggcacccttggcctgccggcctggctgcctctggggtcgagggtctgggtggaaggaccgcgggtgtcgcaggtgtcgtgtcagccgcaataaacagaagccagaagccctctgggtggccctcaggtgtaactgtgtctgagagcacgtgcgtcgcggggttgttgggggggcctctgtttccggaattcaccgcccagtcgccagggggcgcccgcgggagcccggcgggggcacgcgccacgtggccgggagacgcacagggcgccagcgtcgccgcgaggcctctggggtgggttcgccaggagggcacgttcgcgccgcgccgcggagggaggctgagagggccgggccgggcggcggggacacggcggtaccgtcctgcgctcgggaacgcggaatgttgccctggtcgccgccgcggtggggcgcgggcccggaggaggcgcccgagggaccaggccttccggcgggcaaggaccagggcgagccctggagcgccggagcggacgcccccagggagctggggacacccccatgggacaggtgaggggctcggacggagccgtggggggacagcgactgggggcctccatgccttcaccacgcgctctacggaggcttctccattgtccctgctggagattgggtccctcggtctcccttgcaccaggcacccttgggctccaggggagggtgcgtgggggcggtgtggctgcagcctcagtccctgcccctccagcccacagcccccatcccgtagcccttcctggatctggagagagcagctgctgctgccccaccacctgccaggcccggccactgagcagccccccggagccccagatccccgttccccccaggtggcctgggaggtggccccctcgaggatgactccactagcgccctgggaccccaagtatgaagccaaagcaggacctcggccggtgtggggggccaactgtagctcaggagcctcgttctcaggccggacgctgtgtcacccctcattnnnnnnnnnnnnnnnnnnnnnnncgggcaggggtctcaggcccgtggcccctgccacagggcactggaatggacagcaggcgcccccagatgcagggttcccggtggtgtgctgtgaagatgtcttcctctcggaccctctgctgccccgggggcagcgtgttcccctgtacctgtccaaggccccccagcagatgatgggctccctgaaactgctgccgccgccccccatcatgtctgccagggtgctcccccgcccatcaccctcccggggcccctccactgcctggctcagcgggccggagctgatcgctctcactggcctgctgcagatgagccagggggagcctaggcccagctcctccgcggttggccccccagaccatacctctgacccacccagcccctgtggtagccccagcagttctcagggtgctgacctctctctcccacagaccccagacacccattgtccatagccttctcagggcagagtgggctggttgtgttgacaataaaacagtgttggtttgcaaaaaaaaaaaaaaaaaaaaacgcggnnnnnnnnnnnnnnnnnnnnnnnnnnnnnnnnnnnnnnnnnnnnnnnnnnnnnnnnnnnnnnnnnnnnnnnnnnnnnnnnnnnnnnnnnnnnnnnnnnnnnnnnnnnnnnnnnnnnnnnnnnnnnnnnnnnnnnnnnnnnnnnnnnnnnnnnnnnnnnnnnnnnnnnnnnnnnnnnnnnnnnnnnnnnnnnnnnnnnnnnnnnnnnnnnnnnnnnnnnnnnnnnnnnnnnnnncg

SEQ ID NO: 6150 - DNA, 2540 bp, Homo sapiens
atttttttttttttttattaaaacatgttctttaatgaagcttgctaatttctttgaaatattctgttttgttagaaagcattcaatatttttatttagaaaatccaaaaaacacaatcaaatataaagaacaatttgcagtttaagtggatttcaaatgttaaaacactaagattccacaagaaatgcattataataaacataaaatttagaacttataagaatgcagtggactatatctaaaaacaacagctacaagaaatggtaatgaactagaagtgactgctgtttcattatttgatattaaataacaagaattctttagtgatgaagtatttgattcattccatacccattctcaagctaaatatcaaacttgtaccaccaacagctacttagcaatctgcaattgttttattatgattacaattaagaaatattttattttctcattttcttcaggtcgttatcctcctgtttgattattacatttatactgtaaattacggtatctgcataagtaattttaaacatacacaaatgtgtcccttttattgtataaggatgtaattgttttctttagtgttaataagctatggaagagaccaaaataaaactatctttgagttgataaactatcttaactctgtgtctgtgttattaattaagagagaagcaaattaatgcaggctgtgatgcatgtgactggcaaaagcatctttgaatagaaaaatacactgcacaaatgaaaatggtggccgagagcaatgggaatatgacttgtgtcctaaacctattaatggtaaccacattcatgtcagaaacagctcattaaactaattttagatttggtgagaatgtgtttaaataatgacagcctgcagaagtctgaagcaggtcattaaagccattggaattggtggtttgatttcatttccatccagacggaggtagcgaagatgaggtccataactgaaggaatctcgttctgcaggcagcatggatgggctgggacatattacagagacattcacacttttaattttgttatgatcaaggtgaaggtgctgcagatgagcactgattcggggaacctttgtgagttgattgtgcgacagttgaagatctagaattgatgatacatcaaatcctcttgatgggagaccctcatctgacagtttgttgtgatttagtctcaaaaaggccactttaggaatcacattaaaataattttctggtattccttcaatggaattgttgtctaaaaacaactgcattgtattggctggtaatcttggaggcatattcctcagggcattcttggccatgtttagctgcatgagattcttgagtcctttaaaagtgtctctttgaaaggcattgtccactaatttgttgttctgtaggtcaagaagggtcaggttctccagattgctaaaggtcccttgaggaattctggacaccttatttctagctaattgtaattgttctaaacttcttggcaatggagaaggtacctcctctagctcattatcttccagaaataagaagagcaacttcttcagctggcttagggctcctttttcaattccgtagttggttattttgttcttatttagatttatccatcttagctgggtggcattctcgaatggcttctcaggaatggtttctatcaggttgttttgaagataaagataccaaattcttgaaggaatagcaggaatttctttgagacctctattttcacaatataaagcagtaggaaaactgggtgggcagaaacattccatgggacactcgaagtcatgaatagtccaatcatctgaatcatgtacttcatagacctgccttacacttctagaccacacagtgtctgttatgaataacacccacatgatgaaacagattgtgcctgccattatagcaccttgccttccaggaatacaccgttgagtcctgtgtctcagtctgaggtttgctaaaaatcagttaagagaaaaaaaaaaactttgacgaaaataatttgtttttactttaagctgtcaagtctcctataagaaacagtgaaacctactcgtcccagtcaccatgaacacctttgatctattgtttccactttgacagggcttcagaagactgcttacctcagccttcttggatcttcttcttccttttctattggtcactgcttgtacatggtaatggattgacccaggctccctgtcgtgtttttatgaatcctcggtaaaatatatgcactagtagatccaaatttaacccctccaacaaccacggaatcttagtgcctacacagcccagcaaaggaaattcttactttaatcctaataactcataaaaaaatttctaggcaattttcattcctaattcacagttcaattcattagtatatgttgtcatgtactgatatccagaccttatttaccaataggcagctgaaggcagttttaaagtataacaaaaagatattttaacagattttaaaacattttccctagatgatcatttcttaaaaattg

SEQ ID NO: 6151 - DNA, 867 bp, Homo sapiens
  misc_feature (22)..(22): n is a, c, g, or t
  misc_feature (25)..(28): n is a, c, g, or t
  misc_feature (51)..(51): n is a, c, g, or t
  misc_feature (55)..(56): n is a, c, g, or t
  misc_feature (61)..(61): n is a, c, g, or t
  misc_feature (69)..(69): n is a, c, g, or t
  misc_feature (74)..(75): n is a, c, g, or t
  misc_feature (78)..(79): n is a, c, g, or t
  misc_feature (88)..(88): n is a, c, g, or t
  misc_feature (96)..(97): n is a, c, g, or t
  misc_feature (102)..(103): n is a, c, g, or t
  misc_feature (113)..(116): n is a, c, g, or t
  misc_feature (123)..(123): n is a, c, g, or t
  misc_feature (127)..(128): n is a, c, g, or t
  misc_feature (132)..(132): n is a, c, g, or t
  misc_feature (134)..(134): n is a, c, g, or t
  misc_feature (140)..(151): n is a, c, g, or t
  misc_feature (293)..(293): n is a, c, g, or t
gcgggggcccccggggggggtnccnnnncggcggggccccccgcgggttcngggnncccgncccccccnccggnnccnnggtttcccnccttcccnnggccnncccccccccnnnnccccccngggnnggangncccccnnnnnnnnnnnnccccccaaccccccatttcacccctccccagcttcccaaacttctgtctgcccaaatgggctctgaccgtgctctgtcggcccgagacatttggaagtcctgggggatgctggcaaatctcagctgttgctgaggagggggntgggacccctttcccaatcccaaccttgagccccaggagataccgcgcccacacccaatcttgggacactccctatctggttggaagagagtaaccagtttccagagagccagagagtgagagagagaaagagagtgagagagagagagaaagagagagagagatgctgttgaatcagaaacagatcaacagcccaaagattttcctgtccctggagtgccagccccaggaagctccagggctgagtggtcaggagccagtttctccagcccctcctccccacaacccctagtggggaggggcagctgtccatttgcccaaagtattaatgcaactgaagctgtgatatttccaacgactgtaggaggaaaaattaaggggagagaggaaaacaaaaccaaccaacccctaaaatcattttcttattgtacataacgacctcattctcctgtatatgcggaagatataaccttatatttggtaagtgtttcttgtgctattttatcacgtgacctgtttataaaaatatatattaaaaaagttgtaaaaaaaaaaaaaaaaaaaaaaaaagggc

SEQ ID NO: 6152 - DNA, 2916 bp, Homo sapiens
  misc_feature (474)..(493): n is a, c, g, or t
  misc_feature (1387)..(1387): n is a, c, g, or t
cctcctcctctgggatcttgaaaacgtagaattcccagagactctgctgatggacagaatccggctccaggaactggcattccagttgcaccagttaactgtcctggcctcagtcttgctagtggccagaagcttctctggtgaagttttattcagatcacctgaatttgtggatagactgaaatgcaccaccaaggccctaactgaggaatttatctccaggcctgaagagactatgctgagtgtgagtgaacaggtgtctcaggaagtccatcaaggccttaaggacatgggcctcactactctgagcagtgaaaacacagcatctcttctaggccaactccagaacatcaccaagaaagagaactgcattcgtagcattgttggagtctctgctacactttcctggaggcctcattctcattgaaaaggagttggcagaactgggctggaagtttctcaatctgatgcatnnnnnnnnnnnnnnnnnnnntttcacaaaacgaaatctttccagaagatcacgaataagagagatcaaagctaggcagcttgagttgaagtagagcttgtggcaagattctgaggggaagtgtagctcccaggttggttccaagtcttcttccaattaggatcttatccaggacgcttcattgcatttggtcttcatttctccttagtctcctccaggctgacatttcctcaatctttattggtcttccacagccctgacacttttggagataccagtcagcatttccaagttcgttctgtgagactgtagtgtcaggacaaagcaacaacaaaatgtgctctactctaaagaagtgtgggacatacagaactgaagttgcagaatgccatgaccatggtagcacttttcaaggaagaaagaaaggtgggagttctttccgggataattttgacaagaggagctgtcattatgaacatggtgggtatgagcgcccgccttcacactgccaggagaatgatggaagcgtggagatgagggatgtccacaaggaccaacaactaagacacactccttatagcatccgatgcgaaagaagaatgaaatggcatagtgaagacgaaatccgtattaccacgtggagaaatagaaaacctccggagagaaaaatgagtcagaacacacaggatggatacacaaggaactggtttaaggtcacaattccttacgggataaagtatgacaaggcatggctaatgaattcaatccagagccattgcagtgaccgcttcactccggttgatttccactacgtccgaaatcgggcatgcttctttgtccaggatgctagcgctgcctccgcattgagggatgtcagttattagatttatgatgatgagaaaccaaagatatgtntattgtgtcaatcattctactgcgccctactctgtgaagaataagttgaagccaggccaaatggagatgctaaagctgaccatgaacaaacggtacaatgtctcccagcaagctcttgatctccagaatctccgctttgacccagacttgatgggccgtgacattgatataatcctgaatcgaagaaactgcatggctgccaccctgaagatcattgaaagaaatttccctgagctgttgtctttgaacttgtgcaacaacaagctgtaccagctggatggcctttctgacattacagagaaggctcccaaagtcaagaccctgaatctctccaaaaataagctggagtcggcgtgggagttgggcaaggtgaaagggctgaagctcgaagagctatggctagaagggaacccgttgtgcagcaccttctcggaccagtccgcctatgtaagtgccatccgggattgtttccccaagttgttacgcctggacggccgagagttatccgcaccagtgattgttgacattgacagctctgagacaatgaaaccctgcaaggaaaactttactggatctgagaccctaaagcatttagtcctgcaattcctgcagcagtattactcgatctatgactctggagatcgacagggtctcctcggtgcttaccacgatgaggcctgcttctccttggctattcccttcgaccccaaggactcagccccgagcagcttgtgcaagtactttgaggatagcaggaatatgaaaacactcaaggacccctacctgaagggggaactgctgaggcgcacaaaacgtgacattgtggactccctcagtgcgttgcccaaaactcagcatgacctcagctccatcctggtggacgtgtggtgccagacggaaaggatgctctgcttttctgtcaatggggttttcaaggaagtggaaggacagtctcagggttctgttctcgccttcacccggaccttcattgctacccctggcagcagttccagtctgtgcatcgtgaatgacgagctgtttgtgagggatgccagcccccaagagactcagagtgccttctccatcccagtgtccacactctcctccagctctgagccctccctctcccaggagcagcaggaaatggtgcaggctttctctgcccagtctgggatgaaactggagtggtctcagaagtgccttcaggacaatgagtggaactacactagagctggccaggccttcactatgctccagaccgagggcaagatccccgcagaggccttcaagcaaatctcctaaaaggagccctccgatgtcttctttgtcttcgttcacatcctctttgtttcctcttttcaccagcctaaggcctggctgaccaggaagccaacgttaacttgcaggccacgtgacataaccacccaaagagccagttgctctgtgtattcgccccactcatgatcaccattttattttcataataaagagtgacgttacacgttaaaaaaaaaaaaaaaaaaaaaaaa

SEQ ID NO: 6153 - DNA, 1738 bp, Homo sapiens
  misc_feature (542)..(558): n is a, c, g, or t
cgacggaacacgaggcgacgaagggaggcacggcggaaaaggggcgagggataaggaaacgaaaacgccgaaagaaagaaaacgacggaaaagaaaagcgaacgggagaataggggagaacgataggcggggataaaaggggaagagaacgaacggggggaaagaaacgcgaagcgaggacggaggaaggagaaggcaagggaaagcgtaaacgagcgatgatgggggggcagcatcatgttaatggtcaccgattccaacagcctcctggggaagctggagctccgtgtcagcctgggccgcgtggaagctgccattcaccaggtcagcgattggatggggcaggaagggaggcggtgcctgcaatcactgacccccaaggatggaagtttggagacagtggagaaagcccacgcagaatttgagaacttcttcctccagggtgcagcccagtaccgccgaggcctggagctgtccaagcaggccgctcagctgggagctacagccagaggggctggggaggcagaacgtgcagagttccnnnnnnnnnnnnnnnnngcctctacccagcgggccttccaggctgagctgacccacttttacatggcggccgagcggcaacgcacggacctcgagacgctgctccacctgcaccgcttctgcaagaggatgacctggttccacatggactgtcaggacctgatggcccagctcaggctggacaagacctcaagggtcagtcctggggaccagcgccgcctccaccgctacctgcagcgactggcatctgagttccctgctgagaagctcgcagccgtggggctgcaggtggcctccctgagccgggcaggcctgggccaggagctatgggaggaggcccggatcaggcatgaggagatctggatgctcctggagaaggcactgacccacagctcttgcccagaggctccagctgctcactcagcgcgcccagaacgaagaggggtggcagccaagggccagggtgtgagtgtagaggtcacttccaaggggaggtgggatcagcctccactagactcactgggcatggaccatttgccaaagtcctattggcctcctgggccccccagaggggaacagaacagaactttccaggcaggctctccaccccaggaagctggccaggctgcagaggctgaagacggcaaaggctcccacaagctgcctgaccctgcccgcgagcatttgcttgccaccaccttcttccggcagcagccccccaggcagagccaggtccctcgcctcactgggggcagcttctcctcagaggggacagactcacagacatccttgaggactcacgcccagacaagtccccttgcctccctctagctgagaggcccttccagtccgcacagctccaggagcatgggcagggccagttgacgggtactgggaactctggtcagtcccagtgaaattcccctgtgagcccgcgttacgctttggccctgcgggacgcgttcacctgcgtcaccgtccccggtgctccgaaaaacccctggagaagcacgggtttcccccctggcgaattgccgcagaggtgggtctaaccacggggcaccacacgcggggacgagccacccgcccgcggcgcctcgtggggagaccccgtcttcgcgaccccccagagaatgtctcgctcgagagcagacccccgcgattcagacagcgcccctcgatcaggagactgtctaca

SEQ ID NO: 6154 - DNA, 2389 bp, Homo sapiens
  misc_feature (8)..(8): n is a, c, g, or t
  misc_feature (18)..(18): n is a, c, g, or t
  misc_feature (32)..(32): n is a, c, g, or t
  misc_feature (52)..(52): n is a, c, g, or t
  misc_feature (64)..(64): n is a, c, g, or t
  misc_feature (95)..(95): n is a, c, g, or t
  misc_feature (108)..(108): n is a, c, g, or t
  misc_feature (317)..(317): n is a, c, g, or t
aaaacccnccctggcccntaaagaaaaaaagncgggaggaaagaagtagaanaaagaggaaccnggctggtaaaagcccctgccaattttgcctntccctgactcccnacccccctggccccaagaccccaggagcccccctgaagctttgccttgcctgcatatttgtttcgctcttactcagtttgggaattcaaattgacctgcagaggttcattcccctgaccctttccccacattggtaagagtagctgggttttctaagccactctctggaatctctttgtgttagggtctcgatttgaggacattcattncttcagcagcccattagcaactgagagcccagggatgtcctacaggatagtttcatagtgacaggtggcacttggctaatagaatatggctgatatgtcattaatcatttgtaccttgacatgggttgtctaataaaactcggacccttcttgtgaaatcagttaaataagacttgtctcggtcacctgtgccctgtccagactcgaggcagtggtaacactgcacagtgctatgtggcttctctttgaggatttttgggttttgtaactaaattcttgctgccctcatactttttatgtattagaatcatattcgtattgcccttttaaaacattgggatcctccaaaggcctgccccatgtatttaacagtaatacaggaagcatggcaggcaccatgcaaaccaaggatggatggtgcagtccctgtgtcagtgggcggtggtttcctgctcggcatgagtcactcatcacctgattgattggctctgtggtcctgggcaggtgcctcataggtgtgtggatatgatgacgtttctttaaaatgtatgtatttaacaaatacttaattgtattaaggtcatgtaccaaggatttgataaagtttaaataatttactctctacttttatccattttatccattttaactcatgtaatcctcatgtgagtattcctgtttaacacttgagtaaactgaggcacagagaacataagttgcatgccatagtcacacactgtgaaagtgaaaagagaatgtgtgcaaaacacgtcacagtcctggtttctgagtaaaggcaggctgttatctttagaatcaagctatcacagggagataggcaatgctgtgggtgttggaggaaggtgagagcctgttgctaacaatttcctggttttaaagctaaggctgattttattgggaagatctcacatgtgtgtggcccctgagagttcccagtgccttttatttgcagtccttccatttggacctcctagctgccccatcaggtcatctccagggctcagaggggtgagaccatttcccaaggtcacagaaccagctctctagtcaccaccctgcctctccctctcacccagagtcagtaccagttttatggctttattacaaactgctgggtccctcccattttcaacttgattgatgggatgtcatcccttatcctgtctgacatttgcctctggcctggttgctagaagtttgccccaggggcaagagttgaaatttggcttcctgaggtgggctttgtggtttgcgtccctaaagtgagcccactactggttgcttgtccatggccaacaccagaaatcccctgagcactacctgggtctcattccaagaaggaagagggtcaggagacctggggagtctcatattccaagttcttctttctttctgggagcagtgggcagttcatggtgttagggcactcacccccacagactggcaaaccctgcaggacttccgtggctgaggctgtgaccggagagccagggatgccgttgggtggattgtgagtgaatgggccctttgagctgccctctagagagcaaatccagttttcctggagctcctgaatgaatatctgtactggctcgctcagatgcagaagcttccattgaccatgacggcttgtgaacatcagtggccacaggccccagtgtgctgcttggcactgcactagtttaggacctgcagcatgtaagtagcgtccctaatgtttaataatacaaagcctgctctgcacaactttttctgattcctccttgcaatcctcctaaggaatatcctgccccatttttaaaaccaagggggaaatacccaaggccaggaaacccagggaaaggctcttggaaaaaccaaagcaagttccttcccctttcctgggggaccccaactggctccccctcccccccaaacccccctcttgaaaacaaggaatatacggcctccctgttcccaaggaattccttgggaaataaaagggcgcggggcgggagaattttaacaccaccccataaacttcttggaaacatctcaccccctcggaaaga

SEQ ID NO: 6155 - DNA, 1906 bp, Homo sapiens
  misc_feature (1751)..(1751): n is a, c, g, or t
aggtgctggatctggacgaggacgaggacgacctggaggtgttcagcaagggaggttgaatgtcactccagtttctcaagttgctgctgagagaagacctgagttcagatcacaacgctgtattcattactaagaagcctgttcattttaacgttacctggagatattaggatgcctcattgatggacatgaactccttcagccctatgatgccaacatcccctttatcaatgataaaccaaatcaagtttgaggatgaaccagatttaaaggatctcttcatcacagttgatgaacctgaaagtcatgttactacaatagaaactttcattacgtataggattattactaagacatctcgtggggaatttgactccagtgaatttgaagttaggagacgatatcaagatttcctttggttgaagggaaaactggaagaagcacaccccactctgattattccaccattgccagaaaagtttatagtaaaaggaatggtggaacgctttaacgatgacttcattgagacacgcaggaaggctttacataaatttttgaaccgaattgctgatcatccaactttaacatttaatgaagacttcaaaatttttctcactgcacaagcttgggaactctcttctcacaagaagcaaggtcctggcttgctaagcaggatggggcaaaccgtcagagctgttgcgtcctcaatgagaggagttaaaaaccgccagaggagtcatggaaatgaataactttattgaactatttagccagaaaataaatttgatagataaaatatctcagagaatttataaggaagaaagggaatattttgatgaaatgaaagaatatggcccaattcatattctgtggtcagcgtcagaagaggatctggttgatactctaaaggatgttgccagctgcattgacagatgctgtaaggccactgaaaagcggatgtctggactctcagaggccctgcttcctgttgtacatgagtacgtgctttatagtgaaatgttaatgggtgttatgaacaagaagagacaaaatatgcaaaatgatatcaagttagcattgaagttttgacctataaaaaggcagatactgatctgtgccttgctacgtgggaatcattccttacatcacagaccaaccttcacttggaagaagcctctgaagataaaccttaatcccattgaggacttctgtttgatctttgggagacagcatttattaaccaaagttattctttctggatctgccgtgtccttataaagtggatgaaaaatgttttgtacccatctggaaaaccaacaacttgaaatctcaggtattccaggtcactgacatgaatttgaagatatatctatctgtatggatatatatctatatgtatatagatatataaatacagagagatatctggcttggttttaattatgttcttaaatttgtgtgccaataattgcatatagattttttttcttaaatatttgactgtggaacatgccattttaaatatgttgtaaggactgttttaataaaaagtttagtatgaaaaaaaaaaaaaaaaaaaaaaaaaaccattatattatagtactctcagcctgtgtgctctcgccctgcgggcctttgcaggtcttttttgatcgttgtattgggccacatatcttattgtatgttgcagtaaaccaagtacatcattcatagttcaccctgctattaaatgtgttcatggcggacatctntataagctttaccctaacatatctcaacgcttctcatgcagcaccgccctagtccccctagttgtcactgtttcatcccttagcgaggacgacatctgaactatatcttgtttagctcatacctgcattttctttcgctcaactttgatctctcc

SEQ ID NO: 6156 - DNA, 4071 bp, Homo sapiens
  misc_feature (936)..(939): n is a, c, g, or t
  misc_feature (970)..(992): n is a, c, g, or t
gtccccgacgcctgctggctggcctgggggggcccggggctgccgccgcgagccgagcctgggggccggggctgggcccctgccagtgttgcgcctgcgaggtctcgccgccgaactgcgcgcggggatcaatgagaggaggttcagatgagcccctgctgacttgagagagacagagagaccacgccgattgctgagaggaactggaagaagaaaaattcccagactcagtgggaagagctccctcaccatgagtagcgctatgttggtgacttgcctcccggaccccagcagcagcttccgtgaggatgccccgcggcccccagtgccaggggaagaaggggagaccccaccgtgtcagccaggggtgggcaagggccaggtcaccaaacccatgtctgtctcttccaacaccaggcggaacgaagatgggttgggggagccggaggggcgggcatctccggattcccctctgacccggtggaccaagtccttacactccttattgggcgatcaagacggtgcttacctgttccgaactttcctggagagggagaaatgcgtggataccttagacttctggtttgcctgcaatggattcaggcagatgaacctgaaggataccaaaactttacgagtagccaaagcgatctacaaaaggtacattgagaacaacagcattgtctccaagcagctgaagcctgccaccaagacctacataagagatggcatcaagaagcagcagattgattccatcatgtttgaccaggcgcagaccgagatccagtcggtgatggaggaaaatgcctaccagatgtttttgacttctgatatatacctcgaatatgtgaggagtgggggagaaaacacagcttacatgagtaatgggggactcgggagcctaaaggtcgtgtgtggctatctccccaccttgannnnagaagaggagtggacttgtgccgacttcaannnnnnnnnnnnnnnnnnnnnnnttggcttgtccagcaaaactctgagggccacggcgagtgtgaggtccacggaaactgttgacagtggatacaggtccttcaagaggagcgatcctgttaatccttatcacataggttctggctatgtctttgcaccagccaccagcgccaacgacagtgagatatccagtgatgcgctgacggatgattccatgtccatgacggacagcagtgtagatggaattcctccttatcgtgtgggcagtaagaaacagctccagagagaaatgcatcgcagtgtgaaggccaatggccaagtgtctctacctcatttcccgagaacccaccgcctgcccaaggagatgacccccgtggaacccgccacctttgcagctgagctgatctcgaggctggaaaagctgaagctggagttggagagccgccacagcctggaggagcgcctgcagcagatccgagaggatgaagagagagagggctccgagctcacactcaattcgcgggagggggcgcccacgcagcaccccctctccctactgccctccggcagctacgaggaagacccgcagacgatactggacgatcacctgtccagggtcctcaagacccctggctgccagtctccgggcgtaggccgctatagccctcgctcccgctccccggaccaccaccaccaccaccattcgcagtaccactccctgctcccgcccggtggcaagctgcctcccgcggccgcctcgccgggcgcctgccccctcctcgggggcaaaggctttgtgaccaagcagacgacgaagcatgtccaccaccactacatccaccaccatgccgtccccaagaccaaggaggagatcgaggcggaggccacgcagcgggtgcactgcttctgccctgggggcagcgagtattactgctactcgaaatgcaaaagccactccaaggctccggaaaccatgcccagcgagcagtttggcggcagcagaggcagtaccttgcccaaacgcaatgggaaaggcacggagccgggcctggccctgcccgccagggaaggaggggcccccggcggagctggggccctgcagcttccccgggaggaaggagacaggtcgcaggatgtctggcagtggatgctggagagtgagcggcagagcaagcccaagccccatagtgcccaaagcacaaaaaaggcctaccccttggagtctgcccgctcgtctccaggcgaacgagccagccggcaccatctgtgggggggcaacagcgggcacccccgcaccaccccccgtgcccacctgttcacccaggaccctgcgatgcctcccctgaccccacccaacacgctggctcagctggaggaggcctgtcgcaggctagctgaggtgtcgaagcccccaaagcagcggtgctgtgtggccagtcagcagagggacaggaatcattcggccactgttcagacgggagccacacccttctccaatccaagcctggctccagaagatcacaaagagccaaagaaactggcaggtgtccacgcgctccaggccagtgagttggttgtcacttactttttctgtggggaagaaattccataccggaggatgctgaaggctcagagcttgaccctgggccactttaaagagcagctcagcaaaaagggaaattataggtattacttcaaaaaagcaagcgatgagtttgcctgtggagcggtgtttgaggagatctgggaggatgagacggtgctcccgatgtatgaaggccggattctgggcaaagtggagcggatcgattgagccctggggtctggctttggtgaactgttggagcccgaagctcttgtgaactgtcttggctgtgagcaactgcgacaaaacattttgaaggaaaattaaaccaatgaagaagacaaagtctaaggaagaatcggccagtgggcttcgggagggcggggggaggttgattttcatgattcatgagctgggtactgactgagataagaaaagcctgaactatttattaaaaacatgaccactcttggctattgaagatgctgcctgtatttgagagactgccatacataatatatgacttcctagggatctgaaatccataaactaagagaaactgtgtatagcttacctgaacaggaatccttactgatatttatagaacagttgatttcccccatccccagtttatggatatgctgctttaaacttgggaagggggagacaggtaagttttaattgttctgactaaacttaggagttgagctaggagtgcgttcatggtttcttcactaacagaggaattatgctttgcactacgtccctccaagtgaagacagactgttttagacagactttttaaaatggtgccctaccattgacacatgcagaaattggtgcgttttgtttttttttttcctatgctgctctgttttgtcttaaaggtcttgagggttgaccatgttgcgtcatcatcaacattttgggggttgtgttggatgggatgatctgttgcagagggagaggcagggaaccctgctccttcgggccccaggtggatcctgtgactgaggctccccatcatgtagcctccccaggcccagggccctgaggcctgctagaatcactgccgctgtgctttcgtggaaatgacagttccttgttttttttgtttctgtttttgttttacattagtcattggaccacagccattcaggaactaccccctgccccacaaagaaatgaacagttgtagggagacccagcagcacctttcctccacacaccttcattttgaaattccgggttttggtggtaaagttaatctggacacttctggttggccatggttacttgtgactatacatcccgtaatatacggtacggccaaaagagtaattaatcccccttcccctagtggtttgacttttaaaatcggtacaggaacctgtaccttgcacggggcaccccccttccgggggggcccccctattttgggggggtcaagcctttcccctgtgtttttggaaaagggggttaaggaataaaaaaaattttcagggcccctttttaat

SEQ ID NO: 6157 - DNA, 5583 bp, Homo sapiens
  misc_feature (686)..(721): n is a, c, g, or t
  misc_feature (2359)..(2378): n is a, c, g, or t
  misc_feature (3378)..(3399): n is a, c, g, or t
  misc_feature (3746)..(3795): n is a, c, g, or t
  misc_feature (5543)..(5580): n is a, c, g, or t
gccagcgctgcagggagatagcgggcagcgcagcccgcagaggcgctgcggcccgtgcagccccggaggcccctcgcggagaaggcggcggcggaggagaggccgagttaccgcccgccgcccgcgcccccccaaccccgccgccgccgccgccgccgccactgccccccctccccgcggcgccgcatcttgaatggaaacatggcggtgccggctcggacctgcggcgcctctcggcccggcccagcgcggactgcgcgcccctggcccggctgcggcccccaccctggccccggcacccggcgcccgacgtccgggcccccgcgcccgctgtggctgctgctgccgcttctaccgctgctcgccgcccccggcgcctctgcctacagcttcccccagcagcacacgatgcagcactgggcccggcgtctggagcaggaggtcgacggcgtgatgcggatttttggaggcgtccagcagctccgtgagatttacaaggacaaccggaacctgttcgaggtacaggagaatgagcctcagaagttggtggagaaggtggcaggggacattgagagccttctggacaggaaggtgcaggccctgaagagactggctgatgctgcagagaacttccagaaagcacaccgctggcaggacaacatcaaggaggaagacatcgtgtactnnnnnnnnnnnnnnnnnnnnnnnnnnnnnnnnnnnnagagtgaggatgtggaaagggggtctaaggccagcaccctaaggctggacttcatcgaggacccaaacttcaagaacaaggtcaactattcatacgcggctgtacagatccctacggacatctacaaaggctccactgtcatcctcaatgagctcaactggacagaggccctggagaatgtgttcatggaaaaccgcagacaagaccccacactgctgtggcaggtcttcggcagcgccacaggagtcactcgctactacccggccaccccgtggcgagcccccaagaagatcgacctgtacgatgtccgaaggagaccctggtatatccagggggcctcgtcacccaaagacatggtcatcatcgtggatgtgagtggcagtgtgagcggcctgaccctgaagctgatgaagacatctgtctgcgagatgctggacacgctgtctgatgatgactatgtgaatgtggcctcgttcaacgagaaggcacagcctgtgtcatgcttcacacacctggtgcaggccaatgtgcgcaacaagaaggtgttcaaggaagctgtgcagggcatggtggccaagggcaccacaggctacaaggccggctttgagtatgcctttgaccagctgcagaactccaacatcactcgggccaactgcaacaagatgatcatgatgttcacggatggtggtgaggaccgcgtgcaggacgtctttgagaagtacaattggccaaaccggacggtgcgcgtgtttactttctccgtggggcagcataactatgacgtcacaccgctgcagtggatggcctgtgccaacaaaggctactattttgagatcccttccatcggagccatccgcatcaacacacaggaatatctagatgtgttgggcaggcccatggtgctggcaggcaaggaggccaagcaggtgcagtggaccaacgtgtatgaggatgcactgggactggggttggtggtaacagggaccctccctgttttcaacctgacacaggatggccctggggaaaagaagaaccagctgatcctgggcgtgatgggcattgacgtggctctgaatgacatcaagaggctgacccccaactacacgcttggagccaacggctatgtgtttgccattgacctgaacggctacgtgttgctgcaccccaatctcaagccccagaccaccaacttccgggagcctgtgactctggacttcctggatgcggagctagaggatgagaacaaggaagagatccgtcggagcatgattgatggcaacaagggccacaagcagatcagaacgttggtcaagtccctggatgagaggtacatagatgaggtgacacggaactacacctgggtgcctataaggagcactaactacagcctggggctggtgctcccaccctacagcaccttctacctccaagccaatctcagtgaccagatcctgcaggtcaagtattttgagttcctgctccccagcagctttgagtctgaaggacacgttttcattgctcccagagagtactgcaaggacctgaatgcctcagacaacaacaccgagttcctgaaaaactttattgagctcatggagaaagtgactccagactccaagcagtgcaacaacttccttnnnnnnnnnnnnnnnnnnnnttggacacgggcatcacgcagcagctggtagagcgtgtgtggagggaccaggatctcaacacgtacagcctactggccgtgttcgctgccacagacggtggcatcacccgagtcttccccaacaaggcagctgaggactggacagagaaccctgagcccttcaatgccagcttctaccgccgcagcctggataaccacggttatgtcttcaagcccccacaccaggatgccctgttaaggccgctggagctggagaatgacactgtgggcatcctcgtcagcacagctgtggagctcagcctaggcaggcgcacactgaggccagcagtggtgggcgtcaagctggacctagaggcttgggctgagaagttcaaggtgctagccagcaaccgtacccaccaagaccagcctcagaagtgcggccccaacagccactgtgagatggactgcgaggttaacaatgaggacttactctgtgtcctcattgatgatggaggattcctggtgctgtcaaaccagaaccatcagtgggaccaggtgggcaggttcttcagtgaggtggatgccaacctgatgctggcactctacaataactccttctacacccgcaaggagtcctatgactatcaggcagcctgtgcccctcagccccctggcaacctgggtgctgcaccccggggtgtctttgtgcccaccgttgcagatttccttaacctggcctggtggacctctgctgccgcctggtccctgttccagcagcttctctacggcctcatctaccacagctggttccaagcagaccccgcggaggccgaggggagccccgagacgcgcgagagcagctgcgtcatgaaacagacccagtactacttcggctcggtaaacgcctcctacaacgccatcatcgactgcggaaactgctccaggctgttccacgcgcagagactgaccaacaccaatcttctctttgtggtggccgagaagccgctgtgcagccagnnnnnnnnnnnnnnnnnnnnnnagaaggagacgcactcggacggcccggagcagtgtgagctagtgcagagaccgcgataccggagaggcccgcacatctgcttcgactacaacgcgacagaagatacctcagactgtggccgcggggcctccttcccgccgtcgctgggcgtcctggtctccctgcaactgctgctcctcctgggcctgccgccccggccgcagcctcaagtcctcgtccacgcctctcgccgcctctgagcaccctgccccaccccacctccactcccacctcacccggcctcttcgcctttcccaccctcctgccccacactccccgccttagagcctcgtccctccctcactgannnnnnnnnnnnnnnnnnnnnnnnnnnnnnnnnnnnnnnnnnnnnnnnnnatggggagtcccaaagcgggacgccgcaggtgtttggcacccaaatcacatctcacctccgaactgttcaagtgtccccagacccttcttgcctgctgggctccccccagtgggatgggacagggaggccacacgcactggtgccaaaaccaggcctctgctgccgcccttcctggaggctgcctatgttgggggggaccctgcctcagctgacccggcctctctgccccacccaagcccaaacttggtttctgtgagaatagtggaggaaggtgagatggccagtttgaagcctgtgcctcccagcttaaatcctagcaggagagaggctctggggcagcccccatgggctcctgcccctttcaggcctacagccacatccccaagcccaccaggtgtcaggatagtcacagtgataccagttcagacactaccccatatacacctggaacattgaggatggaaactggactcacattcgacataccccactgggcacacgcacaaacacacacactatggggtggggtgggtgtaggggcttacaaagccttacacagggcgaggggttggtgggagggttggcacctgcacactccatctcctgctcaccacctgcctctaatctgagctgcagcctggctggtcctcccatttctaaagctgaatgtcaaacagtgccaaatgctggggcagggggtgaagaaccctctgtcccacccctagccaccagtgtcctccaagtgccccctcacctctccaggtgctcattgtaaccatttctcactagtgtcaggcccccagtgggaccacatgccactgcctgcacctttcggcagaggaacccccaccagacatcaccctttgccttagcaggggtgactttgtctctcctggctgggccatccttccgccaatctggcccttacacactcaggcctgtgcccactccctatctccttcccacccctacacacacactccctgcttgcaggaggccaaactgtccctcccttgctgaacacacacacacacacacacacacaggtggggactgggcacagctcttcacaccattcattctggtcatttcccccaaaggcatcccagcctgggggccagtggggaactgagggcaaggggatatagtgatggggctcagatggactgggaggagggggagggtgatgcattaattaatggcttcgttaattaatgtcatgttgcttgtcgctttctcagtgtgtgtgtgtggtccatgcccactgctggtgccagggtgggtgtccatgtgcacccggcctggatgccagctgtgtccttcgggggcgtgcgtgtaactgtagtgtagtcaggtgctcaatggagaatataaacatatacagaaaaatatatattttaagtttaaaaaacagaaaaacagacaaaacaatccccatcaggtagctgtctaacccccagctgggtctaatccttctcattacccacccgacctggctgcccctcaccttgggctgggggactggggggccatttccttttctctgccctttttttgttgttctattttgtacagacaagttggaaaaacaacagcgacaaaaaagtcaagaaactttgtaaaatatcgtgtgtgtgattccttgtaaaatattttcaaatggtttattacagaagatcagttattaaataatgttcatattttcacttcaaaaaaaaaaaattattaaacattatttaaaaaaaannnnnnnnnnnnnnnnnnnnnnnnnnnnnnnnnnnnnnccc

SEQ ID NO: 6158 - DNA, 11919 bp, Homo sapiens
  misc_feature (3747)..(3790): n is a, c, g, or t
  misc_feature (4026)..(4041): n is a, c, g, or t
  misc_feature (4152)..(4337): n is a, c, g, or t
  misc_feature (4599)..(4632): n is a, c, g, or t
  misc_feature (4768)..(4827): n is a, c, g, or t
  misc_feature (5106)..(5141): n is a, c, g, or t
  misc_feature (8590)..(8643): n is a, c, g, or t
  misc_feature (8812)..(8848): n is a, c, g, or t
  misc_feature (10612)..(10636): n is a, c, g, or t
  misc_feature (10691)..(10754): n is a, c, g, or t
  misc_feature (10882)..(10915): n is a, c, g, or t
  misc_feature (11187)..(11266): n is a, c, g, or t
gggctgggcctcccttccccataacactgagctgctctgctgggccaaccgtgctcctgggccagccagaggacccccatgaggcggcatgcaggcggggagcaggccacagaacgcagggtgaaacccaaggcgctctagaggagatgaattatggatccgccctcccggaatcctggctcggccctccccacgccacccagggccagtcgggtctgctcacagcccgaggaggccgcgtgtccagccgcgggcaagagacagagcaggtccctgtgtctccaagtccctgagcccgtgacaccggccccaggccctgtagagagcaggcagccaccatggcgaaggaggaagatgaggagaagaaagccaagaaagggaagaaggggaagaaggcaccggagccggagaagcccaaacggagcctgaaggggacgtcgcggctgttcatgggcttccgcgaccgtacacccaagatctccaagaagggccagttccgcagcgcctcggccttcttctggggcctccacaccggcccccagaagaccaagcgcaagaggaaggcccgcaccgtgctcaagtccacgtcaaagctcatgacgcagatgcgcatgggcaagaagaagcgggcgatgaagggcaagaagccgtccttcatggtgatccgcttcccaggccgccgtggctacggccgcctgcggccgcgcgcccggtcactcagcaaagcgtccacggccatcaactggctcacaaaaaagttcctcctcaagaaggccgaggagtcgggcagcgaacaggccacagtggacgcctggctgcagcgctcgagctcccgcatgggctcccgcaaactccccttcccgtcgggtgccgagatcctgcggcctgggggccggctccggaggttcccccgcagccgcagcatctacgcgtcaggcgagcccctgggcttcctgcccttcgaggacgaggccccattccatcactcgggctcccgcaagtcgctgtacgggcttgagggcttccaggacctgggcgagtattatgactatcaccgcgacggcgacgactactacgaccggcagtcactccaccgctacgaggagcaggaaccctacctggcgggcctcggcccctacagcccggcctggccaccctacggcgaccactactacgggtacccgcccgaggatccctacgactactaccaccccgactattacggtggcccctttgatccggggtacacctacggctacggctacgacgattacgaacccccatatgcgcccccgtcggggtactcgtctccttacagctaccacgatgggtacgagggcgaggcgcacccttatggctactacctggatccctatgcgccgtacgacgcgccatacccaccctatgacctcccataccacactccctacgatgtaccctactttgatccctacggagtccactacaccgtcccctatgccgaaggcgtctatggcggtggggacgaggccatctacccccccgaggtgccctatttttacccggaggagtcggcttcggcctttgtgtacccctgggtaccaccgcccatcccgtcgccccacaacccgtatgcccacgccatggatgacatcgccgagctggaggaaccagaggacgcgggcgtagagcgtcaggggacctccttccgcctgcccagcgccgccttcttcgagcagcaaggcatggataagcccgccaggtccaagctgtccctcatccgcaagttccgcctcttcccgcgaccccaggtgaagctgtttgggaaggagaagctggaggtgcccctgccaccctctctggacattcctctccccttgggggatgcggacgaagaagaggacgaggaggagctgcccccggtttccgctgtgccctacggccaccctttctggggcttcctcacgccgcgccagcgcaacctccagcgcgcgctgtcggccttcggcgcccaccggggcctgggcttcggccctgagtttggccgccccgtgcctcgccctgccacctcgcttgcgcggttcctcaagaagacgctgtcggagaagaagcccatcgcgcggctcaggggcagccagaaggcccgggcgggcggccctgctgtcagggaggcggcctacaaacgcttcggctacaagctggctggcatggaccccgagaagcccggcacgcccatcgtgctgaggagggcccagccgcgcgctcgcagcagcaacgacgcgcgccgcccgcccgcgccacagcccgcgcccaggaccctctcccactggagcgcgctcctgtctccgcccgtgcccccgcggcccccaagctccgggcccccgcccgcgccgccgctctccccggcgctctcgggcctgccccggccggcctcgccctacggctccctccgccgccacccgccgccctgggccgccccagcgcacgtgccaccggcgccgcaggccagctggtgggccttcgtggagccccctgccgtgagcccggaggtgccccccgacctactagccttcccagggccccgaccctcgttcaggggctcccgccggagaggggcggctttcggcttccccggggcctctccacgggcgtcgcggaggcgagcttggtcaccgctggcctcgccccagccctcgctgaggagctcgccgggcctcggctactgctcacccttggcgcccccgtcgcctcagctgtccttgcgcacgggccccttccagccgcccttcctgcccccggcccgccggccccgctcgctgcaggagtccccagccccacgccgagccgctgggcgcctgggcccacccggctcgccgctgccgggctcacccaggccgccctcgccgcccctggggctctgccacagcccgcggcgcagctccctgaatctgccctcgcgcctcccgcacacgtggcggcgcctcagcgagccacccactcgggctgtgaagccgcaagtgcgcctgcccttccaccgaccgcccagggccggggcctggcgggcgcccctggaacaccgggagagcccgcgagaacccgaggactcagagacgccctggactgtgcccccactggcccccagctgggacgtggacatgcctcccacccaacgcccaccctccccctggccaggaggtgcaggcagccgccgaggcttttccaggccaccccctgtgccggaaaacccctttctccagctcctgggccctgtgccatcccccaccctccagcctgaggatccagctgctgatatgaccagggtcttcctgggcagacaccatgagccggggcctggacagctcaccaaatcagctggcccaacccctgagaagcctgaagaagaggccaccctgggggacccccagctgccagcagagaccaagcctccaaccccagcacctcccaaggatgtcactccccccaaggatatcactccccccaaggatgtcctcccagagcaaaagacattaaggcccagcctctcatacccactggctgcgtgtgaccagaccagggccacatggccaccatggcaccgctggggaacactgccccaagccgcagcccccttggcgcccatcagggccccagagcccctgcccaaggggggtgaacggcgccaggcagcccctgggcgttttgctgtggtcatgcctcgtgtgcagaagctgagctctttccagcgagttgggcctgcaaccctgaagnnnnnnnnnnnnnnnnnnnnnnnnnnnnnnnnnnnnnnnnnnnntcttcgctggtcctgcctctggcttcgggcagatgcctatggaccctggccacgagtacacacccatccccagtcctgccacctgggccctggagctgcctgcctgtcccttaggggctcctgggaggaggtcggcccgccaagctggcggaacaagatgcactccatccgcaacctgccatccatgcggttccgtgagcagcacggggaggatggtgtggaggacatgacacagnnnnnnnnnnnnnnnnaaaccactgtgctgtccaacctcaagattagatttgaacggaacctcatctacacatacattgggagcatcctggtgtcggtgaacccataccaaatgtttggaatctatnnnnnnnnnnnnnnnnnnnnnnnnnnnnnnnnnnnnnnnnnnnnnnnnnnnnnnnnnnnnnnnnnnnnnnnnnnnnnnnnnnnnnnnnnnnnnnnnnnnnnnnnnnnnnnnnnnnnnnnnnnnnnnnnnnnnnnnnnnnnnnnnnnnnnnnnnnnnnnnnnnnnnnnnnnnnnnnnnnnnnnnnnngccatgaaccagaaacgggaggtcatgcagcagataaagatcctggaggcaacacccctcttggagtccttcggtaatgccaaaaccgtcaggaacgacaactccagccgctttgggaagtttgtggaaatctttctggaagggggcgtgatctctggtgccataacctcccagtacctgcttgagaaatccaggatcgtgtttcaggccaaaaacgagaggaattaccacatcttctacgagttgctggccgggttgcctnnnnnnnnnnnnnnnnnnnnnnnnnnnnnnnnnngaggctgagacctactactatctgaaccagggtgggaactgtgagatagcaggaaagagcgatgcagatgactttcgccggctcctggctgccatggaggtgttgggcttcagcagtgaggaccaggacagcatcnnnnnnnnnnnnnnnnnnnnnnnnnnnnnnnnnnnnnnnnnnnnnnnnnnnnnnnnnnnntatgagacggatgcacaggaggtggcctcagtggtgagtgcccgagagatccaggccgtggcagagctgctgcagatctcccctgagggcctgcagaaggccatcaccttcaaagtgaccgagacaatgcgagagaagatcttcacgcccctaactgtggagagcgctgtggatgccagggacgccatcgccaaggtcttgtatgcactgctgttcagctggctcatcaccagggtcaacgcgctggtgtccccaaggcaggacacactgtccatcgcnnnnnnnnnnnnnnnnnnnnnnnnnnnnnnnnnnnnagcttcaacagctttgagcagctgtgtattaactacgcaaacgagaaccttcagtaccttttcaacaagatcgtcttccaggaggagcaggaggagtacatccgtgagcagatagactggcaggagatcacctttgctgacaaccagccctgcatcaacctcatctcactgaagccttatggcatcctgcggatccttgacgaccagtgttgctttccccaggctacagaccacaccttcctacagaagtgccactaccatcatggcgccaacccgctctattccaaacccaagatgccgctgcctgagttcaccatcaagcactatgcaggcaaggtcacctaccaggtgcacaagttcctggacaagaaccacgaccaagtgcgccaggatgtgctggacctgttcgtacggagccggacacgggtggtggcacacctcttctccagccatgccccacaggctgcccctcagcgcctgggcaagagcagctccgtcactcggctctacaaggcgcacactgtggccgccaagttccagcagtcactcctggatctggtggaaaagatggagaggtgcaaccccttgttcatgcgttgcctgaagcccaaccacaagaaggagccaggtctctttgagccagatgtggtaatggcacaattacgctattcaggggtgctggagaccgtgaggatccgcaaggagggatttccagtgcgcctgcctttccaggggttcatcgacaggtactgctgtctagtggccctcaagcatgacctgccggctaatggggacatgtgtgtgtcagtgctgagtcgcctgtgcaaagtcatgccaaacatgtaccgtgttggggtcagcaagctgttccttaaggaacacctataccagctgctggagagtatgcgagagcatgtcctgaatctggcagccctcactctgcagcgctgcctccgtggcttcttcattaagcggcgattccgctctctgcgccacaagatcatcctgctgcaaagccgggcccgtggctaccttgccaggcaacgctatcagcagatgaggaggagtctggtgaagttccggtccctggtacacgcatacgtgagccgccgacgctatctcaagctgagggcagagtggaggtgccaggtggagggggcgctgctgtgggagcaggaggagctgagcaagcgggaggtagtcgctgtggggcacctggaggtaccggctgagctggctgggctcttgcaagcagtggcaggcctcgggctggcccaggtgcctcaggtggcccctgtgaggactcctcgactccaggctgagccccgtgtcacactgcccctggacatcaacaactatcctatggccaagtttgtccagtgccacttcaaggaacctgcctttgggatgctgacagtgcccctgaggacacccctcacgcagctgccagccgagcaccatgcagaagccgtgagcatcttcaagctgatcctgcgcttcatgggcgacccccacctgcatggtgcccgggagaacatcttcgggaactacatcgtgcagaaggggctggcggtgcctgagctgcgggatgagatcctggcacagctggccaatcaggtgtggcacaatcacaatgcccacaatgctgagcggggctggctgctgctggccgcctgcctcagtggctttgcaccttccccgtgcttcaacaagtaccttctcaagtttgtgtctgattatgggcggaatggcttccaggctgtgtgtcagcaccgcctcatgcaggccatgggccgggcccaacagcagggctcgggggctgcccgcaccttacccccgacccagctcgagtggacagcgacctatgagaaggccagcatggcgctggacgtgggctgcttcaatggtgaccagttctcctgcccggtgcactcctggagtacgggggaagaggtggctggagacattctgaggcacagggggctggcagatggctggcgcggctggaccgtggccatgaagaatggtgtccagtgggcagagctggctggccacgactacgtgttagacctggtgtcggacctggagctgctcagggacttccctcgacagaagtcctacttcattgtgggcacagaggggcctgcagccagcaggggaggccccaaagtggtgtttgggaacagctgggactcggatgaggacatgtccactagaccccagccccaggagcacatgcccaaagtacttgactctgatgggtacagcagccacaatcaggacggtacaaatggggagactgaggcccaaagagggacagcaacccaccaagagtcagacagtcttggagagcctgctgtgccccacaaggggctggactgctacctggatagcctctttgaccctgtgctgtcctacggggatgcggacctggagaagccaacagccattgcctaccgcatgaaagggggaggccagcccggtggaggcagcagtagtggtactgaagacacccccaggagacccccagagccaaagccaatcccaggcctggatgcctccacattggctctgcagcaagccttcatccacaaacaggccgtgctgctggcccgggggatgaccctgcaggccacggcactccagcagcagcccctgagtgctgccctgagatccttgcccgcagagaaacccccagcaccagaggcacagccgacgtctgtgggcaccggtccccctgccaaacccgtgctcctgcgtgccactccaaagcccttggccccagcccctctggccaaggctccaaggctccccatcaagcctgtggctgcccctgttctagctcaggatcaggcttctccagaaaccacttcaccctccccagagctggtccggtactctacgctcaactctgagcacttcccacagcccacacagcagatcaagaatattgtcaggcagtaccagcagccgttccggggaggccggcctgaggccctcaggaaggatggcgggaaagtgttcatgaagcggccagaccctcatgaggaggccctgatgatcctgaaagggcagatgacccacctggcagctgcacctggcacccaggtgtccagagaggccgtggccctggtgaagccggtgaccagtgcaccaaggccatccatggcacccacttcagctctgccctcgcgatcgctggagccccctgaggaactcacgcagacgcggctgcaccgcctcatcaatcccaacttctacggctatcaggacgccccctggaagatcttcctgcgcaaagaggtgttttaccccaaggacagctacagccatcctgtgcagcttgacctcctgttccggcagatcctgcacgacacgctctccgaggcctgccttcgcatctctgaggatgagaggctcaggatgaaggccttgtttgcccagaaccnnnnnnnnnnnnnnnnnnnnnnnnnnnnnnnnnnnnnnnnnnnnnnnnnnnnnngcactgcacgagacacctgggaggtctacttctcccgcatcttccccgccacgggcagcgtgggcactggtgtgcagctcctagctgtgtcccacgtgggcatcaaactcctgaggatggtcaagggtggccaggaggccggcgggcagctgcgggtcctgcgtgcatnnnnnnnnnnnnnnnnnnnnnnnnnnnnnnnnnnnnnccagaacatgctggagttcaacctggccagtgagaaggtcatcctcttctcagcccgagcgcaccaggtcaagaccctggtagatgacttcatcttggagctgaagaaggactctgactacgtggtcgctgtgaggaacttcctgcctgaggaccctgcgctgctggctttccacaagggtgacatcatacacctgcagcccctagagccacctcgagtgggctacagtgctggctgcgtggttcgcaggaaggtggtgtacctggaggagctgcgacgtagaggccccgactttggctggaggttcgggaccatccacgggcgcgtgggccgcttcccttcggagctggtgcagcccgctgctgcccccgacttcctgcagctgccaacggagccaggccgcggccgagcagccgccgtggccgctgctgtggcctctgcagccgctgcacaggaggtgggccgcaggagagagggtcccccagtcagggcccgctctgctgaccatggggaggacgccctggcgctcccaccctacacaatgctcgagtttgcccagaagtatttccgagaccctcagaggagaccccaggatggcctcaggctgaaatccaaggagcctcgggagtccagaaccttggaggacatgctttgcttcaccaagactcccctccaggaatccctcatcgaactcagcgacagcagcctcagcaagatggccaccgacatgttcctagctgtaatgaggttcatgggggatgccccactgaagggccagagtgacctggacgtgctttgtaacctcctgaagctgtgcggggaccatgaggtcatgcgggatgaatgttactgccaagttgtgaagcagatcacagacaataccagctccaagcaggacagctgccagcgaggctggaggctgctgtatatcgtgaccgcctaccacagctgctctgaggtcctccacccacacctcactcgcttcctccaagacgtgagccggaccccaggcctgccctttcaggggatcgccaaggcctgcgagcagaacctgcagaaaaccttgcgcttcggaggtcgtctggagctccccagcagcatagagcttcgggccatgttggcaggccgcagttccaagaggcaactctttcttcttcctggaggccttgaacgccatctcaaaatcaaaacatgcactgtggccctggacgtggtggaagagatatgtgctgagatggctctgacacgccctgaggccttcaatgaatatgttatcttcgttgtcaccaaccgtggccagcatgtgtgcccactcagtcgccgtgcttacatcctggatgtggcctcagagatggagcaggtggacggcggctacatgctctggttccggcgtgtgctctgggatcagccactcaagttcgagaatgagctatatgtgaccatgcactacaaccaggtcctgcctgactacctgaagggactcttcagcagtgtgccggccagccggcccagcgagcagctgctgcagcaggtgtccaagctggcttcactgcagcatcgcgccaaggaccacttctacctgccgagcgtgcgggaagtccaggagtacatcccagcccagctctaccgtacaacggcaggctcgacctggctcaacctggtcagccagcaccggcagcagacacaggcgctcagcccccaccaggcccgtgcccagtttctgggcctcctcagcgccttacctatgttcggctcctccttctnnnnnnnnnnnnnnnnnnnnnnnnnttgctgtgccagccccttgcatccttgccatcaaccacaatggcctcaactttcnnnnnnnnnnnnnnnnnnnnnnnnnnnnnnnnnnnnnnnnnnnnnnnnnnnnnnnnnnnnnnnnacccagcggcccacggccaactccagctacccctatgtggagattgcgctgggggacgtggcggcccagcgcaccttgcagctgcagctggagcagggactggaactgtgtcgtgtggtggccgtgcnnnnnnnnnnnnnnnnnnnnnnnnnnnnnnnnnnagaagcggctcacattgccccccagcgagatcaccctgctctgacccagcccccagccctccagtaccttctgccagaagactcactgtgtggcctcagagaaatcactgaacctctcaggatcaatgacccctgtaaggggccagagccttggaggacactaagaggaggcaggaggagcaactcaaatccccaagaacacaagaagacccatcctgaactgggatggaatggcagcatgcaaacttggatcagatagcaggaggaacttnnnnnnnnnnnnnnnnnnnnnnnnnnnnnnnnnnnnnnnnnnnnnnnnnnnnnnnnnnnnnnnnnnnnnnnnnnnnnnnncagaccctgcccctaactcctgcctatgacacagaagccccacaccagttgcccagatgaactggcctctgcctttggtttactcagggtctgatgttggaatctgctccaactccacaccctagcccttacatgtcctcctaaggggcccctccttgtgctgccagtcagcctggatttctggtctttggttatttctgtgcaaacaaaaggtgtgcctggcagccatttctccatggagttgctaagtggccggaaaacaagcctgagggaggaggcaggagttggagttaccttaggcccctgattcactggctatgaacagaccatcccccactccttgggtatccccaaccccagacccccatcacttgatgggccacacaagtttgagagtggtacaagggagaagtttgggaaaagccttcttggaaaatgggacattagcattgagttttgaaagatgagtaggagtttgctaagaatagatggaagacagcaggataaacattccagagaaaatcatgtttattccctgctgtatcttccagaacctaggaggatgcctaacagagagtaagcacttaaaaaatatttgtcatatgaatgaaaaaataaacgagtgaatgttgataaaaaaaaaaaaaaaaaaa

SEQ ID NO: 6159 - DNA, 5560 bp, Homo sapiens
  misc_feature (752)..(788): n is a, c, g, or t
  misc_feature (4060)..(4099): n is a, c, g, or t
cggcacgagggttaccattttactccacggaatagttctgccctgtagcatctccagcggcctttgcagactgctgtcagccaacaggtgccaaaaatgcaaaagaagaagaaactaaaagcagtgctatttttgcagaacaaatgctagctattaaatcatcttaggccaagacaccaatggcacttggaccgataggtatttggagcatgagttaggaaggatatgtctttctccaggtgcgcagctgaaagttgctgagaaaagctgcctgtgttgctgtggtaacatgagaaggaatgaacagctctatacaaaaactggccacacattataaggcctattctatgcagttatgtttttggctatttgctcatttagtcattgtttatcaaccaaactaggtaagccaaggagttacaagacagctctagagaagctccctctgcttacaggacaataatgcattgtttgttgatacaaatgaattatttgaatccacagaagtgaaaaagggaaaaaatcctggctgacttgtgggaagagcgtactgcagagcctagggcctgagttaactcgctggcggccctgcaggcaggcttgatgggagcgcccagcacatctgcccaccctgcacagggcatgaagcaccgtgtgcagagatctgtgagcaaaagcccaggacgtgaccttaggcaagaggggtccttggagaagtggaggtgtgcatggtgtgtagccttgcgtgtctnnnnnnnnnnnnnnnnnnnnnnnnnnnnnnnnnnnnnggccagtctctcggaggggtccgtgatgctgagttacgccattcacctgaactctgcagctcatcggctgtaggatttgggtgagacacttttccttgctgactcatttccccatctgcaaaatgggggtgacgatatctacctcttggggtgtgtcaagggtaaaagagcacactttaagaatcctaaagcactaagccaaggatgaaagactagaaagctgcctctatgttgctactctcaaaaatgctcagaaattttcttgtcgtactaaaaatgtgttatttttctcattttcattcttccattcaacacagaagtaatctaagtaagttctaaaaacatagatccgggggcccacagacattcaattttcttctgaattggctctggtatcacacaacacacaagcaagcaaacagcctgcctgctagggccttgggttccaggctggaggaatgcaggcagaaatctcttaggaaataactaagtgagcgccaagttttgaattgccttagagccgaaagagaatgtggcgtgctggggagagatctggacctctttctcatcagtcatttgacctgtccacgaagaacaattttgttatgcagcctgggaacctggtttccttacaccctgcgcccttaatgacacagacaaccacgggtactcctggacggaagctcatcacgcctcctcaaataccttcacccatgttcaggtcacacggaggtcaccatctcctcagcacacaacaactgctttggttcccagggttattttttctacgagttgaaaacccacggagcctaagccatctttttgtcccctaaggagagccccatagactaagagctacacttcctgtctgtctttcccacctttccatctcattctagcttaaagcttatcacgctactgagagcctgttctgtagttcaaggtggcagagaaaaatacgaaccttgagtgaaatctggagagcagtgcagggtcatccccagacgtgacgggccatatcctaggcgactcctgcagcttatagaagcagggaatttaatggacttcttccaggaaagccagcccacggggactcttaaaaagacaccaaccatttggaagatgcagcttgaggtctgggggactggactgattctgccaccatatagtgaacacgattaatcgggaggaagaagtaaggcactctgtgagttagtctaccaccctattgactttgacagagagaaaaccaacttttttcatatgatcacacagtagtactggaatatctcgactgcaatatcctctaaacaaatgcatgcaaagctttgtaaaagcagctgatgattaaaaaaattttaaaacattagggtttttctaatatatccatatgtgggacagtgatttaaatgtcattaattgtccagccacaacttgtaacagtgatgtgaaagacacaaaaaaggccccactggagtggaggagtggtctggctggtccccaagcaaaacagaatgggcttcgcataggctttagaacttattcataaatattgaccaaagtgtgaagcaaggtatccagtgaagattctctagggtctctacttctgctcaagagatttaatccagctttctctaaagcagtggtccagacttgccacatactaggttaaagataaagtgagaaaaacaaatactttggtttgcacgtctcttgaggggccctaggctgtatggaggaatatttagaggaatatttgtgagctgccatttgtgtttaaaagaacatgaaagcaagacgggccctaacccgcctgtgtctgtagctgaccaggaggccactgcttccttcccccagagcttctaggagagccccccaaaatgcaactctccaaggtcctgtggagtagtcccctcataatgcctccaccacacctgtgtctcacgatgccttaactgacgtagctcctaagtgatgttcacagagaaggaaatacttaggcaagcccatgtgtaacatgctcacagatgtgctggctttgccaatgctttcggactccaccatgctttctgattcttctggtcctagtcacgccttggcacggggcagaagcggccgagctatgctgacaggtgctgctgagagccaacagccattcagccgagaaggcgtttctaggtgagggcatgagagctggcattccaggctgctgagtgcggcatctgcaggtgcaccacattgctccacggtgtgttcagaagagaccagcatcttgaatctcaggctctgggctcattctttgcctctgccaagggaccattcaggggcttcaagccagctgctgaaaatcccccttttctggatttttccccatctatataaggatatggtggctgtgtggacaagaaattggtttcatctcagaagggtgcttccctacaaagatcttcagaaatttaattgaaaacaattttttgaactttttttgtttggccaggatgaatgaagctgaagtcacatcctgaatgtgcatgccagacaaagggtaagcaagcagtctttacaaatgccaatccctctgcactccaaaaccggagcccgtaatgaaggcccaggttccagtcatcacaggatcccccaagccagcacagtgcctgatgcctccctaggcattagcacatcccagcactctaattcacatcctcagcatccctgcctcctgcatccagggcttaggttgagtgtttccagagtgtcaagtacatttaaacacaaaccaaatactccagggttttgacctgtcacaatggcttttgaaaacaacagacgtacaatttgagagaaggactcgatggacttcttaggctgaggactaaggacatgttgctgttcctcttggtccaggacattcaataccattcacagcattcatcaccaactgacatagtatcgatcacgacattcaactgtttgaaattactgctattttggtcaaaaactaagaaatcagaaattgcacctacatagtgtgtctcctcattggagtcccatctctctgagcacagggatgggctcctgagctcacagccctgccctgcccccccagcagggcctcaccctcatggccctcagtgaatagtgactacatgaagggggcacttactagaggcctgagtaatggaatttcaattagcttctgcttcccttttctaaaaaagaaccacctttcttaagaataattaggccaaaataaacttgagtaatttgtacannnnnnnnnnnnnnnnnnnnnnnnnnnnnnnnnnnnnnnnaagctgttctccaggaaaggacatccaggttcccacccaggccttccttcctcagctcctgcagcctcatcctagtttaatatgaaggttgtgaatgggttaaaaagcagttcttaagcacctacttagatcttttcagtatctggaaatagcacccagggctgtgttagtaaagcttttcactgggtaagagtcatacaatttttacatttaatttgtttttttaaaacaaggcagtcttgttttacatattggaatgactagatattttttgacatttctggcacctctggttctgctgaattttaagggaggtgagtggtatgtacacaaagttaagattgctgcataataattcctttgcatttccaaaataaattacacaaatgtcacttttccttttctattccatagtactagttttagccagatctttgccaaacattctaggacattcagaaaagtcatccatggaattttggaatgccattctctctgtatctttgcagatcatgaggaaggaaagttgatgaactagtacgggatggctcagacttgtaaagtgtctaagtcacaacgctgcagagccagcttccgggtagcaatggcatggcctcagctgtgccaaggctacaactggagcttccttactcgcatctgaggcaaacacagcaaggctggcccaggccgcccacagtcaacagatgttcacgggagatggatcagcccctcttttgcttgttctatcaaggaaagagatctaaccatgggcaagggtggaacacacccggttcaggtcagggtatgagttgctctaagtgaacagtgaattcttacttctcagcctgtatcaattgtacccagggttcatgattactgtgacccactaagggacgatctttgaggaaacagacctggagggaggtaatttaaggagggaaagtgagtgggttttacagactgctttgtggcgacattcaggaacagaccattcaatggatgacttttcagtacataaaagcaagcagtaatggccaggagagagcaaagatgccctaagaatgacatcagactgaccaaatgtgccttttcaaataagttatgagaacgaatgaattggaattagagcaaggtattggacagaaccatgctagtctttgagagaacgtgtggattgggtggatgtttggaccgaatgaatggtaactttttaatgtgaaacagagaactgatatatgggctgtcatgtcaccctagggtactgtcgctctgtcatgtgtagcaatctttccaaatttttgttggtgggctgaacaaagataaaactaataaagtatgtgtggataccactagaaaaaaaaaaaaaaaaaaaaaaaaaaaaaaaaaaaaaaaaaaaaaaaaaaaaaaaaaaaaaaaaaaaaaaaaaaaaaaaaaaaaaaaaaaaaaaaaaaaaaaaaaagg

SEQ ID NO: 6160 - DNA, 3970 bp, Homo sapiens
  misc_feature (422)..(445): n is a, c, g, or t
ggcggggggcgcacagagccagaggggcttgcgagcggcggctgagggaccgcggggagggggcgccgagcggctccagcgcagagactctcactgcacgccggaggccccttcctcgctgcgcccgcgcgaccgcgcgccccagtcccgccccgccccgctaaccgccccagacacagcgctcgccgagggtcgcttggaccctgatcttacccgtgggcaccctgcgctctgcctgccgcgaagaccggctccccgacccgcagaagtcaggagagagggtgaagcggagcagcccgaggcggggcagcctcccggagcagcgccgcgcagagcccgggacaatggggccgcggcggctgctgctggtggccgcctgcttcagtctgtgcggcccgctgttgtctgcccgcacccgggcnnnnnnnnnnnnnnnnnnnnnnnnaaatgccaccttagatccccggtcatttcttctcaggaaccccaatgataaatatgaaccattttgggaggatgaggagaaaaatgaaagtgggttaactgaatacagattagtctccatcaataaaagcagtcctcttcaaaaacaacttcctgcattcatctcagaagatgcctccggatatttgaccagctcctggctgacactctttgtcccatctgtgtacaccggagtgtttgtagtcagcctcccactaaacatcatggccatcgttgtgttcatcctgaaaatgaaggtcaagaagccggcggtggtgtacatgctgcacctggccacggcagatgtgctgtttgtgtctgtgctcccctttaagatcagctattacttttccggcagtgattggcagtttgggtctgaattgtgtcgcttcgtcactgcagcattttactgtaacatgtacgcctctatcttgctcatgacagtcataagcattgaccggtttctggctgtggtgtatcccatgcagtccctctcctggcgtactctgggaagggcttccttcacttgtctggccatctgggctttggccatcgcaggggtagtgcctctcgtcctcaaggagcaaaccatccaggtgcccgggctcaacatcactacctgtcatgatgtgctcaatgaaaccctgctcgaaggctactatgcctactacttctcagccttctctgctgtcttcttttttgtgccgctgatcatttccacggtctgttatgtgtctatcattcgatgtcttagctcttccgcagttgccaaccgcagcaagaagtcccgggctttgttcctgtcagctgctgttttctgcatcttcatcatttgcttcggacccacaaacgtcctcctgattgcgcattactcattcctttctcacacttccaccacagaggctgcctactttgcctacctcctctgtgtctgtgtcagcagcataagctcgtgcatcgaccccctaatttactattacgcttcctctgagtgccagaggtacgtctacagtatcttatgctgcaaagaaagttccgatcccagcagttataacagcagtgggcagttgatggcaagtaaaatggatacctgctctagtaacctgaataacagcatatacaaaaagctgttaacttaggaaaagggactgctgggaggttaaaaagaaaagtttataaaagtgaataacctgaggattctattagtccccacccaaactttattgattcacctcctaaaacaacagatgtacgacttgcatacctgctttttatgggagctgtcaagcatgtatttttgtcaattaccagaaagataacaggacgagatgacggtgttattccaagggaatattgccaatgctacagtaataaatgaatgtcacttctggatatagctaggtgacatatacatacttacatgtgtgtatatgtagatgtatgcacacacatatattatttgcagtgcagtatagaataggcactttaaaacactctttccccgcaccccagcaattatgaaaataatctctgattccctgatttaatatgcaaagtctaggttggtagagtttagccctgaacatttcatggtgttcatcaacagtgagagactccatagtttgggcttgtaccacttttgcaaataagtgtattttgaaattgtttgacggcaaggtttaagttattaagaggtaagacttagtactatctgtgcgtagaagttctagtgttttcaattttaaacatatccaagtttgaattcctaaaattatggaaacagatgaaaagcctctgttttgatatgggtagtattttttacattttacacactgtacacataagccaaaactgagcataagtcctctagtgaatgtaggctggctttcagagtaggctattcctgagagctgcatgtgtccgcccccgatggaggactccaggcagcagacacatgccagggccatgtcagacacagattggccagaaaccttcctgctgagcctcacagcagtgagactggggccactacatttgctccatcctcctgggattggctgtgaactgatcatgtttatgagaaactggcaaagcagaatgtgatatcctaggaggtaatgaccatgaaagacttctctacccatcttaaaaacaacgaaagaaggcatggacttctggatgcccatccactgggtgtaaacacatctagtagttgttctgaaatgtcagttctgatatggaagcacccattatgcgctgtggccactccaataggtgctgagtgtacagagtggaataagacagagacctgccctcaagagcaaagtagatcatgcatagagtgtgatgtatgtgtaataaatatgtttcacacaaacaaggcctgtcagctaaagaagtttgaacatttgggttactatttcttgtggttataacttaatgaaaacaatgcagtacaggacatatattttttaaaataagtctgatttaattgggcactatttatttacaaatgttttgctcaatagattgctcaaatcaggttttcttttaagaatcaatcatgtcagtctgcttagaaataacagaagaaaatagaattgacattgaaatctaggaaaattattctataatttccatttacttaagacttaatgagactttaaaagcattttttaacctcctaagtatcaagtatagaaaatcttcatggaattcacaaagtaatttggaaattaggttgaaacatatctcttatcttacgaaaaaatggtagcattttaaacaaaatagaaagttgcaaggcaaatgtttatttaaaagagcaggccaggcgcggtggctcacgcctgtaatcccagcactttgggaggctgaggcgggtggatcacgaggtcaggagatcgagaccatcctggctaacacggtgaaacccgtctctactaaaaatgcaaaaaaaattagccgggcgtggtggcaggcacctgtagtcccagctactcgggaggctgaggcaggagactggcgtgaacccaggaggcggaccttgtagtgagccgagatcgcgccactgtgctccagcctgggcaacagagcaagactccatctcaaaaaataaaaataaataaaaaataaaaaaaaaaaaaaaaaaactatttccaaataccatagaataacttacataaaagtaatataactgtattgtaagtagaagctagcactggttttattaatttagtgactattcattttatctaaatcagtgaagatttactgtcattgtttattagtctgtatatattaaaatatgatatcattaatgtacttacaaaatagtatgtcactgtttttatgttcattcttaaaaacataacctgtattaataaatgtgaacatttgcttggtaaaaaaaaaaaaaaaaaaaaaaaaaaaaaaaaaaaaaaaaaaaaaaaaaaaaaaaaaaaaaaaaaaaaaaaaaaaaaagggg

SEQ ID NO: 6161 - DNA, 2020 bp, Homo sapiens
  misc_feature (1612)..(1612): n is a, c, g, or t
gcgcctgcgctgaccgccagggcaggtgcccgcccgcgtagacgcacccggcctgaccccgcgccaccatgtaaacggcgccagcaggcggacgctggcttctccgcctgggacccctccgccccgacccgggccccgcggccctcgatgaggacacaccatgctgaccggggtgaccgacggtatcttctgttgcctgctgggcacgccccccaacgccgtggggccactggagagcgtcgagtccagcgatggctacacctttgtagaggtcaagcccggccgcgtgctgcgggtgaagcatgcaggacccgccccagccgctgccccacctccaccatcatccgcatcctcggatgcagcccagggggacctctccggcttggtccgctgtcagcgccggatcaccgtgtaccgcaatgggcggttgctggtggaaaacctgggccgagcccctcgagccgacctcctacacgggcagaatggctctggggagccgccggccgccctggaggtggagctggcagatccggcgggcagcgatggccgcttggcccccggcagcgcaggcagcggcagcggcagtggcagtggtgggcggcggcggcgagccaggcgccccaagaggaccatccatattgactgtgagaagcgcatcactagctgcaaaggcgcccaggccgacgtggtgctctttttcatccatggtgtcggcggttccctggccatctggaaggagcagctggacttctttgtgcgcctaggctatgaggtggtggctcctgacctggccggccacggggccagctctgcgccccaggtggccgcagcctacaccttctatgcgctggctgaggacatgcgagcaatcttcaagcgctatgccaagaagcgaaatgtgctcattggccattcctacggtgtctctttctgcacattcctggcacatgagtacccagacctagtgcacaaggtgatcatgatcaatggcgggggccctacggcgctggagcccagcttctgctcaatcttcaacatgcccacctgcgtcctgcactgcttgtcgccctgcctggcctggagcttcctcaaggccggcttcgcccgccaaggagccaaggagaagcagctgttaaaggagggcaacgctttcaacgtgtcatccttcgtactccgggccatgatgagcggccagtactggcccgagggcgacgaggtctaccacgccgagctcaccgtgcccgtcctgcttgtccacggcatgcacgataagtttgtgccggtggaggaagaccagcgcatggccgagatcctgctcctggcattcctgaagctcatcgacgagggcagccacatggtgatgctggaatgccctgagacggtcaacacgctgctccacgaatttcctgctctgggagcccgagccctcgccccagggctctaccggagccactgccggggcctcccagaagaaaagaagtagccgctgggccggcggggcttcgcttggtgaagcacagccgcagcaggaggaggcccgagcctgcgccaggtctgcagcgcagaccacctgggcgggccgttcgctccggtgggcggggcaaggtcaggnagacgccccaggctgctgggcggggcgtggcatccgagggagccagcggacattccgtctccgctccgtccgcggggccatcggcggttggggcgcagcgggacctcacggaagatgacttgtcgaaagtctcttaatttcaccccatagcacgggcaagggagtgcccaaccccgaagatacggggaagccaggtatactggaccaagaagcccacaggggcctcagggcccaccggtacagaacttccaccccaatctcgcgagagaatatttgccaagggggaaaggggaggagcaagaggcgcacaagaacgcagaagcgagagggcaacaaacacaagaacaaaaaggcaatacaacagagcacaccacagagaagaaaggcgcgaagagagaacgaaacacg

SEQ ID NO: 6162 - DNA, 575 bp, Homo sapiens
  misc_feature (533)..(533): n is a, c, g, or t
  misc_feature (540)..(540): n is a, c, g, or t
  misc_feature (551)..(551): n is a, c, g, or t
  misc_feature (566)..(566): n is a, c, g, or t
ttttttttttttttttttttttttttttttttaaatggaccaatcagatttattcgtaaagcaaatccaaaaaaatcccatcataattttggaacttaaaaaaaaagtctttcgtacaagatggcaaagcatttcacgtacagtgcgtttctcgacaaatcccaggggcttcacttcccaatttactctgaaccaaaaaggccagttgccaaggtaactctgacaccatgtgactggggccggggcgtctctggggtcttggggcatgtctgcaggcacacacgtgtgctcgcagacacgctggtcctgcctcccactctgggctgggcccagtcttccatccaagggtctccggggctgagggaggaggggtttgggagaggggaggggaaacagtatgggagagggacgcgggatgacgatttggggggttgagggcccattaggcaccctgcatgggatttttcctcaagggggagaacagtggggtcctcccgggcagcttttccttttgggaggggagtgaggatttnctgagtnttttttggccntcttttccaggggangtttccaca

SEQ ID NO: 6163 - DNA, 1109 bp, Homo sapiens
  misc_feature (1003)..(1003): n is a, c, g, or t
  misc_feature (1075)..(1075): n is a, c, g, or t
gaaacttgtttaatggagtaatatacttttttttcttattaaggaattgtattactggcacctaacacagttgtattcttagctcctattatagataatgggcatttacataaaatatcctagatggcttgatggcagaataaacctttcccctcctacctgagtcatgagaaggatggagacgtcctctgccataacatgggccataaagcaaattcgacatgggatgttctgtttcagtatgacctcaaccagttccatgaactgagtgaaggaccttcattttcaaagttatttaataagtagcttaattaagcctttctacccattctcccaagatctattggcattattgaaaagcaaagtttatcaaatatctaactaaggatgtagttaaccttattaaatattgattagaattgttctgtaatattactgaatttgtaagatctttagcaaagatttttgagcaatttataaatgtagagcaaatgtttctgtttactgcactttttgtaactgaaggtgataaattctcaagccatgattattggcttccatgcactgcaatatttatccacaattctagacattttccattcttgtggaagagttgctgttaccttaattataaatgcaattgtgtggttaatgagagctaatgctagtagttaaccttttaaagtggattggctacagttgagggagaaatctcttttaatataaatcacatcattccttaactgcctctcttggaaagagattgaaaccttttttttaaagcacgatttagcatcctaagcttcctgagggtagagattgtatctttttgcgtctgcacaatggctagcacatgtcagcatttgacaattgttaaatgataacaagtgtgccccaattaaaacgttcttcctgagttgttctgttaaatttacaaagtaagccaagccttacggttaacattctcctctacaaccaagtattaaagccacatttaacacanactttacaaacttctgtttgagtaaacaaactcagccttctgtaaatatacatgcaagctttgaaacagtantactgtacctataaatatatgctgtctgttttgg

SEQ ID NO: 6164 - DNA, 4840 bp, Homo sapiens
  misc_feature (3223)..(3237): n is a, c, g, or t
  misc_feature (3718)..(3718): n is a, c, g, or t
  misc_feature (3764)..(3764): n is a, c, g, or t
agcggttacgatcacgcacacacacacatgcacacattttctcgcgctctctccggctctcctttgtttattttctaatctatatttttactggaagatttcctctttattctctcccgccctcctacaagcgctcttgctggccgtctgggtgcacacaccgctccctcgatcaccccagcccccttcctggtctcccgagcgcggggtttgaaggtcacctcctttccagtccccgtgcgagccgcgctgccgccgcctcctccagccagagtcggtgggactggctgcgctgccctgaagtggttctccaagcagcgcggagggtggcggacggcggacggagcccaggggccgcgtcgggtggggaaacccgaactcgcggaggggaatccctcccccttcgccccagccccccagcagcacccgcggtggggcgggggcgctctgccagccccgggaacagcagaggcggcggcactggctggacccacgcgcgcgcctccggggctgaagaaggaaggagtgagccgagccgagcaccccacatctggaggggacagccagccgtgggccccgccccggcgtccggagcaggagaattccgagcttcttgcccaggcagagagagcaggagcggaccgcgcgcccgggattgagagtccttgcgctccagacccccacccagtggccgccaggtcccgcctgtccggaccctcgccgcgcccaggcaggcgcgccagggcggggctgacctgcccgcgaagttgcggacagtgcgtgagaaaccagcacccccttccgccgcctccagcttatggtgagtgtggctgggggtgcagagagcgcacgggaattcgggggtctggggccgagaacgtgaccgcagccgggctcgccgggagttctaggaaactggtcaaagaactcatgcaagtggaacttacagcttccttgatcggactcagcattcagatatcaaagcagactgcaatacctgcgtggaaatagaagacagaaaggtttcaagacaacagatgaattgtgaaagagagcagctaaggggtaatcaggaagcagccgctgcccctgacacaatggctcagccttacgcttcggcccagtttgctcccccgcagaacggtatccccgcggaatacacggcccctcatccccaccccgcgccagagtacacaggccagaccacggttcccgagcacacattaaacctgtaccctcccgcccagacgcactccgagcagagcccggcggacacgagcgctcagaccgtctctggcaccgccacacagacagatgacgcagcaccgacggatggccagccccagacacaaccttctgaaaacacggaaaacaagtctcagcccaagcggctgcatgtctccaatatccccttcaggttccgggatccggacctcagacaaatgtttggtcaatttggtaaaatcttagatgttgaaattatttttaatgagcgaggctcaaagggatttggtttcgtaactttcgaaaatagtgccgatgcggacagggcgagggagaaattacacggcaccgtggtagagggccgtaaaatcgaggtaaataatgccacagcacgtgtaatgacaaataaaaagaccgtcaacccttatacaaatggctggaaattgaatccagttgtgggtgcagtctacagtcccgaattctatgcaggcacggtcctgttgtgccaggccaaccaggagggatcttccatgtacagtgcccccagttcacttgtatatacttctgcaatgccaggcttcccgtatccagcagccaccgccgcggccgcctaccgaggggcgcacctgcgaggccgcggtcgcaccgtgtacaacaccttcagggccgcggcgcccccgcccccgatcccggcctacggcggtgttgtttaccaggatggattttatggtgcagacatttatggtggttatgctgcataccgctacgcccagcctacccctgccactgccgctgcctacagtgacagttacggacgagtttatgctgccgacccctaccaccacgcacttgctccagcccccacctacggcgttggtgccatgaatgcttttgcacctttgactgatgccaagactaggagccatgctgatgatgtgggtctcgttctttcttcattgcaggctagtatataccgagggggatacaaccgttttgctccatactaaatgacaaaaccataaaaaccttccaatgtggggagaaaggaagctttccgaggcctgagtattgcaatacatgcagtagtacatcattttagcaactctaaaaaaaaaaaaaaatacaaataaaaaggaaaaaaaatgacattttttatcttatacctcagatattttgttctgtgtattttaatattgtgggtctttaatttctgaaggttccgtagtttggttgctggctgtaggagtttttgtggttgatctagacagatgctagataatgaataaaaactggtttagggccatatccagagtgctatattatgtaaatgaattatatatgctgaatattaagctactggggttatcagctgtttgggaagagtgtaagtgactacagtagtcatttttttctgcacctgcattattttattttgtgaaaggggaggttgggaggggcttaggggattggaactggggtttggctgaaagaaaaaaaaaaaatgtaactgatgaatctaaacgacccactgcaccaacaatcatttatcaatggttctaagttactcattgccagttcaagccaaaggtcatgttgttaagggggtgcttctagtagcacttgtgcatctgagttgaatgaagctgtgcaaacccaccctttaaaccattccacccggcagtattcagcttcttaaccagtcgctatttaggaaaaaaaacccactagttaggccatcaacaagcattctttttatatttcttccagtataataaattattgatatcattgctgacttttatattatgggagggaaaaaataacattaataaaaaggtgataaaaaagcactgtttctatttttttctttttttccaaaaaaagaaagtaataaaacttaaattctttgtaccagttaaaaaaaatgtataaaatttacatctgtgcagtggagttgttaagttctagaaacagtctatgaagctttagttttagcctnnnnnnnnnnnnnnnagagacagacgtataatttttatggaattacatgataatcatattcggatttatagaagcattttacaagtattgcaatcattgagtagagataatcatggtattttcatcagcttggtactttttgaaacgtgactgcgttgtgtgaacaatctgcaatttttcagtccgtgagatcctgcccttccacctctttcccatacccccaaggattatctcaaaatgatctctttagttctgtctccaaggcccaggacacttgtcagaaggatgcaaaaaaagaaaaaagtagatccaccctcttaatcccaaaagaacaaagtctccccacctttctcggatgcagggccagagtgacacagccgaaaaattgcagtttgtctgtacttctgtttgaactttccacgttgtcctgtttacaagttaacttaagttggggtatccgtcacgggtcttcctgttttgtatttaaataaaaacnacagcagcaggctgtccctgagtagttttgctgccataggttaagncctcatgtgtaacagtgcagccctgtggcccgcacttcagtaagttatcaactctcaccgctgtgaacctgccaatccgctgtaacaactctgctttaaaacaaaaccaaacaaaactttaaaaaaaaatgtgtgatccagctttctcttgccatcctatgtgcatgccgtaagatcagttggatattaaaccatcaataaagtttcacaagatttgaaaacaaagtttctgtagcttcgatacctaagacagacgatagtgatcttgaaaagagaaaagggggaggggggagctacttatcagccaaaagcatataaagtgttcttttcaccagacttctttgggtgggtgaggggaggggcaagagggtgttttatagcatcactaagacattctcattcccccacctggaaaacagtgttatggcaatgggtgcctggttgatgttcttaaaggaaacgaattattaaaacactatgacatcctccagagggaagaaagagtaggagcagggggctatggagaataaatttctcccaattgccgcctcagatttcaaaatccagaatttgtattgtgtttcgaatcacaaacatagaattcttactgtgttggttaaagtaaaattcatttgcagttttgattttcatcaatgagctgtactttcccccatgactgtatgtagttttaataaaatcatttagagtgagtgagtggcaaccgatgttgcagaatcttttgtctaggcactccaagatgccaataagtcattttaaaatgtatgtcagagatgtaaacaaacattttggattttttttaaacagtatttatttggaatgttttcatttatctaaataactattgctattatgaattatggaaaattaatattatgtgtggcatatagtgacttcttaacacacacatcacgcaatctgcaaacccagaaaatgtgtatatctgtctttagaaattagtgtttatatcacttacagtggtttgtgaataaagaaaactggtttgtaatatcaaaaaaataaaagcttagtctgaaaaggcaaaaaaaaaaaaaaaa

SEQ ID NO: 6165 - DNA, 3692 bp, Homo sapiens
tgagtcccggccggagccccacggccgcgggcggcgcctaggacggcgatccgcgccctggaggatccgccggccgcccggctccactacagctccagccgcctgcagcggggccctcctgaggccccagaggaagagaccatgaaagtgaggtcggccggcggcgatggagatgccttgtgcgttacagaagaggacctggcgggtgacgacgaggacatgccgaccttcccatgcacccagaagggccggccagggccccgctgcagccgctgccagaagaacctatctttgcacacatcggtgcggattctttacctcttcctggccctgctcctggtggccgtggctgtgttggcctctctggttttcagaaaagtggactctctctccgaagacatctccttgacccagtctatttatgacaagaagcttgtgttaatgcagaaaaatctccagggcctggatccgaaagccctgaacaactgctctttctgccatgaagctgggcagctggggccagagatccgaaaactgcaggaggagctggagggaattcagaagctgcttctggcccaggaggtgcagctggaccagaccttacaggcccaggaggtgctctccaccaccagcagacaaatctcccaggagatgggcagttgctccttctccatccaccaggttaaccagtctctggggctcttcctggcccaggtgagaggctggcaggccaccacagctggcctggacctctctctgaaggacctcacccaggagtgctacgatgtcaaggctgcagtgcaccagatcaacttcaccgtggggcagacttccgagtggatccacgggatccagcggaagacagacgaggagaccctgaccctccagaagattgtcaccgactggcagaactacacacggctcttcagcggcctgcgcaccacctccaccaagactggagaggcggtcaagaacatccaggccaccctgggggcctcctcacagcgcatcagccagaactcagagagcatgcacgacctggtactccaggtcatgggcttgcagctgcagctggataacatctcgtccttcctggatgaccacgaagagaacatgcatgatcttcagtaccatacccactacgcccagaaccgcactgtggagaggtttgagtctctggaaggacgcatggcttctcacgagattgaaattggcaccatcttcaccaacatcaatgccaccgacaaccacgtgcacagcatgctcaagtacctggatgacgtgcggctctcctgcacgctgggcttccacacccatgccgaggagctctactacctgaacaagtctgtctccatcatgctgggcaccacagacctgctccgggagcgcttcagcctgctcagtgcccggctggacctcaacgtccggaacctctccatgatcgtggaggagatgaaggcagtggacacacagcatggagaaatccttcgcaatgtcaccatcctacgaggtgcccccggccctccaggaccaagaggattcaaaggagatatgggcgtgaaagggcctgttggcggcagaggcccgaaaggagaccccggcatcttgggccccctgggaccccagggtcctcaggggcaacctggagaggccgggcctgtgggagaaaggggccctgttggccctcgagggttcccaggcctcaaaggctcaaagggcagctttggaactggagggccgagaggacagccaggcccaaaaggggacatagggcccccagggccagaagggcccccggggtctccagggccctcagggcctcagggaaaaccgggaattgcagggaagacagggtcaccaggccagcggggggccatggggcctaagggtgaaccagggatccagggtccccctggtctcccggggcctccaggtccaccaggaagccagagcttctactgaggagggctgtggcagagccactgtcacacagaatgccggaggggcgcagagcagatccaggccccagaaagcctcacctacagacagctgtggtcctctgattccaatgagggggctccccagggctgaccctgcagctttgggctcccccatagtgactgtgccataggaaagcagcccctcctcacacatacatgtgcacatgcacacacatgcatgcacacacatgcacacatacacgcacatgcacacatacacatgcatgcacacatacacaggcatacatgcatgcacacatacatatgcacgcacacacacatgcacacatacacgtgcacacatacacaggcacacatgcatgcacacatacacatgcacacacacatgcacacatatatgcacaggcacacacatgtatgcacacacacatgcaccgcacacatatccatgcacacaaacacatatatacacatgcacatacacagatttttctgctggccaggtgggccaactgggtttcccctggctgggcaggaggagagggcagaggaagaccccctctcctgtgactgagcctgccagggaggcagctacctcgggaggaaggtctcacatctgtctttgggcacccatgctggccagcagtttcccagggctccctggggttgaaaagccccaaggaaacctttgcgggtggggcgttactgccaaaactccagaggcaaagtggacctggcaaccacaagaccctccccataagcaggggaccagcagacccgggagctgtcccctgtctgtcacagcacagtggggccacgaggctgacattctctggccttgcacacagtgccccctgagaagttcaacatttatttcttcacgtgtccaggaaaattcctcaattcatccttgcctctgcccttcaggagcagcctggaaggaatccaagcaggagtttcatctgcatgggggcactttgcaggccctggaacattgggcctgagtggagatgggagacagaggcaggccagaaggttctctctgcacagctgcctcccttgctctccctgagggtggcctgccccattccccaagggggctcctttggagtggtagggaggatcaggctgcagaagggccaaccccttgcaacagggcagctctcgcctcccgcacacggctctcctgatcacagctgcatgccgaccttgtcccaccgggacccacaatggcccgagccctctttgcatgggcagccagctggactaggagtgggaagggcctggacactcacagaggccccctctgtcatcactccttggcacccaccaacttcctgcacacactggcagagaggggcgctgggaaatcaccccacagggtggaggtctcctgttggctacactctaaagctgctttgccttcatgttcaaacagattcaggcaccaccccctccaccgcccgcaaggttagggcatagatttgtctccttcccaacacggacccagagagcagcccttccctgctcaaagcctttccgcaccctcctgactgtcctggatgtgcaactggtttgcactgcacaccccacggccatgtaactctcctgtccacatatgataataccattctgcatagtattactgactcagtaaagaactatttccaggagtaaaaaaaaaaaaaaaaaaaaaaaaaaaaaaaaaaaaaaaaaaaaaaaaaaaaaaag

SEQ ID NO: 6166 - DNA, 3409 bp, Homo sapiens
gtcgactttattttttttttttttttttttttttttttggccatagaaacgtctttattgaagaggacaggagtcatgctgagtttggggacatgcagtgaaggggcagtcgtgagctgtccttggtggtcggggccccaggtccgccctggaccccctgggccttcaggttctccctcgagctgttggtctggcccaggtgctgtggggtcctttgaggccagtgactagaacgtagattgaaatcggggttccaggatttgagatcccctcagggccttggggccttccatttattagagatggaggctttaggatttggggttcccttagggctggggctcttggaatttggtgtcttgaaacccatggactcggggcattgaaattctccagtttccagggatgggaattcctgtgtggggtttcctggtgcctgtgaatagggcttgaggtgtctgggagcctggaatgcatatcctgactgcagtctcctccataccaggcacaaggacctcatgattgggtttcctggggacttgggattggattttcaaatttgggattccctggggatttgggattccatgatttgggggtcctaggagttacggcattggggtcttctaggggctgtaggacttgagggcacaggggagtttgggacgtgtgtactctagggtttgggatccccagagtcctagaatggggcctccaaattttggggtcccccaaagggggaagtcgttacttaaaaaatagagaattttctgggagtctggccagcacaggagctgtgggccatgtggggtgggcttcatacaaggcactgggggtttcttgagggtgcagagggtaggaagacttggggggtcctgtaattagcacttccaggactgttttggtgtctgtaaattaggggtgacagtgggctggttatggtgggtttcttcttgagggataagaacaagggtctttgttaatgaaggaagtctctgattgaggggttggaatctaagggcttcagggtgaccatggggtcacgacatcttgagaggactgatgttaaatggggaacaatgacatgaatgtctgttactcttttgctttgggggtgtgacctatgtttatttcaagaggacttaaggggcagtgtttgttaatggggaggtttctgatccagggttgggtgattcaagaatgttctgttgtaatgcattatgtggagagggtcaccatcatttggggtgatatggaaatctgttaatctgggaatctgctctgaggggttggggatagggactagcctgaaggtgctactcagggaatctctttctgggtgacatggggtctgtatttgggggttattatgggagtatctgttaataatggggcctcaatgatcgagggctggctaacaggggtctctactctggatgtgttactgggaatctctatctcagggtgactcagggctcctcgggtgtcaggagatgctagtggggactctgtctctttgtcaggtgtccagggcctctaagactgcatctccgccctcagcatccaggggaaccagcagcagaacagcaacctggaaatggagttctctgatgcaatgtcctttggggtccggactgtggtgaaggtgcgtttgggctgcgtcattgtcacttgatgcacttttttggctccaacgctgtccccgggggaatcagtggatccgccaatcctctgaatacgggatgctggtgcgaagaccccatgcctcggggggcaagtgaagtaccggacaccgaagacagagccatcatgcttgcctgtgggctggtccagctcaatgccataccagtaacctggggcaaagtctgtcttcccgtagaagcgcacgatcccctgcttctggcccgcgacaaggacctggtctccaacctcagccttggccccgtcacgctgctgcaagctgcccagagatggggatgatggggtcttcttcttgcctttgtgttccctgcggcctttgccggtgacacgggagaagtccatccggggggtccggggtgtggaggtgacagaggaggggggtgcgtccactgccttggagatcttggacacggaggcaaagagaccctgcttgggagggcagatgaagtaccgaacgcccccaacgctgccatcgttcttgccctcaggttcgtccagctccacgcccacccactggccgctggcaaactccgtggtcccacagaaccgcagtgtgcccgtcttctggccatccagcagcacgcggtctcccaggcgcaagcccagtgcgctaagcatgagattgcctgggacgttgtcatagttgggtagcgtgaccttggggagggcgcaagatagtggcactgcctcttccagaagcgtccgcagctccttggccaccagtgccgcctctgccttgtccagggacatgtccataggatctgggaccacctccgccggcacctgtccttttcgattcctcagcgcagggttggcgccgtgctccagcaaacatttggcggcgcccaggcacaggctggaagcagcgatgtgcagggctgagccgtggttgaagtcactgcacgtggagttcaccactcgcggcctcgcacccttcagcagcacacgcacgaggtcgggcacatcaaaataggccgcgtagtgaagcgcgttcatgttggtccagcggtgcagcgtcacatctcgcgcccagcgcacagcagctgactgccgagaggcgcacggctgccgcggggtccccgactccgtgggccccagctttgcacgcatagtggagcagtgtcatgtcggtcagcccgtcacgatcgttcacatggcagcctcggcgcagaatctcattgccgatgacgtctatcttgtgctggacttggggcacccactggcgcacaatggcaaacagctcggggatggtggtctgagggtcaaacaggatctcctggcacgccgggtcattgggatcgaagaaggtgaaagcgtagtccttagggaggggggcaggtgccgaggggtgcacaacaggcttctgccggcgctcctgggtggggctgggggcctcggggacgggttcatcctcctcctcctcttcttcctcctctcctcggggtggcggggccatcggggcaggatctgtcttagtcatggtcctcggtggccctcggggggcgggtgcagagttgggggcagccttcaggcaaatcctcgggcagacagcgctggggaccaaagtggagactggggagactgtgggagcaatggggtgtcggtgtcaggggacgtgatgggggaggcaagggagacagagagaaggggacgaggcccagacgccgacagggggtgggggcggagagggaggggcgcgactgcgcat

SEQ ID NO: 6167 - DNA, 3418 bp, Homo sapiens
  misc_feature (1815)..(1815): n is a, c, g, or t
  misc_feature (3303)..(3416): n is a, c, g, or t
attcagccagcaggctctgcttatgtaagcaaagtgcagggagccaggctccaccgacagccaggcactgggcagcacgcactggagacccaggaccctgtgcaggagcagctccgggtgacacgaggggactgaagatactcccacaggggctcagcaggagcaatgggtaaccaaatgagtgttccccaaagagttgaagaccaagagaatgaaccagaagcagagacttaccaggacaacgcgtctgctctgaacggggttccagtggtggtgtcgacccacacagttcagcacttagaggaagtcgacttgggaataagtgtcaagacggataatgtggccacttcttcccccgagacaacggagataagtgctgttgcggatgccaacggaaagaatcttgggaaagaggccaaacccgaggcaccagctgctaaatctcgttttttcttgatgctctctcggcctgtaccaggacgtaccggagaccaagccgcagattcatcccttggatcagtgaagcttgatgtcagctccaataaagctccagcgaacaaagacccaagtgagagctggacacttccggtggcagctggaccggggcaggacacagataaaaccccagggcacgccccggcccaagacaaggtcctctctgccgccagggatcccacgcttctcccacctgagacagggggagcaggaggagaagctccctccaagcccaaggactccagcttttttgacaaattcttcaagctggacaagggacaggaaaaggtgccaggtgacagccaacaggaagccaagagggcagagcatcaagacaaggtggatgaggttcctggcttatcagggcagtccgatgatgtccctgcagggaaggacatagttgacggcaaggaaaaagaaggacaagaacttggaactgcggattgctctgtccctggggacccagaaggactggagactgcaaaggacgattcccaggcagcagctatagcagagaataataattccatcatgagtttctttaaaactctggtttcacctaacaaagctgaaacaaaaaaggacccagaagacacgggtgctgaaaagtcacccaccacttcagctgaccttaagtcagacaaagccaactttacatcccaggagacccaaggggctggcaagaattccaaaggatgcaacccatcggggcacacacagtccgtgacaacccctgaacctgcgaaggaaggcaccaaggagaaatcaggacccacctctctgcctctgggcaaactgttttggaaaaagtcagttaaagaggactcagtccccacaggtgcggaggagaatgtggtgtgtgagtcaccagtagagattataaagtccaaggaagtagaatcagccttacaaacagtggacctcaacgaaggagatgctgcacctgaacccacagaagcgaaactcaaaagagaagaaagcaaaccaagaacctctctgatggcgtttctcagacaaatgtcagtgaaaggggatggagggatcacccactcagaagaaataaatgggaaagactccagctgccaaacatcagactccacagaaaagactatcacaccgccagagcctgaaccaacaggagcaccacagaagggtaaagagggctcctcgaaggacaagaagtcagcagccgagatgaacaagcagaagagcaacaagcaggaagccaaagaaccagcccagtgcacagagcaggccacggtggacacgaactcactgcagaatggggacaagctccaaaagagacctgagaagcggcanaggtcccttgggggcttctttaaaggcctgggaccaaagcggatgttggatgctcaagtgcaaacagacccagtatccatcggaccagttggcaaacccaagtaaacaaatcagcacggttcccaccaggttctcctgccaccaagatgtgttctccttactccatctcctccccaaacacgctccatgtatatattcttctgatggccagcaaatgaaattctgcctagaaattaagcccgagctgttgtatattgaggtgtattatttacgtctctggtccagtcttttctggcaaataacagtaaagatggtttagcaggtcacctagttgggtcagaagagtcgatgatcaccaagcaggaaagggagggaatagaggaatgtgttcgggttaagtgatgaaaatggcagtggtggccgggcgtggtggctctcgcctgtaatctcagcactttgggaggccgaggcaggtggatcacctgaggtcaggagttcaagactagcctggccaacatcatgaaaccccgtctctactaaaaatacaaaaattagccaggcatggtggcacacacctgtagtcccagctactcgggagcccaacgcacgagaaccgcttgtacccaggaggtggaggttgcagtgagccgaagttgcaccattgcactccaccctgggcgacagagcaagattctatcaaaaaaaaaaggcagtggcaagtaagttatagaagagaaatgctgctagaaggaattaagcgttgtagtaaacgcgtgctcatcctctaagcttgaagaagggagacgaaaatccatttgtttaaattcacatctcaaggagggagaacccgggctgtgttgggtggttgccaatttcctagaacggaatgtgtggggtatagaaaaaggaatgaataagcgttgtttttcaaatagggtccttgtaagttattgatgagagggaaaagattgactggggagggcttaaaatgatttgggaaaacaattgcttttgaggctcagtgacaacggcaaagattacaacttaaaaaaaaaataaaaataaaaaataaaggaagttgcacggttattttgcaacacaagggggcggcaaggtccccatttttatcctgtaatactgtatccctaacaaagatttggtctctgctatcttacattattaatgtttctcagatggctgaggggctcgcttcatctgttccgtctgacacttatctcaagtgtgtctgtcattcctaatgttctcaggatgtgctctgataaaaccctccccataacctcagttaataaaaatttacagaagacttctcaaatacctgagttgtttttaatacctgtacaaaggagtaaataggaccctgagtctattaaaatgtaattcaaagtagcatatgattgactgacagtcatgtaaactgtatctttctttttctgatttaataaaaaatacatttacttctaaaaaaannnnnnnnnnnnnnnnnnnnnnnnnnnnnnnnnnnnnnnnnnnnnnnnnnnnnnnnnnnnnnnnnnnnnnnnnnnnnnnnnnnnnnnnnnnnnnnnnnnnnnnnnnnnnnnnnntc

SEQ ID NO: 6168 - DNA, 1679 bp, Homo sapiens
  misc_feature (48)..(48): n is a, c, g, or t
  misc_feature (596)..(613): n is a, c, g, or t
gaccagagttcagtttggcggttatgtgtggggaagaagctggaagtncaggggctgtttctgtggacagctttccctgtcctttggaaggcacagagctctcagctgcagggaactaacagagctctgagggcgttatatgtggtcttctctcatttccagcagagcaggctcatatgaatcaaccaactgggtgaaaagataagttgcaatctgagatttaagacttgatcagataccatctggtggaggttacccagcattgtgagtgacagagcctggatctgaacgctgatcccataatgcatcctcaagtggtcatcttaagcctcatcctacatctggcagattctgtagctggttctgtaaaggttggtggagaggcaggtccatctgtcacactaccctgccactacagtggagctgtcacatcaatgtgctggaatagaggctcatgttctctattcacatgccaaaatggcattgtctggaccaatggaacccacgtcacctatcggaaggacacacgctataagctattgggggacctttcaagaagggatgtctctttgaccatagaaaatacagctgtgtcnnnnnnnnnnnnnnnnnnttgccgtgttgagcaccgtgggtggttcaatgacatgaaaatcaccgtatcattggagattgtgccacccaaggtcacgactactccaattgtcacaactgttccaaccgtcacgactgttcgaacgagcaccactgttccaacgacaacgactgttccaacgacaactgttccaacaacaatgagcattccaacgacaacgactgttccgacgacaatgactgtttcaacgacaacgagcgttccaacgacaacgagcattccaacaacaacaagtgttccagtgacaacaacggtctctacctttgttcctccaatgcctttgcccaggcagaaccatgaaccagtagccacttcaccatcttcacctcagccagcagaaacccaccctacgacactgcagggagcaataaggagagaacccaccagctcaccattgtactcttacacaacagatgggaatgacaccgtgacagagtcttcagatggcctttggaataacaatcaaactcaactgttcctagaacatagtctactgacggccaataccactaaaggaatctatgctggagtctgtatttctgtcttggtgcttcttgctcttttgggtgtcatcattgccaaaaatgtttcagttcaacaactaagtgtttcatttagcagccttcaaattaaagctttgcaaaatgcagttgaaaaggaagtccaagcagaagacaatatctacattgagaatagtctttatgccacggactaagacccagtggtgctctttgagagtttacgcccatgactgcagaagactgaacaggtatcagcacatcagatgtcttttagactccaagacaatttttctgtttcagtttcatctggcattccaacatgtcagtgatactgggtagagtaactctcccactccaaactgtgtatagtcaacctcatcattaatgtagtcctaatttgttttgctaaaactggctcaatccttctgatcattgcagagttttctctcaaacatgaacactttagaattgtatgttctctttagaccccataaatcctgtat

SEQ ID NO: 6169 - DNA, 658 bp, Homo sapiens
  misc_feature (539)..(553): n is a, c, g, or t
gtctctctgtctctcctgccaccatgtgaagaaggtgcttgtttcccctttgccttccgccatgagtgtaagtttcctgaggtctcccagtcatactgctggttaagcctgcagaacggtgtacttgtttgaaatgtatctggcccaatcgctgagcgtccgcgctgcatttctccaaactgcccagcagggggcggtgctacctcggctccgcgcagccacggcttcccgctggcgaaccaagggcgcggaatctggagagggcgaggaacatctttcctcccacctgtcccccgccaggtctgccagacccgtctcatccgtgctgctgcttctgaaaatcagaagagtgaggatgaaataaagtcttcataaaggaaaaccaaaaaaaaaaaaacaaaaaaaaaaaaaaatttttgtggggggcttttgggcctttagaaaaagtttttagaacaatcggtttgggcgacggcggcccaagaagtttagggaacaccggggcacataagtggtccaagagaacaaccgggcgagtnnnnnnnnnnnnnnnccacccgaattaaaaccgcgcggagcaaacggagggtcgtgacaaaccaaagggttcggagcacaaccgggcttacagggggctcaaggagccaaataatgccgg

SEQ ID NO: 6170 - DNA, 751 bp, Homo sapiens
ttttttttttttttttttttttcaagtggatgccatttgctctttattattattgttttcttgtaaagaaggagacaaaatgtaacagccaaattcaacaattataaaaagaaagagagagagagagaaatcagaagcaagtttgtctgttgcccccaggctccaatgaaatgctgacatatactgaatgtacagatttcccagctgacaagggtcaacacatgaatacaagcacagtttaaagtggtatcaaaattaatccatttcacagtaattatttctataagctcagttgcacatatcagggtttccactgtcacaaattcacaatgtcagagcaaaataacagatgtgttcaggcctgggaaattggtatcgatgaggggagatggattgagaggcaaaagcagctgggggatttgtcccaatcctgaagatctgtgttaatgctcgggctgggggtgggtgaagggcaggcactgttcagcagtcagatatcagtacagtgaaacaactgttgaggcattgagcttgagagggtgtgctatttgggtatgtttgtcagataaattcttgctagagagagactcgctgcccacagtctgaaaggaaaagctcccacgtttgaatatttggaggcgaatgatggagcggccagtctgacagcgaagcatctgctttacagaatatttagaaagatacatcatgtgtattagtttaaattgcagtctagttcacaaactatgttatt

SEQ ID NO: 6171 - DNA, 1291 bp, Homo sapiens
  misc_feature (4)..(42): n is a, c, g, or t
  misc_feature (964)..(1287): n is a, c, g, or t
accnnnnnnnnnnnnnnnnnnnnnnnnnnnnnnnnnnnnnnncaaggagttttccagggcacatgtcataaaattagagccagctgcagagctgtaagggaacttttagagatgaacttcttcagcctccatattttacagaaggaaactgaatcccagaaggagaaattgccgttctcaaggctccctggatgggtaataacacagatatgagtaggtcacataaagtatatctttttttctggcatgtggtctgtaaacacagcatgattcatattttttatgtttcatgctactcattttgtttaattaccaacaaacatggggactttggctttttgacttatttgcaacaagcatgaaattgttaaatttaccttttatcaattgtaatcatcctatgccaacatattatcataaattcatagaaatatttttaaaaataaataacagacattgaaatccaattcttagataatactcccagaacagccaatggtaaatgccctatacttgagtcttacttagatgctgtggtaatgcaccattttagaagatgaatgatactgctatttctcttcagggaaacaataatggataaagaaatgtaactgccgggcagcaaagcttctaagtgaaacctgtagtagcagtagtagtagggagaaaatgtgtagtcatcaagtgaaaataggaaaggatctatgatttatgatgtcttaatagaccctaaattgttctttaattacaagagtggcagtctctgaagtcatttgtgagcttgtatgacttttgtatttagcaatgttgcatgctcacataattgaaaattaaaagtaacacatttttctgaaatgtaaaaaaaaaaaaaaaaaaaattttgggggggctgggtaaaaagttttttaaacaattgttgggggggggccctgttttgaaatggcaagggtcaagaaacggggannnnnnnnnnnnnnnnnnnnnnnnnnnnnnnnnnnnnnnnnnnnnnnnnnnnnnnnnnnnnnnnnnnnnnnnnnnnnnnnnnnnnnnnnnnnnnnnnnnnnnnnnnnnnnnnnnnnnnnnnnnnnnnnnnnnnnnnnnnnnnnnnnnnnnnnnnnnnnnnnnnnnnnnnnnnnnnnnnnnnnnnnnnnnnnnnnnnnnnnnnnnnnnnnnnnnnnnnnnnnnnnnnnnnnnnnnnnnnnnnnnnnnnnnnnnnnnnnnnnnnnnnnnnnnnnnnnnnnnnnnnnnnnnnnnnnnnnnnnnnnnnnnnnnnnnnnnnnnnnnnnntggg

SEQ ID NO: 6172 - DNA, 2279 bp, Homo sapiens
  misc_feature (348)..(371): n is a, c, g, or t
  misc_feature (1854)..(1873): n is a, c, g, or t
gggggagattcacagaggcaaggcagagaacaagacctgtgcttctttactccaaactcttagcagtgtggacactgattaactgcagctggggtctgatttgcccagcctgtctttgatattgatcaatgaactccttctcaaggaatgctttcctctaactgcggtgaaggtggtggctctggtggtcctctccaacatgggtgtctgggttttgactgcctaagagaaggtattacaagtggataaataatgtgcactgctctgagcccaaaggtacgcagtgggcctggcctctctgatatgcatcagtatagccaatggctagccagcagacatgaagctaannnnnnnnnnnnnnnnnnnnnnnnctggccttgtggttaaccaatctattagggaaggagattacagcagaaacttttatggagaagttggacaatggtgccttgctctgtcaacttgcagaaactatgcaggagaaattcaaggagagcatggatgctaacaagcccacaaagaatctaccgttgaagaagatcccatgcaaaaccagtgcaccctcgggctccttttttgccagagacaatacagcaaatttcttatcctggtgccgagatttaggggtggatgaaacgtgtctatttgaatcggaaggtttgggatttggaggccagtgactatgcttcatctatttctctgagaaagaatctactcaacaagaaaaggtcctccacaagcaacccagagaagtgtgtctctgtctgctagagcttggccggattgcagccaggtatggtgtggagcctcctggtttgataaagctggaaaaagagattgaacaagaagaaacactttctgccccttctccttcaccttctccttcatcaaagtcttctggaaaaaagagtacaggaaacttactggatgatgcagtgaaacgaatttctgaagatcctccttgcaaatgcccaaacaagttctgtgtggagcggctctcccaaggaagataccgagtgggagaaaagatcctcttcattaggatgctgcacaacaaacatgtcatggtccgtgtgggaggaggctgggaaacttttgcagggtatttgttgaaacacgacccctgccgaatgctgcagatctcccgtgtggatggcaaaacatcccctatccaaagcaaatctccaactctaaaggacatgaatccagataactacttggtggtctctgccagttataaggctaagaaggaaattaagtgaaacaaattggtcatgacaaggggaccctcataatggcctgtatccacttctccagtatagtcagtttagttcatatgttctgaaaactgttttggagaaagatagacagaaaaatgtcatcatattgaaaaatgtttcaaagagtagcactatttatttttaatgcttctgtagaatatgacctattaaaagaaaatctaaactcaaatttaaattatccaaattttaggcaaattattatttctcaatatgcgaacacagtatttagaacacaatattagaaacacaattctaactaaagataaataaggagaaaacatttaggatttgcagataagtcaacagaaagtgcctgctttacactcatgagtaaaagcactccagacatttttataattgcaagatttttatgcttttttttttttttttttttttacaaaatgatgattagtgtgataatgtgctgcaaaaaatatccaacagcactacacataagtacagagtattcacaatagtaatatgttactggaaaggccacttccgaaaagtttacattcacttggaaggctgccttaaagtatatctcttatcnnnnnnnnnnnnnnnnnnnnacttttagaagttttcagtacacccccttagagaatagcttatgagttatttcacacattcctgagcacatggctgtgtttagaatgatctagtgtaattcatacatgagctgacatacgttgatactttgacgagtaaattgtacagtcaaatgttcattgatttcatgttatttcaaagcattttcttattaaaaatatatctttagttaatcctattttgctatgctttctagtaaagtaaattcactgtagctaatgatgttacagacttacgtatacccttgtatacctgggacagggctgttttataccaataaacagcaaaatattgtccttactcattcaagaattaaaaggataaattttaaaaatgttaaaaaaaaaaaaaaaaaaaaaaaaaaaa

SEQ ID NO: 6173 - DNA, 2861 bp, Homo sapiens
ttactccaatgaacttcttccccactcattggaaaaacagaaatgatatgacatgagaaagacagcaaaatataatattagcgtggcaaagagccaggaaaattaaaagacatataaagggaagagatggcgaaaagaccctctagaaatatctaaaaattcagatgtgtggacacagaaatgaccttagccaagacttgttgttcacgccaccctcaagccctgagctatctaagggcaggctgagaagcacgtgttgaagaataccaatgtttataaggtggcagttcaaaaactctcccatccaaaattggacaaaggaacaaaaaaatctgccatgtgacaaatttaaagtttccaaattccagggttctttgatctctgacacaaccagattatcaaaattaaacctctactacttaacaatgataaagggtatttcattctcataagtgtagctagtagtatatcttttccatcatggctttttctctgtttatcttttctctctttctttatttccctgtagctttcaagcagaaattcttttcattttgttttggctctgtaattaaacactcaaagtgtatcagtagctaaaacattacttcaatacccacatttattctggctagaaaatcattccattttataccatgagcatccagttatttaattaagaaaatttcccttaagatttatactagatatggaaaaggagtaaagccaatgtaaggagcaaaacaaaatgtctgctgctgttgttgatttcaattatgcaataataacatgcaattccaggatcaggccagctcagcactgtattaaagatttaattggaatagttatgattcaccatgggaatacaatcttgtaaaaaatatgttttctgaaaattaagcaatccttatgggctctattcatcagacatgttatgccatctttcttcatcaaaggtataaatatatacatatgcatatatatatacacattcccactacatttctttagcttcccttctttatccatcttagtttcactactttctatatatgtgaatgcaatatcttgattacaatgagcaaaaatataattattttctcctactaaattacatcctcactcacagagcataagctacattttattaagacacacatgttcaatggtccttccctacctacccagaggccttgaaacagctctaacatttacattccaatgtaagatgtttcttttactcctccttagacggtatgctgttattaagaagtattttaaagtagaagtaaaggtaaattaaaccaaattttctatttttatatttcgttgttgacttgtttctaaaattcctataattttttgctgcatattatcctcatccccaaaataacatccattttaaagtgtatagttgaggggaaggatgctgtttttggtataagttgtcaaatatggaacatttgacctggagagggctaaaatcaatatttaatcctcagagcttcacctgtcaaaactatttaagtctgcagaaaatcaagattgaaatgaaaactaccaaccagctgaacatccaaaacgtcaaattccttaacatgatgtaaaaaatgtaagctaaaaggaattagtccattttgatagcagcaatagagagccctgtgtattcgtattcgactttcatggaaaggttcttctgtggcaagaccacctgtggaactagtacctaaacacacagatttgttttttttgggagcttcacaatttgggatctcaaatacaaaacctaataggctgaaacacagggtctatgaaggctaagaacccacattaattcaaaaagttgacacagctaaacatcttacaagcatgaggtgagaactgcagaaaccaaagctgtgctaacatctcacctctactgctttgatgtgatctagatgcacagttagcttcagtgtggcccgttatctaatagaaccatctttcaaggcttttcattagaaatgacaaaaagccagttgctctggctgtgtggcttcagaggcacatttccagttaatcagtacaaccaaagtcaaccaaatagttgactggtatttaatttattttaatttacttttattatagatctaggggggtacacacgtaggtttgatagatggatatattgagtaatgctggggtttaggcttctagtgaacccatcacccaaacagcaaacatagtacctagttcaaagactattatcttacttaggtagacgacacacgtttaaaatatatacctttaaattaaaaaaaaaaaaggatagtgataacaaagctgaaaattaaagacattttagcctataacttaaatactgatcatatcatgtttgttgaatagagctcatgtctggctggctgaaatttattcttacttttaagtattctgaactatgtttcattttttcctttctatgtcactgttatcagatgcatgaaaaacattttaaaagcctttttctttcattttttcttttaattgagaaagaatccagcaatgcaatttaagatattatgaattgcatgacattaatcatatttgtcttctgttgcaatgcagccagtattttcaagaagtacaaaagaaggtaaagcgctttagcggtacaattaaaaattacagatttctagatataattcctcactttgtgagtatatatttcactagatcaaattcaagtcactagacttcagagttcaacacctggacatgagaagatattatattatgtaccataaatatttcctgtatctgactgcctgaacatattaccacatcctgtaccttagtatcctacagagacaaaaaaaaaaaaa

SEQ ID NO: 6174 - DNA, 2640 bp, Homo sapiens
ataaaagaaactttcagtcagaataagtctgtaattttttttttttttttttaattgtaaatggttctttgtcagtttagtaaaccagtgaaatgttgaaatgttttgacatgtactggtcaaacttcagaccttaaaatattgctgtatagctatgctataggttttttcctttgttttggtatatgtaaccatacctatattattaaaatagatggatatagaagccagcataattgaaaacacatctgcagatctcttttgcaaactattaaatcaaaacattaactactttatgtgtaatgtgtaaatttttaccatattttttatattctgtaataatgtcaactatgatttagattgacttaaatttgggctctttttaatgatcactcacaaatgtatgtttcttttagctggccagtacttttgagtaaagcccctatagtttgacttgcactacaaatgcattttttttttaataacatttgccctacttgtgctttgtgattctttcattattatgacataagctacctgggtccacttgtctttttttttgtttgtttcacagaaaagatgggttcgagttcagtggtcttcatcttccaagcatcattactaaccaagtcagacgttaacaaatttttatgttaggaaaaggaggaatgttatagatacatagaaaattgaagtaaaatgttttcattttagcaaggatttagggttctaactaaaactcagaatctttattgagttaagaaaagtttctctaccttggtttaatcaatatttttgtaaaatcctattgttattacaaagaggacacttcataggaaacatctttttctttagtcaggtttttaatattcagggggaaattgaaagatatatattttagtcgatttttcaaaaggggaaaaaagtccaggtcagcataagtcattttgtgtatttcactgaagttataaggtttttataaatgttctttgaaggggaaaaggcacaagccaatttttcctatgatcaaaaaattctttctttcctctgagtgagagttatctatatctgaggctaaagtttaccttgctttaataaataatttgccacatcattgcagaagaggtatcctcatgctggggttaatagaatatgtcagtttatcacttgtcgcttatttagctttaaaataaaaattaataggcaaagcaatggaatatttgcagtttcacctaaagagcagcataaggaggcgggaatccaaagtgaagttgtttgatatggtctacttcttttttggaatttcctgaccattaattaaagaattggatttgcaagtttgaaaactggaaaagcaagagatgggatgccataatagtaaacagcccttgtgttggatgtaacccaatcccagatttgagtgtgtgttgattatttttttgtcttccacttttctattatgtgtaaatcacttttattttctgcagacattttcctctcagataggatgacattttgttttgtattattttgtctttcctcatgaatgcactgataatattttaaatgctctattttaagatctcttgaatctgttttttttttttaatttgggggttctgtaaggtctttatttcccataagtaaatattgccatgggaggggggtggaggtgggaaggaaggggtgaagtgctagtatgcaagtgggcagcaattatttttgtgttaatcagcagtacaatttgatcgttggcatggttaaaaaatggaatataagattagctgttttgtattttgatgaccaattacgctgtattttaacacgatgtatgtctgtttttgtggtgctctagtggtaaataaattatttcgatgataaaaggatgtctttttcctatcagtaccatcatcgagtctagaaaacacctgtgatgcaataagactatctcaagctggaaaagtcataccacctttccgattgccctctgtgctttctcccttaaggacagtcacttcagaagtcatgctttaaagcacaagagtcaggccatatccatcaaggatagaagaaatccctgtgccgtctttttattcccttatttattgctatttggtaattgtttgagatttagtttccatccagcttgactgccgaccagaaaaaatgcagagagatgtttgcaccatgctttggctttctggttctatgttctgccaacgccagggccaaaagaactggtctagacagtatcccctgtagccccataacttggatagttgctgagccagccagatataacaagagccacgtgctttctggggttggttgtttgggatcagctacttgcctgtcagtttcactggtaccactgcaccactacaacaaaataatcaaccttattttcctccaatttttttggtttgttatctaaaagaacagactcctcaaacgagttgccaatctctttataactacgggtttcgttcacaaaggttaatcactatcagatgtcatcgactcttgtcatatcactactctcataatacttctgatgaaacaaacaactacatcacaattaatcaagtaactgatcaaatagtataattattacgtctactgactagatcagacgagaga

SEQ ID NO: 6175 - DNA, 2498 bp, Homo sapiens
cgacgagatgggaactttctgaattaagcagcaattcccgcgctggttttctggggagtcctcgcctccagagctagttatgtatcaaatcccatttgcaagggttgtttgtcttgttcaaaggacaatgggtgtagccgatgtcaacagaagttgttcttcttccttcgaagagaagggatgcgccagtatggagagtgcctgcattcctgcccatccgggtactatggacaccgagccccagatatgaacagatgtgcaagatgcagaatagaaaactgtgattcttgctttagcaaagacttttgtaccaagtgcaaagtaggcttttatttgcatagaggccgttgctttgatgaatgtccagatggttttgcaccattagaagaaaccatggaatgtgtggaaggatgtgaagttggtcattggagcgaatggggaacttgtagcagaaataatcgcacatgtggatttaaatggggtctggaaaccagaacacggcaaattgttaaaaagccagtgaaagacacaataccgtgtccaaccattgctgaatccaggagatgcaagatgacaatgaggcattgtccaggagggaagagaacaccaaaggcgaaggagaagaggaacaagaaaaagaaaaggaagctgatagaaagggcccaggagcaacacagcgtcttcctagctacagacagagctaaccaataaaacaagagatccggtagatttttaggggtttttgtttttgcaaatgtgcacaaagctactctccactcctgcacactggtgtgcagcctttgtgctgctctgcccagtatctgttcccagtaacatggtgaaaggaagcaccaccagcatggcccctgtgttatttatgctttgatttgaatctggagactgtgaaggcaggagtaagtgcacagcccgtgacttggctcagtgtgtgctgagagaatccgtccccggcaccatggacatgctagaggtgtgaggctgcagaacaccgctggaggacggacttgtgcctatttatgtgaaagaagatgcttggcaggcaatgcgctactcactcgtgacctttatttctcacattgtgcattttcaaggatatgtttgtgtggatatctgcttagtgttaccacatggtattctcagcatgttaccttcacactgttgtgcgatgaaactgcttttagctgaggatatgctctggaaattcctgctcagtttcactgcagccctaatatgtacatatactgcaggagctacatataaagctcttatttactgtatatttatgctttcttgtgggtaacaagtcatacctgattaatatgatgccactttgtttctagtggttcctaacccattgtctgataaatgacttttctagtttggggaattgacacttgttttgttgcctcttgaaactttttttttcccctcattgtgggcttatttctcattgtaagggtaggataaactagtttttgtatatagagtcaaatgaccagtgtcaaagagtttgcatattgggtagaccttctccactccacatgtcccacacatatagataaagcagcaggcggcatctggcaatcagaagcccaaactgcctttgagtctaagatgtgatgactttgatgaaacacaactgaaaacatgagggactatatccagtcacttgtagccagtttcacaggccagctacagaattgtccaaacaaacattatttctgactgcaatttttttcccccaaatttaaagcaatccctggctttaaatgacaaggcacctaccaatgttcttgggtcactgaagaagctactaccatgagcctgtgcatagaattttaggagataaaaggatgaatttctgtgactgccagtcagatcttaacaggtttctgttgagccagaatctgtttcagatccaagatggagaggaacactatggaaacttcccaggtgactttcagagcagttgtttcaaacacatcattgtccttttaggggaaccagtttttagaaggttgtgaattggctttttcacaaagcatgattatcttcctggctgatccaggagaaaattagaacagaaaaataatggttgtggattttgaaacaaagcaaggtaaagcctttttttttcaccttgcattggcaaaactacctcttcagtgtttttaacttttgattcaaaagcatcttaccaataaggataaatatcatatacatcgttatgaaaatattgctatgagataataagccacatatgaatgttgtatacaactttagggtttacatttaatcctgaagtgttacctcctttcatgtctatttacactattttcccatttactaagtggggagggggtctccttatatagtgcttcatcgttaataagtcaatacctgttgttcctgggatgttcttttttgtgcattaaaaacttcaaaattaaaaaaaaaaaaaaaaaaaaaaaaaaaaaaaa

SEQ ID NO: 6176 - DNA, 700 bp, Homo sapiens
gctagagttggatgtttaaggccacagagtattagagcagtggtcctggagacttgagcacacatttgaatctcctgccttggccacccaaagtgctgggaattacaagtgtgagccaccgtgcccggcctcataatttctagtaagaagatgctagtgatatgataggcattgccctcaacgacatgataaaaaattatatttcatgttttaccatagccctttatgcataacccatccacagcactcatcagatgttatcataattattggtttactatgtaattctcttgttagactcagaatttcttgaaaatgatgaacaggatttgtatggcttcagcccatagtacatatttcagttaatatatttttgaattgaaacactgttttatcctgccttattcaaaaggggaaaatttaatttattaacaccttacctgagtaccttgcctactctttacctctgaaataaaaagagggatgaatcaaaagtccctgtccttgaggaaggtatgatttactgggaataaacatgtattaatagttatattgtactctagctggataattgctacatgatagaagtgtgaacattcttttgtgaaatgacttatagattgcttaaactacactctcattacagccagcttcaccttttagaatttggggtttggatctttaagaaaagagaggcggg

SEQ ID NO: 6177 - DNA, 2316 bp, Homo sapiens
  misc_feature (1929)..(1943): n is a, c, g, or t
ttttttttttttttttttttttttttttttttttttttttttttttttttttgctgtttaaagaagagatttattttattatttaacttttaaagtctctaatatgccttctaagaagggttctggctcagaaaattgcagaagaaaatcgagtagagaactagaattacagaaacctaagaaatacttttactgagctttcttcacacaagaaaatgcacggaaatgaattatacatggataccaatttgtgatttttaaaaatttgtaattttttaaattaagataaaaattagtttatttttttgaatacttttttgttttgttttacctcaccctttactaagctgttagcttggtctgttgcgcttactgctatatcctcagcatctagtacagttcctgacacatatatgcacttaataagtatttgtcaaatgaatattattgagtaaataagatgaaggtcaattcagaaattcagcactatcaggctatatacataatacagactattataaaaaactagaatggagcagttccttttaacgacggagaaatgtcagtaacatactttgagcacaatatagctaatttcacaactggtctttaaatataacatacctataatcaatttaatgtttttctttgttaccagagttgttcaaaacgtgcgttttacctatcaaagctcaactaaatgaggtttaagaaatctgcacatttgaatgtacttaattttaaaagattctggttttggattaactctggatttcaccctatgggaaattttgtaaatatttccaacttaaaaaaaaactgtgaagccccagcgctaagagtaaacgatgcattggaatttcaacagatttctgtaactctgaaataatctttagcatttcttcttccccccatcccctcagtgtaggagcattccagtccaagtttctgggagatcgctatcgaatcttatgacactggggtgagaagttttgccgggttgaaatgagggggtcactttaataatctggaattccggagactttatgtcaagtcttaaaaattcgagcctgtggaaggctgcgctgtcaagagaccggagttgcgagcgtctgggtgacgtcggtcctcctggaaggtgggatccgggtggcaggtccctgggcggcgactccggccgggctcatagcgtcgcgcccgccccgctcatcggccctacccagcgtccctcccagaccgacgaccgcctgggaagcctcgagctcccagcccgctgcacagcccggctccgctccacagtcccccactgccaccggccggggcgacaccgggcgagctggcgagacccggctccaggaccgaatcgcgccgacacttgacggcgctccccgcccctccctgccgccgtctccgcccccgtccggtcgcattccggcgcccgccgccgccgccgccaccgccgccgatctgggaggcttgtccctcgccgcccaccgtagccccggcgctcggccggtcgccgtttccaagatggccgcggcgcgcacggctcctgcggcggggtagaggcggaggcggagtcgagtcactcccgcacttcggggctccggtgccccgcgccaggctgcagcttactgcccgccgcggccatgcggggctccgtgcacggatgagagaagccgctgccgcgctggtccctcctcccgcctttgccgtcacgcctgccgccgccatggaggagccgccgccaccgccgccgccgccaccaccgccaccggaacccgagaccgagtcagaacccgagtgctgcttggcggcgaggtgagtgtggcggccgcagtcggtcgctcgcagaaagcggggcgggtcctggcccgaactcggtcgggcccgagggcctctgcttcccgccaggtggggagggaagcnnnnnnnnnnnnnnngctggggcgggaggggcgcggtgcatccctgggtcccaggggaccgcgtctgagtctgtccggcgactcctcccggggttgcagctccgcagggttccgctcgagcgtgttgccggctccccttcccttgtagactcccccagctcaccctcaacgttgcgggggctgggagcagagtgcggctgcctcccctgccgctagcttcggaagagtggcctcactgaagtgcctctcatcattactgaccgaaagtggtccctcccctctgccctcattcgagtaaaagagacattcggaaatcgaggcgtactggctatttcccgcgctctcctcctcctctccttttgcccgctccagagaatgcctgtcatct

SEQ ID NO: 6178 - DNA, 493 bp, Homo sapiens
taaattcgcggccgcgtcgactttttttttttagtcagggtctcactctgttgctcaggctggagtgcatggcagattatagcttactgcagcctcaactcctgggttcaagcgatcttcccatttcagcctcccaaagtgctgggccaaaaaaattttttaacaatatcatcttatctggtttaggaggtttacattttctttatctggtgatcttctagtcaaaggacaacccagtcaaatctaacatctcaatatcttgaattcacttccatctcctttataaagacagatcatttattcatggtaactgtggctgacgcagaaatatccaaagtaattataccactcctttacctacttactcttttaaacaacatagtactgtattctagaaagtgatacgacaatatagtaaatctacatgaatcatctcccaattttacttcaaactatttctggttcctttattaccaaacgaagcccattctac

SEQ ID NO: 6179 - DNA, 3386 bp, Homo sapiens
  misc_feature (7)..(7): n is a, c, g, or t
  misc_feature (9)..(9): n is a, c, g, or t
  misc_feature (11)..(11): n is a, c, g, or t
ccaattngncnttgacagtgttgtggtacataaaagcacaagcgtctgtaactctgggcaatggggcacatcgagagtttgctgagaagactgtgaagcaaaaagaagaaagtttttcctactcttccttatgtgtccaacacgaagtttgctgttcagttttcacagaacttctagaagttgaagttacaaaggtatatagaaggtacacagaatcagaaaagattataaaagaaagcaagatttttgttagtgacgtcctgtttcctctgaagagtaatagttggaatcaaaagagtcaacgcaatgaactgttatttactgctgcgttttatgttgggaattcctctcctatggccttgtcttggagcaacagaaaactctcaaacaaagaaagtcaagcagccagtgcgatctcatttgagagtgaagcgtggctgggtgtggaaccaattttttgtaccagaggaaatgaatacgactagtcatcacatcggccagctaagatctgatttagacaatggaaacaattctttccagtacaagcttttgggagctggagctggaagtacttttatcattgatgaaagaacaggtgacatatatgccatacagaagcttgatagagaggagcgatccctctacatcttaagagcccaggtaatagacatcgctactggaagggctgtggaacctgagtctgagtttgtcatcaaagtttcggatatcaatgacaatgaaccaaaattcctagatgaaccttatgaggccattgtaccagagatgtctccagaaggaacattagttatccaggtgacagcaagtgatgctgacgatccctcaagtggtaataatgctcgtctcctctacagcttacttcaaggccagccatatttttctgttgaaccaacaacaggagtcataagaatatcttctaaaatggatagagaactgcaagatgagtattgggtaatcattcaagccaaggacatgattggtcagccaggagcgttgtctggaacaacaagtgtattaattaaactttcagatgttaatgacaataagcctatatttaaagaaagtttataccgcttgactgtctctgaatctgcacccactgggacttctataggaacaatcatggcatatgataatgacataggagagaatgcagaaatggattacagcattgaagaggatgattcgcaaacatttgacattattactaatcatgaaactcaagaaggaatagttatattaaaaaagaaagtggattttgagcaccagaaccactacggtattagagcaaaagttaaaaaccatcatgttcctgagcagctcatgaagtaccacactgaggcttccaccactttcattaagatccaggtggaagatgttgatgagcctcctcttttcctccttccatattatgtatttgaagtttttgaagaaaccccacagggatcatttgtaggcgtggtgtctgccacagacccagacaataggaaatctcctatcaggtattctattactaggagcaaagtgttcaatatcaatgataatggtacaatcactacaagtaactcactggatcgtgaaatcagtgcttggtacaacctaagtattacagccacagaaaaatacaatatagaacagatctcttcgatcccactgtatgtgcaagttcttaacatcaatgatcatgctcctgagttctctcaatactatgagacttatgtttgtgaaaatgcaggctctggtcaggtaattcagactatcagtgcagtggatagagatgaatccatagaagagcaccatttttactttaatctatctgtagaagacactaacaattcaagttttacaatcatagataatcaagataacacagctgtcattttgactaatagaactggttttaaccttcaagaagaacctgtcttctacatctccatcttaattgccgacaatggaatcccgtcacttacaagtacaaacacacttaccatccatgtctgtgactgtggtgacagtgggagcacacagacctgccagtaccaggagcttgtgctttccatgggattcaagacagaagtcatcattgctattctcatttgcattatgatcatatttgggtttatttttttgactttgggtttaaaacaacggagaaaacagattctatttcctgagaaaagtgaagatttcagagagaatatattccaatatgatgatgaagggggtggagaagaagatacagaggcctttgatatagcagagctgaggagtagtaccataatgcgggaacgcaagactcggaaaaccacaagcgctgagatcaggagcctatacaggcagtctttgcaagttggccccgacagtgccatattcaggaaattcattctggaaaagctcgaagaagctaatactgatccgtgtgcccctccttttgattccctccagacctacgcttttgagggaacagggtcattagctggatccctgagctccttagaatcagcagtctctgatcaggatgaaagctatgattaccttaatgagttgggacctcgctttaaaagattagcatgcatgtttggttctgcagtgcagtcaaataattagggctttttaccatcaaaatttttaaaagtgctaatgtgtattcgaacccaatggtagtcttaaagagttttgtgccctggctctatggcggggaaagccctagtctatggagttttctgatttccctggagtaaatactccatggttattttaagctacctacatgctgtcattgaacagagatgtggggagaaatgtaaacaatcagctcacaggcatcaatacaaccagatttgaagtaaaataatttaggaagatattaaaagtagatgagaggacacaagatgtagtcgatccttatgcgattatatcattatttacttaggaaagagtaaaaataccaaacgagaaaatttaaaggagcaaaaatttgcaagtcaaatagaaatgtacaaatcgagataacatttacatttctatcatattgacatgaaaattgaaaatgtatagtcagagaaattttcatgaattattccatgaagtattgtttcctttatttaaaaaaaaaaaaaaaaaaaaagaatgctaggtaatcttcgtagaaaactagaaagtatgataaacaacagttggaggaatccatggaaaatagacgagaaaatgtaaataaggctttctggggatcacagaacttttgtatgaataaaagccttataaaaccagctctggcatatgactaaaatattcctctactatttttcaatgtcatctaatgcaaacgctcaacctttttaaaatggttaattgtgagaaaggcactg

SEQ ID NO: 6180 - DNA, 2206 bp, Homo sapiens
ggaaaaaaagtaagagttcctcagatcagagctcagtagctgtgtcaatttgaagttcaatcagtgtagttgtcctggggtgatcgctgactctgctctgtttcatatttcagttgcttgctccaaggagagaatttctgagaacaatgggtgttagcaactttaagttactccccaaacgtttgctggccacattctcatttctaaacatctggatctgggtaaaggtttgaatagatgtagggaacaaaattggtttttccatggtgtagtctaattttgccaaatcacccaagaaagaaagtatatgacgtgtggagtttgcatttcttggatgggacctatcgggtcacccagcccagtcttacagtcataaattcctacctcttagttcctgccaaagggccttcagcctctgtgtgcacacttattgaatgaatgctttgcctaaagtttggccttttgaagaaaaacagcatgtgataatataaaaatatgagagtttaaaaaaaaaaaagatctctgcctctcttctctctgcctcgtcccaccttgctgtctgtctcattgtctttctctcccctcaccatgcgctgaattcagatttctctttcttttattataggcatgttgttttgaatgtggactttgtgggagggagaggattgttctgagaacagaaactggaagatacgtctgagttgatgggaccaacagggctttgctcctctgtgaggccaaagccattgatacttgtcgggggtgatgagggctttagcatctcaaggcagacatatgaagtatttactgctaaactatattacttactagtacaaatctgttggaattcaggggcagtctaagatttggtgagtgaaatgccatctggcaaaatcgagaagagagtgtggcctgagaggggaatgttcagcctcactgtcacattaagggtacctcaaaatacatggtccttccagtgtgttccttttccttcctccatttcactttgtcccctcttcttcctttctctcccattttcctggctttttagcactcagcttttttttataagtatgtatttactttttattatatatttggtcctttgggactttgtgatgattaagaatttattccattcaggattttaaaatgatgtgtttaatattttgttctcttaaactcttttgaagctatgctgctaaccaggtataggccagaaaggaggtggcccagtcagtaccttgctcacgtcagctaagggggacagtgatgtcatgtgggtgactcttcttcatttgaccaaggccagcctcctgttcttacctctgcccattcatttctggctatgggaaaactaccacctgttgagtgagccaatgaggccaggaagatcagaggggctgggttccggcccatgggccactatttgaatttctctgtagtaagctctttgtagggctggctccaactgcagtagccaaagaaaacctgtctgactcgacattttaatgcctgagagttggtgaaagttcagctgaagctaatgtctagacatcagcagtaactaggcatccagaaagtagcttcaaccaaagctaatagagcccaagtttccgcaggaagtttggtgctgagctgtccagagcagttgtttatctgagtgttgctagcccttagccatgctttcttagctttattctcgcctgttcctaggcatagcctgacacagagcctatggctcactgctcgctttattctactccctagtcatgcggaacaacatagtctaaaaaggaagatgtggactggggagttaggagacctgatttctattccctatgcttctactaactagcctcgagatcttaaccgctctgtgcctcagtgttcccatctgcaaaatggggatagtgttaattgccctacctacctcacagggttgttgtgaggataaactgagacaatgaattcaaagcaagttgacaagtaagtgctatgcaaattgtaagaaatggaaacaatcatgttaaaagcaatggaatggacattggcagaagggttaatggattgtccagccctttctctgtgtggcttaaacccaggtcgccattgctttatacattttcacttagcacagatttgtaattatgcatgtaataaagcacagccttatccacaacaaaaaaaaaaaaaaaaaaaaaaa

SEQ ID NO: 6181 - DNA, 976 bp, Homo sapiens
ttttttttttttttttttaaaattacatagtacagagttctagccttccttttctcttgctcccaggagaaaataaaaatagtttctaccatcttctttctcattcaaattaagagtgactgcagacctgcatgaatgttccaagggacttgcaaaaccacctctataactgctacttctatatttgtgaaactctggcgtttgtcaaaaaccgttttaagcaccagtagtcagctaagggggctgagtggatccctgtgttgaagctgcagagggcagccgtccattctagcacttggagctttgctttccaaccacccaatctaaccccaacatactcaagatatttttaaagccctgtgaaggggaaaacactgaaaaacaatttgccaatttgtaagtttttgtgtcttaaaaaaataataataagtgcataaagctgacacagtactgtttcacaattacgcagttgaccagatttttttttttttttttttagagttgaggttgagtctcgctctattgcccagctagtaattttcccagaggtaatgaaatacaaaagaataaagttggagctaaagtcttcttgaagattccctacaaggaagaattgccagactccaaggattttcgcttactcgaagaaagtcataaatgactagcctggccagcaaacacacagatgtaagttttactacaatattattgttttacaagaatgaatatatacattaaattctctttctgttgaattctcttgtatggttttaggctcaaaaaagtctagttcccttactaacaggagcatgacacggctgcctctttcaacagaccctgctccccactcccaaaggtggatgaatggtcagaagggtgtggagtccaacaagggctggtgtcaagatccctgcccccactgctcaccggcctgctgcccacaaccactctcagcaaccaaagtgcacaggagcca

SEQ ID NO: 6182 - DNA, 767 bp, Homo sapiens
  misc_feature (538)..(538): n is a, c, g, or t
  misc_feature (553)..(751): n is a, c, g, or t
  misc_feature (765)..(765): n is a, c, g, or t
ttttttttttttttttttacggatgggtccagtggcttagaagaaaactcagaagtaacaaaaggtgttaaatttataaagagcagtagctttacagttaatctatcagataatcaaagcttaatttgctctgccccagcagagaagaaatgtgcaaataaccccaaccaagacattccctttcaattctgtctcagcccactaaaaccacccaacactagatttccaaaaatccactctgggaccgtcagattccaaagatgtcacatgttccccccaacccccacactcaatgtcccaactctgccagatacatgtctgttgggagggctcaaccagcaacagagagaaaaagatatttgctagaaagaggagaccagacccactggcgttaagaaggggacctgggaggataagattggagaggcgtgcagatatgcttgcactgggtgaaattgaggccagatgtgtgaagttccagaagcctcaccaagagggcagtcctgggagagtggagattgtaggaagagaagagatntttgaagatctcctnnnnnnnnnnnnnnnnnnnnnnnnnnnnnnnnnnnnnnnnnnnnnnnnnnnnnnnnnnnnnnnnnnnnnnnnnnnnnnnnnnnnnnnnnnnnnnnnnnnnnnnnnnnnnnnnnnnnnnnnnnnnnnnnnnnnnnnnnnnnnnnnnnnnnnnnnnnnnnnnnnnnnnnnnnnnnnnnnnnnnnnnnnnnnnnnnnnnnnntgcagtccataggnca

SEQ ID NO: 6183 - DNA, 2961 bp, Homo sapiens
  misc_feature (410)..(429): n is a, c, g, or t
  misc_feature (710)..(724): n is a, c, g, or t
ggtggacctggcgggcagcgagcggcagtccaagaccggggccacgggcgagcggctcaaggaggccaccaagatcaacctgtcgctctcggcactgggcaatgtcatctcggcgctggtggacgggcgctgtaagcacgtcccctaccgtgactcgaagctgacgcggctgctgcaggactcactgggcggcaacaccaagacgctcatggtggcctgcctgtcgcctgcggacaacaactacgatgagacactcagcacgctgcgctacgccaaccgggccaagaacatcaggaacaagccgcgcatcaatgaggaccccaaggatgcgctgcttcgcgagtaccaggaggagatcaagaagctcaaggccatcctgacacagcagatgagccccagcagcctgtcannnnnnnnnnnnnnnnnnnngcccccagaccctgtgcaggtggaggagaagctgttgccccaacctgtgatccagcatgacatggaggccgagaagcagctgatccgggaggagtatgaagagcgcctggcccggctgaaagccgactataaggccgagcaggagtctcgggccaggctggaggaagacatcactgccatgcgcaactcatatgacgtcaggctgtccacgctggaggagaacctgcggaaggagacagaggctgtcctgcaggtgggagtcctctacaaggctgaggtcnnnnnnnnnnnnnnntttgccagcagcgctgagtacccgcctgcttttcagtatgagacagtggtgaaacccaaggtcttctccacgactgacactctgcccagtgacgatgtctccaagactcaggtttcctccaggtttgcggagctgcccaaggtggaaccctccaaatctgagatttctctgggctccagtgagtcatcctcgctcgaagaaacctctgtgtccgaggctttccctgggcctgaggagccctccaacgtggaggtctccatgcccactgaggagtccaggagcagatacttcctggatgagtgcctcgggcaggaggccgctgggcacctgctgggggaacagaactacctcccgcaagaggagccgcaggaggtgcccctgcaggggttactaggcctgcaggacccgtttgccgaggtggaagccaagctggccagactctcctccaccgtggccaggacagatgcaccccaggcagacgtccccaaggtccctgtgcaggtccctgcgccgacagacctgctggagcccagtgatgccaggcccgaagccgaggcggctgatgacttcccgcccaggcctgaggtagatctggcctcggaagtggccttagaggtggtgcggacagcagagcctggcgtgtggttggaggctcaggccccggtggccctggtggctcagcctgagcccctgccggccacagctggtgtgaagagggagagcgtgggcatggaggtggcagtgctgactgatgacccgctgcccgttgtggaccagcagcaggtgctggcccgtctgcagctgttggagcagcaggttgtgggtggagagcaggccaagaacaaggacctgaaggagaagcacaagcggcgcaagcgctacgcagacgagcgcaggaagcagctggtggctgccctgcagaactcggatgaggacagcggggactgggtgctgcttaacgtctacgactccatccaggaggaagtgcgggccaagagcaagctgctggagaagatgcagaggaagcttcgggcagcagaggtggagatcaaagatctgcagtccgagtttcagctggagaagatcgattacttggccaccatccgccggcaggagcgtgactccatgctcttgcagcagctcctggagcaggtgcagcccctgattcgcagggactgtaactacagcaacctggagaagattctgcgtgagtcctgctgggacgaagataacggcttctggaagatcccacatcccgtcatcacaaaaaccagcctcccagtagcagtttcaactgggccacagaacaaaccagcccgcaaaacctctgcagcagacaatggcgagccgaacatggaggaggaccgctacaggctcatgctcagtcggagcaacagtgaaaacattgccagcaactacttccgatctaagtgggccagccagatcctcagcacagacgccaggaagagcctcacacatcacaactcgccaccaggcctcagctgcccactcagcaacaactctgccatcccacccacccaggcccctgaaatgccccagccccggcccttccgcctcgagtccctcgacatccctttcaccaaggccaagcgtaagaaaagcaaaagcaactttggcagtgagcctctgtgagcacagctgcttgccattgcctgccttataggcatgtagagactgccaggccctcccagggcagccccaaccaggtctcctcccacctgccacacagcgctccggggcctgagggctccctcagccctgggaagacacattcccttccctgttccccagagagcccacctctgccctgggcaggagcccctcggaggctgtatagtcctccttagagaggcctgctccagctgttcataccacatcagtgtttccgtctgctcacctgccacagagcccacacccatgcccaccagtgttggtctttgcctcaaagcctgagacctgcttcacggccttcaccagccctgatggagagggcagcagctgccacgtggaggaagctcaatatcagctgggaaggaactgtgcctctgtctgactggccccacttcctaagcactgccctgccccatggggtggcacaggggtcccacagcaggtcttcctgcactgcccacccctggctggtctgtggcccaaggaaggccactccacattaagctgcccaataaactgcttttaagataaaaaaaaaaaaaaaa

SEQ ID NO: 6184 - DNA, 2377 bp, Homo sapiens
ccatggaaactcttcagatagactgtcttctattcgtgtctatgaacgaatgccagtggaatccttaaacacattacttaaacagctagaagaagaaaagaggactcttgaaagtcaagtgaaatactatgcacttaaactggaacaagaatcaaaggcttaccagaagatcaacaatgaacgccgtacatacctagctgaaatgtctcagggttctggtttacatcaaggtgcgcagcggccatggcttcctcaattatctgccaggagcactgccagatctcgggccaggcaaaaatagacatcttattagttggagatgtcactgtgggctacctggctgatactgtacagaaactatttgcaaacatagcagaagtcaccatcaccatcagtgacacgaaggaggcagcagcgcttttggatgattgcatattcaacatggttctcttgaaggtgccttcttcactaagtgccgaggagctggaagccatcaagttaattagatttggcaaaaagaaaaatacacattcactgtttgtttttataatccctgaaaattttaaaggttgtatttcagggcatggaatggatattgctttaactgaaccactgacaatggaaaaaatgagtaatgtggtaaaatactggacaacatgtccctcaaacactgttaagactgaaaacgcaactgggcctgaagaacttggattgcccctgcagaggtcctacagcgaacacctgggatattttcctactgatctatttgcctgctctgaatctttaaggaatggcaatgggcttgaattaaatgcttcgttgtcagagttcgagaaaaacaaaaagatctctcttcttcattcaagcaaggaaaacctaagaagggaaagaatcaaatattgctgtgagcagctgcgtactctcttgccgtatgtaaaagggagaaagaatgatgcggcttcagttcttgaggcaacagttgattatgtgaaatatatccgggagaaaatctctccagccgttatggcccagattacagaagcacttcagagcaacatgaggttttgtaagaaacaacaaacacccattgagctgtctctcccaggcactgtcatggcacagcgggaaaacagtgtgatgagcacttactcccctgagagagggctccaattcctggctaatacgtgctggaatgggtgctccactcctgatgcagagagctccttggatgaagctgtgagagttccatcaagctccgcctcagagaatgctattggtgatccatataaaactcacatttccagtgcagcgctgtctctgaattccttgcatactgtcagatattattctaaagtcaccccttcctacgatgcaactgctgtaacaaatcagaacatttcaattcatttaccttcagccatgcccccggtctcaaagcttctccctcggtactgcacttctgggttgggccagacgtgcactacacatcccaactgtctgcaacagttttgggcgtattaaaagcacatgtttgaaattcacactctcaaccacctactgggcgcagtttgacaatctaggaaaagtggaacaaagaatgattttgaaagctccacccaaagacctaatatcaaaagagttggcatggtttggcttctgataaatgcactcaaagcttctgcagatagaaagaccagcagcgaaaaagctggccacacactgtcactcatcttcatacacacttggatccccgccagccagagagctacaagaacaaatggcctcagtgacctacactctcttttctcaaaaaatattccacaatttatgaaaaaagcatgctataaggaagatccatgtagacacgataaaatgattagattgggaaggtgtgttgataccttgtgtcactgagtacagatattacaacttgattcttatttttagtatccctgtgaattactgtcactcatttctaggtggtcttttccttatttgacattttagagagtttccttcttcattcaccatccaaactaagatatgcagagagatgctgaaagaggggtttacctcctcacttgacaactaatgaataaattgatgtgtgcttttgcatttcacaatcccttgagtgaaacgatggctaataggtaaatatttctttctggaccttaagttacagactagcaggttttttgtttttcatctcttcctccctatgggtattagaaaggacagttgaaaataagggggaaaaaggtttgttttatatttcactgaattgttcttatatgtaagttttattattaaataaaatactcagttttcaccctgaaaaaaaaaaaaaaaaaaaaaaaaaaaaaaaaaaaaaaaa

SEQ ID NO: 6185 - DNA, 5964 bp, Homo sapiens
ttttttttttttttttgcttaaaaaaaagccatgacggctctcccacaattcatcttccctgcgccatctttgtattatttctaatttattttggatgtcaaaaggcactgatgaagatattttctctggagtctccttctttctaacccggctctcccgatgtgaaccgagccgtcgtccgcccgccgccgccgccgccgccgccgccgcccgccccgcagcccaccatgtctcgccgcaagcaaggcaaaccccagcacttaagcaaacgggaattctcgcccgagcctcttgaagccattcttacagatgatgaaccagaccacggcccgttgggagctccagaaggggatcatgacctcctcacctgtgggcagtgccagatgaacttcccattgggggacattcttatttttatcgagcacaaacggaaacaatgcaatggcagcctctgcttagaaaaagctgtggataagccaccttccccttcaccaatcgagatgaaaaaagcatccaatcccgtggaggttggcatccaggtcacgccagaggatgacgattgtttatcaacgtcatctagaagaatttgccccaaacaggaacacatagcagataaacttctgcactggaggggcctctcctcccctcgttctgcacatggagctctaatccccacgcctgggatgagtgcagaatatgccccgcagggtatttgtaaagatgagcccagcagctacacatgtacaacttgcaaacagccattcaccagtgcatggtttctcttgcaacacgcacagaacactcatggattaagaatctacttagaaagcgaacacggaagtcccctgaccccgcgggttggtatcccttcaggactaggtgcagaatgtccttcccagccacctctccatgggattcatattgcagacaataacccctttaacctgctaagaataccaggatcagtatcgagagaggcttccggcctggcagaagggcgctttccacccactccccccctgtttagtccaccaccgagacatcacttggacccccaccgcatagagcgcctgggggcggaagagatggccctggccacccatcacccgagtgcctttgacagggtgctgcggttgaatccaatggctatggagcctcccgccatggatttctctaggagacttagagagctggcagggaacacgtctagcccaccgctgtccccaggccggcccagccctatgcaaaggttactgcaaccattccagccaggtagcaagccgcccttcctggcgacgccccccctccctcctctgcaatccgcccctcctccctcccagcccccggtcaagtccaagtcatgcgagttctgcggcaagacgttcaaatttcagagcaacctggtggtgcaccggcgcagccacacgggcgagaagccctacaagtgcaacctgtgcgaccacgcgtgcacccaggccagcaagctgaagcgccacatgaagacgcacatgcacaaatcgtcccccatgacggtcaagtccgacgacggtctctccaccgccagctccccggaacccggcaccagcgacttggtgggcagcgccagcagcgcgctcaagtccgtggtggccaagttcaagagcgagaacgaccccaacctgatcccggagaacggggacgaggaggaagaggaggacgacgaggaagaggaagaagaggaggaagaggaggaggaggagctgacggagagcgagagggtggactacggcttcgggctgagcctggaggcggcgcgccaccacgagaacagctcgcggggcgcggtcgtgggcgtgggcgacgagagccgcgccctgcccgacgtcatgcagggcatggtgctcagctccatgcagcacttcagcgaggccttccaccaggtcctgggcgagaagcataagcgcggccacctggccgaggccgagggccacagggacacttgcgacgaagactcggtggccggcgagtcggaccgcatagacgatggcactgttaatggccgcggctgctccccgggcgagtcggcctcggggggcctgtccaaaaagctgctgctgggcagccccagctcgctgagccccttctctaagcgcatcaagctcgagaaggagttcgacctgcccccggccgcgatgcccaacacggagaacgtgtactcgcagtggctcgccggctacgcggcctccaggcagctcaaagatcccttccttagcttcggagactccagacaatcgccttttgcctcctcgtcggagcactcctcggagaacgggagcttgcgcttctccacaccgcccggggagctggacggagggatctcggggcgcagcggcacgggaagtggagggagcacgccccatattagtggtccgggcccgggcaggcccagctcaaaagagggcagacgcagcgacacttgtgagtactgtgggaaagtcttcaagaactgtagcaatctcactgtccacaggagaagccacacgggcgaaaggccttataaatgcgagctgtgcaactatgcctgtgcccagagtagcaagctcaccaggcacatgaaaacgcatggccaggtggggaaggacgtttacaaatgtgaaatttgtaagatgccttttagcgtgtacagtaccctggagaaacacatgaaaaaatggcacagtgatcgagtgttgaataatgatataaaaactgaatagaggtatattaatacccctccctcactcccacctgacaccccctttttcaccactccccttccccatcgccctccagccccactccctgtaggatttttttctagtcccatgtgatttaaacaaacaaacaaacaaacagaagtaacgaagctaagaatatgagagtgcttgtcaccagcacacctgttttttttctttttctttttcttttttctttttccttttttttttttttcctttatgttctcaccgtttgaatgcatgatctgtatggggcaatactattgcattttacgcaaactttgagcctttctcttgtgcaataatttacatgttgtgtatgtttttttttaaacttagacagcatgtatggtatgttatggctattttaaattgtccctaattcgttgctgagcaaacatgttgctgtttccagttccgttctgagagaaaaagagagagagagagaaaaagaccatgctgcatacattctgtaatacatatcatgtacagttttattttataacgtgaggaggaaaaacagtctttggattaaccctctatagacagaatagatagcactgaaaaaaaatctctatgagctaaatgtctgtctctaaagggttaaatgtatcaattggaaaggaagaaaaaaggccttgaattgacaaattaacagaaaaacagaacaagtttattctatcatttggttttaaaatatgagtgccttggatctattaaaaccacatcgatggttctttctacttgttataaacttgtagcttaattcagcattgggtgaggtaataaaccttaggaactagcatataattctatattgtatttctcacaacaatggctacctaaaaagatgacccattatgtcctagttaatcatcatttttcctttagtttaattttataaacaaaactgattataccagtataaaagctactttgctcctggtgagagcttaaaagaaatgggctgttttgcccaaagttttattttttttaaacaatgattaaattgaatgtgtaatgtgcaaaagccctggaacgcaattaaatacactagtaaggagttcattttatgaagatatttgctttaataatgtctttttaaaaatactggcaccaaaagaaatagatccagatctacttggttgtcaagtggacaatcaaatgataaactttaagaccttgtataccatattgaaaggaagaggctgacaataaggtttgacagaggggaacagaagaaaataatatgatttattagcacaacgtggtactatttgccatttaaaactagaacaggtatataagctaatattgatacaatgatgattaactatgaattcttaagacttgcatttaaatgtgacattcttaaaaaaagaagagaaagaattttaagagtagcagtatatatgtctgtgctccctaaaagttgtacttcatttcttttccatacactgtgtgctatttgtgttaacatggaagaggattcattgtttttatttttatttttttaattttttcttttttattaagctagcatctgccccagttggtgttcaaatagcacttgactctgcctgtgatatctgtatcttttctctaatcagagatacagaggttgagtataaaataaacctgctcagataggacaattaagtgcactgtacaattttcccagtttacaggtctatacttaagggaaaagttgcaagaatgctgaaaaaaaattgaacacaatctcattgaggagcattttttaaaaactaaaaaaaaaaaaactttgccagccatttacttgactattgagcttacttacttggacgcaacattgcaagcgctgtgaatggaaacagaatacacttaacatagaaatgaatgattgctttcgcttctacagtgcaaggatttttttgtacaaaacttttttaaatataaatgttaagaaaaattttttttaaaaaacacttcattatgtttaggggggaactgcattttagggttccattgtcttggtggtgttacaagacttgttatccatttaaaaatggtagtggaaattctatgccttggatacacaccgctcttcaggttgtaaaaaaaaaaaacatacattggggaaaggtttaagattatatagtacttaaatataggaaaatgcacactcatgttgattcctatgctaaaatacatttatggtcttttttctgtatttctagaatggtatttgaattaaatgttcatctagtgttaggcactatagtatttatattgaagcttgtatttttaactgttgcttgttctcttaaaaggtatcaatgtaccttttttggtagtggaaaaaaaaaagacaggctgccacagtatatttttttaatttggcaggataatatagtgcaaattatttgtatgcttcaaaaaaaaaaaaaagagagaaacaaaaaagtgtgacattacagatgagaagccatataatggcggtttgggggagcctgctagaatgtcacatggatggctgtcataggggttgtacatatccttttttgttcctttttcctgctgccatactgtatgcagtactgcaagctaataacgttggtttgttatgtagtgtgctttttgtccctttccttctatcaccctacattccagcatcttaccttcatatgcagtaaaagaaagaaagaaaaaaaaaggaaaaaaaaaaaaaaaccaatgttttgcagtttttttcattgccaaaaactaaatggtgctttatatttagattggaaagaatttcatatgcaaagcatattaaagagaaagcccgctttagtcaatacttttttgtaaatggcaatgcagaatattttgttattggccttttctattcctgtaatgaaagctgtttgtcgtaacttgaaattttatcttttactatgggagtcactatttattattgcttatgtgccctgttcaaaacagaggcacttaatttgatcttttatttttctttgtttttatttttttttttatttagatgaccaaaggtcattacaacctggctttttattgtatttgtttctggtctttgttaagttctattggaaaaaccactgtctgtgtttttttggcagttgtctgcattaacctgttcatacacccattttgtccctttattgaaaaaataaaaaaaattaaaagtacaaaaaaaaaaaaaaaaag

SEQ ID NO: 6186 - DNA, 1873 bp, Homo sapiens
atctcctaccccacgagaaaggaacacagtaaactgaattgatccgtttagaagtttacaatgaagtttcttctaatactgctcctgcaggccactgcttctggagctcttcccctgaacagctctacaagcctggaaaaaaataatgtgctatttggtgagagatacttagaaaaattttatggccttgagataaacaaacttccagtgacaaaaatgaaatatagtggaaacttaatgaaggaaaaaatccaagaaatgcagcacttcttgggtctgaaagtgaccgggcaactggacacatctaccctggagatgatgcacgcacctcgatgtggagtccccgatctccatcatttcagggaaatgccaggggggcccgtatggaggaaacattatatcacctacagaatcaataattacacacctgacatgaaccgtgaggatgttgactacgcaatccggaaagctttccaagtatggagtaatgttacccccttgaaattcagcaagattaacacaggcatggctgacattttggtggtttttgcccgtggagctcatggagacttccatgcttttgatggcaaaggtggaatcctagcccatgcttttggacctggatctggcattggaggggatgcacatttcgatgaggacgaattctggactacacattcaggaggcacaaacttgttcctcactgctgttcacgagattggccattccttaggtcttggccattctagtgatccaaaggctgtaatgttccccacctacaaatatgtcgacatcaacacatttcgcctctctgctgatgacatacgtggcattcagtccctgtatggagacccaaaagagaaccaacgcttgccaaatcctgacaattcagaaccagctctctgtgaccccaatttgagttttgatgctgtcactaccgtgggaaataagatctttttcttcaaagacaggttcttctggctgaaggtttctgagagaccaaagaccagtgttaatttaatttcttccttatggccaaccttgccatctggcattgaagctgcttatgaaattgaagccagaaatcaagtttttctttttaaagatgacaaatactggttaattagcaatttaagaccagagccaaattatcccaagagcatacattcttttggttttcctaactttgtgaaaaaaattgatgcagctgtttttaacccacgtttttataggacctacttctttgtagataaccagtattggaggtatgatgaaaggagacagatgatggaccctggttatcccaaactgattaccaagaacttccaaggaatcgggcctaaaattgatgcagtcttctactctaaaaacaaatactactatttcttccaaggatctaaccaatttgaatatgacttcctactccaacgtatcaccaaaacactgaaaagcaatagctggtttggttgttagaaatggtgtaattaatggtttttgttagttcacttcagcttaataagtatttattgcatatttgctatgtcctcagtgtaccactacttagagatatgtatcataaaaataaaatctgtaaaccataggtaatgattatataaaatacataatatttttcaattttgaaaactctaattgtccattcttgcttgactctactattaagtttgaaaatagttaccttcaaaggccaagagaattctatttgaagcatgctctgtaagttgcttcctaacatccttggactgagaaattatacttacttctggcataactaaaattaagtatatatattttggctcaaataaaattgaaaaaaaaaacaaaaaaaaaaaagactagcggggagctttgcgcc

SEQ ID NO: 6187 - DNA, 1486 bp, Homo sapiens
  misc_feature (60)..(60): n is a, c, g, or t
  misc_feature (870)..(870): n is a, c, g, or t
  misc_feature (1204)..(1221): n is a, c, g, or t
ccacaaacagtgatagcttcactggtttatcccttatcaagaaaaaacaactctacagcntaccttaaaattcaccaataattcaaaactctttccaaatacgtcagatccccaaaaagttctgcgattagacaatgcaccggaaccttatgatgtgagttttgggaattctagctactacaatccaactttgaatgattcagccatgccagaaagtgaagaaaatgcacgtgaagggccatcccctagggatgaccataccctccccactcgtaccttctgtatagaacctaaccagcaaaaaggccgttaaaccagcaagtgtcatcctacatccctagcccttttgaccaaattcatcctttcaaaaggttacacaaaattactgtcacgtggattttgtcaaggagaatcataaaagcaggagacccagtagcagaaatgtagacaggatgtatcatccaaaggttttctttcttacaatttttggccatcctgaggcatttactaagtagccttaatttgtattttagtagtattttcttagtagaaaatatttgtggaatcagataaaactaaaagatttcaccattacagccctgcctcataactaaataataaaaattattccaccaaaaaattctaaaacaatgaagatgactctttactgctctgcctgaagccctagtaccataattcaagattgcattttcttaaatgaaaattgaaagggtgctttttaaagaaaatttgacttaaagctaaaaagaggacatagcccagagtttctgttattgggaaattgaggcaatagaaatgacagacctgtattctagtacgttataattttctagatcagcacacacatgntcagcccactgagttatgaagctgacaatgactgcattcaacggggccatggcaggaaagctgaccctacccaggaaagtaatagcttctttaaaagtcttcaaaggttttgggaattttaacttgtcttaatatatcttaggcttcaattatttgggtgccttaaaaactcaatgagaatcatggtaaaaaaaaaaaggttacccaagggaatatacctgtacataatttgtacacgttttaacgttgttcagcataggaacgggattccttatgtatcagactttatggctcaatcataatggaatagattctgcatccctaaatgtatgannnnnnnnnnnnnnnnnnatgaatggcactctcaaacagactttttcactgagccatcaggtctcactaaatgcgatgactataggaaggattcactcggatccctaggcatgtgtcagctgtgttttaattaccaccctcctttgaagaacaaaatatgtaccttgatgtcgccaagcaggttcaaagattaagggtgcatccgagtaattcctagacagaggaaattaaaaggcccaactagtacagcaaagttaatcgatgaacaggggggaccacaagg

SEQ ID NO: 6188 - DNA, 7625 bp, Homo sapiens
  misc_feature (556)..(570): n is a, c, g, or t
  misc_feature (5867)..(5896): n is a, c, g, or t
agcggggcggggcccaaaggacagcggcccagacaggggctggcggcccggccggccccggctcaccgactcgggcagcatccacctgccccagccaacacccttctctcgccccaggtcctttctcagcctccagctgggctgtccccaagctgagctgaggctcttctcctccgatccccacctctgcccggacatccaccatggggacagccaccaggaggaagccacacctgctgctggtagctgctgtggcccttgtctcctcttcagcttggagttcagccctgggatcccaaaccaccttcgggcctgtctttgaagaccagcccctcagtgtgctattcccagaggagtccacggaggagcaggtgttgctggcatgccgcgcccgggccagccctccagccacctatcggtggaagatgaatggtaccgagatgaagctggagccaggttcccgtcaccagctggtggggggcaacctggtcatcatgaaccccaccaaggcacaggatgccggggtctaccagtgcctggcctccaacccagtggnnnnnnnnnnnnnnngggaggccatcctccgcttcggctttctgcaggaattctccaaggaggagcgagacccagtgaaagctcatgaaggctggggggtgatgttgccctgtaacccacctgcccactacccaggcttgtcctaccgctggctcctcaacgagttccccaacttcatcccgacggacgggcgtcacttcgtgtcccagaccacagggaacctgtacattgcccgaaccaatgcctcagacctgggcaactactcctgtttggccaccagccacatggacttctccaccaagagcgtcttcagcaagtttgctcagctcaacctggctgctgaagatacccggctctttgcacccagcatcaaggcccggttcccagcagagacctatgcactggtggggcagcaggtcaccctggagtgcttcgcctttgggaaccctgtcccccggatcaagtggcgcaaagtggacggctccctgtccccgcagtggaccacagctgagcccaccctgcagatccccagcgtcagctttgaggatgagggcacctacgagtgtgaggcggagaactccaagggccgagacaccgtgcagggccgcatcatcgtgcaggctcagcctgagtggctaaaagtgatctcggacacagaggctgacattggctccaacctgcgttggggctgtgcagccgccggcaagccccggcctacagtgcgctggctgcggaacggggagcctctggcctcccagaaccgggtggaggtgttggctggggacctgcggttctccaagctgagcctggaagactcgggcatgtaccagtgtgtggcagagaataagcacggtaccatctacgccagcgccgagctagccgtgcaagcactcgcccctgacttcaggctgaatcccgtgaggcgtctgatccccgcggcccgcgggggagagatccttatcccctgccagccccgggcagctccaaaggccgtggtgctctggagcaaaggcacggagattttggtcaacagcagcagagtgactgtaactccagatggcaccttgatcataagaaacatcagccggtcagatgaaggcaaatacacctgctttgctgagaacttcatgggcaaagccaacagcactggaatcctatctgtgcgagatgcaaccaaaatcactctagccccctcaagtgccgacatcaacttgggtgacaacctgaccctacagtgccatgcctcccacgaccccaccatggacctcaccttcacctggaccctggacgacttccccatcgactttgataagcctggagggcactaccggagaactaatgtgaaggagaccattggggatctgaccatcctgaacgcccagctgcgccatggggggaagtacacgtgcatggcccagacggtggtggacagcgcgtccaaggaggccacagtcctggtccgaggtccgccaggtcccccaggaggtgtggtggtgagggacattggcgacaccaccatccagctcagctggagccgtggcttcgacaaccacagccccatcgctaagtacaccctgcaagctcgcactccacctgcagggaagtggaagcaggttcggaccaatcctgcaaacatcgagggcaatgccgagactgcacaggtgctgggcctcaccccctggatggactatgagttccgggtcatagccagcaacattctgggcactggggagcctagtgggccctccagcaaaatccggaccagggaagcagccccctcggtggcaccctcaggactcagcggaggaggtggagcccccggagagctcatcgtcaactggacgcccatgtcacgggagtaccagaacggagacggcttcggctacctgctgtccttccgcaggcagggcagcactcactggcagaccgcccgggtgcctggcgccgatgcccagtactttgtctacagcaacgagagcgtccggccctacacgccctttgaggtcaagatccgcagctacaaccgccgcggggatgggcccgagagcctcactgcactcgtgtactcagctgaggaagagcccagggtggcccctaccaaggtgtgggccaaaggggtctcatcctcagagatgaacgtgacctgggaacccgtgcagcaggacatgaatggtatcctcctggggtatgagatccgctactggaaagctggggacaaagaagcagctgcggaccgagtgaggacagcagggctggacaccagtgcccgagtcagtggcctgcatcccaacaccaagtaccatgtgaccgtgagggcctacaaccgggctggcactgggcctgccagcccttctgccaacgccacgaccatgaagccccctccgcggcgacctcctggcaacatctcctggactttctcaagctctagtcttagcattaagtgggaccctgtggtccctttccgaaatgagtctgcagtcaccggctataagatgctgtaccagaatgacttacacctgactcccacgctccacctcaccggcaagaactggatagaaatcccagtgcctgaagacattggccatgccctggtacaaattcggaccacagggcccggaggggatgggatccctgcagaagtccacatcgtgaggaatggaggcacaagcatgatggtggagaacatggcagtccgcccagcaccacaccctggcaccgtcatttcccactccgtggcgatgctgatcctcataggctccctggagctctgatcctggaacccctccctctgcgccgcagctggacgccacctccgacggacacagccagccccttcctgctgccaaggtggcctgacactgtgccagagagtggctggttttaaatacctactttaaacagtgccctttttgtaggaggtaggatattttatattctgccgcaggatagaacccacgcaaggattttctttaaattgagaggcaccaggcagtaacttccatgatgacactgacgcctatacctgagctctaggctgcctggagggaaggaacaggcccatgggaagaagggggttttaaaaacatgtcttcaactcagcagagatggccctctgggaccctatacgcactccgccacttgagagcagtcctaggcccggcaggaacaccagacatgaacaggttgaagaactggagcgaagtgcacacctcaccatccttcagtctaaggaagaagggcaagccctgggaccaagagctctcccgccttctccctcgagcagcagcaaggaccctgacgctgtccccgataactccctaggggctcctgcctgcccaagcggctgagaaccagcgccccgatgcctgaggctgggagcctgagccccttcagctttgaggggggtgatactccaggctgtttggggtgggagccaaaaagagttgagaggccagggcccttggtggaaaggggcaccagccttggtctgagatagtcacaacccaggtgacgatgccctctcagccaacactgccaacctgaccctgtcatcccgattgacagcgccacttcaggtggctgggtgactaaagggcttgtcttggtggggtctcccacccctccaagacccattctgcacagtccctccagggtttgggcaggagatggccaatcatgcgcccacctctccagtgctgcctgcagtcagctcggcctccccgacctgcagccccagactctgctctcccagcactgactcactcctgcctgggaggggaatgcagcattcatgctggtgtgtcctggtattgggaggtttctgggaagggcagaggataaatgtggccctgcctgctcccaggtatacctaggaccacctggccagatccgctcccagacggccttggactgcttgcatttccccggagaaaaaggggttaataaatgggccatcctttcctgaaaaaaaaaaccccccccccccaaaaaaaaaaaaaaaaaaaaaaaaaaaaaaagctcaacttcttcaagcccctcactttacagatgaggaaatggaggtggtccagagagggtctgggattcccaaggtcacacagcccagaagagatggggctgggttaagaactcgagtcttccacatttctgttcaaggctgtttgtctacccagaggaaggaggcactgctgaatggctatggcctggctaagaaggtgattagtcagtagggtatgaaaattctacttcaaggggttcggattggtgatcatggggattggcatggctgggttccagtccaaggtgtgggcagagcttctaccaaacttcaacatggagggctgacttgaagctccctgtccccctcactcttgccccaagaaaagaggccaaagcaagagcagattccctaggcaagagcagcagcacaactaggaaaccccaaagcccatgctccgacaggtggcccttcacagggggcagcgggacaggcatcttgaagggcatatgtcctcggaagctccgagcctgttttctgtagtttatagttagagctctattttgttatggttttttaaacttttaagtcctgctctattttcctgggcaggtttatgttgatgtttacccactacaattttttaaaaatataagctcacatgccttttccctgccacagccaaacccccactgcaccctacccacccacccctagcccaggtcagctttcctggagctggctaatcaaagcctcctcacctcttcccaacccttacaagcaagggtgctaggggctcagctatacgaccattctccctgacagggagtccaaacttggcctagcatccctcctggcccccctctggccacgacttggcctgtgcctggttctctatccgaaaaggggatgctggaaaacctccttccaagttttatccaattcgttcctcattgcctcgggctgcatcaggggaagcaggggacaggtgtccagttgctgggccgagggaggagctggtttggcataggacctaaccagtgaagctagaggctacagccactaaacttgcttcaggccaacgatagttactcacaagtaagtaccttaatgctaatgaggtccactaaaaaggggaggaaggcagacctcctgggagacccacgaagggtttttagccagggaaaactgagccccaggaaaacctaaccactgggcaggcagaatttgtttgagggatagaacgacaacaaaataaatgttcctgcagcctgagatttcaggtagagtactgactaaggtttaataagacaannnnnnnnnnnnnnnnnnnnnnnnnnnnnnaatgcaacagcctcctgctagagtgacttgtacatgagcttgcttgcagaagactagattagatgtttctcaggatcccctcctgcgcaggggttctctgattttcgtgttctctgcccagatgggctgggggagttgagagtgtgcttattttcactgcgatcatgagaccacagttctgggttatctcctctcatacatcaagccccagaggaggcggcaagaggaacagccacaaacaagtactttaccccacagcttagtggccagtaaacaccctggggactaggaaaaggaaccaactgtaggcacctctccagggcctagggagacaagtgtcctctcttctgcatacatttgggctccccttacagagccctttgccctggctctctggtccttgttgctctaacagtccagatgtacacccagcctcagggggaaggcagctctctccagacagagtctcagggcccagcaaggtcaggttatctgctttcattcagggcaacaaatgatacaaatggtgccagggagtggcaaggccatgggggtaggtgggggtgtctttttcttttcataaagtaacaacagacgagactgaggttaaacatcagaaaaaaacctctggaatgaccttcctcattccaggaggccctggaataaggaagaggcttctttctgagggagctttgaggaattttgacagctgttgacatgggatttgggaaaggtgaagctgttactggatgggcaggagatggtccaagtgtccatccagagatgagactcttagaatcaaagtgttcagcccaggaagtcttggagatcccaccttctgtggccctgcaccttatgggaagccattaagggggctcatctaggaattctggttacagcccagtgctcatcccagcgtatgctgcctctttagggcagccccaagggccagccagcctgtactctgggcaagagcccaaaatggctaggaatgtttgactcccttaatctcttccccagctacagaggaatcttttctctgcctggtctcagaatgggactgccaactggctcattggtgggagacacagtatcctcaaacctgtggccactggcatgacagtggtgctctgtctccctgggtgacacccaccctaggcttcctcctggatgtgatggggattgccagagaggctcttagcataaaaggcattaggtgggcatttttctgtgtgcccccaaaaagctccatggaaacaggcacctggtagctgcggaacacccgtggacttgtgtatatggtcataggctttgggaagacaggacgtaaaggaaaatgagagaaacaaaatgggtcagatagctttggccacagccccaggcagcctttggggcctatgacacttagtgcccttagatgggatacatcttgcctcggccccaagactcctccaacttacccgtcccatccagggcctgcacagcttagagaggctcacagcttggcaaatgctagggcttcatcagaccactgacttgactcagtgtttgttaaaatggaaccactcccgttggcctactgtttctctcctgtacttcttgtaatgatagttatttattgactctggtagcaggcagttcttaaataaagatggtttctcaacctgttggggaaaaaaaaaaaaaaagtgggtgttatcatcaggctaaaaaaaaaaaaaaaaaaaaa

SEQ ID NO: 6189 - DNA, 3894 bp, Homo sapiens
  misc_feature (119)..(133): n is a, c, g, or t
agcggaggattctaaaaagagcaatggttcacaaggaaacttctgcctcaggtggggagaggagtccatagatcagggaaacttatgtcttggtgaaatggaagaccatgtttctaaannnnnnnnnnnnnnntacttgaatttccactagaggagcagaaatgccaccaatgccaagtgccccacctgtgcatccacctccagatggaggatggggttggattgtggttggagcagcttttatctccattggattttcctatgcattccccaaagctgtcaccgtattcttcaaagaaattcagcaaatattccacactacctacagtgaaatagcatggatttcatccattatgctggctgttatgtacgcaggaggtcctgtaagtagtgttttggtgaataaatacggcagccggccggtggtgatagcaggaggcttattatgctgtcttggaatggtgttggcctcctttagtagcagcgtggtacagctgtacctcactatgggattcattacaggtttaggtttagccttcaacctgcaacccgccttaaccataattggcaaatacttctataggaagcgacccatggcaaatggattggccatggcaggaagtcctgttttcttaagttcattggctcctttcaatcagtacctttttaatacttttggctggaaaggaagcttcctgattttgggaagtctacttttgaatgcctgtgtggctggttccctcatgagaccccttggacccaatcaaaccacttctaagtctaaaaataagactggcaaaacagaagatgattcaagcccaaagaaaatcaaaacgaagaaatcaacttgggaaaaagttaataagtatttagatttctccctttttaagcatagaggatttctgatatatctgtctggaaatgtcattatgttcctaggtttttttgcccccattatattcttggctccatatgctaaagaccaaggaattgatgagtactcggcagcttttctgctatctgttatggctttcgttgatatgtttgctaggccttctgtaggattaattgcaaactccaaatatattcgacctcgaattcagtacttcttcagttttgcaatcatgttcaatggagtgtgtcacctcttgtgcccactggcacaggactacacaagcctggtattatatgctgtattttttggccttggatttgggagtgttagcagtgttctctttgaaactctcatggacctcgtgggtgcaccaagattttccagtgccgtcggacttgtcacaattgtggagtgtggcccagttcttcttggccctcctcttgcaggtaaattggtggatttaactggagaatataaatacatgtacatgtcctgtggggctattgtggtagcagcaagcgtgtggctgctcattggcaatgctatcaactatagattgcttgcaaaggaaaggaaggaggaaaatgcaaggcagaagaccagagaatctgaacccttgagcaaatctaaacattcggaagatgttaacgtcaaagtttcaaatgcacagagtgtaacctcagaaagagaaactaacatttaacaagaatcacatctctgatttcagtgtttatgactttatctaggagtttgtttttcattttgtttttttaaagtattagaaaaggttttagctgaaatgaggagtcacaattaaggatggaggtgatattttcctcaatggcaaattttaaattagtttttaaaaacttacttatttgggtagttaaattttgagattatgcatagaaagaatccatgctataggtttatttccatacctgactctgggtgtggtggttaaaatactaattttaaagtcttccagtgactttcggtcttggttatatggagaattctgaatcccaaacccctggtttaagtaggtagaaggaggatgcctaatcatacaaagtgaccctttatacatttcattttttatttgatattaaagtatgagatagagttgagagacaattaattatcccctcttacacacaaacacacatactcccacatacttacccacatgtacacagagtatctggagaataaaacccaaattcaaaaaaaaaaatgataatttatttttaaggtaaaaataatccatgaagataaaagaaacatatgtctgcgtgctactttacaatgttggttttaaagataagcacatgggtaaaaatgagggtgatccttattcaaaaataacatctgactactataaaaatatttgcatatataagtttgacaaagaaaagaaaatcaatgttaaaccattaaatctgagcactgttagacttgattaatccatgcacatgattttttttgagtagggagcattagtacctggtgctagagaatagaaccctcaaataatttttagaattcttacctaatatgtaaaagtctgcatgactcttaacaatgagtcacatccattgattttacagggattttagttcgtaatccagaaagtaataatcagggattttattttaatcaggcatcaatccagattcactgttatactgaaatatcaaagtaaaatcctagttggcaggattgtaagtagaccgaattctaatttttcccaacacatagtggtaattggaggttactgttatgaatactccatctgactacgactaagagagtgaggggtggttttaatgaaccctctaagctctctcagttccttcccttccacaaaatgcaagagcaaaagcaaactacaaacaggccttgtgctcaaccactggaaatgcctcctgggataagaatggcagcacttgaaaattctgccctctactgatgagacttcctgctgcctttggacataactaagccaggaaactttaaaagccttctagaaatagaggcactgtatgacttgcaatcgtaggtatagtttataacctgatagcaaaaaacttgaaatattgcagcccagtttaattcagcactttcccattttcataactatgtgaaaacatctgggaatttgaatcactcctgaatacagaggcatattctttttaaactataaataccattttgagtgagaaagtacttttaaacaagaaagaaattgtacattatgactaaagttataaatacaatatttatatctataaatctgaagtttaacatgattaatttaaaaagtatttagtgcttgacaaagtagtgtcactcttaagatgtcaaagggaattagccattttttttattgtaataaaggcaggtgctatttttttctggtgagattgcacctggataccaggcttttgtaatagttaacattaaacatttgattcataaagttaattcactgcttaagcatgtggctcatatttaggaagctatataaaattcagtttttcatttaacatttgctcttttgcatatgaagagatatttgtatttttcaaatgttaagtaaaacaagatgtgccaatatcataggtaaataaattagggaaaatgtgggaaaaaaaaaaaaaaaaaaaaaaaaaaaaaaaaaaacttgattcttgaattagctatgtttatatttttagttcttttttattcaactcagatttgtcaagaaatgtaacctctaaattgtgtagtacctctccaatcataaattttcaaaaaaaaaattctactttccaaaaagtgtcttgaattctttgaaaaggcacattaaactaatatgaacatcagaatccagggggaaataaatggcaaagttataaacatgagggtttaggtcaaagactacattatatatattttttattaccctttagcagaaacattcgtctgggtgcattttaatgggcttctttcag

SEQ ID NO: 6190 - DNA, 1098 bp, Homo sapiens
tggtctcagacgtttaggaattagaaggctcacaaaagctattttcacagctagctcaacctgcttaaacaatgttaaatgagtaatagtcttttttttttttccttagagataaatagcattttagaaaaaaaaataaggaaaagcatattcccttttgggggcaactgatttggcaaaatttaacgaggtttttaaaactcaacagtcatggagcaccattaaatattcacacaaaaagacccaggcagcttagagattagtatttccttgttcacaagacacctaattgacttgcaacaagacaaaatattcagtgcatctggttggggccaacatggatgatgacgtgtttctcataagcccttttcattgttttctcaatttgcttcagaaaaacttgcgggattcgtccacataaagtgtgcacagtctccaaaaacttcagctgaagggggtaatacatggattgaaagagattgtcttgaaagggaaaatcccgtattgcttcatagagtgctctgaacgttggttgcttatcgtcatggtagacgcctcggtttccatgcagaacagacacaccttcatgctcagcctctctgcagttgcttccgtacatgcagtgatcgggacggtagttccactggcaggggaatacatagagacactctgggttgaaataaaaaataatatttaataatcctggtctccccacgtgatggcattcttgtacttctggtacagaaggtacaacatgtcctcccaagccaggcctgttggaatcatgctgttcttgaactgggtacttcttatccgagttaaattcattaacatgactcctgaattaactcctgcagagccatagaaaggatgcctagcaaagcggctgtaccagccaatcttggggatttcgtgctcagggccatgctgcaagctgggtggaattaaacagcctcagaagcttccagatgtcatcaacaggtctcagaaagaggacatcggtgtccacgtagagaagtgagtccacatcctttaaaatcaccggaagaaagagtctctgggcagcacagggtttgaacaatttcttccactcctgag

SEQ ID NO: 6191 - DNA, 1016 bp, Homo sapiens
  misc_feature (6)..(7): n is a, c, g, or t
  misc_feature (9)..(10): n is a, c, g, or t
ttcggnntnnccccagcgggggcggtaactcgcaggccggacgtgacgcaaggctgggtggcgatctgctccctggggaacccagcaggcggcgaagatggcggagaacagcggtcgcgccggcaagagcagcgggagcggcgcggggaagggggcggtgtccgcagagcaggtgattgctggcttcaaccgccttcggcaggaacagcgaggcctggcatccaaagcagctgagttggagatggagttgaatgagcacagcctagtgatcgatacactgaaggaggtagatgaaactcgtaagtgctaccgcatggttggaggagtgctggtggagcgaactgtcaaagaggtgctgcccgctttggagaacaacaaggagcagatacagaagatcattgagacactgacacagcagcttcaggcaaagggaaaagaactaaatgaattccgggaaaagcacaacattcgtctcatgggagaagatgagaagccagcagccaaggaaaactcagaaggggctggggctaaggccagctcagctggagtgttggtctcctagggaccaaggcctttgcatttttttctaccctgactcccacttctaatttctctttattgttattattattattttctctgctattgtaatatttttttgttaattaaatgttttggtcagaaaaaaaaaaaaaaaaaaaaaaaaaaaaaaaaagggggagcaggctacaaaagacatcccagagagggggcaccatagctataggcgttacccagagttgcttgtacacagggggccccaatatgcggaggctcgaaattcatgccgagcgcagggcccaccgggccctcaggtttaacacaccgtcgtcgtcgagcgcggcacaaccgcggcgccaccgcgtgggaacctggagcaaggcggaaccctatgccacagcgaagagtgcgacccacatgatcggggcaaacgcaacgcgcaggagatcctcaaagcgccgaagggacacactcag

SEQ ID NO: 6192 - DNA, 1733 bp, Homo sapiens
ttttttttttttttttttccattttttttttttttttttccttggacaaataatatttattgagagcccactttgtggcaagcactgtgctaggtgcagggaatcagcagtgggtccagtccaagctcacgccctcacggatctacattctagaagccggctacctaagcaaacctatgccaacaaaacttctctctccctgctcaggggctgggatcggagcaagggatgggaggaggatgtgtggcttggggaaggtgaggacgctatggactaagttaaggcctatctaccctcgacctttgcccctccaggcagctgggggagagcggaggcagggtcgctcagggttctacccacacgctgctgttggtcacccgggccccgaaccagcccttccagtagacggagtcctgccccccgtgctcgaagcggacgaagcggacgcccggcccgtagtcggtgaaggtgtgggagatctccatccagcccccgccgtcactgtcttggggcactgccacctgcccgctgctgaactcagccagcacgttctcgtgctcggacagtagcttaacggtgagctcgtagaggcaaccagcgtcgctgcggcccgagtaccagtccttcaccacgatggccggctgagtcgtgtccagcagctcctcccagtagccctcagcctgcaggtcaatgacctgtgctttgcgacaccactcaaaggaggaggcgaagtacttcttgacgctctcatcgtgggtgaactccaccccactgtctccaggcagctcctccaccctccagccgtccccaccatgctccacgtcacaccagccttccaagtcctcttccccacacgggttacgcagaaggttgcggcgccgcttgctcaggaagtagaactgctgccagtggtcgcgctcctcctccacgccgccctcgggcaccagcccctcctgctggcacttgagcagccacagcggggcgccgtccaccagctcaataaggagagtatgaaccaggcggcaggcctgcaccagctcggcggccggcagtgcggccagcacgcgcagcagcagcggctcgggcagctcgtccaggtacgcggcggcggccgccgcctcctcctcctgctggtcctccggccgctcctcctcagcactcgcctcctctggctgctcctccgggcttgcctcctcgggctggcccacgctctctgggtcaccgtctccgtccatcgctgcggagggcggtcgcgagaggaggagccggagcgctgcgggctgcgcgagtcccggggcggcgagtcccggcgctgtccgcgtctgtgtcggtcccggcgaccgcgcctcttaaaggcccccgacccgacccgccccgccccgcctctggccccgcgcccggccgccccgcagtcccagcagtctgctcgaggcccggggctgcgggttcctcagcggaccgaggaggctgggaaaggtcaggagtcgttttttttccaactggggaggggtccgatttggggcatctcgcagctcgctcctgggggactgctgggaggaggcggctacgggaggcacggagaggctgggtcaggccgagggtgaggggcgggtggcccaggcggagtcggggtataggaggtgccttccgccccaccccccacaccaggtaattttcctacgacgcggtgggggtgcgtcactggcccagcgctgcgcggggtgcggcccgct

SEQ ID NO: 6193 - DNA, 3744 bp, Homo sapiens
gacacaaccaagggagaaaactattctgtcaaagagacggtgccaaaaggcaaaaacaaaggagctgatggcaaagaaggtagctgtgattggagctggggtcagtggcctaatttctctgaagtgctgtgtggatgagggacttgagcccacttgctttgagagaactgaagatattggaggagtgtggaggttcaaagagaatgtggaagatggccgagcaagtatctatcaatctgtcgttaccaacaccagcaaagaaatgtcctgtttcagtgactttccaatgcctgaagattttccaaacttcctgcataattctaaacttctggaatatttcaggatttttgctaaaaaatttgatctgctaaaatatattcagttccagacaactgtccttagtgtgagaaaatgtccagatttctcatcctctggccaatggaaggttgtcactcagagcaacggcaaggagcagagtgctgtctttgacgcagttatggtttgcagtggccaccacattctacctcatatcccactgaagtcatttccaggtatggagaggttcaaaggccaatatttccatagccgccaatacaagcatccagatggatttgagggaaaacgcatcctggtgattggaatgggaaactcaggctcagatattgctgttgagctgagtaagaatgctgctcaggtttttatcagcaccaggcatggcacctgggtcatgagccgtatctctgaagatggctatccttgggactcagtgttccacacccggtttcgttctatgctccgcaatgtactgccacgaacagctgtaaaatggatgatagaacaacagatgaatcggtggttcaaccatgaaaattatggccttgagcctcaaaacaaatacattatgaaggaacctgtactaaatgatgatgtcccaagtcgtctactctgtggagccatcaaggtgaaatctacagtgaaagagctcacagaaacttctgccatctttgaggatggaacagtggaggagaacattgatgtcatcatttttgcaacaggatatagtttctcttttcccttccttgaagattcactcgttaaagtagagaataatatggtctcactgtataaatacatattccccgctcacctggacaagtcaaccctcgcgtgcattggtctcatccagcccctaggttccattttcccaactgctgaacttcaagctcgttgggtgacaagagttttcaaaggcttgtgtagcctgccctcagagagaactatgatgatggacattatcaaaaggaatgaaaaaagaattgacctgtttggagaaagccagagccagacgttgcagaccaattatgttgactacttggacgagctcgccttagagataggtgcgaagccagatttctgctctctcttgttcaaagatcctaaactggctgtgagactctatttcggaccctgcaactcctattagtatcgcctggttgggcctgggcaatgggaaggagccagaaatgccatcttcacccagaaacaaagaatactgaagccactcaagactcgggccctgaaggattcatctaatttctcagtttcttttctgttgaaaatcctgggccttcttgctgttgttgtggcctttttttgccaacttcaatggtcctagtcagcataatgctttgggctttattatcttgtcagtcactacctcctaaagaaaaaaaaaaaggctagaagaaaaaacattacattcatgttctaattatagattttagagttaggtagtacaggtaagggggaaattgtaaagaattagcagaattaggcatatgtacaaaaccaaaattttgtcatgaaattttgcctttccacgcttccctcagttcaccaaagttaccaaaatgtaaaataaaataagactggctcaggtaagtagtgctgccaaccctgatataggggagttgtatggaaaaatagtagaattacacagcatgaaaagcagcccatggtttaaattattggacaatttaaattgtgggtaaatatttaaaactcctgaacaatgtttctgatggtcttctatccaccctacttggtaacaaagttctcagatgttaggtcatgtttcatttgctcagtcggggatcactcaaaactactagacaaaaaagtgagaggatagatttagaaaacatcagtgatgctcagataaacttttaggacctcatattaagagctaagcaaatggccacatttcctatattttgacagagatactgctggaaaaattaaaattaaaatgccataatagctacctaacaaatatatatgtttaatgtttatcataggccagacattgtgctatgtgcatatcatatgtattatttcatttaattctcacaacaattctgtgaaatggttacagctattatagtcatttcacagatgatgaaactaagattcagagcagctgatcttgtgaggcagctggaattggaactcagatttgttgaactctagaactaaagatcataatgttgtcttgtaatatatttatttacaaaacacttcattatttataaagaatttactaacagtttatcttatttatacccatacatctgctactttgggaggccctttacatagaaaacagcattctttttgccaaatatgaccaaattacttttatttataatttttgatttatatttcagctagatctaaaaagcatctgaaggaatttacaatgaaagatacctatgcaataacatttaggataatctttgacattttgggaaaaataagaattgaggaaaaaaagtgtatctttcaagtagatgcaaagcattataatgactgacacttgtatctaactccagtcttacagataactaaggcaaaaagctaaataaacaatatgtaacctctaacatttggtaaaaggaagtatactggtctgttagcagagacaaactttttttagaattgaagtctgaaacaaacaaaagcaattcaatgtcaatagacattaagcaacataatagacaaacatctcctaagggaacatttgttacagctgctccttccctgaactgtgctttggaagataagctctgtcctgagtccaaaccaagcccttccaagagagaacaaaggtcagagatgttgaagattccagcaaatttctcctcttatttctaccaagcctttgtgaacattgctcttcattttggcctgtacttctccctcagggacgtagaacaatggaatgtcagtcagtctctgtagttaaaactttttctttaaaattcaattaaggtacttctccctcagggacgtagaacaatggaatgtcagtcagtctctgtagttaaaactttttctttaaaattcaattaagttacaccagaatttacaggcaagattttttttttcattgctcccataagcaaatttgttttaaaataattgtaaatgaggtatatacttagttcttggttaaaaaatatattgctttgttaagtattaaagattatttgtaagtcattgtattaataatactaatgaaatttatcaagcctttatagcaagggtcagtgaattaccactgcctgtgggccaaatctagctcactatctgtttttgtaaataaaattttataatagtaaaaaaaaaaaaaaaaaaaaaaaaaaaaaaaaaaaaaaaaaaaaaaaaaaaaaaaaaaaaaaaaaa

SEQ ID NO: 6194 - DNA, 1125 bp, Homo sapiens
gcgccttcagaaataatcagaatgattaaaggttcaaaacactttcataccttaaaatatagggactaatatttctttttcttttttttaaaaaaaacatttcttctgtggcttagaaatgtgccagtgtgttcaaaacatttacaccaatttcaccagatttaggacctattaaaaattcaaacaagtttcttttttttttttttttttctgtgtaacagggatttttaaataacggactatatgcattcttttgttatttcacacttcagttaaagtgataacaatggtaaactgtgatcattatcagactgactgaatgctttctgatttccagtgagtgatctagttctacgtattacacaggtgtaatatctgtgagtgtaaataactggaactgtacactgattaacatgacagtttctcttttgttgttcttatctgtactgtattatagtatgtgggtataaatatctacaagtatacacacatatgtacttgtattccactattgtaacctgaaagaaagactatgtattcccttttttaattccgtactggtatttgtgttatttaaaaagcaaaattctgctctatttagttgtataatattagaggatactttgctgtgcacaattccaagtgccttagaacattgtttagctttcctaagtatatataaatgcatatatgtataaaattgggaaaagttacctcaataaaatcattgggaaatccccaaaaaaaaaaaaaacaaatttctcttatatttggatagtgctcagcctttttaaatgaaaaaagaaaaaagagtaagacaacttccctaattgcctgttatttcagcttcacctaagtttttaacacctctttgtatgtaaggtcttgagacatgtaaggcctgggactttttatttaaaatgtctgtctaaagaattactgctctttaaaagaaacttccagtattttttttaacttgctatctttttatgtttgaggtatttgatattgatgtttttattgccattattatatgtaaacataaaagatagtccatttagggtttataatatagaaaataaacagacttcctcattaaaaaaaaaaaaaaaaaaaaaaaaaaaa

SEQ ID NO: 6195 - DNA, 4573 bp, Homo sapiens
  misc_feature (457)..(482): n is a, c, g, or t
  misc_feature (1208)..(1245): n is a, c, g, or t
  misc_feature (4568)..(4570): n is a, c, g, or t
  misc_feature (4572)..(4572): n is a, c, g, or t
gaattcgcggccgcgtcgaccgcttctgtggccacggcagatgaaacagaaaggctaaagagggctggagtcaggggacttctcttccaccagcttcacggtgatgatatggcatctgccagctctagccgggcaggagtggccctgccttttgagaagtctcagctcactttgaaagtggtgtccgcaaagcccaaggtgcataatcgtcaacctcgaattaactcctacgtggaggtggcggtggatggactccccagtgagaccaagaagactgggaagcgcattgggagctctgagcttctctggaatgagatcatcattttgaatgtcacggcacagagtcatttagatttaaaggtctggagctgccataccttgagaaatgaactgctaggcaccgcatctgtcaacctctccaacgtcttgaagaacaatgggggcaaaatggagaacnnnnnnnnnnnnnnnnnnnnnnnnnnttagaacaaaggcagcgttgtctcaggcggagagctgacaattttcctggacgggccaactgttgatctgggaaatgtgcctaatggcagtgccctgacagatggatcacagctgccttcgagagactccagtggaacagcagtagctccagagaaccggcaccagccccccagcacaaactgctttggtggaagatcccggacgcacagacattcgggtgcttcagccagaacaaccccagcaaccggcgagcaaagccccggtgctcggagccggcaccgccagcccgtcaagaactcaggccacagtggcttggccaatggcacagtgaatgatgaacccacaacagccactgatcccgaagaaccttccgttgttggtgtgacgtccccacctgctgcacccttgagtgtgaccccgaatcccaacacgacttctctccctgccccagccacaccggctgaaggagaggaacccagcacttcgggtacacagcagctcccagcggctgcccaggcccccgacgctctgcctgctggatgggaacagcgagagctgcccaacggacgtgtctattatgttgaccacaataccaagaccaccacctgggagcggccccttcctccaggctgggaaaaacgcacagatccccgaggcaggttttactatgtggatcacaatactcggaccaccacctggcagcgtccgaccgcggagtacgtgcnnnnnnnnnnnnnnnnnnnnnnnnnnnnnnnnnnnnnntccagggggccatgcagcacttcagccaaagattcctataccagttttggagtgcttcgactgaccatgatcccctgggccccctccctcctggttgggagaaaagacaggacaatggacgggtgtattacgtgaaccataacactcgcacgacccagtgggaggatccccggacccaggggatgatccaggaaccagctttgcccccaggatgggagatgaaatacaccagcgagggggtgcgatactttgtggaccacaatacccgcaccaccacctttaaggatcctcgcccggggtttgagtcggggacgaagcaaggttcccctggtgcttatgaccgcagttttcggtggaagtatcaccagttccgtttcctctgccattcaaatgccctacctagccacgtgaagatcagcgtttccaggcagacgcttttcgaagattccttccaacagatcatgaacatgaaaccctatgacctgcgccgccggctttacatcatcatgcgtggcgaggagggcctggactatgggggcatcgccagagagtggtttttcctcctgtctcacgaggtgctcaaccctatgtattgtttatttgaatatgccggaaagaacaattactgcctgcagatcaaccccgcctcctccatcaacccggaccacctcacctactttcgctttataggcagattcatcgccatggcgctgtaccatggaaagttcatcgacacgggcttcaccctccctttctacaagcggatgctcaataagagaccaaccctgaaagacctggagtccattgaccctgagttctacaactccattgtctggatcaaagagaacaacctggaagaatgtggcctggagctgtacttcatccaggacatggagatactgggcaaggtgacgacccacgagctgaaggagggcggcgagagcatccgggtcacggaggagaacaaggaagagtacatcatgctgctgactgactggcgtttcacccgaggcgtggaagagcagaccaaagccttcctggatggcttcaacgaggtggccccgctggagtggctgcgctactttgacgagaaagagctggagctgatgctgtgcggcatgcaggagatagacatgagcgactggcagaagagcaccatctaccggcactacaccaagaacagcaagcagatccagtggttctggcaggtggtgaaggagatggacaacgagaagaggatccggctgctgcagtttgtcaccggtacctgccgcctgcccgtcgggggatttgccgaactcatcggtagcaacggaccacagaagttttgcattgacaaagttggcaaggaaacctggctgcccagaagccacacctgcttcaaccgtctggatcttccaccctacaagagctacgaacagctgagagagaagctgctgtatgccattgaggagaccgagggctttggacaggagtaaccgaggccgcccctcccacgccccccagcgcacatgtagtcctgagtcctccctgcctgagaggccactggccccgcagcccttgggaggcccccgtggatgtggccctgtgtgggaccacactgtcatctcgctgctggcagaaaagcctgatcccaggaggccctgcagttcccccgacccgcggatggcagtctggaataaagccccctagttgcctttggccccacctttgcaaagttccagagggctgaccctctctgcaaaactctcccctgtcctctagaccccaccctgggtgtatgtgagtgtgcaagggaaggtgttgcatccccaggggctgccgcagaggccggagacctcctggactagttcggcgaggagactggccactgggggtggctgttcgggactgagagcgccaagggtctttgccagcaaaggaggttctgcctgtaattgagcctctctgatgatggagatgaagtgaaggtctgagggacgggccctggggctaggccatctctgcctgcctccctagcaggcgccagcggtggaggctgagtcgcaggacacatgccggccagttaattcattctcagcaaatgaaggtttgtctaagctgcctgggtatccacgggacaaaaacagcaaactccctccagactttgtccatgttataaacttgaaagttggttgttgtttgttaggtttgccaggtttttttgtttacgcctgctgtcactttcctgtccaggagctggcaccccaggtgttctgagaccttgagggacccagacctttgggtccaagagtttcccaaacagccacgcctctcaggaacccacctggcggttccgtgagctcaggcaggcctgacccggcggcacagcctggcagggacctcgtccccaagcctggcagaatgagaggggttgaggtcccgagcgccactcctagccttgccgccttcaatagagaagaaatccctttgctagatagggtcccccaggcagtccccagtggcgggacacaggggtccggctgtggagctcccctgccagcccctggagctccaggagggcctgttggtcccctgttcagaatggagtgcagcccgccagcggaaagtgttcattctgcataggtgtgaggctttatctgcacacaggacatgaaaaccagcagaaaggccctgagctgctgcatagccccatctgatttctgcagttcccgccagcctccaacacggggactctgccgtaactggaatcttcataggtcatattgaaatcttcaaggtgaccatgccccaccggggtgctggggcagtagtcatggcagactcccggcctgggcccccaggattctaggacccccaggcagccccttggactggtcccgggtgccttccaagcacagtctccatgctcccagattctcgaccttcccccggcccgggaggtgcagcctgcgtctgcctctgtcgtgtgtgctgatttgagtggcttagcttgccacagcgcaacctcttctgtccctttcagtcatttgctgtacttccctgtggcacgttaccatggaagccgctccagggtgggtcagggtgcaagctgctggtgaggtttggaagcatcaggctcacgggtgttcatgtgtgttcgtgcgtgtgtgtgcgtacgtgtatataactgaagtgtctgtacggaatgccctttgctagccatgggctggtcaccaaattgttttgtaatgcccgccccttgcctcgatattgccagtttcttgtgcaataaactatcagcagctgaaaaaaaaaaaaaaaaaaaaaaaaaaaaaaaaaannnang

SEQ ID NO: 6196 - DNA, 7886 bp, Homo sapiens
  misc_feature (1072)..(1086): n is a, c, g, or t
  misc_feature (5803)..(5823): n is a, c, g, or t
ctcactgtccctggaatcttcaagggagttactgcattacatcatcagaaacaaggcatttctatattactatggaaagatttcgtctggagaagaagttacctggtcctgatgaagaagctgttgtggatcttggcaaaactagctcaactgtgaacaccaagtttgaaaaagaagaactagaaagtcatagagctgtatatattggtgttcacgtcccgtttagtaaagagagtcgtcggcgtcataggcatcgcggacacaaacatcaccaccggaggagaaaagataaagaatcagataaagaagatggacgggaatctccttcttatgatacaccatcccagagagttcagtttatccttggtactgaagatgatgatgaagaacatattccccatgatctcttcacggaaatggatgaactgtgttacagagatggagaagaatatgaatggaaagaaactgctagatggctgaaatttgaagaggatgttgaagatggcggtgaccgatggagtaaaccttatgtggcaactctctctttgcacagtctttttgaactaaggagttgcatcctcaatggaacagtcatgctggatatgagagcaagcactctagatgaaatagcagatatggtattagacaacatgatagcttctggccaattagacgagtccatacgagagaatgtcagagaagctcttctgaagagacatcatcatcagaatgagaaaagattcaccagtcggattcctcttgttcgatcttttgcagatataggcaagaaacattctgaccctcacttgcttgaaaggaatggggaaggcctttcagcctcccgccactctttgcgaacaggtctgtctgcctcaaacctttccttgagaggagaatcacctttatctcttcttctcggtcatcttcttccttcttcaagagctggaacccctgcaggctcaaggtgtacaaccccagtacccacccctcaaaacagtcctccttctagccctagcatcagccgcctgacctccagaagttcccaaaagagtcagcgtcaggccccagaacnnnnnnnnnnnnnnnccagtgatgatattcccacagtagtaattcatccgcctgaggaagacttagaagcagcgctgaaaggcgaggagcagaagaatgaggaaaatgttgacttaactccaggtattttggcctctccccagtctgctcctggaaacttggacaatagtaaaagtggagaaattaaaggtaatggaagtggtggaagcagagaaaatagtactgttgacttcagcaaggttgatatgaatttcatgagaaaaattcctacgggtgctgaggcatccaacgtcctggtgggcgaagtagactttttggaaaggccaataattgcatttgtgagactggctcctgctgtcctccttacagggttgactgaggtccctgttccaaccaggtttttgtttttgttattgggtccagcgggcaaggcaccacagtaccatgaaattggacgatcaatagccactctcatgacagatgagattttccatgatgtagcttataaagcaaaagacagaaatgacctcttatctggaattgatgaatttttagatcaagtaactgtcctacctccaggagagtgggatccttctatacgcatagaaccaccaaaaagtgtcccttctcaggaaaagagaaagattcctgtgtttcacaatggatctacccccacactgggtgagactcctaaagaggccgctcatcatgctgggcctgagctacagaggactggacggctttttggtggtttgatacttgacatcaaaaggaaagcaccttttttcttgagtgacttcaaggatgcattaagcctgcagtgcctggcctcgattcttttcctatactgtgcctgtatgtctcctgtaatcacttttggagggctgcttggagaagctacagaaggcagaataagtgcaatagagtctctttttggagcatcattaactgggattgcctattcattgtttgctgggcaacctctaacaatattggggagcacaggtccagttctagtgtttgaaaaaattttatataaattctgcagagattatcaactttcttatctgtctttaagaaccagtattggtctgtggacttcttttttgtgcattgttttggttgcaacagatgcaagcagccttgtgtgttatattactcgatttacagaagaggcttttgcagcccttatttgcatcatattcatctacgaggctttggagaagctctttgatttaggagaaacatatgcatttaatatgcacaacaacttagataaactgaccagctactcatgtgtatgtactgaacctccaaatcccagcaatgaaactctagcacaatggaagaaagataatataacagcacacaatatttcctggagaaatcttactgtttctgaatgtaaaaaacttcgtggtgtattcttggggtcagcttgtggtcatcatggaccttatattccagatgtgctcttttggtgtgtcatcttgtttttcacaacattttttctgtcttcattcctcaagcaatttaagaccaagcgttactttcctaccaaggtgcgatcgacaatcagtgattttgctgtatttctcacaatagtaataatggttacaattgactaccttgtaggagttccatctcctaaacttcatgttcctgaaaaatttgagcctactcatccagagagagggtggatcataagcccactgggagataatccttggtggaccttattaatagctgctattcctgctttgctttgtaccattctcatctttatggatcaacaaatcacagctgtaattataaacagaaaggaacacaaattgaagaaaggagctggctatcaccttgatttgctcatggttggcgttatgttgggagtttgctctgtcatgggacttccatggtttgtggctgcaacagtgttgtcaataagtcatgtcaacagcttaaaagttgaatctgaatgttctgctccaggggaacaacccaagtttttgggaattcgtgaacagcgggttacagggctaatgatttttattctaatgggcctctctgtgttcatgacttcagtcctaaagtttattccaatgcctgttctgtatggtgttttcctttatatgggagtttcctcattaaaaggaatccagttatttgaccgtataaaattatttggaatgcctgctaagcatcagcctgatttgatatacctccgttatgtgccgctctggaaggtccatattttcacagtcattcagcttacttgtttggtccttttatgggtgataaaagtttcagctgctgcagtggtttttcccatgatggttcttgcattagtgtttgtgcgcaaactcatggacctgtgtttcacgaagagagaacttagttggcttgatgatcttatgccagaaagtaagaaaaagaaagaagatgacaaaaagaaaaaagagaaagaggaagctgaacggatgcttcaagacgatgatgatactgtgcaccttccatttgaagggggaagtctcttgcaaattccagtcaaggccctaaaatatagtcctgataaacctgtgagtgtgaaaataagttttgaagatgaaccaagaaagaaatacgtggatgctgaaacttcattatagaattgaaccaagaggcattatacatatagatatatacatatgtaatgtgtgcgtatcatgtcactatatataagaatattgtatgtcatgctgtttatgtgtgactaccgggtttttaaaagtagtgtctggagtttgtaatgagcaccgtggagactatgtatttaatgaaatgctctctttgaagtgaggtacatggttcttaactattcaaatatttattctgttagaaaaaaaaaattttctgttttgcaatagaaggatgtggagaaatgctttcagtctacttttcttaaatctctgttcatcagtggcaattcgtaaaaaccttaagtgatactttgtttatatgtttataatttttaggtgtttcctgaaattttcacatattatttcacttttgttagtgctttatgggaagaatagggagtctataccagtgctgtgggaaaaatggtaacatttcagggcttctctatttgtgtttcatttctgtagatgtccatcgtgtttcactaactggcgttttcttagccatagagatgactgtagaacaatagaaactttaataatgatagtttttaacttttatgtttaaattttttttaaatcttaaaaccttcatatctaggtatccattgtgacagacaagtaaaattgcaggtgatttgataattaagcacccataccatttataacttctgaatttaaaaagttatacaatgccagtttgcaatagttgattttgatgcctttgtagaatattttttctgaatccttatgctcttttaaagccaatgattcccactctgttctctgccttgtctctctttgtcttaaaatgctttagtttccatcaggttcaagttcttgactattattctcttataagtagtaggcgtaaataatcaggagttagaattctctcagaagggtctatgatcagtattactttattaagaattacctttcattttctctttatgttattctttcacttttgtagattacatttaatagcttgttacctgtgattttattttaaaatatttattttgatatgatgcttaaatattatataaacatttggaaaagtaacaaatagagtaaattgttaatgtaaatagttggtgcttactttcatttatgtttattatcttaaagcaattgatagattttacatctttgatataaagcactgccatatttatattttaaaaggaaattagacattttatatgtagctcagattaatgacatttttattttgtgtattagtttttgcttttctgagctttttaaagtctaacaaatctttttagtcatcttttatatacttttagttccacatgaaataaatgttgttaagcctgtaggactggatgaatggggttgtgaaactgatttgacaagagaataatttacaaaaatcaaatgagtattgagaagccacagaaatatcaaaaatggtgacatcactattaggatgaaaattttatgaaattccaatgctccctttaaccatataattaaattacaaaggtatacataattaatctaataaaggatcatgaggaatgccaaaagctgaaattttagcaagtctggtgttttaaattcattataaactatttattaactaatgtaatgtcctcctctaagaccatattgtaagagtcttgttaaaatgatggattcaacttctgcctcggatgagaggttggaaatgtagctgcttttctttagaaaatatgtagctgtcatcatttggtactgcctaaaaagagttagactctattggcaattgatagagtattacccacggtgcttattattgtttatgagcttccattgtaatgattcctttttatttgtagcagcataattatttccaaagaccccagtatttgctgctatttttaaaactcccctgatgtacctgaacaagaggatttcctcacatcatttccttgtgtctggacatcaggggtaacaactgtacttactttacaggaagaaattttaaaactgaaaactacctgggatcatagtgtttctgtgattttatttaattgtgtatagtaatnnnnnnnnnnnnnnnnnnnnntcacttgcaaaatactttgcactcaaaatgtttttacaatgcttctaaatgttactggtttctgctttcttttgactacttgactgacaaaatgatctgactactccatttaagagcaaaggtaactcatgtttaagtaattaactgcttgttttaagtgattatatttcttccactgtttttgaaaaataatcaaagatagcattcattgagagacagtgacagatataatttactacatatattgatttttaaataaagttgccttaaataagtgtatgtaagcagtagtagttgctatgtactgatttacctcaaggtgcaaaataattaaacctgtacatattccatttacaaaataaattcagccctgcactttctttagatgccttgatttccagaatggagcttagtgctactgaataccctggccacagagccacctcaggatattcttttctccaccctagtttatttatttatagatatctgtttacaaagtctgtagtaaatcctgatgctgaccatctgaaatgtactttttttctgaatgctgtttcaatctaaaatagcagcttttgagaaaacaatgatgtaaattccttatgataaaaggatgattctatatattctttaatgatattaaatatgccgaagccaagcacacagtctttctaaagtgtgtgtatgtttgtgtgaatgtgaatgatactgatcttatatctgttaaaagttgttttaaaaagctgtggcatcccattgttcatatttgccaagtcttctgtaaagatgtctaggacgaaatattttatgtgctaatgcatgtatttgtaaaccagatttgtttaccactcaaaattaacttgttttcttcatccaaaaaagtttatgtcttccacgtacttaaattttctgtgtgggtataatatagctttctaatttttttctttcacaaaggcaggttcaaaattctgttgaaagaaaaatgctttctgaaactgaggtataacaccagagcttgctgtttaaaggattatatgatgtacatcagttctataaatgtgctcagcagtttaacatgtgaatcctgttttaaagtgctcagatttcaactgtgtaagccattgatataacgctgtaattaaaaatgtttatatgaaataacttaatgttttaaatttatttatgtagatcacatcatttttatcagtatgcagtgcaaatatgtgaaatgtcttttggtttattccaacaattatttattttagaaagtaagtttaaagactttaaggacattcaaagtttaaaatagtgttcaaattgcaaaatttggcaatcttcatataaattggtttcttttctaacttttcaaaaactaacattaaatgtcaattataggaaaacatagttggaaatgtaatcatcccaaagatcatttttaaaatgaaatttaattagcacatattgaacatttgacttaattgttaaaccccagttttgttttgtttttttaatcagatttttgcacactgattagtttttgtgttgtggcttttgttgctttattattcaaggtttttttttttctttccccatgggggagattgtcttccaatgtttaactacgtttaaataaataaaaattgaattttattgttcatttatataaaatctgataccttgatgtaatttcacaatacagttccaatttttatggcttttataattacaatgatattttcttctataataaaatccaaagtaaacatttaaattgtagaactgatatttttcatttatatgaagtataagcctctactgggtctatattgtgaatcatcctgcctttcaaatttgtttcataattgttagatgaaaactatttttttggagatgttactgaagttgattgagcaataaaagtctacttaattaaaaaaaaaaaaaaaaaaaaaaaaaaaaccgctctaaaagtatcccccccaaagggggccccaagccttaccgcggtaaccccagccttttctttggtgacaaaaggggggctccccccaatacaggga

SEQ ID NO: 6197 - DNA, 2181 bp, Homo sapiens
cctggcccggtcgcggtcgcggctctttccagctcctggcagccgggcacccgaaggaacgggtcgtgcaacgacgcagctggacctggcccagccatggaccgaaaagtggcccgagaattccggcataaggtggattttctgattgaaaatgatgcagagaaggactatctctatgatgtgctgcgaatgtaccaccagaccatggacgtggccgtgctcgtgggagacctgaagctggtcatcaatgaacccagccgtctgcctctgtttgatgccattcggccgctgatcccactgaagcaccaggtggaatatgatcagctgaccccccggcgctccaggaagctgaaggaggtgcgtctggaccgtctgcaccccgaaggcctcggcctgagtgtgcgtggtggcctggagtttggctgtgggctcttcatctcccacctcatcaaaggcggtcaggcagacagcgtcgggctccaggtaggggacgagatcgtccggatcaatggatattccatctcctcctgtacccatgaggaggtcatcaacctcattcgaaccaagaaaactgtgtccatcaaagtgagacacatcggcctgatccccgtgaaaagctctcctgatgagcccctcacttggcagtatgtggatcagtttgtgtcggaatctgggggcgtgcgaggcagcctgggctcccctggaaatcgggaaaacaaggagaagaaggtcttcatcagcctggtaggctcccgaggccttggctgcagcatttccagcggccccatccagaagcctggcatctttatcagccatgtgaaacctggctccctgtctgctgaggtgggattggagataggggaccagattgtcgaagtcaatggcgtcgacttctctaacctggatcacaaggaggctgtaaatgtgctgaaaaatagccgcagcctgaccatctccattgtagctgcagctggccgggagctgttcatgacagaccgggagcggctggcagaggcgcggcagcgtgagctgcagcggcaggagcttctcatgcagaagcggctggcgatggagtccaacaagatcctccaggagcagcaggagatggagcggcaaaggagaaaagaaattgcccagaaggcagcagaggaaaatgagagataccggaaggagatggaacagattgtagaggaggaagagaagtttaagaagcaatgggaagaagactggggctcaaaggaacagctactcttgcctaaaaccatcactgctgaggtacacccagtaccccttcgcaagccaaagtgatttccggaaatatgaggaaggctttgacccctactctatgttcaccccagagcagatcatggggaaggatgtccggctcctacgcatcaagaaggagggatccttagacctggccctggaaggcggtgtggactcccccattgggaaggtggtcgtttctgctgtgtatgagcggggagctgctgagcggcatggtggcattgtgaaaggggacgagatcatggcaatcaacggcaagattgtgacagactacaccctggctgaggctgacgctgccctgcagaaggcctggaatcagggcggggactggatcgaccttgtggttgccgtctgccccccaaaggagtatgacgatgagctgaccttcttgctgaagtccaaaaggggaaaccaaattcacgcgttaggaaacagtgagctccggccccacctcgtgaacacaaagcctcggaccagccttgagagaggccacacgacacacaccagatggcatccttgggacctgaatctatcacccaggaatctcaaactccctttggccctgaaccagggccagataaggaacagctcgggccactcttctgaaggccaatgtggaggaaagggagcagccagccgtttgggagaagatctcaaggatccagactctcattcctttcctctggcccagtgaatttggtctctcccagctctgggggactccttccttgaaccctaataagaccccactggagtctctctctctccatccctctcctctgccctctgctctaattgctgccaggattgtcactccaaaccttactctgagctcattaataaaataaacagatttattttccagcttaaaaaaaaaaaaaaaaataaaacgtt

SEQ ID NO: 6198 - DNA, 2336 bp, Homo sapiens
  misc_feature (1747)..(1774): n is a, c, g, or t
tttttttttttttttttttttttttttttgttttttttttttttttttttttttaaaactaattcacatccactggtttattattgatcacggggcatttcacatcgacactaaaattctttattgcaagttttacaataatcaagtaaattcagtccaaaaacacaataaccacgataggggtggggagagattctacctatagactgcctctctgaactgaaagttcattttgattttcttttggctcctcaaactgaacagctctgagaggctctccagatgcatttagctttgtctgctgtcttcgccccctctcctcccacacccccccccaacaataatacaaaagaacttcatagctttgttctccttaaaatgacttccccctcactaacctcccctggtgcattttcaatgcaaaaggcctaaggaaagagggggggaaggaggaggaggagaaggatgagaattggctttaaaatttctttccttttttcttttcctcatttcccctgaaattcacccaagccagaccatcacaccttgcaatatataatttttgcagctttttttcttaaaaaataaataaccccccaaaatggccttttaaaaaaaaacacccagcaggtaccatgctaagacaacatcacatgcttaaaagggtccttaacagtgggagggagaggagggcagggggcttgtttgtttatctgttttgtctgtttggaactgacaagggacaaggtgagaggaagagagaaaagaacctatatatatatatatatatatatatattaaattctataaataagagtcaatttgtgtgtgaggggagggtgggggcatggggtgggggcaggggtgtgagttatgttttataacctggtaatgtcctctgcccgttgctgctccggcggcgtggcgctctgggagtggtcttcagaagtacccggggtagctgccgaaagggtgctgggcgcagcgccggccgggggtgctgacctgactttggtgttggggagtcggtggtccttcttccatttcatgcgacggttttggaaccagattttgatctgcctctcagagaggcacagcgagtgggcgatctcgatccttctccttcgggtcaggtagcggttgtaatgaaactctttctctaattccaggacttgctgccgggtataggctgtcctcgagcgcttgggttcccctccgttataattggggttcaccgtgctaacgtgaatttttttcatccatgggtagactatgggttgcttgctggcggcgctggagggatggtcgggggctggctggctgcaggctggcggggctggggacggggaggcggaggcgcctgagagaggcgccggctcgcagagcgactgtgatttctcggggtggtggtggcccgcctgggccggcccgtggcctcgcgaattgccgggcccctggagactggtgcagctatactggcgctcagggtagctagggcgcggaggcggtggtgggtacagctcctggtggtgatgctggaatcccgattccctggtccggccgtaatattccggactgtgttcagggatgtagctattttgcgaatattcttcgcatggaggaaatttcggatcgatgtagttagagtccatcaaatacgagctcatgatcattaatttctggagtgtatggtaatttttctggctttgtagtttttctgctggaccaggcaggtagaggcagcggnnnnnnnnnnnnnnnnnnnnnnnnnnnngacgtcatttctggaggtctgggggttgagcccccgcgagcgctgctgtcactctccctctctccctctctgcctctctctctcccactctctttctcgtcttccctcattctgtgccgctgccgagcctgtctcagctccacacacacacacatatactttatataaattcaaaaataaaaataattataatcatccaaaagccaaacaaaattaaggagagttgcaagaagggggcaggaggaagagcctgggagagaggaggggcggaggcatctgcagctcccaagctcaactcctgctcctgcattcctcctgccccttgggggccagagggtcgggaaggaagagagagatgccctcaacttctgtctctcccctcccatccccaccctccccagctgcccccagcttcggcaactccacctgggaggaaaaaaaattaaatgggggaaaaataattattaatcagattaatttaaaaaaaatactgctaatgaagggagcgcccagggcaggtttccctggcaatggttaggctcttacagggaggactgttctg

SEQ ID NO: 6199 - DNA, 7956 bp, Homo sapiens
  misc_feature (1098)..(1126): n is a, c, g, or t
  misc_feature (3996)..(4040): n is a, c, g, or t
  misc_feature (4192)..(4211): n is a, c, g, or t
  misc_feature (4455)..(4549): n is a, c, g, or t
  misc_feature (5574)..(5602): n is a, c, g, or t
  misc_feature (6038)..(6094): n is a, c, g, or t
gggagagggagacgcaggcggcgaaacggcagaggagccgagccccctccgcccaaggcgccctccctccgtccgcgcacaggcgccgtcgcttggaggagcaaggtgcctcccagcccgcaggggcgccgcgcgcaagcccgcgggctcttcggtggctctgccccgggactgcacctggaggcggccccggacggggatggtcagcggctgctgccgtctggctcgcgagcgggacgctgtgagggcaccatggcgctgactcccgggtgggggtcctcggcggggccggtccggccggagctctggctgctgctgtgggcagccgcgtggcgcctgggtgcctcggcgtgccccgccctctgcacctgcaccggaaccacggtggactgccacggcacggggctgcaggccattcccaagaatatacctcggaacaccgagcgcctggaactcaatggcaacaacatcactcggatccataagaatgactttgcggggctcaagcagctgcgggtgctgcagctgatggagaaccagattggagcagtggaacgtggtgcttttgatgacatgaaggagctggagcggctgcgactgaaccgaaaccagctgcacatgttaccggaactgctgttccagaacaaccaggctttgtcaagactggacttgagtgagaacgccatccaggccatccccaggaaagcttttcggggagctacggaccttaaaaatttacggctggacaagaaccagatcagctgcattgaggaaggggccttccgtgctctgcgggggctggaggtgctgaccctgaacaacaacaatatcaccaccatccccgtgtccagcttcaaccatatgcccaagctacggaccttccgcctgcactccaaccacctgttttgcgactgccacctggcctggctctcgcagtggctgaggcagcggccaaccatcgggctcttcacccagtgctcgggcccagccagcctgcgtggcctcaatgtggcagaggtccagaagagtgagttcagctgctcaggccagggagaagcggggcgcgtgcccacctgcaccctgtcctccggctcctgnnnnnnnnnnnnnnnnnnnnnnnnnnnnntcgtggactgtcgtggaaaaggcctcactgccatcccggccaacctgcccgagaccatgacggagatacgcctggagctgaacggcatcaagtccatccctcctggagccttctcaccctacagaaagctacggaggatagacctgagcaacaatcagatcgctgagattgcacccgacgccttccagggcctccgctccctgaactcgctggtcctctatggaaacaagatcacagacctcccccgtggtgtgtttggaggcctatacaccctacagctcctgctcctgaatgccaacaagatcaactgcatccggcccgatgccttccaggacctgcagaacctctcactgctctccctgtatgacaacaagatccagagcctcgccaagggcactttcacctccctgcgggccatccagactctgcacctggcccagaaccctttcatttgcgactgtaacctcaagtggctggcagacttcctgcgcaccaatcccatcgagacgagtggtgcccgctgtgccagtccccggcgcctcgccaacaagcgcatcgggcagatcaagagcaagaagttccggtgctcagccaaagagcagtacttcattccaggcacggaggattaccagctgaacagcgagtgcaacagcgacgtggtctgtccccacaagtgccgctgtgaggccaacgtggtggagtgctccagcctgaagctcaccaagatccctgagcgcatcccccagtccacggcagaactgcgattgaataacaatgagatttccatcctggaggccactgggatgtttaaaaaacttacacatctgaagaaaatcaatctgagcaacaacaaggtgtcagaaattgaagatggggccttcgagggcgcagcctctgtgagcgagctgcacctaactgccaaccagctggagtccatccggagcggcatgttccggggtctggatggcttgaggaccctaatgctgcggaacaaccgcatcagctgcatccacaacgacagcttcacgggcctgcgcaacgtccggctcctctcgctctacgacaaccagatcaccaccgtatccccaggagccttcgacaccctccagtccctctccacactgaatctcctggccaaccctttcaactgcaactgccagctggcctggctaggaggctggctacggaagcgcaagatcgtgacggggaacccgcgatgccagaaccctgactttttgcggcagattcccctgcaggacgtggccttccctgacttcaggtgtgaggaaggccaggaggaggggggctgcctgccccgcccacagtgcccacaggagtgcgcctgcctggacaccgtggtccgatgcagcaacaagcacctgcgggccctgcccaagggcattcccaagaatgtcacagaactctatttggacgggaaccagttcacgctggttccgggacagctgtctaccttcaagtacctgcagctcgtgatcctcagcaacaacaagatcagttccttaagcaattcctccttcaccaacatgagccagctgaccactctgatcctcagctacaatgccctgcagtgcatcccgcctttggccttccagggactccgctccctgcgcctgctgtctctccacggcaatgacatctccaccctccaagagggcatctttgcagacgtgacctccctgtctcacctggccattggtgccaaccccctatactgtgactgccacctccgctggctgtccagctgggtgaagactggctacaaggaaccgggcattgctcgttgtgctgggccccaggacatggagggcaagctgctcctcaccacgcctgccaagaagtttgaatgccaaggtcctccaacgctggctgtccaggccaagtgtgatctctgcttgtccagtccgtgccagaaccagggcacctgccacaacgacccccttgaggtgtacaggtgcgcctgccccagcggctataagggtcgagactgtgaggtgtccctgaacagctgttccagtggcccctgtgaaaatgggggcacctgccatgcacaggagggcgaggatgccccgttcacgtgctcctgtcccaccggctttgaaggaccaacctgtggggtgaacacagatgactgtgtggatcatgcctgtgccaatgggggcgtctgtgtggatggtgtgggcaactacacctgccagtgccccctgcagtatgagggaaaggcctgtgagcagctggtggacttgtgctctccggatctgaacccatgtcaacacgaggcccagtgtgtgggcaccccggatgggcccaggtgtgagtgcatgccaggttatgcaggtgacaactgcagtgagaaccaggatgactgcagggaccaccgctgccagaatggggcccagtgtatggatgaagtcaacagctactcctgcctctgtgctgagggctacagtggacagctctgtgagatccctccccatctgcctgcccccaagagcccctgtgaggggactgagtgccagaatggggccaactgtgtggaccagggcaacaggcctgtgtgccagtgcctcccaggcttcggtggccctgagtgtgagaagtttgttcagtgttcaactttgggattcgggaacactttacctgcagtttccacttgaacctgcaaaagtggcacgggccaacatcacgttgcaggtctccacggcagaggacaatgggatccttctgtacaacggggacaacgaccacattgcagttgagctgtaccagggccatgtgcgtgtcagctacgacccaggcagctaccccagctctgccatctacagtgctgagacgatcaacgatgggcaatnnnnnnnnnnnnnnnnnnnnnnnnnnnnnnnnnnnnnnnnnnnnnccattgatggcgggagccccatgaccatggacaactttggcaaacattacacgctcaacagcgaggcgccactctatgtgggagggatgcccgtggatgtcaactcagctgccttccgcctgtggcagatcctcaacggcaccggcttccannnnnnnnnnnnnnnnnnnnacatcaacaacgagctgcaggacttcaccaagacgcagatgaagccaggcgtggtgccaggctgcgaaccctgccgcaagctctactgcctgcatggcatctgccagcccaatgccaccccagggcccatgtgccactgcgaggctggctgggtgggcctgcactgtgaccagcccgctgacggcccctgccatggccacaagtgtgtccatgggcaatgcgtgcccctcgacgctctttcctnnnnnnnnnnnnnnnnnnnnnnnnnnnnnnnnnnnnnnnnnnnnnnnnnnnnnnnnnnnnnnnnnnnnnnnnnnnnnnnnnnnnnnnnnnnnnnncactgccaggcctcaggcaccaagggggcacactgtgtgtgtgaccccggcttttcgggcgagctgtgtgagcaagagtccgagtgccggggggaccctgtccgggactttcaccaggtccagaggggctatgccatctgccagaccacgcgccccctgtcatgggtggagtgccggggctcgtgcccaggccagggctgctgccagggccttcggctgaagcggaggaagttcacctttgagtgcagcgatgggacctcttttgccgaggaggtggaaaagcccaccaagtgtggctgtgccctctgcgcatagcgctgggcgtggacaggccggtgagggcgggcaaggggccccagccgctgcagcagcggagacagtcgccagcagctgggctggggtgcaggtcatcacaggacggctcctgggcagctgggccctcctgggtggggtggtgccagagcagccttttaaaagcaaattgcgccatagctgggggcagcgggggtgggcgaggcctgagctgcgggctgccctctccggaagtccttgcacaaataggcgcttaataaatatttgttgagtgaatgtgtgcgtgaggtcaggccaagaagtgcagaacgatgacacccctccttacctgctatctgaatctggagaagaaaaatgacagccttccaaaccaacccttccctttggcctgtggcccaggctggcttggaactgggtctgtggccccagaagcctcttacccctctgcgggcaaccatgaagtactgtcagcctccccgggaagccagcctggttcattctgctgctacagaatctgctggtggtaggccaggctctggagcgggggtgccgcctcctgctggccagggagggtcggacccttgccccctgggctgactggcagctctgcagccacggcttgggaacgaggctgtgggtggaggtggttcttaggaccaggcctctgaatcctaaagttctagcatgactactgtagctgcgagggcttatgnnnnnnnnnnnnnnnnnnnnnnnnnnnnnggtggcagaccccactaaagagggcagagggttctttgctctagataaacaaacatcatctgcctccagacactggccacagtaggagtattggtcctgggcttccccagccaccagtcagccacaagctgtcggtgacctattggtagagggactgggtgtgagggtctgggccagggtgcttgacctgggagcagctggttcagagtccttcacaccgcaggccagtagggagcagtggaagggacagtgctccaggcattgggaagtccctgctggctctatcactcggggcaaacttctccccacctgggccttgggttcttcagctataaaatggccagaggtggggggcgggatgactaaaggaacagtgcagactcccccactgtggtcttgggaggccagaggagttagaagacctatctatctatcnnnnnnnnnnnnnnnnnnnnnnnnnnnnnnnnnnnnnnnnnnnnnnnnnnnnnnnnngggattgtggacgttctggcctaatggacagatgtgaactcatcccagagcatcgcaggaatgaccaggatgcccgggaagagttgagctgagtgggggctccagccacagacagcggcccaggccagggagttgctggcaacgaaggagccagtggtggaagaagaagaggccctgaatatacgattgcctgcccacgttgtcttctcttccatacacagtgaaaatgtagaaagatggtttgtgaggccaaactgtgaatgggctaaagggaggcaaagttgcactctccttccccagagggctcaccaagagggcacacccccgggggttctggtgggcaacgggggtgagcatgtccctgccctggctccctccatctgtgaccaggaggcatggctgggtgtatgttcaggtgaggctcagagtggcattgtgtccctgtcccctgcccagggcagtgaggggagcccttgatgctgattagaaggctagaactggggtagaggtgcctggcatgtctcatgccatggggactcaatctagcaactgtgagtcctggggtccctgtgatgggaagagggcagtgccctgcccaatgtggcaggtgtcctcatggcaggatctgcccctcaccagggggctgggatctacttgcttggagctctgagcaaggccacaatgcccgcccccacccccaagtagactgcagcctgggcctcatggggcttctcccaggcccacatggcatccctctctgagtttccaggccaccgtgggaccctgcagagcatctgcaccgggctggatagggcagaaaagctcaagggcagctagcttgcctcttccctggaagaaaggtgctctgggactcaccaaccctgagaaagatagctttcctggccaccaccattccccaccaccctggagaagccaattcccaggcttgaagggcactggctggcaggaggcctcttcattctgcaggaggtggaaaggacacctgtagacaggtgatgctcacccctcacctggcgccatggggctgggaagtgagcggctggcatgtttgttcctagggagcaccatgtgagcttaaggctcccctgaccggccccaccacatggcccagcctcctagcacagcagcgctgacctcagtgcagtctgaggattggaatccaccatgagatgatgtgagagctgtgtgccccaggatcaactttttctccaacttggccatcagccagcgagttgctaaggacctgagtcagcactcacgttgcctattcacactccgcttgaaagtccggaaggtggctactgcaaaatcacccctctgagaagtcctctctccacatcttgtccccctttgtgaagacccctagttcgctctgcattttaggcatgaagagatacagcagggtgcgtccggagggagctgtggccttgcaacaccactggcaacagggccggggctcccggtgaaggtgtcaggaagtggaaaaggctggactttgtctcctctttgcctgctggtagcctaaccgcaaaagtatctctttatacagaatacttacagattctaatatatatttgtatttcattttgttacagtatttttatatgttaaagtcaacatccagcgtcttgttttgcctttcagatgctatgtggtcgtggcacgttttgttgggggtttctgtagtcgtcttgtttggatcaactcctagaggctggtttagaacaggcccatgagggagctgcacctgccctggaagtattgttttagactatgtcgatattgtctgttgtcttccatgtgaacatgacattgagtcactctgcaaaaaaaaaaaaaag

SEQ ID NO: 6200 - DNA, 2490 bp, Homo sapiens
  misc_feature (2375)..(2375): n is a, c, g, or t
gccgggcacacacacacaaatatacatatatatcaaatatatatgtatatttgatagagatgatagcaattatgtgtgtgtgtgtgtgtgtgtgtgtgtgtgtgttagccaagtgtggtttctcacgcctgtagtcccagctactttggaggctgaagtgtaagagttgcttgagcccatgagttagaggctgctgtgagctatgatcatgccactgcactccagcctgggcaacagagcaaaaccccatctctaaataaaaaaaaagaatcgtgagacatcatgtaatccaacctcttaatgttacagataagtaaactgaggcccggggagatatagtaatagtcccagtgtcagtaaactgggtcttgaacttaaatgtttgtttcagttctcattgccttcatctcttaattgtcggcacttaaggccaaccaagcagcttagacagcgcagtccactcaacggtaactttatttgctatattgacaatctgctctgttctgtaatatagaacattggatcaatctttatctttttgctgacttaaggaggctgctattgttgcaatatccagagatttcaagttctagccattgcggggtctttgtggtgttttcaatttctcctctctccacccctgcccccatctgtggccatctaagttagcaatacaatttattttggccatttaaaatttttctgcctttgttttatttcttcccaaatatatttgaaaatgaatgatctatatagctgattttctgaccacatatataattgcaatttttatttgctcttcaaactattacaacatttttgtccttataaggttttttgggcagataatgcgaggtctgtggtgttaccttttatatactcctattaccttatgtttgtgaagcattttacattttacagagcactttgattcatctccctatttgttcatttatttaactgatcagttcactgaaatatttattgaacacctactggaaccaagtgactgtgctagtaacttgtgatatacagtagtgagagtccaggcatgtaaccgatcattatagtacaataacatccctaaaccagactttacaagtagataggatcaacaatactctatcaattttcaactccaattttctattctacttaaaatgggaactagaaactgtttgcctgaagaatgtgtctgaaacataatatatcactgcatgtctgtgctgtagacctgttaattttatctgtgagaaaaaaagttactcaaaattctccctgacctaagaatactttctagttcactgcagtcttactgaccagatgcaacagttgaagtttgatttctcgacccaatatttctattgggttttgaattattaatatcactgttttgaggtattcagaaacaccagtgtatcaaaaaagcatttgcactttaggtgtgtgtggtggttatgtcatttattagaccatcccagacataagacaatcagggaaatcagaaaactccagcctcaaatgtgtctataatttcctgttctaccattgtcatatcataacatggtattacttcttaaggttttgattaagttgatctagcctcaacttaaattgtaatacatctgcctaattattgtctggaataacttttcaaccatccaatgcccactgctctcacaatgattattgtagagaagtaaaatggtaattattcaagtaaagtcacataatttctggagtcagtttttcatatcaagtttatggaatacatcatcattggcttcttcataatatatttattatgagtgaccaaattttgcctggaggagcaaaatgctcaaaacttgttattataggttaatttccagctcactgttgacactgaaagattctgtgttactttaaacccaggataaaaggctggaaaaaaaaaattaaatgtaagtcataaactagtactcagcttttcctagtttctaaggcttattaacatttgcaaattactcaataaatgtctttcataatggaataacataaaagcttttgatttggcagatagtgatattttatttattttcattctggttggaaaaaatctcagtggcttctcttcattccacgagaattttgatttttaacagcagtctctctttttctcagcattgcaaatatatatgtatatatacattcatgaccaaagtatcgcttactgaccatgcagctgtaaaccttctgtgcctatcaaacaaatacatagcatgaaactaattttagaagtttcatgggggaattttaggggaaagtataaacctaagagtgagtgaatggagatgattcatggaaaaaaaaaaaaaaaaaaaacatgtgctatnaggcagagttattaacttcttttagttgttgtttgagatggggttctgctcttgttgcccaggctggagtgcagtggcgtgatctcgtctcgctgcaccctccgcatccaggttc

SEQ ID NO: 6201 - DNA, 3789 bp, Homo sapiens
  misc_feature (2746)..(2764): n is a, c, g, or t
  misc_feature (2909)..(2928): n is a, c, g, or t
  misc_feature (2970)..(3372): n is a, c, g, or t
  misc_feature (3374)..(3384): n is a, c, g, or t
  misc_feature (3386)..(3456): n is a, c, g, or t
  misc_feature (3458)..(3494): n is a, c, g, or t
  misc_feature (3496)..(3504): n is a, c, g, or t
  misc_feature (3506)..(3511): n is a, c, g, or t
  misc_feature (3514)..(3528): n is a, c, g, or t
  misc_feature (3530)..(3542): n is a, c, g, or t
  misc_feature (3544)..(3546): n is a, c, g, or t
  misc_feature (3548)..(3548): n is a, c, g, or t
  misc_feature (3550)..(3550): n is a, c, g, or t
  misc_feature (3553)..(3555): n is a, c, g, or t
  misc_feature (3557)..(3559): n is a, c, g, or t
  misc_feature (3565)..(3565): n is a, c, g, or t
  misc_feature (3570)..(3570): n is a, c, g, or t
  misc_feature (3574)..(3574): n is a, c, g, or t
  misc_feature (3586)..(3587): n is a, c, g, or t
  misc_feature (3599)..(3600): n is a, c, g, or t
  misc_feature (3615)..(3615): n is a, c, g, or t
ttcccaggctggaaggattaaggtgggccagttcaggcccacccaccaggcatccggcctccagcaccgggggaggacacacctacccccgtgtggccttctctcaaatctggtggcatctgcgcccgtgagtgacctcgttccttggctgcactgcactgtgggtggtgagacgcttggccttttttgttgctgccaggacttggtagagatggcagaagggttacggggtggttgtgtgcagaaccctgccgccctgaggtgagcagaggcactggtgtgcctgccaggctggggcggagctgcccggaacccttgccaggccaatgtgtagcttggtggcgcccttgaaggccactggggggtaggtgtgtcctcccccggggctggaggccgggtgcctggtgggtgggcctgacctggcccacctcatccctccagcctgggatctcactgctctgcacatgtgcactgacgtgaattttatacgtttgtagaaactctgatgtaacttcttctacctctgaagcgccctcctgggccctgctgtcacgtggctggtgcggcttccccgagtgctggccccctgcccgctccccatgggcacccaccactcaaactctgcgtggtgaggcccggggaaagccaggccgggcctagcactgctcaggggcctggggctcctgggatttctgtgtgtttggaagcctctgtttttggagtggggggcgtggaaggcgggaggggctgacagtgcctggggccagagctgggcgaaggaggacatcctcactggacgagcactgcaggcctgacgagaggctccgggcagctgagggctgaagcgcctcgggatgccccacactgcccagagccacgggtcttgctgtgctgggggtggggtggccccaggcagctgccactgcccaggtgtgagtcgctgcagacctggtccctgagggtgggaggcctgcttgtgctgaagctgccatgtggtctggcccccagaagggctcctgagcgtagggagttgagccccgcagccgtggcggcatctcctcctccttcctccgccccatgcccagccttgcttccggctggtggcatgccttggggccgggcagcaggtgagaagctgcccccggagggaggggccaagggctgggtcagtctggcctgaggggtggatggctggccctgggggaaggctgggcctgggaggccctgtggacagcaggcctgaggccacgaggtcctggggccacccctctcctgctctgggtgtccttctcagagaagatggcagaaggctgcaggccctagaggggacgacgggctggggacgccctgagcttcctggctgtgtggcaggtgctggggaagctctctgggccatagggacctggctcccctctgagaggcccgcctgccctggggcacccagggctgtgctggtggcctgaggctgggaacttgggttcctgggctctgctggcgcctgggctttgtgggggccgaaggtggttgccccgccgggcagggggctgtgtgggccctcgtggggccaccttcctgtcagtgcccgagggacggtgggacagttgcccctgcgccaagggagcccactgccatcccccgtgggctggcgctgcagtcgcgcaccctgtgttgcctgctgacttgcttatgtctgtttggaagctgcttctgtttggccacaggcctgtgttcctgggctgatggccacagagctgacacttggggtttgagttccagacttgcagaccctgggatccgcttactcctccgcgccacggctgctgtgcttccagaggtggcgtgatgcctcccggggccacggtggggtgaaggatggcgagccggacataccattgttggatgtattttttttaaaacagcaataattagccattttaaaggagggatgtacctgtgtgtgtgcatgtgcacgtgtttgagcgtgtgtgtgtgtgtgcaagtgggttcttggatatgtgtagtgtgagcatgtgtgcatgtgtgagcctgtgcacgtgcatgttgtaggtgcataagcatgtacacgcgtgagcatgcatgtgcgtgtacacgtgtataggtgtacatgtgcatgagttgtgtacatgcgtgagcacgtgtatagatgtacgtgtgtgtgcgcatgtgtgcgtgtacatgtgtttgtgtcttgggtatgcataagcatgcacgtgtgtatgaatgtgcgtgtgtatgcatgagcacgtatgcatgtgtgatgcgcatgttcttgtgtacttctctgagggggcacatatgtatgagtgtatgagtgcatacatatgcatatggtgtacgtgtgtgtactttgtgtgtgggcatgtatgcgtatgagtacttgtgtgtggctggtgtatgggtgagcatgcacatgtgtatggatgcatatgtgagctgtacatgtagagtgtacatgtgtgttgcatgagcatgcatgcgtgcgagtgcctgtgtgtgtacttgcatatatgtggctgtgcaggtacccggcggtggtgggctggcagtgcccggggaagcaggtcctgctcacggcttccctgctgggccccaggccccgggctgagcctccctggcccctcttgcccctcagtggagcagggcctgggtggagggcctgggcagctccagggcaggtccggggaggccaggcttggggagcacagggggtggggttcacctgctnnnnnnnnnnnnnnnnnnntgtactgtgagcccacggcgggggcagattgttctgaggccccagatgtgccaaaacagcccccagggtgggggcgagcgagttctgaggagaggggctgcgggggccgggggtgggtgtgtgcccctcccctgaatggcccccnnnnnnnnnnnnnnnnnnnnaaaccagagttgaaggcaaaaaaaaaaaaaaaaaaaaaaaannnnnnnnnnnnnnnnnnnnnnnnnnnnnnnnnnnnnnnnnnnnnnnnnnnnnnnnnnnnnnnnnnnnnnnnnnnnnnnnnnnnnnnnnnnnnnnnnnnnnnnnnnnnnnnnnnnnnnnnnnnnnnnnnnnnnnnnnnnnnnnnnnnnnnnnnnnnnnnnnnnnnnnnnnnnnnnnnnnnnnnnnnnnnnnnnnnnnnnnnnnnnnnnnnnnnnnnnnnnnnnnnnnnnnnnnnnnnnnnnnnnnnnnnnnnnnnnnnnnnnnnnnnnnnnnnnnnnnnnnnnnnnnnnnnnnnnnnnnnnnnnnnnnnnnnnnnnnnnnnnnnnnnnnnnnnnnnnnnnnnnnnnnnnnnnnnnnnnnnnnnnnnnnnnnnnnnnnnnnnnnnnnnnnnnnnnnnnnnnnnntnnnnnnnnnnntnnnnnnnnnnnnnnnnnnnnnnnnnnnnnnnnnnnnnnnnnnnnnnnnnnnnnnnnnnnnnnnnnnnnnnncnnnnnnnnnnnnnnnnnnnnnnnnnnnnnnnnnnnnncnnnnnnnnncnnnnnnccnnnnnnnnnnnnnnntnnnnnnnnnnnnncnnncncnccnnncnnncccccnccccncccncccccccccccnnccccccctcccnncccttcccccctccnttccttttcccccccctcccctctcccctcccttcctctctctccctcctccttcttttttcctttctctcccctccccccctctcccccccttcttcccttctcctcctctcttctttttttccttcttcctcttctccccctcctctctctccctccgttcccttcctcttt

SEQ ID NO: 6202 - DNA, 4435 bp, Homo sapiens
  misc_feature (1494)..(1517): n is a, c, g, or t
  misc_feature (2403)..(2419): n is a, c, g, or t
cggccgcaagcgagcccgaggcgcggcggggcgcggggcgtggggacgctagcgggcgcgggacgggcgcggcgccccgtcacgggcagcgccccgaaccggggccggacacctcggccgctcgggccgcggcggcggggaccatgccgaagaaagtctcctgagcccggcaacttcggcccctccccgcccccacccggctgccctccgcgcggccctcccatgtgcagcccggccagccgggctctcctcctcgcggcggatgggtgaccttttcctggcacgggcaggctgtgggaggcagcggagcaggcgatgaagaagaagcagcagcatcccggcggcggcgcggatccctggccccatggggcccctatggggggcgcccctccgggcctgggcagctggaagcgtcgggtgcccctgctgcctttcctgcgcttctccctccgggactacggcttctgcatggccaccctgctggtcttctgcctgggctccctcctctatcagctcagcgggggaccccctcgcttcctgctcgacctgcggcagtacttgggaaattccacttacttggatgaccatggaccacctcctagtaaggtactacctttcccaagccaggtggtgtacaacagggtaggcaagtgtgggagccgtactgtggtcttgcttctgagaatcttgtcggagaagcacggatttaatttggtcacatcagacattcacaacaaaaccaggcttactaaaaatgaacaaatggaactgattaaaaatataagtactgccgaacaaccctatttattcactcgacatgttcatttcctcaacttctcaaggtttggaggagaccagcctgtctacatcaacatcattagagaccccgtcaaccggttcttatccaactattttttccgtcgctttggagactggagaggggaacaaaatcacatgatccgcacccccagcatgaggcaggaggagcgctacctggatatcaatgagtgtattcttgaaaactatcccgagtgctccaaccccaggttattttacatcattccgtacttttgtggacagcatcccagatgcagggagcctggtgaatgggcccttgagagagcaaagctgaacgtgaatgaaaacttcctgctcgtggggattcttgaagagttggaagatgtgctgctgttactggaaagatttttacctcattacttcaagggcgtgctcagtatctacaaagacccagagcacaggaagcttggaaacatgactgtgacggtgaagaagactgtcccctctcctgaggctgtgcagatcctctaccagcggatgagatacgagtacgagttttaccactacgtcaaagagcagttccacctgctgaagcgcaagtttggacttaagtctcacgtcagcaagccccccctgaggccacacttctttatcccaactccactggaaaccgaggagccaatcgacgatgaagannnnnnnnnnnnnnnnnnnnnnnnagatatttataagaggtgatgtgactgtgttgcctctatggctttatctcccttttccagaaagttctttgtttggggaagtaaaatccttaagggactaaattaatgcttgggtgcattaaaaagaacaaaacattcccacatgttggggtcattgggagatgcccggttttgcgggttttatttgtttaattttattctgtgttttctcttggctctttgggtctttcccgggtacactagatggctccatcccaaggcatcttgtcataaaacagctttcccccaccccatatcatgggaaaagggggagaaatatagcccctagcctaataacttatcatttgtaaaatgacttataaaaatattacctcaatggtaggagacatccagacttgtatatttcagtggaaatacaaaaccacttcagagaccagggtatctcctctggaaggatctaagagaaggtaagacagattaggacatcgaaaaggaggatggagccaggtgccatggcttgagcctataatccgaggctgaggtgggaggatcacttgagcccaggagtttgaggttgcagtgagctgtgatcacaccactgcactccagcctgggtgacagagtgagactctgtctcaattaattttttttttttaaaggaggaggatctccatgggtaagtggtttctacccgcatgggtagagttctgcctctggtccttctcagggggcactttcaccaagagcagtgtaattatctctgaaagagcaagtcagcttgtgccgcatccccaaccaatccacagcctggagtacctttcaaggtcaaagtgcatggccagctccattgagacattccatttcaaagcaccgtgctgacagatannnnnnnnnnnnnnnnnggaaaataatttgtttgctgtgtaaggaagaatgtagacaagacagataaatctgaaggtcatgtggcatcagggaaagggcatggctgtgtcttttgcacccaatatgaaacatcttctcccaacactgctttaatggaagttctaggaaccaatttagctcaggcatttgactcctacagcagaagttctgagcctgaccacagatggtgtgtaatctatcaaacacacccctggccaagttgggtcctataggacctggtactatgtactattgtaacttctagttccctaagaggtacctgttttcagtaaaaaggggtcctgagttctgtgcaggtggaagagctacccgagaactacctgagttctgtgcaggtagagtcccatttcttatgggacctgtgtgctcctgagaactcttacttgagacatcaaaaagaagcagcaagagcttctgggacagagactgcttggccagctttgtaagtaagtggctgcctccaatgtgatgtgagtacatgttgggcagtctcactgtcctaaggtatgtcttctttccacctcccactgcccctcccctgccacctatcaatgatgccttggttcagtcattagaaatctgttgctttgagttctgaaatattttcaccttaaaaaaaatgctgaaaatacacattctcctgggaagacgataaacagctagctaagaagccgaggttcagtggtggcagcaggaaggacactgccacaaattttgtctatttcatatttgtcccctagagccagccctagcaaatgtgtgagttgggagtagttaatagtaaataagactctgactttacacaagctacacattttatacttttcataaaccacaaagtctctctagaattttttctgccttcactaaaattggactgtagccaagatataaagcaagtcatttggaacctgccgagtgagcactgaagctactttatcatgagatgtgtgttaagaaggctgcagcccacaggagtccagggaaggcggggaccacagaggcacagagtccagcacttggccgctcatgggccttctttctgcctcagaggacgggggcagagaagtgatgaagggaaatgttcttagaggaggaaatatcctttgtcctgttcagagagaccagggccctaccattaggcatactttcagaagcaacctggagaacagctatcaatcatattcaaaaccagtacaagaactgctgcctggtaccctgtgagtcatttctatgaaattccatataaagaatgatgataagtttacacactgtgcaatctcacaatctgaaaataaagttgagttggctgtgttttctctgctcttgtcagaacattgggacaattggtcgttcaaaaacattcatcctcttactgcaagtttatctgggtacttttacctgtgtgttcaaaggcatttcttttcagcagtgatcattataacttcacaaaaaaagatgctgacggatttacttacagggccttaatgttattttgtcccagccaacaccctctaggtcctaaaagtcaaggtacttcagtttatttggcaaacatgacaacatttttttggccctgggcccaacagtttgtacttcatgaaacatattgtacattttacatagtttaatttaaaaaataccttttaagctagttgatctttgactgtcttatttattataacctttcagcacattccaaggttttagttactcaggaaggagttaattaaaatgattttattttggtctgatggatgttttttaaaaggaaaattattattatgaaccttcagcctactttcttgagtgccgtaaaagtgcttgtaaatctttttttttttttaagaagaaagaaaaaaatggtgtttgacgttgatggaaattcaaaaatatatatggaactgaaacattaacttagctaaaataaaagcaatctgtgtttgaaaaaaaaaaaaaaaaaaaaaaaattg

SEQ ID NO: 6203 - DNA, 4560 bp, Homo sapiens
ctctttccgagaggcgtcctgcagccaggacggcaaccttcccaccctcatatccagcgtccaccgcagccgccacctcgttatgcccgagcatcagagccgcttgaattccagagaggcagcctggagattggcctgcgacccgccggtgacctgttgggcaagaggctgggccgctccccccgtatcagcagcgactgcttttcagagaagagggcacgaagcgaatcgcctcaagaggcgctgctgctgccgcgggagctggggcccagcatggccccggaggaccattaccgccggcttgtgtcagcactgagcgaggccagcacctttgaggaccctcagcgcctctaccacctgggcctccccagccacgatctcctgagggtccggcaggaggtggcggctgcagctctgaggggccccagtggcctggaagcccacctgccctcctccacggcaggtcagcgtcggaagcagggcctggctcagcaccgggagggcgccgccccagctgccgccccgtccttctcggagagggagctgcctcagccgccccccttgctgtcgccgcagaatgcccctcacgtcgccctgggcccccatctcaggccccccttcctgggggtgccctcggctctgtgccagaccccaggctacggcttcctgccccccgcgcaggcggagatgttcgcccggcagcaggagctcctgcggaagcagaacctggcccggctggagctgcccgccgacctcctgcggcagaaggagctggagagcgcgcgcccacagctgctggcgcccgagaccgccctgcgccccaacgacggcgccgaggagctgcagcggcgcggggccctgctggtgctgaaccacggcgcggcgccactgctggccctgcccccccaggggcccccgggctccggaccccccaccccgtcccgggactctgcccggcgagccccccggaaggggggtcccggccctgcctcagcgcggcccagcgagtccaaggagatgacgggggctaggctctgggcacaagatggctcggaagacgagccccccaaagactcggacggagaggaccccgagacggcagctgttgggtgcagggggcccactccgggccaagctccagctggaggggccggcgccgaggggaaggggcttttcccagggtccacactgcccctgggcttcccttatgccgtcagcccctacttccacacaggcgcggtagggggactctccatggatggggaggaggccccagcccctgaggacgtcaccaagtggaccgtggatgacgtctgcagcttcgtggggggcctgtctggctgtggagagtacactcgggtcttcagggagcaggggatcgacggggagaccctgccactgctgacggaggagcacctgctgaccaacatggggctgaagctggggcccgccctcaagatccgggcccaggtggccaggcgcctgggccgagttttctacgtggccagcttccccgtggctctgccactgcagccaccaaccctgcgggccccggagcgagaactcggcacaggagagcagcccttgtcccccacgacggccacgtccccctatggagggggccacgcccttgccggtcaaacttcacccaagcaggagaatgggaccttggctctacttccaggggcccccgacccttcccagcctctgtgttgaggttgccgggggtaggggtggggccacacaaatctccaggagctttttttcattttttttgccctgcctcccaccgctttatttctttcggtttcggatgcaaaacaaaaaattttaaaagaaaatgtgacttcaaaggaaaagaacaaatttccaaagacttgggggagtgaaggcagagcctggtgcagatggacgaggtctgcagacggagggcagaggtggtggaaggggccaggggcctgcaggcctccccctggaactgggactggtctcggtctgctgacgtcagggtcagctcccccgcggagctgacttcagcagcccacagctgtggggcttcagcagccacaccagcccagcccagcccagctctcgatacgtttggtctttcatgctgaaaaataaataataaagcctgtcccgtgtctactgcctcccccaactgcacagacgccagcctctaggcctgactgccagggaggtggaaacactggccaccagcccggcagcccctacaggccccccagatgggctgcctcagtcgtcctctgagagctgcagatcctccagctcgtcctccggcccctgggccagctgctgcagctccccaggggccagccccgcctctgcgtctgggtctccatcctccgagttgctgctgtcctcctcgccctcctcctcgtcctcttcatcgtcttccaccccatgccgagtgctcaggggcctcagtatccctctctccgagaatccctcggtgtcgtcctcttcagagctgttcaggtcaaagaggtctttaaattgcttcctgtcctcatccttcctgtcagccatcttccttcgtttgatctcagggaagttcaggtcttccagccgctctttgccactgatctccagctggatctcccggtcacgcagcttgcgccagtggctgtagtacaaggtcaagggtgtcccctcttcccgggtcagcttctcccaggcttccactgcctgctgctcagagacgccgaaggaaaccctctggcggcggctgcagatgtatgccgagttctcctgaaccttcccaagcagctgctgcacctgccggcagtagttggccaccttgcactcccggaggaacgacttcagctgcaggaccacaggcagcaccagctccgggaagccgatgcagtgtgcctggctgtgcaggtactccagggtgaggtcgtacagctgctccaccaggccgtcccggtacgccttctcctgcaggttgacattggacagcttcaggatcacggagaagttgatgggcttggagctcatgcgccctggcttcctgtttcctctgaagttgaccgccatctccaggatgaaaggcagcaccgggatgaaggcccccgagctccccgagagcagcgtcagggcacggatgcagtgcattcgcagcgggtagaagcgggcagtggggatgagcttgatacagccaatgatgacttgggcaagggggtagaccaagggctggagggcttcgctggggcccgcagtgctcaggacccggcaccacaggaagaggcagtgcacatactgccagttgtacacagactggtatgtttccttcttgcgggtggtcatggcgttgcgcaggtgtatggcgagctggcggatgtagaggaaggcgtgctggtaggccacacccggctccagggccagcagctccgtcaaggtccactgcatgaaactgatgaaggggagggcaccaggcgaggtgaacttgcagttcctcacatacgtgatgtacatttgcttgaggacggggccaaggaaagtgtccttcttgtgccggcagactctgctgaggaccaggaaagccagcacccgcagagactcctccccagtgctccatacgaccaccattctcttgagcagcatgcggcactgcttggggaaggtcaggaagcagggcaccagcacgctgatgtgccgcagcacggccgccaacaccgtcgtctccgacagacaggacaccagctgtatggccgagcccaggtaagccttgatgtccacacgaagcttcccccagagcgggctgctggacggctgcagcatcctgctgctatcctttgccacctttccaaacagcagcttctggagacagccaatgaggtctctgatgcagaaggtaaccagagcattgaatgcagcactgtccgtgacctggaatttgttggcctcagcactttcctggtcccctcgggtggtggccacagctgctcggaacgcctgtaccacttcatggaacagctttggagtgaggcgttgctttgctgcctgcttccatctctcaaccatggcgacggtcacaggaacagaattcttcttccccttcagccctctggggactctgtccccatcttctccttcctccgctccatcctcctcctcactggcttcctccagcacatctggcagggagtggaacggcccctcttcctcctcagagctgtccgagtcgctgaagtttagcaggctctggtcattctcctgcaggaacttgtagaactcggggtctctgtccttcagccgagagagctggtctttgtgctcagaggcacggcctttacgccggctggccgaggggctcccgcccggcttatccggactccgggcagcctcgcgtgcttcccgtgtctccgcttgtggagaattttcggactcggattcggactcggagtcaaagcccgaagctaggaactcgtccaccgtcagctccgccaggcgcctcttgcggctccccgcagctgccatgacaccaacccgacccgtgcaccccacttccggtcgccagacatgccgcccgct

SEQ ID NO: 6204 - DNA, 5171 bp, Homo sapiens
catttgaatattaacatttgaggtgttctgaccagaagaagacagagcggatgatcattcattcaccacgttgacaacctcgcctgtgattgacagctggagtggcagaaagccatgagatttggtagttgggtctgaggggcgctttttttttccttttctttctttctttctttttttttttttaaactgatttttgggggagagaagatctgcttttttttgcccccgctgctgtcttggaaacggagcgcttttatgctcagtgactcgggcgctttgcttcaggtcccgtagaccgaagatctgggaccagtagctcacgttgctggagacgttaagggatttttcgtcgtgctttttttttttttttttttttttccgggggagtttgaatatttgtttcttttcacactggccttaaagaggatatattagaagttgaagtaggaagggagccagagaggccgatggcgcaaaggtacgacgatctaccccattacgggggcatggatggagtaggcatcccctccacgatgtatggggacccgcatgcagccaggtccatgcagccggtccaccacctgaaccacgggcctcctctgcactcgcatcagtacccgcacacagctcataccaacgccatggcccccagcatgggctcctctgtcaatgacgctttaaagagagataaagatgccatttatggacaccccctcttccctctcttagcactgatttttgagaaatgtgaattagctacttgtaccccccgcgagccgggggtggcgggcggggacgtctgctcgtcagagtcattcaatgaagatatagccgtgttcgccaaacagattcgcgcagaaaaacctctattttcttctaatccagaactggataacttgatgattcaagccatacaagtattaaggtttcatctattggaattagagaaggtacacgaattatgtgacaatttctgccaccggtatattagctgtttgaaagggaaaatgcctatcgatttggtgatagacgatagagaaggaggatcaaaatcagacagtgaagatataacaagatcagcaaatctaactgaccagccctcttggaacagagatcatgatgacacggcatctactcgttcaggaggaaccccaggcccttccagcggtggccacacgtcacacagtggggacaacagcagtgaacaaggtgatggcttggacaacagtgtagcttcccccagcacaggtgacgatgatgaccctgataaggacaaaaagcgtcacaaaaagcgtggcatctttcccaaagtagccacaaatatcatgagggcgtggctgttccagcatctaacacacccttacccttctgaagaacagaaaaagcagttggcacaagacacgggactcaccatccttcaagtgaacaattggtttattaatgcccggagaagaatagtgcagcccatgatagaccagtccaaccgagcagtaagtcaaggaacaccttataatcctgatggacagcccatgggaggtttcgtaatggacggtcagcaacatatgggaattagagcaccaggtaagactttgtttttgtggtagttcctcatttttgactccaagagtgtcatcccctcatcaacacaggtaaatccgcctcatccttttctgttatctcaagctggctgccttgccttgtctgctatctgtgcatctaagatattgcagaggggaagccaggatctttatgcactgaagatctcactatttctcaaccctctagatcctgttttttttttaagggtcttttggcactatctgttgactttgctcattttctggcctcttcttggatttttatctcccttctaggacctatgagtggaatgggcatgaatatgggcatggaggggcagtggcactacatgtaaccttcatctagttaaccaatcgcaaagcaagggggaagtaagtacaaatggggtctttgttttcactttgtcctgggaatatttttcctcttgcattttcttatgttctccttgcccatagcttcatgcttgttcattcctttccattaaactcctggtttcttgcttccatcattttctttttggttgtgatcaaagctttaagcttataaatactgtgtatgatgtacatttatcctgtgtgttgctattgtacagtactgaccacatgacaaaacaagaaacagtcaggaggtgggggagtgggttgtcatagcaacagactgatttgcaaaatgtaagcagtctgcagcagtgcaaggagaggaaagagcatgtccccaaagtgtcataaatctgtctaaccgcagttgatgcatgagttacatttctacactaacctgcaagacaccgaaaagctaaacggagacttcttttaggtaaaataaacacaagctttacttagggtaagtaaaggcatattttgagctccagtcaactaaactttgattttttttcttagtttattcctttgtctgtccatcataatgggattacgtgtggcaatgggaaaagggagaatacaaaatagaggtgtgcacagcaggctgcggggcttagcccaggctaattgactatatccaaattaagtatgccatcacttgcagtgtgacaaatggatttgacttattcagtatacaaaaatagagatcattaatgcaatcttcagtggcaggcctagtgaagtgggcctaggaaaactgtcccagattctcactcttgcattttctctcctataaagacactccagcaattcgagttcaaacaagtaaaactgttttgaacaccaaggctcttattcacttcctaaattacccctaatagcactgttcttgctttgtttttgaaattaaaagcagttatttcagagtcttgcttgtgtctctgattatatttatgcactatttaaaatcactgctgaggccaggggtaattcgtactggtcatcttctctgggtgtgagtcaaatataagtttaacaattagctctgaaaacattccattgagctggggaatgcaacagtcttattacctcatcatggaattctctagcttagttaatttaaatattgtttcttagtttctgggtcaattaaatttaaatgatgtagtttatgcttcgtgaccaattaaattactaggttattacaaaaaaattatcatcttttttgattaaagagctgtgggtacagtatattttataagcaattttcattagttcaaaaatgttcctttaggctagattaagcagccattcattgttagagcctggagaccttattcgaaggtgttcatcgtattcacagtgcactattacttagaactaaagccaattgaacctacttagcaatagcgttatgcctttcacccttgatgattatggagcttatagctctcagaaacaatacacctgtcagtttccatcaactatagcaatccatgcagaagacaagaggccccctcaaagcaggaggggtattgttttaggtccaatttttcttattgttctcaaaatcattataaggtggacagtgttttgtgaagattttcttttccccagctctaagaaaccatgtggaaagaattcattgataactgttttgatttttttctttttttaagtacaggttttgctaagtaatcacccttagtgagcctgtgtagttcagctgcctgtgagatgtttggtgaccagctcagtgtattcttgtattcttgatagagaatatttcaggagacaaaagtgcttcttcagaccagacctcaaataacaattttattctttttaataaataagacctcagtaggcggacctgataacagtgacaatgaaaggaaaatagtggcaaaatgtgagtttccagcatgatgtttctcattttattttcttctgtatgaatcaaaagaatgctttacaaaaccatgttcccttaatcacagtgttctctggcttttataggattgtcatagccaggaccacactattgctttttcataacattttctttttgtttctttcttttgaatttcttacagggctgcaaagtatgccaggggagtatgtagcccggggtggtccaatgggtgtgagtatgggacagccaagttatacccaaccccagatgcccccccatcctgctcagctgcgtcatgggccccccatgcatacgtacattcctggacaccctcaccacccaacagtgatgatgcatggaggaccgccccgccctggaatgccaatgtcagcatcaagccccacagttcttaatacaggagacccaacaatgagtggacaagtcatggacattcatgctcagtagcttaagggaatatgcattgtctgcaatggtgactgatttcaaatcatgttttttctgcaatgactgtggagttccattcttggcatctactctggaccaaggagcatccctaattcttcatagggacctttaaaaagcaggaaataccaactgaagtcaatttggggggacatgctaaataactatataagacattaagagaacaaagagtgaaatattgtaaatgctattatactgttatccataaaaaaaaaaaacttatagattttttaaaaaaaatgtgaaatttttccacactatgtgtgttgtttccatagctcttcacttcctccagaagcctccttacatttaaaaagccttacagttatcctgcaagggacaggaaggtctgatttgcaggatttttagagcattaaaataactatcaggcagaagaatctttcttctcgcctaggatttcagccatgcgcgcgctctctctctttctctctcttttcctctctctcccctctttctagcctggggcttgaatttgcatgtctaattcatttactcaccatatttgaattggcctgaacagatgtaaatcggggaaggatgggaaaaactgcagtcttcaacaatgattaatcaggctgttgcaggcagtgtcttaagggagactggtgggaggaggctgggaaaccaaaaggccgtgtgtttagaagcctaattgtcacatcaagcatcattgtgccctggaaacccccctttattccttcctgtttgtgcggctaacatgacggagtttccttggctttctcgcccccgccgtg

SEQ ID NO: 6205 - DNA, 6654 bp, Homo sapiens
  misc_feature (2740)..(2759): n is a, c, g, or t
  misc_feature (3084)..(3109): n is a, c, g, or t
  misc_feature (4758)..(4790): n is a, c, g, or t
  misc_feature (4852)..(4866): n is a, c, g, or t
gacccatgcggcagccgccctgctcccgaaggcgccggggccggcccagagcagggccactcggccggcggaggcggctggtgccgccactgccacacgaagctggtggagctcaagcgacaggcgtggaagctggtcagcgggcccgggaccaccctccgggatccttgcctctctgccctgcttctcgacaagctaccagcacctggggccctgccagcctgtcgcccagaggccgagcgccgctgtgacgtctgcgccacacacctgcagcagctcacacgggaggccatgcacctgctgcaggcccctgccagccatgaggaccttgacgccccccatggaggccccagcctcgcaccccccagcaccacgaccagctcgagggacacgccaggaccagcgggtcctgcagggaggcagccaggacgagctgggccagacaggaccaaggggctggcctggtcccccgggcccagtgtccaggtgtctgtagcacctgcgggtcttggaggggcgctgagcacggtcaccatccaggcccagcagtgcctggagggcatgtggagtgtctcgcgggtcaacagcttcctcccgccggcgtgcctggccgaggcagcggtggcggccgtggcggtggcagacacggtccgagaatgcccccccgtggccggccctgatggcttgtcgaaggcctggggccgtggtggagtctgcacgtcagccctggtcacccccaccccgggctcggtggggggctccacaggcccctcagctgcagcctccttcttcataagggctatgcagaagctcagcctggcctccaagaggaagaagccccacccgccaccgcctccagccacccgcggcacctccacctaccccaccgacttcagcggggtcctgcagctgtggccgcccccggcgcccccctgcctgctcagggccgcctccaagaccaaggacaaccctggcagcatcgggaaggtgaaggttatgctgcggatctggcccgcacagggggcccagcgctcggccgaggccatgtccttcctgaaggtggaccctcggaagaagcaggtgatcctctacgatcccgccgccggtcccccaggcagcgcaggcccccggcgagccgccactgctgcagttcccaagatgtttgccttcgatgccgtcttcccccaggactccgagcaggccgaagtctgctcggggaccgtggccgacgtgctccagtcggtggtcagtggggctgatggctgcattttttcctttggccacatgagcctgggcaagtcgtacaccatgatcgggaaggacagctcaccccagagcctgggcatcgtgccctgcgccatctcctggctcttcaggctcatcgaggagcgcagggagaggacgggcacccgcttctccgtccgggtctcagccgtggaggtgtgcgggcgcgaccagagcctgcgggacctgctggccgaggtggcccctggcagcctccaggacacccagtctccgggagtgtacctgcgggaggaccccgtgtgtggggcgcagctccagaaccaaagcgagctgcgggcacccacggccgagaaggcggctttctacctggatgcggccctggcggcccgcagcaccagccgagcgggctgtggcgaggacgcccgacgcagctcccacatgttgttcacgctgcacgtctaccagtaccgcatggagaagtgcggccggggaggaatgtccggaggccgcagccgcctgcacctcatcgacctgggcagctgtgaggcggcggctggcagggccggggaggctgctgggggtcccctgtgtctgtccctgtcggccctgggcagcgtcatcttggccctggtcaacggagccaagcatgtgccgtatcgggaccacaggctcaccatgctgctgcgtgaatccctggccaccgctggctgccgcaccaccatgatcgcccacgtgtcggatgcgccagcccagcacgcagagacactcagcaccgtgcagctcgccgcccgcatccaccgcctgcgcaggaagaaggccaagtacgcctccagctcctctggcggggagagctcctgtgaggaaggccgggcccgtcggcccccgcacctgcggcccttccacccacgcactgtggccctggaccccgaccgcacgcctccctgcctgcccggtgaccccgattactcctccagcagcgagcagtcctgtgacacggtcatctacgtggggcccggtggggcggcgctgtcagaccgggagctcaccgacaacgaaggtccgcctgacttcgtgcccatcatccctgccctgagccgccaccggccctccaagggtccccgagacgcagaccacttccgctgcagcaccttcgcggagctgcaggagcggctggaatgcatggacggcaacgagggtccctcaggaggtccaggtggcaccgacggagctcaggccagccccgcccgagggggccggaagccctcgccaccagaggctgcatcccccaggaaggccgtgggcaccccgatggctgccagcacccctcgaggcagttctggtccagacacccaccagggtacccctgagccctgcaaggccattgtctggggtgaccagagagaggacagcagcgcttggcctgagctgctggtcccggaaaaggctgcagtgagtggaggcaggaggccactgcccagcccggctcccccacctnnnnnnnnnnnnnnnnnnnncagagccccagaagagcctgggggagggggcactgatggagtggcacggacccctcccgtgggcatgagtgggcaggtggctgggtccccgatgcttcctggggccacctgcccccgcctggctgctggcagtcgctgtccggagcggggcctgctcaccaccacagtgaccctgcagcggccagtggagctcaacggcgaggacgagctggtgttcacggtggtggaggagctgtccctgggggcgcttgccggagctgggcggcccaccagcctggctagcttcgacagtgactgctccctgcgggccctggcctcggggtcnnnnnnnnnnnnnnnnnnnnnnnnnntcaatgatgagtttgacgcctacacctctcaggcccctgagggggggcccctggagggggcagcctgggccggcagcagtcacggctcctccatcagctcctggctcagcgaggtcagcgtctgcactgccgacagccgtgaccccacgccgcagccccgcttcagccccgactcgctggcagggcttgaccctgggggcccccctgccctggatggttccctgggggatggaagctctgggttcctggggccagacagacctgacagtcctgggccaacctggggtccgtgccctggggaagtggctgcagtggccccatcccgacccggcagggagccccaggccgggccctcgcggtgggcatccgcagcccagaccatccactccagcctcccccggaaaccgaggactgcctctgccaccacccgtgtgggctgtgctcgcctgggccagagcccacctggccgtggaggcctgtttgaggacccatggctgctccgggtaggggagtgtgatacccaggcagcttctgctggcagggcccccagccccacacttggctccccccggctgcctgaggcccaggtgatgctagcctgtgcccagagagtggagagagagagagaggtggcagccagggcggcccgcaggccagaggctgtggctcggatcccaccgctgcggaggggtgccaccacgctgggtgtgacaacgccagctgtgtcctggggagatgctcccacggaggtggtggcctgctcggggagcctgaaggcctcccccaccagcaagaagggtctggctcccaaggcgggcttcctcccgaggcccagtggggcggcccccccggccccacccacgcggaagtccagcctggagcagaggagcagcccggcctcggcccctccgcatgctgtgaacccggcgcgggtcggggctgctgctgtccttcgaggggaggaggagcccagacccagcagccgggctgaccactctgtccccagggccacgtccagcctgaaggcccgggccagcaaggtagaagcagcacaccgtcttgccggacacgcgtctctggagcggtacgaaggcctggcgcacagcagcagcaagggccgggaagcccctgggcggcctccccgggctgtacccaagctgggtgtgccaccctccagccccacacacggtccagctcccgcctgtaggagcggcgcagccaaggctgtgggggcccccaagccccctgttggtggaggcaagggccgtggcctagtggctggtgggtcgcgggctctggggctttcggtgaagctgtctacggcctctgtgacgggcaggagccctggcggccctgtggccggtcccagagcagccccacgggccgggcccagtgtcggggcgaaggctggccggggtaccgtcatgggcacaaagcaggcgctccgggctgctcacagccgcgtccatgagctgtcagccagtggagccccgggccgaggtggctcctcgtggggctcggcggactcagacagcggccatgacagcggcgtgaacgtgggggaggagcggccacccacgggcccggccctgccctccccctacagcaaggtgaccgccccacggcggccccagcgctacagcagcggnnnnnnnnnnnnnnnnnnnnnnnnnnnnnnnnngagagctgccgcccgccatgggccgcaccgcccttttccaccacagcggtggcagcagtggnnnnnnnnnnnnnnngcgcgacagcgaggccaccggcagcgcctcttccgcccctgactccatgagcgagagtggggctgcctccccaggcgcccgcacccgcagcctcaagtcccccaagaagagggccacaggtctgcagcggcggcgcctgattcccgccccactgcccgacaccactgccctgggccgtaagcccagcctccccgggcagtgggtggacctgcccccgcccctggctggctccctgaaggagccgttcgagatcaaggtgtacgagatcgatgacgtggagcgccttcagcggccccgccccaccccgagggaggcccccacccagggtctggcgtgcgtcagtacaaggctgcggctggcggagcgcaggcagcagcggctgcgggaggtgcaggccaagcacaagcacctgtgtgaggagctggccgagacccagggccggctgatgctggagcctggccgctggctggagcagtttgaggtggacccggagctggagcccgagtcggccgagtacctggcggccctggagcgagccacggcggccctggagcagtgcgtgaacctgtgcaaggcgcacgtcatgatggtcacctgcttcgacatcagcgttgcagccagtgctgccatcccggggccgcaggaggtggacgtctgaggctgggcgccggacaagaggagggggcgtgcagcgggctggaggacgggacgtgggacggagcgaggatgtggtgggggctgcggggggaggatgcggaggggtttctgtgcaggacgggagtctcagagaggagacggagtgtgggggagggagggccggccacgcggtggacagagcgagggtgccagggtgacccgaagaccgtcaccacccgacagcaacgcaagtgcctttgaccttgatttggacttttctcccttttgcatttggtgctacagacttgagacaccagcagaagttgtgttcagcccggccccgctgcgcctgtccgggccggggctggcgccggttgtgtttgtgtccaccttgccttctttgcagccaagcagtttttgtggagtgggacttacctgcacgccccaggggtctttcaggattcaggatgacttttcttttacaatggtttcctctcggcagagcccgggttgtgggggatctgtgtggggttctcaacgcagatccatcctggggtctcccgggcagggatggctgacctcgagtcccctcccttcccgagaacctgctctgtcccgagggcagctaacaagggctgagccccaggtacaggttgcctcttccacggcaggaatttttaccaaaaccacaagcaaaaaacaaaacagaccaccacgaccaacaacaaagatggggggtagggttttgtaaaggttctgttaggttcatatttttatatcattttgcccataaatgcggaatttgccgtgggaatttgaagacaaatgatctatgtttttatggttttctagggaaggtgttctgggggccgggctctctccagctgtgggaggcctgctccctctggggggcaccctgggcagggtgggggggccttgggaggcgcttcttgccaaatgcagacgaggggtgagcctgccagcgtttgcgacgtccccgcacgacaggctcataatttctgaggatcgtgcgtagcataggacgtctgaacctttgtacaaatgtgtagatgacatcttgctacagcttttatttgtgaattaaagatgcatcgatggttaaaaaaaaaaaaaaaaaaaaaaaaaaaaaaa

SEQ ID NO: 6206 - DNA, 2370 bp, Homo sapiens
  misc_feature (1256)..(1280): n is a, c, g, or t
gctcagggcacatgcctcccctccccaggccgcggcccagctgaccctcggggctcccccggcagcggacagggaagggttaaaggcccccggctccctgccccctgccctggggaacccctggccctgtggggacatgaactgtgtttgccgcctggtcctggtcgtgctgagcctgtggccagatacagctgtcgcccctgggccaccacctggcccccctcgagtttccccagaccctcgggccgagctggacagcaccgtgctcctgacccgctctctcctggcggacacgcggcagctggctgcacagctgagggacaaattcccagctgacggggaccacaacctggattccctgcccaccctggccatgagtgcgggggcactgggagctctacagctcccaggtgtgctgacaaggctgcgagcggacctactgtcctacctgcggcacgtgcagtggctgcgccgggcaggtggctcttccctgaagaccctggagcccgagctgggcaccctgcaggcccgactggaccggctgctgcgccggctgcagctcctgatgtcccgcctggccctgccccagccacccccggacccgccggcgcccccgctggcgcccccctcctcagcctgggggggcatcagggccgcccacgccatcctgggggggctgcacctgacacttgactgggccgtgaggggactgctgctgctgaagactcggctgtgacccggggcccaaagccaccaccgtccttccaaagccagatcttatttatttatttatttcagtactgggggcgaaacagccaggtgatccccccgccattatctccccctagttagagacagtccttccgtgaggcctgggggacatctgtgccttatttatacttatttatttcaggagcaggggtgggaggcaggtggactcctgggtccccgaggaggaggggactggggtcccggattcttgggtctccaagaagtctgtccacagacttctgccctggctcttccccatctaggcctgggcaggaacatatattatttatttaagcaattacttttcatgttggggtggggacggaggggaaagggaagcctgggtttttgtacaaaaatgtgagaaacctttgtgagacagagaacagggaattaaatgtgtcatacatatccacttgagggcgatttgtctgagagctggggctggatgcttgggtaactggggcagggcaggtggaggggannnnnnnnnnnnnnnnnnnnnnnnnagtgggcggggcagcgactgggagatgggtcggtcacccagacagctctgtggaggcagggtctgagccttgcctggggccccgcactgcatagggccgtttgtttgttttttgagatggagtctcgctctgttgcctaggctggagtgcagtgaggcaatctaaggtcactgcaacctccacctcccgggttcaagcaattctcctgcctcagcctcccgattagctgggatcacaggtgtgcaccaccatgcccagctaattatttatttcttttgtatttttagtagagacagggtttcaccatgttggccaggctggtttcgaactcctgacctcaggtgatcctcctgcctcggcctcccaaagtgctgggattacaggtgtgagccaccacacctgacccataggtcttcaataaatatttaatggaaggttccacaagtcaccctgtgatcaacagtacccgtatgggacaaagctgcaaggtcaagatggttcattatggctgtgttcaccatagcaaactggaaacaatctagatatccaacagtgagggttaagcaacatggtgcatctgtggatagaacgccacccagccgcccggagcagggactgtcattcagggaggctaaggagagaggcttgcttgggatatagaaagatatcctgacattggccaggcatggtggctcacgcctgtaatcctggcactttgggaggacgaagcgagtggatcactgaagtccaagagtttgagaccggcctgcgagacatggcaaaaccctgtctcaaaaaagaaagaatgatgtcctgacatgaaacagcaggctacaaaaccactgcatgctgtgatcccaattttgtgtttttctttctatatatggattaaaacaaaaatcctaaagggaaatacgccaaaatgttgacaatgactgtctccaggtcaaaggagagaggtgggattgtgggtgacttttaatgtgtatgattgtctgtattttacagaatttctgccatgactgtgtattttgcatgacacattttaaaaataataaacactatttttagaataacagaaaaaaaaaaa

SEQ ID NO: 6207 - DNA, 1726 bp, Homo sapiens
  misc_feature (1369)..(1369): n is a, c, g, or t
  misc_feature (1388)..(1388): n is a, c, g, or t
gggcgggcctagcgcgcccggacggagaccaccttgcggccgaccccgctcccccgtctcctcgggagagataaatgctgactccgctcggaaagttctcaactgcaaagtttgctgtccggctgcctagggtctgggaagctcgggcaccctccctctccggggctcctgctcccacccctccggcccccccaccgtcgcgctcctccaggctgggcctgtggccgcggtgctttttaattttcccccagctcagaatcttgctgctcggcccccaggagagcaacaactcaacgggaacgatgtggaaggtgtcagctctgctcttcgttttgggaagcgcgtcgctctgggtcctggcagaaggagccagcacaggccagccagaagatgacactgagactacaggtttggaaggcggcgttgccatgccaggtgccgaagatgatgtggtgactccaggaaccagcgaagaccgctataagtctggcttgacaactctggtggcaacaagtgtcaacagtgtaacaggcattcgcatcgaggatctgccaacttcagaaagcacagtccacgcgcaagaacaaagtccaagcgccacagcctcaaacgtggccaccagtcactccacggagaaagtggatggagacacacagacaacagttgagaaagatggtttgtcaacagtgaccctggttggaatcatagttggggtcttactagccatcggcttcattggtggaatcatcgttgtggttatgcgaaaaatgtcgggaaggtactcgccctaaagagctgaagggttacgccctgctgccaacgtgcttaaaaaaagaccgtttctgactctgtgccctgtccctgagctcgtgggagaagatgacccgtggaacacttgcctggcccactcagaatccacggtgacctctccgcttgccaaaataaccgaaggaaagaccgttcaccagacttggctcctctaaacatttgctgttcaaacatgtttttgaatatacattctataaaagattatttgaaagacaaaattcatagaaaatggagcaaaactgtataaactgatttgtaactaacactggaccattggatcgatattatatgctgtaaccatgaaaaaaaaaaaaaaaaaaaatgttattgttaaaatgcagaggaatctggaaatatttatatccacggagtccttggatccagtgctacgtcagtaaatagcaccagcattttgcaattgctgatctgctgaaatgtacacattctggtctagtttggtctatcttttaaagcctgatctggtgtgaataatccactaggaaatctaaacttggataacacgtgggtgaacaactgcctntagctggtcccagattaantcatttcaaagacatccatttttaaatcacaagcaggaaagtcgatagtctccaagggcactttgtttcctcccaagtagggccaccagggcagccttctagagttgcttttacccaaattccttcttccaagccttgaacttgggtgaactcctaaccttggctccccaacctggcccccttcccaattttcccctaaaaaaggaatagagggacccacagggccttaagggggggaaagccctttttctctcctttccccaagggggagggccaacttccttttccacattggggccggcgttttggggtctcggggaaaattatgggggatttcc

SEQ ID NO: 6208 - DNA, 2138 bp, Homo sapiens
ttacgtctaggtacgagcggatgggtgagggaagtaggtccgttggtcggtcgggaacgaggctcaggcggccaggcccgcgcggagccgttgccatggcagccgccgccggggacgcggacgacgagccgcgctcaggccactcgagctcggagggcgagtgcgcggtggcgccggagccgctgactgacgctgagggcctcttctccttcgctgacttcgggtctgcgctgggcggcggcggcgcgggcctctcgggccgggcgtccggcggggcccagtcgccgctgcgctacttgcacgtcctgtggcagcaggatgcggagccgcgcgacgagctgcgctgcaagatacccgctggccggctgaggcgcgctgccaggccccaccggcggctcgggcccacgggcaaggaggtgcacgctctgaagagactgagggactcggccaatgccaatgatgtggaaacagcagctgctggaagatggcgcggatccctgtgcagctgatgacaagggccgcacagctctacactttgcctcatgcaatggcaatgaccagattgtgcagctgctcctggaccatggtgctgatcctaaccagcgagatgggctggggaacacgccactgcacctggcggcctgcaccaaccacgttcctgtcatcaccacactgctacgaggaggggcccgtgtagatgccctggaccgagctggtcgcacacccctgcacctggccaagtcaaagctgaatatcctgcaggagggccatgcccagtgcctagaggctgtgcgtctggaggtgaagcagatcatccatatgctgagggagtatctggagcgcctagggcaacatgagcagcgagaaccgcctggaatgaacctccggcaccccgcctgcagatgaccagtaccaaagagcaggtggatgaagtgactgacctcctggccagcttcacctccctcagtctgcagatgcagagcatggagaagaggtagcaagagaggctccctgccttcctgccactgccccaccctgccccactgctgtctcagtaccaagaaaaagcccaacatctgggacttggagctgcacttgtctggtgaggaccttgccctcacccgcacatgccgtggggcagagatgctctctctccacggcctcagagccactcccagccacagtttccagcatctctgtggacagggaccacagctcccagcttcttccagttctcgcagcaccagaccagcctctgcagctgcacttcagctccgcagacctgcgctatctcagcagacctcacttgccccatggccttcatggcgcgctccaggcctcagacccttctctgtgttccgtcctggccatgggcttgttgcagtcagcaggtgtgggcttaggcgggcaccctgtggccaggggtactgcgtgaggccctcagttggtcctgtgcctctcaccagcacttagacagacacgtcaccagactttcaaggagatactgcagtgagtttctctggttggaaggggagggttggtgagtcccagaccttaaaaatacaaggttaagagggaccccaaagcaaaaaattccaacccttttcctcccagtcattgaaacaccaaaactattataccggagggtgtaatagttttgctgcccagttgtggtaggccagtagtggcctcccaagatgcccatgtcctaatcccaggaacctgtcaaaattaccttgtatggccaaaggggctttgcagatgtaatgaagttaaggatctttcgccaggaagattatcccagcttgttcaggagggcttgatgtcctcacccgggtctgtataacagaagagcaggtgacgggagaggaggttggaggtgtagcgatggagcaggaaactggagttgaggagggcagctcaagccacagagtccaggccacctcagagccaggaaatgcatcctcccacagagccctggaaggccccagccctgctcccacctggactggctcagtgaggctaattttataattctggctgattttagaactctaagggaataaatttgtgttgttttaagtcaaaaaaaaaaaaaaaaaaaaaaaaaaaaaaaaaaaaaaaaaaaaaaaaaaagg

SEQ ID NO: 6209 - DNA, 1772 bp, Homo sapiens
gcggccggtcgaccggagtggctgccctgcgcggggacactcagagcccggtgggcgggaggaaggcggcatgccccagacggtgatcctcccgggccctgcgccctggggcttcaggctctcagggggcatagacttcaaccagcctttggtcatcaccaggattacaccaggaagcaaggcggcagctgccaacctgtgtcctggagatgtcatcctggctattgacggctttgggacagagtccatgactcatgctgatgcgcaggacaggattaaagcagcagctcaccagctgtgtctcaaaattgacaggggagaaactcacttatggtctccacaagtatctgaagatgggaaagcccatcctttcaaaatcaacttagaatcagaaccacaggacgggaactactttgaacacaagcataatattcggcccaaacctttcgtgatcccgggccgaagcagtggatgcagcactccctccgggattgactgtggcagtggacgcagcaccccttcttctgtcagtactgttagtaccatttgcccaggtgacttgaaagttgcggctaagctggcccctaacattcctttggaaatggaacttcctggtgtgaagattgtacatgctcagtttaatacacctatgcagttgtactcagatgacaatattatggaaacactccagggtcaggtttcaacagccctaggggaaacacctttgatgaacgagcccacagcctcggtgccccccgagtcggacgtgtaccggatgctccacgacaatcggaatgagcccacacagcctcgccagtcgggctccttcagagtgctccagggaatggtggacgatggctctgatgaccgtccggctggaacgcggagtgtgagagctccggtgacgaaagtccatggcggttcaggcggggcacagaggatgccgctctgtgacaaatgtgggagtggcatagttggtgctgtggtgaaggcgcgggataagtaccggcaccctgagtgcttcgtgtgtgccgactgcaacctcaacctcaagcaaaagggctacttcttcatagaaggggagctgtactgcgaaacccacgcaagagcccgcacaaagcccccagagggctatgacacggtcactctgtatcccaaagcttaagtctctgcaggcgtggcacgcacgcacgcacccacccacgcgcacttacacgagaagacattcatggctttgggcagaaggattgtgcagattgtcaactccaaatctaaagtcaaggctttagacctttatcctattgtttattgaggaaaaggaatgggaggcaaatgcctgctatgtgaaaaaaacatacacttagctatgttttgcaactctttttggggctagcaataatgatatttaaagcaataattttttgtatgtcatactccacaatttacatgtatattacagccatcaaacacataaacatcaagatatttgaaggactctaattgtctttccttgacaagttgattttgcaattgtggtaaatagcaaataacaatcttgtattctaacataatctgcagttgtctgtatgtgttttaactattacagtgcatgttagggagaaattccctgaatttctttagttttgtattcaaacaattatgccactcgatgcaacaaacataataaatacataaaggatttaaaaaaaaaaaaaaaaaaaaaaaaaacattgaattcaaataaaatcaacatttcaatgagaaaaaaaaaa

SEQ ID NO: 6210 - DNA, 1163 bp, Homo sapiens
  misc_feature (341)..(375): n is a, c, g, or t
aatcatcttgttggccctgacctcgttggaaaacgaagctccccgcagggtcccggcctctagggctgctgtgcgggcgggggtggcctggagctatttccattcggcggcgggaacaggtgccggcgcctccgccccatccccaggggccgcctcccccggggcggcctccaggctgccgagacctataaaggcgccaggttttctcaatgaagccgggacgcactccggagcgcactgcgtggtcgcaccctacccgggctgccttggaagtcgtccccgccgcccctccgcaccggcatgaagctcatcgtgggcatcggaggcatgaccaacggcgnnnnnnnnnnnnnnnnnnnnnnnnnnnnnnnnnnnctgcccaactgctgcgtgatccatcaggatgacttcttcaagccccaagaccaaatagcagttggggaagacggcttcaaacagtgggacgtgctggagtctctggacatggaggccatgctggacaccgtgcaggcctggctgagcagcccgcagaagtttgcccgtgcccacggggtcagcgtccagccagaggcctcggacacccacatcctcctcctggaaggcttcctgctctacagctacaagcccctggtggacttgtacagccgccggtacttcctgaccgtcccgtatgaagagtgcaagtggaggagaagtacccgcaactacacagtccctgatccccccggcctcttcgatggccacgtgtggcccatgtaccagaagtataggcaggagatggaggccaacggtgtggaagtggtctacctggacggcatgaagtcccgagaggagctcttccgtgaagtcctggaagacattcagaactcgctgctgaaccgctcccaggaatcagccccctccccggctcgcccagccaggacacagggacccggacgcggatgcggccacagaacggccaggcctgcagcgtcccagcaggacagcatgtgagcgtttccctatgggggtgtctgtacgtaggagagtggaggccccactcccagttgggcgtcccggagctcagggactgagccccaagacgcctctgtaacctcgctgcagcttcagtagtaaactgggtcctgtttttttaaaaaaaaaaaaaaaaaaaaaaaaaaaaa

SEQ ID NO: 6211 - DNA, 1616 bp, Homo sapiens
  misc_feature (216)..(216): n is a, c, g, or t
ttttttttttttttttatcttgtttcagtgttaatcacagtgaaatatacttttcaggataacattttcaaatggagcaaatatcgttacagattgatggcatagcctttatttgccttgtcaacattatggcacgagggacttctgagatacaaatgtcagactgacagtagtgactcagaagcagaaattcaaaaaatgcacttgctgtaaatnctgctacactgcccagggcacttcttggtctgtatgtgtaacatgtattcagctattgtaaagtttctttaacagtcctggaagtactatgacagtaacaaggaagattgatagcagattccatgcctctttgttaatcacattaagaactctgcttggtactctttgatgttgtgtctggaaacatacatccccaccacaccatattgaaaactttcatcctattacccatctgctgccagcaaatgatcagtttaaaggcaaaaaatgggtgatgggggtgtgaaagtcaaagatttgccaagcataccgtttttctactactcattcttctaattaccttttgggaaatgagagaacctaaccatataacattttgaaatgtttccttagggaatctgaataatattttatgtagcttgagttacatgataatgacaagcatgtcttcaaacattagaattaaacccatggatgtggcatagtgcctgttgtttttcatcataagagtttatgataaaactgagtactggagtctgcagtttataaaaagatgtttccttctatttagctggaggagtttcttatactggtggattggttcccagcgcctacagtcagataaataaaaagttgcagcagggggaccaactagtagggagtacagtcagataaataaaaagttgcagcagggggaccaactagtagggagtacatttcatcggttggagagaggaaatttatttcttcaattactttagaacatctgcatgttacaaagaggaatgtgcattaacacaattaaccatttcttttttttaattgaattcatggattcattcctaagttttctaatcagttttgctctggtgtcataagttaagggagaatccataccaaactaattttcctgcataaagagattacttggataatagattttttccagtgcttttggaaatattgagtctaataaaataactctaacagagatacaattattcatatcagtaagttgttcatcagaaatatttcacaaagactagacctgaatctaaattggaggcaaaatcattcaattcaatagagcagttgcacttttctcatatagtaaaatgaccagttgcacctagtaaacagtacagcacaacccctaagtgcaggggatctggaggcaaaacatgagggtcaaagcctcactgtaccactttccagctgtgtaatcttgggaaagattcttcatctgtaaaatgatgcttaaaagctatacctgacttttaggattgttgtaaacattaaatttgtaaatgagaatgatcttataactgtacatgttaaccattgtttaaacctatatgaataaaattctagatgagtcaaaaaaaaaaaaaaaaaaaaaa

SEQ ID NO: 6212 - DNA, 2653 bp, Homo sapiens
gtctttactccgggtggcggcgaggacgagtctgtgctccatcagctgccgcacccgccgcctcccgcccccaaaccccatccccgcggttgagccacgatgagcggcagagtcggcgatctgagccccaggcagaaggaggcattggccaagccagaagcttcgacctgcagaagtcggaggccatgctccggaaggtgatccaacagtatctgtcagggggtatgtgtggctatgacctggatggctgcccagtctggtacgacataattggacctctggatgccaagggtctgctgttctcagcctccaaacaggacctgctgaggaccaagatgcgggagtgtgagctgcttctgcaagagtgtgcccaccagaccacaaagttggggaggaaggtggagaccatcaccataatttatgactgcgaggggcttggcctcaagcatctctggaagcctgctgtggaggcctatggagagtttctctgcatgtttgaggaaaattatcccgaaacactgaagcgtctttttgttgttaaagcccccaaactgtttcctgtggcctataacctcatcaaacccttcctgagtgaggacactcgtaagaagatcatggtcctgggagcaaattggaaggaggttttactgaaacatatcagccctgaccaggtgcctgtggagtatgggggcaccatgactgaccctgatggaaaccccaagtgcaaatccaagatcaactacgggggtgacatccccaggaagtattatgtgcgagaccaggtgaaacagcagtatgaacacagcgtgcagatttcccgtggctcctcccaccaagtggagtatgagatcctcttccctggctgtgtcctcaggtggcagtttatgtcagatggagcggatgttggttttgggattttcctgaagaccaagatgggagagaggcagcgggcaggggagatgacagaggtgctgcccaaccagaggtacaactcccacctggtccctgaagatgggaccctcacctgcagtgatcctggcatctatgtcctgcggtttgacaacacctacagcttcattcatgccaagaaggtcaatttcactgtggaggtcctgcttccagacaaagcctcagaagagaagatgaaacagctgggggcaggcaccccgaaataacaccttctcctatagcaggcctggccccctcagtgtctccctgtcaatttctaccccttgtagcagtcattttcgcacaaccctgaagcccaaagaaactgggctggaggacagacctcaggagctttcatttcagttaggcagaggaagagcgactgcagtgggtctccgtgtctatcaaatacctaaggagtccccaggagctggctggccatcgtgataggatctgtctgtcctgtaaactgtgccaacttcacctgtccagggacagcgaagctgggggtggcggggggcatgtaccacagggtggcagcagggaaaaaaaattagaaaagggtgaaagattgggacttaacacttcagggaagtcagctgccggggagaaacttgctcctaaatgaacacataagtttagatcgcaatgaggagtagcagggtagctggttgctagagttacggtggggatcagaaactcttccaaacattttagcactgaggctggggtagcttttggcttttcccaggtctcaggaggtggcctgagtcagcacacatcttcccactcggtacacaggctggcctctccctcactttgagactttggcaactcctgggccacacggcctgcctctttgattactaatgattgtcagtgactcagagcttcctgggacttcgggtacccacccgctgttctccatgcaaacaaagcgccagggaaatgacccacagggatcgcagctgcagggagggccagggaggttgggggtgggagtgaatgctaaaagcagatcgtccagtgcccttttcagtgctaccggcctctcaccaagcagtcctccatgtgagcaaccccgagacaaaaatgctaagtgggatcaagagagcagcactcggagagggtgtttgccagtctgagtgtcccgcggtgcccgccaacccgcttcctgactgacctgagcaaggtcttactaagcagtcccatctctgtgggaggcatgcaacgcgtgcagggagttcaggtgccggtcggcgtagccaggcctggaggccccccaggcaggaggccgcccaaaggcggggccggcgtctcgcagactaggggctgggggcggccacagacggcctcgaaaccacagcccttaccccaatcccacgagccccgccaacgaaccacaggtgctgggctttagagaacatgggaaggcggccccagacctggcgggaacgcctttccctcagagccaggccccggccccgtctgggaagctcatcttgcgaagctgagggagctcagggcaaaggccaggctagcgcggaccggaaggggccgaggctgcacgggcctctgccagaacgctcaggacatcccggcctgggtttacaacgctgttaggaaaattaaccaatgaataaagcaacgttcagtgcgcaaaaaaaaaaaaaaaaaaagaagaaaaaaaaaaaaaaaaacccca

SEQ ID NO: 6213 - DNA, 1704 bp, Homo sapiens
ccgttatagtttccccatgctttcagcgcatggccatgagatttttacatgtgcataagtatttagccaatacacattttgctgacttctttaaccatttatattgtttaaattagtaatatccaatgcagtgcacacttttttgtcttttttccaacggaatattttggttgtctgtagcgttggaagcattttatatgataaaaatagcaagaaaaaattaaaaagtgtcaacggtgtgctggttctaaattaagaagatagaacaaagagaaagacattaatgttacctaagaagcacatttaacatccgaagaagcaatgctgtcctcacttgatgtttctcttctcaacccagcaatggagagcagggcttgcaaagccgtacagagcctacgtgctctttcctgcaagtgggagaaaactaatcaatggcacacagggccaggtgtggccctgtgaggcaaaggataatgtcacctcaggaccaaggtggaaacttacagctgaatccagggcttactaagtagggaagtcagtttacatatttcagttttcctctgatgtttttgaggtactgtgtatttgcagaagtttaagcagaagggttttgtttctattgtaagttaggttctaaaagtgtataatctgatactctagcccaactgaaatattatatcttgggcgttacagcctttgtctttttctttagtcaccttaatacccagtcctatgctgtatctctgatagcctatataaatgacatataggaatattattttccatatgatctgttgtatggtgtatatgctatgtgttcatttcgtgtgcaagttcagagtgtaatagatttacccagagaaggtgtttctatacaatgcccctacctatttgaaattacatgcttgcccaacacactgtgaaatagttaccaaaatttgtacaaatgcagcatcttcattctttctgagaagacaagatggttttctttacatgaacaaatgaacaaaagagatcctagatccataacgtagctaaggcatctaagagtttgctgttgataatcttgctgaccaaaaactactggagagtaacacaggttatatgccatcacaaatacaatgctcatgaagaactgatttgtagagtcaatgaacctgtgtccagaattttaataggctctctattggaaggagaaagaatttcaagttaacagtatctaactttatcatagttgatgttagtaaattttaaaaaatgattttatatgtatgacaaaaatctttgtaaaatgcgcaagtgcaataatttaaagaggtcttaactttgcatttataaattataaatattgtacatgtgtgtaattttttcatgtattcatttgcagtctttgtatttaaaaaacatttactgttatgtttgtataatagaacagtaatcatttattataatctaggcaagttgtaaataaattcataattcaaacagccagtatatatgcatatatgagtgttatattgcaaaatctttgttttacttacatggttaaagcagcaagaattcttttgttgatatgtaattatacacataaaatatatatatgtatgatacatgaaatatatttagaaatgttcataattttaatggatatcctttggtgtgaataattgaatacagagtttttaaaataaaaaaaaaaaaaaa

SEQ ID NO: 6214 - DNA, 1946 bp, Homo sapiens
  misc_feature (3)..(244): n is a, c, g, or t
  misc_feature (246)..(270): n is a, c, g, or t
  misc_feature (273)..(276): n is a, c, g, or t
  misc_feature (278)..(280): n is a, c, g, or t
  misc_feature (282)..(285): n is a, c, g, or t
  misc_feature (287)..(290): n is a, c, g, or t
  misc_feature (292)..(298): n is a, c, g, or t
  misc_feature (305)..(307): n is a, c, g, or t
  misc_feature (309)..(310): n is a, c, g, or t
  misc_feature (314)..(314): n is a, c, g, or t
  misc_feature (318)..(327): n is a, c, g, or t
  misc_feature (347)..(348): n is a, c, g, or t
  misc_feature (353)..(353): n is a, c, g, or t
  misc_feature (360)..(360): n is a, c, g, or t
  misc_feature (363)..(363): n is a, c, g, or t
  misc_feature (398)..(398): n is a, c, g, or t
  misc_feature (401)..(401): n is a, c, g, or t
  misc_feature (407)..(407): n is a, c, g, or t
ggnnnnnnnnnnnnnnnnnnnnnnnnnnnnnnnnnnnnnnnnnnnnnnnnnnnnnnnnnnnnnnnnnnnnnnnnnnnnnnnnnnnnnnnnnnnnnnnnnnnnnnnnnnnnnnnnnnnnnnnnnnnnnnnnnnnnnnnnnnnnnnnnnnnnnnnnnnnnnnnnnnnnnnnnnnnnnnnnnnnnnnnnnnnnnnnnnnnnnnnnnnnnnnnnnnnnnnnnnnnnnnnnnnnnnnnnnnnnnnnnnntnnnnnnnnnnnnnnnnnnnnnnnnnttnnnnannnannnngnnnnannnnnnnttgacannnannctgntaannnnnnnnnntttacagtcaacctggtaannccaanctgaatnccncccttcctttttcaaggtctctccgggttggccancgncagganctgcaaacttgggcacggcggctacaccggcagcggaccgggctttggagaacctcgggactcaggtgctgaggtgcccagcggctccggacgtgctacggggtgcgagcgcgggggagttcggggcgcacgacaaggaagggcccccgggagctctatatggaggaaggagcccagaatggtgtgcaccaggaagaccaaaactttggtgtccacttgcgtgatcctgagcggcatgactaacatcatctgcctgctctacgtgggctgggtcaccaactacatcgccagcgtgtatgtgcgggggcaggagccggcgcccgacaagaagctggaggaagacaaaggggacactctgaagattattgagcggctggaccacctggagaatgtcatcaagcagcacattcaaggctataggagaaatttctcccttctgaatgtgtccaactaactctgttcacctgagaaatcatattccccagctctgggtatccctgaataaccacaggagaacagttccaggccctgataagtcagctattgcaagggggacctggctggaagatatgaaggaaaaatatcattcttgaactaataagttgagagatcacagccttcaggggaccagaagggaaggctgaacagagaagggcaatttcacgttcgccatgtccatatttctatcgtcatgagccatctcaccttacaggcagggaagttttgagcttagagaatgggatgcgtcaagaaaaccgtggctcccccagctctgttcctggattcagtgcctgttgtttcatcctgtgtagactggagtcagggtctacacagttggaattctatggaaccaagatgctgtgtggcagatggatgtggactccaactgtgacaatccagaaggccttggggacttgtttcatgaacagctccctgtaggatctctgttggggtgggggattctaggggcatctccgcagttttcttctgaaaacaaaacgaatacaagttgggcaggtgcaacaactgtgcatgcagtcccctcccagggctggctagcagtattgttgggtaccgtaagcacttagcattgttaagtgagcataagtaacaagatgcaacagcctctggccaagttttgaagattttgttttaaagtatgcttttagatgttgacattcatgattattaaaaggaacaaaactcaatttggggtctcaagagccacaattctagacttctaggatgtcaggagccatgctcttaagcttctcaccctgctgttttaatgagattaatgattattttccactgagcacctacctgtgatgttcataaaaaagtgaaataaatgactcacatggagatttggaaggatatcactgtggaaagtagatgttaacagcctctagaaatatgataattatcagctatttgagatgcagtcactgtaatgtgataacaagatgtgttgtgcaggtagaaagcatggagagaaatggcacaaagtagagttataagaaaaaaaaaaaaaaaaaa

SEQ ID NO: 6215 - DNA, 3171 bp, Homo sapiens
agccagttctcttcgggaacagaactgcaacggagagactcaagatgattccctttttacccatgttttctctactattgctgcttattgttaaccctataaacgccaacaatcattatgacaagatcttggctcatagtcgtatcaggggtcgggaccaaggcccaaatgtctgtgcccttcaacagattttgggcaccaaaaagaaatacttcagcacttgtaagaactggtataaaaagtccatctgtggacagaaaacgactgttttatatgaatgttgccctggttatatgagaatggaaggaatgaaaggctgcccagcagttttgcccattgaccatgtttatggcactctgggcatcgtgggagccaccacaacgcaacgctattctgacgcctcaaaactgagggaggagatcgagggaaagggatccttcacttactttgcaccgagtaatgaggcttgggacaacttggattctgatatccgtagaggtttggagagcaacgtgaatgttgaattactgaatgctttacatagtcacatgattaataagagaatgttgaccaaggacttaaaaaatggcatgattattccttcaatgtataacaatttggggcttttcattaaccattatcctaatggggttgtcactgttaattgtgctcgaatcatccatgggaaccagattgcaacaaatggtgttgtccatgtcattgaccgtgtgcttacacaaattggtacctcaattcaagacttcattgaagcagaagatgacctttcatcttttagagcagctgccatcacatcggacatattggaggcccttggaagagacggtcacttcacactctttgctcccaccaatgaggcttttgagaaacttccacgaggtgtcctagaaaggttcatgggagacaaagtggcttccgaagctcttatgaagtaccacatcttaaatactctccagtgttctgagtctattatgggaggagcagtctttgagacgctggaaggaaatacaattgagataggatgtgacggtgacagtataacagtaaatggaatcaaaatggtgaacaaaaaggatattgtgacaaataatggtgtgatccatttgattgatcaggtcctaattcctgattctgccaaacaagttattgagctggctggaaaacagcaaaccaccttcacggatcttgtggcccaattaggcttggcatctgctctgaggccagatggagaatacactttgctggcacctgtgaataatgcattttctgatgatactctcagcatggttcagcgcctccttaaattaattctgcagaatcacatattgaaagtaaaagttggccttaatgagctttacaacgggcaaatactggaaaccatcggaggcaaacagctcagagtcttcgtatatcgtacagctgtctgcattgaaaattcatgcatggagaaagggagtaagcaagggagaaacggtgcgattcacatattccgcgagatcatcaagccggcagagaaatccctccatgaaaagttaaaacaagataagcgctttagcaccttcctcagcctacttgaagctgcagacttgaaagagctcctgacacaacctggagactggacattatttgtgccaaccaatgatgcttttaagggaatgactagtgaagaaaaagaaattctgatacgggacaaaaatgctcttcaaaacatcattctttatcacctgacaccaggagttttcattggaaaaggatttgaacctggtgttactaacattttaaagaccacacaaggaagcaaaatctttctgaaagaagtaaatgatacacttctggtgaatgaattgaaatcaaaagaatctgacatcatgacaacaaatggtgtaattcatgttgtagataaactcctctatccagcagacacacctgttggaaatgttcaactgctggaaatacttaataaattaatcaaatacatccaaattaagtttgttcgtggtagcaccttcaaagaaatccccgtgactgtctataagccaattattaaaaaatacaccaaaatcattgatggagtgcctgtggaaataactgaaaaagagacacgagaagaacgaatcattacaggtcctgaaataaaatacactaggatttctactggaggtggagaaacagaagaaactctgaagaaattgttacaagaagaggtcaccaaggtcaccaaattcattgaaggtggtgatggtcatttatttgaagatgaagaaattaaaagactgcttcagggagacacacccgtgaggaagttgcaagccaacaaaaaagttcaaggttctagaagacgattaagggaaggtcgttctcagtgaaaatccaaaaaccagaaaaaaatgtttatacaaccctaagtcaataacctgaccttagaaaattgtgagagccaagttgacttcaggaactgaaacatcagcacaaagaagcaatcatcaaataattctgaacacaaatttaatatttttttttctgaatgagaaacatgagggaaattgtggagttagcctcctgtggagttagcctcctgtggtaaaggaattgaagaaaatataacaccttacaccctttttcatcttgacattaaaagttctggctaactttggaatccattagagaaaaatccttgtcaccagattcattacaattcaaatcgaagagttgtgaactgttatcccattgaaaagaccgagccttgtatgtatgttatggatacataaaatgcacgcaagccattatctctccatgggaagctaagttataaaaataggtgcttggtgtacaaaactttttatatcaaaaggctttgcacatttctatatgagtgggtttactggtaaattatgttattttttacaactaattttgtactctcagaatgtttgtcatatgcttcttgcaatgcatattttttaatctcaaacgtttcaataaaaccatttttcagatataaagagaattacttcaaattgagtaattcagaaaaactcaagatttaagttaaaaagtggtttggacttgggaacaggactttatacctcttttactgtaacaagtactcattaaaggaaattgaatgaaaaaaaaaaaaaaaaaaaaaaaaaa

SEQ ID NO: 6216 - DNA, 4397 bp, Homo sapiens
  misc_feature (221)..(279): n is a, c, g, or t
  misc_feature (1840)..(1844): n is a, c, g, or t
  misc_feature (1849)..(1849): n is a, c, g, or t
  misc_feature (1859)..(1859): n is a, c, g, or t
  misc_feature (3068)..(3082): n is a, c, g, or t
atggaggatgaatcaatttacacctgcgatcactgtcagcaggacttcgagtctctggcagacctgacggaccaccgggcccaccgctgtcctggagatggtgatgacgacccacaactctcctgggtggcctcgtctccctccagcaaggatgttgcgtcacccacgcagatgatcggagatggttgtgacctcggcctcggcgaggaggaagggggcannnnnnnnnnnnnnnnnnnnnnnnnnnnnnnnnnnnnnnnnnnnnnnnnnnnnnnnnnncttgaagaggcacgagcagatccacagcgacaagctgccgttcaagtgcacctactgcagccgcctcttcaagcacaagaggagccgcgaccggcacatcaagctgcatacgggcgacaagaagtatcactgccacgagtgcgaggcagccttctcccgcagcgaccacctcaagatccacctgaagacccacagctccagcaagcccttcaagtgcactgtgtgcaagcgcggcttctcctccaccagctcgctgcagagccacatgcaggcccacaaaaagaacaaggagcatctggccaagtcggagaaggaagccaagaaggacgacttcatgtgcgactactgcgaggacaccttcagccagacggaggagctggagaagcacgtgctcacccgccacccgcagctgtccgagaaggcggacctgcagtgcattcactgccctgaggtcttcgtcgacgagaacacactgctcgcccatatccaccaagcccacgccaaccagaaacacaagtgccccatgtgccctgagcagttctcctcagtggaaggtgtctactgccacctggacagccaccggcagcccgactccagcaaccacagtgtcagtcccgaccctgtactgggcagcgtggcctccatgagcagcgccacacccgactccagcgcctctgtggagcgtggctccaccccggactccaccttgaagccgctgcgggggcagaagaagatgcgggatgacgggcagggctggaccaaggtggtctatagctgcccctattgttccaagcgggactttaacagcctggccgtgctggagatccacctgaagaccatccacgcggacaagccccagcagagccacacatgtcagatctgcctggactccatgcccaccctctacaacctcaacgagcacgttcgcaagctgcacaagaaccatgcctaccctgtgatgcagtttggcaacatctctgccttccactgcaactactgccccgagatgttcgccgacatcaatagcctgcaggagcacatccgcgtctcccactgcggccccaacgccaacccctctgacggtaataatgctttcttctgcaaccagtgctccatgggtttccttactgagtcctccctcaccgagcacatccagcaggcccactgcagtgtgggcagtgccaaactagagtctccggtggtgcagcccacgcagtccttcatggaggtctattcctgcccctactgcaccaactcccccatctttggctccatcctgaaactcaccaagcacatcaaggagaaccacaagaacattccactggcccacagcaagaagtccaaggccgagcagagcccagtctcgtccgatgtggaggtgtcttccccgaagcggcagcggctctcagcaagcgccaactccatctccaatggggagtatccttgcaatcaatgcgacctcaagttctccaactttgagagcttccagacccacctgaagctgcacctggagctgctgctgcggaagcaagcgtgcccccagtgcaaagaggactttgannnnntcccntcctgcaaanacccttgaacagtgcattacatgaccacgtcgacccactatgtgtgcgagagctgcgacaagcaattttcctcggtggatgacctgcagaagcacctgctggacatgcacacctttgtgttgtaccactgcaccctgtgtcaggaggtcttcgactccaaggtgtccatccaggtgcactggcggtgaagcacagcaatgagaagaagatgtaccgctgcacggcctgcaactgggacttccgcaaggaggctgacctgcaggtgcacgtcaaacacagccacctgggcaacccggccaaggctcacaagtgcatcttctgtggggagaccttcagcaccgaggtggagctgcagtgccacatcaccacacacagcaagaagtataactgtaagttctgcagcaaggccttccacgccatcatcctgctggagaagcacctgcgggagaagcactgtgtgtttgatgctgcgaccgagaacggcacggccaatggggtacccccaatggccaccaagaaagctgagcctgctgacctgcagggcatgctgcttaagaaccctgaggcacctaacagccatgaggccagcgaggatgacgtggacgcgtcggagcccatgtacggctgtgacatctgtggggcggcctacaccatggaggtgctgctgcagaatcaccggctgcgggaccacaatatccggccgggcgaggatgatggctcacgcaagaaggctgagtttatcaagggcagtcacaagtgcaacgtttgttcacggactttcttctcggagaacgggctacgggagcacctgcagacgcaccggggccctgccaagcactacatgtgtcccatctgtggtgagcgcttcccttcgctgctgacgctcaccgaacacaaggtgacccacagcaagagcctggacacgggcacctgtcgcatctgcaagatgcccctgcagagcgaggaggagtttattgagcactgccagatgcaccctgacctgcgcaactcactcacgggcttccgctgtgtggtctgcatgcagacagtcacttccacgcttgagctcaagatccatggcaccttccacatgcagaagctggcgggcagctcagcggcgtcctcccccaatggccaggggctgcagaagctctacaagtgcgccctgtgcctcaaggagttccgcagcaagcaggacctggtgaagcnnnnnnnnnnnnnnntgccctacggcctctgcgccggctgcatggcccgcagcgccaacggacaggtgggtggcctggccccgcccgagcccgccgaccggccctgtgccggcctccgttgccccgagtgcagtgtcaagtttgagagtgccgaagacctggagagccacatgcaggtggaccaccgtgacctcacgccggagaccagtgggccccggaaaggcacccagacatcgccagtgccccggaaaaagacataccagtgcatcaagtgccagatgaccttcgagaacgagagagagatccaaatccacgttgccaaccacatgattgaggaaggcatcaaccacgagtgtaagctgtgcaaccagatgttcgactccccggccaagctcctctgtcacctcattgagcacagcttcgagggcatgggcggcaccttcaaatgccccgtgtgtttcacagtcttcgtccaggccaacaagttgcagcagcacatcttttgccgtgcacgggcaggaggacaagatctacgactgctcacagtgccctcagaagttcttcttccagaccgagctgcagaaccacacgatgagccagcacgcacagtgagggatcgctcaacaggacacctctccgcagaaggcttgccggagacgccgtggggagggccatttgaacattacatccaatcaaagtgtcatttgcaacccagatgtaaaactctaatgatttggccatgaggcgctgctattataagcagctggaaatgaatattaatggcagagattaaaagtattccatgctcagtattttttattgtcctgctacagctagtgtgcttttagactttccgccgcagactacatttctagagttagagaaacctgctttttaaggctattgtcctttgttccttcatgtattatattgatagtttttaaaaaagaattagtgtgattttttttctttgcttcttttttttctttcttgtttttcttcccccccacccccccacccccttcggttaactactttttaattgcaattctaggtaattgtgcatcgtgatgtgattgcttggctattgtctgaatatttccttttaattttttaattaaagactaatgctttgattggatttgccagttcaccggacagtgattaaaactatgtaatgaatataatcggtttcagtgcaactggatggtctgcttttaaatgtgacttaatctgactgcagtaactagtacagttcaataaagggaatcatgcgaaaaaaaaaaaaaaaaaattttttaaaatctaaatactatacgagtagacacat

SEQ ID NO: 6217 - DNA, 6604 bp, Homo sapiens
  misc_feature (835)..(862): n is a, c, g, or t
  misc_feature (3699)..(3743): n is a, c, g, or t
  misc_feature (6537)..(6572): n is a, c, g, or t
catccttcctgtcttcgcagaggagtcctcgcgtgaaataagcgggttttgaaaacaaaaaaaagaaggagtggaagagggggccaggatccaggcctccatccccacagaagtgaagctacagctgggaggtctcctcccgtaacaaccgtcaccctgggtcccgactgcccacctcctcctcctccccctccccccaacaacaacaacaacaacaactccaagcacaccggccataagagtgcgtgtgtccccaacatgaccgaacgaagaagggacgagctctctgaagagatcaacaacttaagagagaaggtcatgaagcagtcggaggagaacaacaacctgcagagccaggtgcagaagctcacagaggagaacaccacccttcgagagcaagtggaacccacccctgaggatgaggatgatgacatcgagctccgcggtgctgcagcagctgctgccccaccccctccaatagaggaagagtgcccagaagacctcccagagaagttcgatggcaacccagacatgctggctcctttcatggcccagtgccagatcttcatggaaaagagcaccagggatttctcagttgatcgtgtccgtgtctgcttcgtgacaagcatgatgaccggccgtgctgcccgttgggcctcagcaaagctggagcgctcccactacctgatgcacaactacccagctttcatgatggaaatgaagcatgtctttgaagaccctcagaggcgagaggttgccaaacgcaagatcagacgcctgcgccaaggcatggggtctgtcatcgactactccaatgctttccagatgattgccnnnnnnnnnnnnnnnnnnnnnnnnnnnngctgattgaccagtaccacgagggcctcagcgaccacattcaggaggagctctcccacctcgaggtcgccaagtcgctgtctgctctgattgggcagtgcattcacattgagagaaggctggccagggctgctgcagctcgcaagccacgctcgccaccccgggcgctggtgttgcctcacattgcaagccaccaccaggtagatccaaccgagccggtgggaggtgcccgcatgcgcctgacgcaggaagaaaaagaaagacgcagaaagctgaacctgtgcctctactgtggaacaggaggtcactacgctgacaattgtcctgccaaggcctcaaagtcttcgccggcgggaaactccccggccccgctgtagagggaccttcagcgaccgggccagaaataataaggtccccacaagatgatgcctcatctccacacttgcaagtgatgctccagattcatcttccgggcagacacaccctgttcgtccgagccatgatcgattctggtgcttctggcaacttcattgatcacgaatatgttgctcaaaatggaattcctctaagaatcaaggactggccaatacttgtggaagcaattgatgggcgccccatagcatcgggcccagttgtccacgaaactcacgacctgatagttgacctgggagatcaccgagaggtgctgtcatttgatgtgactcagtctccattcttccctgtcgtcctaggggttcgctggctgagcacacatgatcccaatatcacatggagcactcgatctatcgtctttgattctgaatactgccgctaccactgccggatgtattctccaataccaccatcgctcccaccaccagcaccacaaccgccactctattatccagtagatggatacagagtttaccaaccagtgaggtattactatgtccagaatgtgtacactccagtagatgagcacgtctacccagatcaccgcctggttgaccctcacatagaaatgatacctggagcacacagtattcccagtggacatgtgtattcactgtccgaacctgaaatggcagctcttcgagattttgtggcaagaaatgtaaaagatgggctaattactccaacgattgcacctaatggagcccaagttctccaggtgaagagggggtggaaactgcaagtttcttatgattgccgagctccaaacaattttactatccagaatcagtatcctcgcctatctattccaaatttagaagaccaagcacacctggcaacgtacactgaattcgtacctcaaatacctggataccaaacataccccacatatgccgcgtacccgacctacccagtaggattcgcctggtacccagtgggacgagacggacaaggaagatcactatatgtacctgtgatgatcacttggaatccacactggtaccgccagcctccggtaccacagtacccgccgccacagccgccgcctccaccaccaccaccgccgccgcctccatcttacagtaccctgtaaatacctgtcatgtccttcaggatctctgccctcaaaatttattcctgttcagcttctcaatcagtgactgtgtgctaaattttaggctactgtatcttcaggccacctgaggcacatcctctctgaaacggctatggaaggttagggccactctggactggcacacatcctaaagcaccaaaagaccttcaacattttctgagagcaacagagtatttgccaataaatgatctctcatttttccaccttgactgccaatctaactaaaataattaataagtttactttccagccagtcctggaagtctgggttttacctgccaaaacctccatcaccatctaaattataggctgccaaatttgctgtttaacatttacagagaagctgatacaaacgcaggaaatgctgatttctttatggagggggagacgaggaggaggaggacatgacttttcttgcggtttcggtaccctctttttaaatcactggaggactgaggccttattaaggaagccaaaattatcggtgcagtgtggaaaggcttccgtgatcctctcgctgcacccttagaaacttcaccgtcttcaaactccatttccatggttctgttaattctcaaggagcagcaactcgactggttctcccaggagcaggaaaaacccttgtgacatgaaacatctcaggcctgaaaagaaagtgctctctcagatggactcttgcatgttaagactatgtcttcacatcatggtgcaaatcacatgtacccaatgactccggctttgacacaacaccttaccatcatcatgccatgatggcttccacaaagcattaaacctggtaaccagagattactggtggctccagcgttgttagatgttcatgaaatgtgaccacctctcaatcacctttgagggctaaagagtagcacatcaaaaggactccaaaatcccatacccaactcttaagagatttgtcctggtacttcagaaagaattttcatgagtgttcttaattggctggaaaagcaccagctgacgttttggaagaatctatccatgtgtctgcctccatatgcatctgggcatttcatcttcagtcccctcattagactgtagcattaggatgtgtggagagaggagaaatgatttagcacccagattcacactcctatgcctggaagggggacatctttgaagaagaggaattagggctgtggacactgtcttgaggatgtggacttccttagtgagctccacattacttgatggtaaccacttcaaaaggatcagaatccacgtaatgaaaaaggtcnnnnnnnnnnnnnnnnnnnnnnnnnnnnnnnnnnnnnnnnnnnnncctcagaaagcaactcaaaggactcaaagcaacggacaacacaagagttgtcttcagcccagtgacacctctgatgtcccctggaagctttgtgctaacctgggactgcctgacttcctttagcctggtcccttgctactaccttgaactgttttatctaacctctctttttctgtttaattctttgctactgccattgaccctgctgcaggatttgtgtcattttcctgcctggttgctgagactccattttgctgccacacacagagatgtaagaggcaggctttaattgccaaagcacagtttgagcagtagaaaacaacatggtgtatatctcaaattgcctgacatgaagaggagtctaacggtgaagtttcacttttcatcagcatcatctttcacatgttcattatcatccgctcttattcttgcatgtttaaacacttaaaatttttagtataatttttagtgtgttttgaagtggtgactaggctttcaaaaacttccattgaattacaaagcactatccagttcttattgttaaactaagtaaaaatgataagtaacatagtgtaaaatattcctttactgtgaacttcttacaatgctgtgaatgagaggctcctcagaactggagcatttgtataataattcatcctgttcatcttcaattttaacatcatatataatttcaattctatcaattgggcctttaaaaatcatataaaaggatataaaatttgaaaagagaaacctaattggctatttaatccaaaacaacttttttttttccttcaatggaatcagaaagcttgtcaatcactcatgtgttttagagtaattacttttaaaatggtgcatttgtgcttctgaactattttgaagagtcacttctgtttacctcaagtatcaattcatcctccatacatttgaattcaagttgttttttgtcaaatttacagttgtcaattgatcttcaagctgcagggtgcctagaaatgggccgttgtctgtagccctggcatgtgcacacggacatttgccaccactgcaagcaaaagtctggagaagttcaccaacgacaagaacgattagggaaaatatgctgctgtgggttaacaactcagaaagtccctgatccacatttggctgtttactaaagcttgtgattaactttttggcagtgtgtactatgctctattgctatatatgctatctataaatgtagatgttaaggataagtaattctaaatttattattctatagttttgaagtttggttaagtttcctttcactcaattgatttattttgttgttaatcaaatttatgttaattggatcctttaaattttttttggcattttccaacaaaaatggctttattcataagaaaggaaaaaaatcaatggaatttgatatctaaagaagttagaaagggagcaaaataaaaaacataaaggagatagatgaattagtaagcaaatcagtagtcgagtttttcaaactggcaaaattaattaattgacttttagcccaaatttacattgttaattaaatcaagaaggaagaagatctaagagctcccattgataggcaagcctagagagaactagctaaatttatcatgctaggatattgaaacacagaaagtttacatacatttatgaagggtcaatttagtttggacagtgaggtatttgtcttagtggaaaaaaggagaattagtctgatcaaatcgtgaagtaatacagtgaacttgcaggtgcacaaaataagagggccacatctatatggtgcagtctggaattctgtttaagtttgtaggtacctcttggacttctgaattgatccagttgtcatccaccacagacatctcacatcagatacagacagttccaagattgacaacagagaacaacctgctggaaagacctgggcagaaatggagagccctgcgggaaccatgctacattttcatctaaagagagaatgcacatctgatgagactgaaagttctttgttgttttagattgtagaatggtattgaattggtctgtggaaaattgcattgcttttatttctttgtgtaatcaagtttaagtaataggggatatataatcataagcattttagggtgggagggactattaagtaattttaagtgggtggggttatttagaatgttagaataatattatgtattagatatcgctataagtggacatgcgtacttacttgtaaccctttaccctataattgctatccttaaagatttcaaataaactcggagggaactgcagggagaccaacttatttagagcgaattggacatggataaaaaccccagtgggagaaagttcaaaggtgattagattaataatttaatagaggatgagtgacctctgataaattactgctagaatgaacttgtcaatgatggatggtaaattttcatggaagttataaaagtgataaataaaaacccttgcttttacccctgtcagtagccctcctcctaccactgaaccccattgcccctacccctccttctaactttattgctgtattctcttcactctatatttctctctatttgctaatattgcattgctgttacaataaaaattcaataaagatttagtggttaagtgcaaaaaaaaaaaaaaaaaaaaatatgggggctcggccgaaaattttaaacttgttgggggggccaggtagaactggcacggtccagagacgggagaggggttccaaaaacgggcgggttaaacaggggggcggacaaggggnnnnnnnnnnnnnnnnnnnnnnnnnnnnnnnnnnnncttgtaagccttaatttttggttttcgcgttt

SEQ ID NO: 6218 - DNA, 5347 bp, Homo sapiens
  misc_feature (1441)..(1462): n is a, c, g, or t
  misc_feature (1485)..(1510): n is a, c, g, or t
  misc_feature (1927)..(1987): n is a, c, g, or t
  misc_feature (3209)..(3226): n is a, c, g, or t
gcccacccgtccagcaaaatagagtccctcagggtgacagttgacttcctgaaggtgcctcttggcctaaagaagccggtgctgaaggaggtggctgtggggccccccaagaggccccagcctgcggccctggagcgctacaaggcgcggcgttcagacgccatggacaccgagtcccagtactcgggctattcctacaagtcgggccactcccgcagctcccgcaagcacagggaccgccgggaccgacaccgctctaagagtcgagatgggggccgaggggacaagtcggtgacaatccaggctcccggggagcccctgctggacaatgagtccacacgaggggatgagcgggatgacaactggggggaaacgacgacagtagtaacgggcacctcagagcacagcatctcccatgatgacctcacacgcatcgccaaggacatggaggacagtgtccctctggactgctcccgtcacctgggtgtggcagcgggggccaccctggcactgctgtctttcctcacgcctctggccttcctgctgctgcccccactgctgtggcgggaggagctggagccttgcgggacggcctgcgagggcctcttcatctctgtcgccttcaagctgctcatcctgctactgggcagctgggctctgttcttccgccggcccaaggcctcgctgccccgcgtctttgtgctgcgtgccctgcttatggtgctggttttcctgctcgtggtctcctactggctcttctatggtgtgcgcatcctggatgctcgggagcgcagctaccagggcgtggtgcagttcgccgtgtcgctggtggacgcccttcttttcgtgcactacctggccgtggtcctgctggagctgcgccagctccagcctcagttcacgctcaaggtcgtgcgctccaccgacggcgccagccgcttctacaacgttggccatctcagcatccagcgcgtggcagtgtggatcctggagaagtattaccatgacttccctgtctacaaccctgccctcctcaacctgcccaagtccgtcctggccaagaaagtgtctggcttcaaggtgtattccctcggagaggaaaacagcaccaacaactccactggccagtctcgggctgtgattgcagcggcagctcggaggcgggacaacagtcacaatgagtactactatgaggaggctgagcatgagcgaagggtgcgcaagaggagggccaggcttgtagtggcggtggaggaggccttcactcacattaagcggctgcaggaagaggagcagaaaaaccccagggaggtgatggacccccgggaggcagcccaagccatctttgcatccatggcccgtgccatgcagaagtaccttcggaccaccaagcagcagccctaccacaccatggagagcatcctgcagcaccttgaattcnnnnnnnnnnnnnnnnnnnnnnccaaggccttcttggagcgatannnnnnnnnnnnnnnnnnnnnnnnnnaccacaaggaacgctggctggccaaacagtggacattggtgagcgaggagccggtgaccaacggcctcaaggatggcatcgttttcctcttaaaacgccaggacttcagcctggtggtcagcaccaagaaggtcccattcttcaaactctccgaggaatttgtggatcccaagtcacacaagtttgtcatgaggctgcagtctgagacctcagtgtgactgtgcaacagcagggggagtgggaaactctggggggtcctgagggggtgggagggggcttggttctcaggcccagccacattcctgccacccttcttcttcttgctcttttttttttacttgaattaacgcacccccaccttctctcctcgcttcttccttattttaccccatgtgaacctggagagaccatcctgcnnnnnnnnnnnnnnnnnnnnnnnnnnnnnnnnnnnnnnnnnnnnnnnnnnnnnnnnnnnnnccctgcaggaatcagtgcctctctccctcttctttccctagtcttttcccagattacagtctctcctgaaagggcacagggccctgctgattgtactttcccctcctgagccccgactcacaaatccaagttcttaaaacatttctcttcagtggcccaacagggtttctctggggcacatggacatgactccagagagccacagtgccaaactcctccagggcagcaactggccctcctgtccctcaccccagccacaacaaaccctgggttctagggcagggatactcctgccacacagcccgagttagaaatctccttgctaggagcatttgcttccacatatatttagagcaaagaaggatcccatccttttcccagaaatctccacctaatgtttttggtttgtatggtcacgtgaccataggcaaccacgtggaaaccctctgtgaccacttttccagggacttaggggaaggtacctttcttccaatgtgtcttcctaggcagcccctgaggaggagggctgaatagatccctgaggttttggagagacccccatcactgactcctgctccctaaccctaccctcactttcgtccccgctcttcccagtgaaggatggtatgtagactcctgtacagacatagtggcttgcagaccctgacccagcccctgtggtcttagacaaatgtttttatttttgtcaccagccacccctgtcctgccgccttctctcgactccagagacctgttgcctcatctcttttggggaagagccggcagctcctcctcatcccctgccttaagtccagttctttgcctcaggggtctcgtttccttggccttccagggtccccaccccttttctccctgcctgattctctgagctctgggctccgtctgtattgggttgaggggcaaggattactgccttttgtaggtacttcacccctcaccccattttagcttccatagtctttgcaccaaatccaaattcttgataatttagatctcattttgagcaaaatttgctggccctctaataaatattttcaatataaatctgagcctttgactcagacatttttgccaaggagagtagaattaggaagtacccatatacatccagccaggatccacatggaggacctttctgatggctgcaatgactaggccattcctctgagtaactcacagtgtccttttgtaggcccttctnnnnnnnnnnnnnnnnnntggtacttaccttgcagagcacatcctgggataagatccccagtgtctcccctgggaggctccccctctgtgtagcaccagccctgggaatgatggagcctagtgatcggggtttctcctgctgtcctttctgcaaaagttcacttgtttacccaccgcatgctagagaggagctcattggccaatgcttaccttgtccccaaaggggtgggttgtggagctcacttaggcagggcctctggctggggccagggttatgagataggcctgtatgaaatatgtcctgttctgggggtctgtctcttttcttctcttcaaaaactttgtgtcagagagtcccttctgagtcacataaatacctcactatcctggaaaacagggcctggatggtgactggggtcattgcctttgtggacaggatggagtgtggtgtggtctgaggagcaggttggggtgggggagagggaaaggatttgggatcttagttgctgccctaggttaggggctggggagtgtttattttaagatcctgccatgtttttaatcactgtgatttttttttcattcccctttcctaaaaaaaatttttttcctccaactctctaagcactaagggctgtgcctgagaatggtagcattttggtcttttgcttcagaactgtggtatctttgtcttttttcattattattattattattattattattattactattgttttttaaaaggccaggatgaattgtccgacatatgggccagtgggttggccctctgcttctcccctgtgggaagttgtctccatgctgtgaactgctgtggggtgtgcagctgactcagtccctctgagcagtttccccactgtgtctgtcccatcatgcgctggatctgctcattctcctgctgtgggggtatgcccacctcttacccccttgacaccatagggctgctgtggctgggcctcaccagcactgtcttttgtgtgactcatggcatcctcgttcatccccaccgtgcctagcaggccttccttttcaccacctcggaacgcttgcctttcctccctccacaacaggacgctgtgcctcagtccttcacctacctcgccactctgccactgtccccattggtcctttctcctaaactggtctttgtgctctctttgttttttcttatttccctcttgtctctcattttttcttcccattcccctcccatttcagcccttaacttttctctttcccatctccactcagtattccaatggcaaaccctgatgatgtaacacctgcgatgagacatcggactctccggaactttctcatctgacacgtctttttcccagggttcgtacttctcctccattggtcccaggctaactcccctgttcctctgtggtgtctgtcagtccgtctgtcttctctttcctctgcccttcccacagggcagtatctgctgatggattcagtcctggtgtgtgattgttgtgatttgttcttccgtgcgcaaaaggaagagggctttttgagtcccttccaagtgagattgtaaatgtagaattttccactgttggatctagattttttttccttttttttgggggggtggggttacagagctgagaccttgtgcatgcatgtagaaaattgtaaaatgtaaattttttttaatatataaaaagcttgtttctacagtttgcagtggatctaaacattacggcaattttaggatttttttcttaaacataggaactaaaactgtacaaattttttttatataaaataaagacatttgacttttgtgggaaaaaaaaaaaaaaaaaaaaaaaaaaaaaaaaaaaaaaaaaaaaaaaaaaaaaaaaaaaaaaaaaaacaaaaacaagggggcgcccacaaacaaatacacccaaggaggggccacaacaaatacacatccccacgttgtccgtgagcaacaaggggggcccacaatgaggagcgcgcgaactgtcaaacaagcacagacaaggggacagagtataaaaaaagatggtcaggaggggccaacaaggtcgaacccggcgatcaccgtggagcagagcacccaccacgtcggggggggcaacaataggcggaaaaaccaaa

SEQ ID NO: 6219 - DNA, 3326 bp, Homo sapiens
  misc_feature (2531)..(2547): n is a, c, g, or t
cggctcaagtgaactgactctgctagaacacgtgtccgtgcttttccacagaaggttagaccctgaaagagatggctcagcaccacctatggatcttgctcctttgcctgcaaacctggccggaagcagctggaaaagactcagaaatcttcacagtgaatgggattctgggagagtcagtcactttccctgtaaatatccaagaaccacggcaagttaaaatcattgcttggacttctaaaacatctgttgcttatgtaacaccaggagactcagaaacagcacccgtagttactgtgacccacagaaattattatgaacggatacatgccttaggtccgaactacaatctggtcattagcgatctgaggatggaagacgcaggagactacaaagcagacataaatacacaggctgatccctacaccaccaccaagcgctacaacctgcaaatctatcgtcggcttgggaaaccaaaaattacacagagtttaatggcatctgtgaacagcacctgtaatgtcacactgacatgctctgtagagaaagaagaaaagaatgtgacatacaattggagtcccctgggagaagagggtaatgtccttcaaatcttccagactcctgaggaccaagagctgacttacacgtgtacagcccagaaccctgtcagcaacaattctgactccatctctgcccggcagctctgtgcagacatcgcaatgggcttccgtactcaccacaccgggttgctgagcgtgctggctatgttctttctgcttgttctcattctgtcttcagtgtttttgttccgtttgttcaagagaagacaagatgctgcctcaaagaaaaccatatacacatatatcatggcttcaaggaacacccagccagcagagtccagaatctatgatgaaatcctgcagtccaaggtgcttccctccaaggaagagccagtgaacacagtttattccgaagtgcagtttgctgataagatggggaaagccagcacacaggacagtaaacctcctgggacttcaagctatgaaattgtgatctaggctgctgggctgaattctccctctggaaactgagttacaaccaccaatactggcaggttccctggatccagatcttctctgcccaactcttactgggagattgcaaactgccacatctcagcctgtaagcaaagcaggaaaccttctgctgggcatagcttgtgcctaaatggacaaatggatgcatacccttcctgaaatgactcccttctgaatgaatgacaaagcaggttacctagtatagttttcccaaacttcttcccatcatagcacatgtagaaaataatatttttatggcacactgggataaacaagcaagattgctcacttctggaagctgcatatgactagaggcctcttgtgactggaggtaacaaccctgcccagtaactgtgggagaaggggatcaatattttgcacacctgtaataggccatggcacaccagccaagatgctctgctcacagtcagtatgtgtgaagatccctggtgcgtggccttcaccacgcatcttgagcaaattaggaaaatgtacccttcgcttgaggcagatgcagcccttcccccgagtgcatggcttggagagcagaatgtgggctgcatataagcacactcatccctttgtctgggaatctttgtgcagggcataacaggcttagtaagtccaaacacagatgacagtgctgtgtgggtctctgtcagagttgtggctctcagccatgtagacacactctccaaatggagtgttggaaaatgttctttctgcagggtctagagactgctgggacacttttcttggagtgctacttcagaagccttataggattttctttctggccaagatttccttctgtatcactccaagcagcctcagcagaagaagcagccatgcccagtattcccactctccaaaaggaactgaccagcttatatttctcacacttctggggaactgggtataatccaaccatcaaaatagaagaccttgcaagaagcagagtcattctccagaaggaacttgggagatgatggtgcagatgatgaaactgggttcatcccagttccaaagactcagagaactagagtttaagctgaggcagagtgccgccaccctggcatgccccacaaacagatcaccagccagcttacacaggcattaactctcctcaatgaggaagaatcattcacaactgagcaagacattcatatgatcatttaaggaagtgtttcccttatgtgttagcaagtataatcggctaactcctaaatcccaatgaatagtcctaggctggacagcaatgggctgcaattaggcagataaagacatcagtcccagtaaatgaatccatagactcatctagcaccaactaccattagcactatgttaggagctgcaaggccccaaagtagaagatgtgcataatgtctgctcttgtgtagctcaggagacaattccagcacagacactacagtnnnnnnnnnnnnnnnnntgcaagtaatagcatgaacagtcagaaaaataccttatgagggggcagggctgaagctgggccttgaaggatggatgaaatttggatagagaatgaggaagacagagggcctccaagtgagagaagcatgaaaaatgagcaggggcctggatcagtggggtgtattcagagcacctctccagatgcaccatgcatgctcacagtcccttgcctatgtgtggcagagtgtcccagccagatgtgtgcccccaccccatgtccatttacatgtccttcaatgcccacctcaaaaggtacctcttctgtaaagctttccctggtatcaggaatcaaaattaatcagggatcttttcacactgctgttttttcctctttggtccttctatcactaaaactcatctcattcagccttacagcataactaattatttgttttcctcactacattgtacatgtgggaattacagataaacggaagccggctggggtggtggctcacgcctgtaaccccaacactttgggaggccaaggcaggcggatcacctgaggtcaggagttcgagattagtctggccaacatggtgaaaccccatctctactaaaaatacgaaattagccaggtgtggtggcacacatctgtagtcccagctactctggaggctgagacaggagaatcgcttgaacccaggaagtggaggttgcagtgagctgagatcacaccactgcactccagcctgggagagagagagtgagtctccatctcaaaaaaaaaaaaaaaaa

SEQ ID NO: 6220 - DNA, 1423 bp, Homo sapiens
caacacgagatacacatttacataaatctcagtcatttacaaaaataaatcttgtcttaatttaaaccaataaacagacttgcaggggaaaaagaaaccagcaagtagggctaattatcagtaacaaatagatgggggtgtttgctctgtgtgtgtgtgtgtgtgtgtgtgtgtgtgtgtatatgtgtgtgtttgtgtgaagtgaagtgttgctgctgtaagtagtgtccataagcccatttgactgtattacaagttagttaattactcatatagttggccacatattatgggatctatgttttctgaaaataattggttaatggaagttatctaatatattttaactgttcctgttaaaaacaataggcttcaagatgacataacaccaaatcaaaaatgaccaaaggaatcattttgtttgttagatttgtaatttagcatcattggcaataaatctactcaaacgttctgctaactttttatttattcaagtagaatccaatatgaaaatgaaataagcataaacaaacagttaaatttctactaaacctttaatcagctaagcaggccagaattttttaatgctgggcaagggctgtcatgaagaagatttatgaaagcagtgacaaaataatttcccaataaatacagtgcagatggggaaaatgatgactgggtcatcctcccacatagaaagaataacaagaggccagtacattgatcccacatataattttcaataaatgaggttcagtttggtctcaatgaactcttctgagaagaaaacattgaattttattaggtgtacacagagttaacaaatatattcccaaacagtttagtatgaaacattttgaacccctttagatccaatattgaacattttgcatggaatcttcattgtgtagtcaactgttcctggcctttcttggtagttgtcttccctaagctcaaacaaacagtgttaaactaaaaaggaaattaagaatgcaaaataaaagaaaataaatggaatggaccaaaatcctcatggatgaatgtgttggtttgcctttatttattttcatctaggataattcaacagactgtattctgagatcatggcaaggcacctctaacccagccactgggcaacatgagccccagatgctgagctagaggcatgtactggtgaaatacacagtaccggactcagcatgctgagctaaaaaaaatatttttcctaatatgtccagtttaaaaacttgtcattaaacaccaaaaatattaaagtctaattaatttataactaacgtttgcattgctgctgcaggaaagaacacaacagccgtcttgcccatgctctgctgagtatgaggggaacgcagccagaaacggggatggcgttaagtttggttcattaaaaacaggacggagtata

SEQ ID NO: 6221 - DNA, 1049 bp, Homo sapiens
gaagtaaatttcaaatccatttgattgttttcatagtgaccccttagtcattttatattcttgtctgcctttctagaaaaatggttgtcataaagtggaaagtgattaaaaagcatcaaataagaaattatttcaagtggatttttaaaaatatttttttgaagggcagggggaaaattcaccccttttctgatttgaaatatgttgtacatatttccatttgatggataatcattaagtaagaatatttgatttaaagtattagccaacctcttcaggtattagcctgaagataaattttaacaaaacatatacacttgggtatccgtcattgctcaaactctatagtgtattgctggagccaataggcagggtatattttattagctaaatttgatatttgtcttctgccttctgtatcacctccaagctataggaaatcaggattttgttggctttaagaaaacacatggtatgttcactgtatattaaatatacctgtatttaatgttttctcttaggacagaaaagtagacacacacacacacacacacatgttgtgttcagctttctgttttatattatttgccattgagattagaatagaacaggctctattcatgcaaactatatgaaatgaaaaacttttaagactcttcattaattggagcttctgggcaacatcgtgtgtgtgtgtgtgtgtgtgtgtgtgtgtgtgtatacagacattttttttttaacttgttgattcagatgtcttggtccctgaatagtcctagattacttattttgagaattcattgttaaaaattacagggaattaaaataattgcctttttttttttagagggtaagagatgggtagaagagtatgcctctgaaaattttattagtttattcttgtggagaataccaagaaaatgtgtatttgcccattgctaaatatgatatatgccattttgtatttatttgtcccaagtgtctttttgtaagaggagaataaacaataaggaattactgaaaaaaaaaaaaaaaaaaaaaaaaaaaaa

SEQ ID NO: 6222 - DNA, 6679 bp, Homo sapiens
  misc_feature (483)..(502): n is a, c, g, or t
  misc_feature (1676)..(1679): n is a, c, g, or t
  misc_feature (3354)..(3363): n is a, c, g, or t
  misc_feature (4970)..(4999): n is a, c, g, or t
  misc_feature (5932)..(5954): n is a, c, g, or t
gatcaagttcgtgaaactggtcttgtacaggttgaaaaatgccttcctaacaggaggcgccaaggagcttaagtgtaactcacacacagtaaagaaaatgacgaaagttcctccggcgtttgatttcagtttcttaaatgacgaagaggccgggaagatccttcaggtgctggaaaggaatgaggagttacagagggccgagaaggacaggatcagcaaacttcagaagacaaagagggatatcagatggcttcagggagtgactggtgaatggtttgaagaaattcaaagaaaaaagttttgcaatgaaacagatgttagccaaatgttaaaacaaccacttacatacaggctaagtaaggagatggcaaaaaatgatccgatagaattacctacatcaagatctaaaaatgtaactaatcaaaaaaagccgacacctttttcttcccggatgagcttcagatcgtcatttgcttccctgtnnnnnnnnnnnnnnnnnnnnaaggagacttcaaagcttccatcactgggacagaaaggatgtgatggccatgcaggacctcctatgcctgtgaggggagctgctgtgcaggcaaaaatatacaattcacctctggaaaatcatctagttgacagtacatttgtcccaaagccagcagtcatgagggaggagagtggcatgcctccaccgtgggatgcttcactgctggagaatgagtttttccaagttttagatgacttggatagcaaattggctcaggaacagtctgcaagctcagtgaataccagaacacccctcaactatggatcaagaacacagttcggtcacttttattccagtggtaacagacatggtaatatcacagaaaggcacaaaaaacactataatgaaacttccaatatgtctatctatgacatcctaagaccaggaactcctagggaaggttttaaaaccttttctcctaggacaagcacaatttatgatatgtataggacaagggagcccagagtctttaaagaagattatgtgcaaaagaatacttttggcagtacttcgctgtgttttgacagcaggcaacggtcggccttaccagccacagggcatttcacagcaagaagcttacattttccagccacaactcagagcaagagtgggtttataccaccaaggcaccagcagagtccaaagagaactcctttatcatccatcatatggaacagatcagattcctctagagacagggagaaccaggaagagttcctgagggcaccatcaccaatggaaattgatcccgctgacaagtatgtgtatcccaggggttttcaggagaataagagatatgaatcgtaccattcacagaatgtttaccaacgtgttagtttaaatgctcccatggagaatgcaatgagtcccgacacttttgagaactcagagaacatgccattctaccatcaaagcaacacatttaccagatctttcttcagcaatacctttggacgaagcggagaacagaggagatttggacaaggtcctttttggggccaagagaaaggacattctttctggtctgactttcatcgaagcaggaaatcattcagttcttctgacagagactttgaaatgatttccatggaagcaaatagtgtatcagccagtcatgccatatgtgtcttcnnnnaacactgggaatcattttcttctggttatggaacagatgtttccagaggccaagaagagccacatccttggcagtttgattttcagagatccacactggatagcatggtggtatcacatggtaatgagacccagttgactcctcattttggcacaccaaatgtttgctccatgactggttcaagctatcacgtcaaatctagtgagttggtaagtcaacaggacagttctcctgtagaagtacatataaacaaagaagcttcctcatttggaattgctcagactctagcatcctcattcaaaacttccttttcccagatttctgatgacagaaggaatcctcagagtcccaacttgcagaatcccacagtcactttgcagaaaatttttccaaataagcctgcctctcatccaatgagaagccatacagaagtcactgtgaccaacagcaattcagttgactctctgcctcttgccaaaagccagcccaatatcttggtcacagaagtaaataatgagaaagacttaaatgaatctatttcagaagaagacaaacagctaagcaagatggaccagacaaacaaggcaggtgaaataccccaacctgtttcacagacagggatctcaaactctttacctgattttcaaaatcccttatcccaggactcagccaagagcaacgggtttggttttaatgcatctaccataataagttcaaaaaagtcacccagagtcttttccaggaaagatacctccaaaatgtatataccgcacacagataaatccaatgacattaaacaagataagaggtttactgaaaacagaaaacttggctcaacagcttcccttcctttcattcaggaacacagaacaccaccatctttccccaggacagaccaaggttgtcaccaggaattaactgtaaataatgaagatatttcaagaattattacaaataaccactggagctctgcactgactgatactcaaaatgcacaatactcaaaatgcaagttaactcctggccacaagacctcgtgtgattctttagatctgtcatcagctgcactaccagattcctcaccatcaaagaattcttcccttgatgctcctgtggttccatctactacagtgttctccaggagaagtccttcagacaaagatccatcgctaggagaaagagaagaaaaagacaatgctgggaagaaccaaaagaatcagtttattgtaagccactcagaaaaccaagagagaaatgatagtcctgtgcctacacatgatgaagtggttgatgtcaaatgccattcacactctccttttaggaatgaaagaggaaaaggaaaaataaggcatcatatatcctgtattgaaaagttaagcaaaacagaaagtatatcagtacccaccagtgatcacaggagcctcattgaagcaaatcaaagcaattccaaagtttctgaacttgacacaatttattgtaccttgccaagaaaatcaagcagttttctcatacatggcaggcagtcaggaagtaaaataatggctgcttcattgaggaatgggccacctcccttccaaatcaaaaataatgtggaagatgcaatggggaactatatgttaaacaaatttagtcccagttctcctgagtcagcgaatgaatgttccaaagtcctttnnnnnnnnnntgttttatatcttttagccacagagagaatgacaaatgtaaaaagcagtggatctacttccgttagaaaaggaccacttccattcctcatcaacagggctatgtcatgtccctcaggggagccacatgcctcaactggaagagaaggaagaaaaaagccattgacctcaggcatggatgcttctgagctaacaccaagggcttgggagagaatcattagccctgtggaaagtgactcatctgttagagattgttctttaaccaaaagacaacaccaaaaggaaaacttccaagaatacactgagaaagagggtaaaatggctgcctccaggagaagtgtatttgctctttcaaatgaagaccctttacctttttgctcagacttgtcaggaaaagaacgtgggaaaacattacataaagttaagacgactagtacgttttctgtttctggtgatgaagataatgtaaaatgtctggaggtggtctcaatatattacactctaccgaggaaacccagcaaaaaattctgtaacctccttcaacagtatacacaaaatactaatttacttatagaatcacctcaagtggagactgaaacatttcctaacgctttagaaaaagacaaacagaattattctacacgagagcagtcaggaacaccttcatgtgaaaatctaaagatgtccgtcaactctgatcagacgctcaccactgaaaatatgactgccttccgattatcaaatagggggcccctagctcctacattacaggaaatggcttctgttgaggcagctgtttctcttcctgaagaggaatctaaagctagagagattttttcagataatttagctaaaacacctctaggtgattcagaaaacaagaaggaaagaggcaaaaagttgcaaagtgaaaccctgcatacttcattgatgcttcagagaaaaaatgtatccgaagaaaaatctgaaaattgtcaacaatccattaattcaagtaacagtggtccctctagtcttccagctctttcagaagttaatattggaaattcccaaactagaagaagttcttgggagtgtacagggagtggtagagccattccatttactggaagtggcaagtgtccccagaaagatcacacatccacagctgtaggtgatggctccagtggatcacagcctagggaaggcagaggggacattggaaccaactgccaaaaaatgactaataaaacactttctcactcagagagtcaagtctttgcccttactccagcattgcataaactacagcttggtgaggagactcagtcagatgaaccaaacttagagagtctgcagtctgaaccaagagaattacctcaaagaagtcaggaggcaaatatgacagagagcaggaaggctgaagatgaaatgcagaagtcagcttgggatcaaccttcacttcctgaaggaaacaaaaataaaaccaacttggatgacctagtaaagggggaaaatagatcttcagttaaacacagattggcagccatgtctaaagccagcagaaaattcccagctaaagatgtaagccccagaagacatgtagctactatcttcccccaaagtggannnnnnnnnnnnnnnnnnnnnnnnnnnnnnggcacagtggagtgcaacccactgttccctgagcctactccaaaatctgcagagtccattggcgaaagcaggttgagtgagaacagaaagcatgtgaagaaatccgagaaccttctccccattactgtactacccaacagagaaccttctacacacgtcagcaaccagaagtctaacagcatttcacaacgacatcagaatgagtttaaaaacgtctcagaatcaccatcaaagcatgagaattctaaagacgtcacagcagctcagaatttagtaagagaatcaggagccccatcacccatcacattcaccagcctcagggaagcagaattctctgacaatcagaggaggctgagccctccttttccactggagcctgcacagaaatctagagtaagcagtccactggccagttttctgcagcaacaaaggagtgcttcatctctggagtgggaacctgagccacacctctatcgttcaaagagtttaaaaagcattaatgttcatggcgatctactacgaaaaagccatcctccaaaagtcagggagcgccatttttctgaaagcacttctattgacaatgccctgagtcgactgacccttgggaatgaattctctgtcaacaatgggtacagtcgaagattcagatctttttctgaactcccctcctgtgatggaaatgaaagttgggcttatcgcagcgggacaaaaacaggtcccaggtctgcaatatctatatacagacctatcgactatgggatctttgggaaagaacaacagttagctttcttagaaaatgtaaagaggtcacttacacaaggaagattatggaaaccaagttttcttaagaaccctggcttcctaaaagatgatttgaggaaccctcccaacccctcagagtcattaagctcaaattctcccagtagtcaggtnnnnnnnnnnnnnnnnnnnnnnnagtgaaccgcttaatatctatgaggatgacccagtggactcagattgtgacacagacacaaccacagatgatgaatactacctggatgaaaatgacaaagagtcagaactgtgaggctttttcaataaaatgctttacttttttcaccaaaagcttataatggaactaaggtgtacatgtgcatgtgcatggaaggataaaagatctagtctgggcagtgtctgctctgaaatgtcccacatctccttttttttcctccacaccctatatagacacttcctgaatgctagaacaatgaattcttgttttgagagagtctctgctattttctatctctgtaaatgttcttagcctgcctttccaccactcccacttaatccctgattcactgtctgatttgggctttctgctttacttccctcctaacatttttcatctttaattgtgatttacaaccctaatatcccaggcacatacaaaacttatgaattacccagcacaactgtgaaactctgtattgcttcttccggtccacaccctatactcatgacattaaataaaaggtagggatgataacagtggggtaaatattatcatcctgtttgactcatgaacatttaggaagtttaaggtggtgatcttctctttcaaacaaagataaaggaatttattttttaacctgagaaactgattgcaaaaaggaaaaaaaaaaaaaaaaaaaaaaa

SEQ ID NO: 6223 - DNA, 1843 bp, Homo sapiens
  misc_feature (722)..(736): n is a, c, g, or t
ctgattatgtaataggatggaaaaagtaaaaaaaaaaaaaaaaaatctaatttgtatttccatgacaacgtgttctcccagcaacatccctctcctttatttgagttataaagggcactgctgggcctgagaaccaggccagaacctccttctgtatggcagctaacagtgtagggctccagtatcccaggaaggccccttatccacactccactcagctcataggagagtcttgcataatgaagacacagacctgggcacttcagtccttgtgctcctcctctcttttccccacagcaggacctggatacagaagtactcagccaaggtgacagaataaaatcctttttttgttgttttctgtttgtttgtttgttttggagaaggagtctcgctttgtcacccaggctggtgtgcagtggcacgatctcggctcactgcaacctccgcctcccaggttcaagcgattctcctgtctcagcctcctgagtagctgggattacagacgtgcgccatcacgcccagctaatttttgtatttttagtagatacggagttttgccttgttggccaggctgtgctggagctcctgacctcaggtgattcacctgccacagcctcccaaagtgctgggattacaggcgtgagccacagcaccctgccaaataagatcctttttaaaaaatatctgaaaaaagcttcatatctttacaaactcataannnnnnnnnnnnnnncatggaggagatgaggctgtttagaactggttttgtttcaagtttgtcaattttccctgtatgagaacttgggtaaagcacaaagaaacatacagtgctagtaacaggtctcctgcgccctggaactaagtgtttggaggaaggactaaaccccgggggaggtgagtataaaataattccactaagatcacctcctcagtccccagaaggctgatggtggatcctctggccatctcctgtggggtcttactgctcctctgccatttctctatgcctgaagacacgaagatgatatcaaggcagagctaccatatcgcagccagtctctaggctactgctgtgcagtggctcccactttctaatgcttttttgtttttgctttttctaacaaaacaatcttttttcaaaatgaattccaacccctgctagcttccttccccgcctccatactgttttaggcagcaccgtttatgtgacagagtccgtgtttctcaaatgcatggtgttcctcaggtggagagtgggcagaagtttttgcaacactttttttttaagttattgggtgcaaaatcccaaaccaggatatgtgtatgtctgtgtgtttatgttttttatttgaccctcccctctttcaacctacccccttttatatctaatgtagaaaaagcgaaattgaatctggaaagcaaactgttgtatatagttgcggtaacaatcatgaagagagagccgggctgtcccctcagtaattcattttaaataacaaattatttaaaaataaaattcatgccagagccagctgaagaggccttccttcatcaccactgaggccacccccaatctgggccctctgtccatctggcatgtctcctcccagcaagattcatctgttcaatgccatttgcgtttcaataaagttatctcctgtactgtcaaaaaaaaaaaaaaaaaaaaaaaggggggcggaaaaatcccgaggggccagtaagcgaccccgttttggcaaggccccaaggggggaaaaaagagacggggcgtcaaaggcgggggaacggctgggcttggagagacctccgggggcaggggacccacagaaccggaaaaaag

SEQ ID NO: 6224 - DNA, 1628 bp, Homo sapiens
ataaaaaaaaaaagcaaaattgttggcatctctaagacagagcaagactccctctctaagagatagtagtgtctcccacttaattgaattcgttttgttttgtttgctttgctttgattcttgccacgtaaaatctgtgggtcttgacccagagatttgctcagacagttaagaaaaataataagatgtatttgtaaatttttacataatgaaaaatgagatgtatttgtaaaattttaaaataacctctttataaatacgtttgtaaatataaagaggtaggatgttttggctaattagcacattctgggtcatacacacacacacacaaacaggccaaacactctagatagtcaaataaattccccttttggtgattcagttcagtaatggtgattcagttcagtaactgcctatcctcatcaatgcttgtttgtgatgatgaaatagttgacaaccgggactttacaaaaatagctcctgaaaaaaattaaatattttattgcaatatatgttcatattttttttaacttttatgaaataacattgtgataggtgctttaagaaaaatatttttccagaagtggtttatagtataaactgggggcagtttttacattgtgatgtgtgggtggatggtcatatttagttaggttattaagaaatcatgaagtgttccctaacaagaaacttgcaaagctatttggcaggaagaaaatcattaacttctagtttatttattttttttctcatgctatacgcttaattaccaagtaaattcacttgcataccattaccttaattcaaaggagaagccagaatgtttatcattggtgggagtaaaatatacacagattctttaccatggtgaaatagaataatactgaattcccaatacagaaatactaatttcataagctaatattcctatcttttagctgacttctttctctcttcaggatatatttactatttattatttacctttgaatttttgatttgggggatttttacctattgccatcctactatcttaagtatcctgtacaatgaaatatcttagcaaggaaacacttttaaaacttcacaaatatccaatttcattcttaacatatgggggaagcagtaaaagaaaaagcacttcaccacgtagaagagaaagtgatcattttaattaagataatttcaattcattatcaacatttaatcctctgcaaacaagggaacacttactagcagtacttgaagacttgtgagttggaattgcatgttacttgaaagatctaattaagctaaattttggtgcacagcaggttgtacatgatttcatgtttatgtagcaaaatgcattgaaatgtattagtgttgaaacatacatgtaaaggtagttgtggaaattgttatattttccttgtgtgtcatttatttgagcataaaggttttttttattcagcctaactgaataaggctaaatgaatactgtaattgaaaatatattttaaatctttgtcatgagtttttttaaaaaaaactattgcaaattgtatcattcctgattacacagaactttgtgggtggttttaaataaattttatacttctattttgcaaaaaaaaaaaaaaaaaaac

SEQ ID NO: 6225 - DNA, 1500 bp, Homo sapiens
cattatcacacacttggaaaatacagaaaagtggaggaaaaaatcatatccccaccatccaaagacatatactctcctcttatcttgttcattcttgtttctgtgcacaggtttatgattataactgtgtcaaaatgtatattcaaaatagctgttacattaccttgtggaattatggttaaatactttcactttaattttttcaaatgttccctataataatgtcctgataacagtgtattatgtgtgtctccattggtgtgcataatacatacccagaggaaaaattagaaaataaagtaaattattttaaaaaattacctatattcccaacacctaacaactactgctaacatcttgatctgtttcctctatcttgtttcagtgcacacgcttgtgataacagtgttaaatatgtgtgcataaagtcttaaatgaaaagatgtggaaaataactaaaatagtgttgtcattgtgggaatttggttaaatattttgtctcaaattccttaaataatctttggtgttttggtaataaattttatgtatgtattttccattacaaatataatacatactcatacaaaactttggaaattcagtaaagaaaattcacacatattcccaacacccaacaacaattaactgttaacatcttgatctgtgcactagtctgtgattattagggtgttagtgataagtatgcataaatgtcaaagatgggaagaaagatgaaaaacaagaaatagttgtgtggttgttgtgggattatggttattttgtttcggtttccttgaaaggtcatcattctagtgttttggtagtccacctttactacatatatttccattatatatgaaatgtgttcattatagaaactttgaagttacagaaatgtagaagagaaactcacccatgttttcaccatccaaagagtgtggttaacatcttgatatattttcttcatcttgtttctgtgcacaggtttttggtttgttaatatggttgtggtcattctatctgtaatagtgtcaacaataaaaataaagttaaaaataaataaaaaaaaaaaaaaaaaaaaaaaaaaaaaaaaaaaaaaaaaaaaaaaaaaaaaaaaaaaaaaaaaaaaaaaaaaaaaaaaaaaaaaaaaagaaaaaaaaagaaaaaaaaaataaaaaccaaaaaagaaaaaaaagaagggcggcgctgcccgatacccactgacgcctacggagcggggccagaggcgagagaccggcacagccggtgcccgagagcaaagaggaaggcgagacacgtagggcacgtagataacgaaaagagagcagaggcaaggggcaaagaaccgacaaggcaaacaagcggagagcaaacagaccgcgcgccaccagacgccaacacacgagaacaaccacacacggtaaggggaagaggacaacgacaaccccaagacatgacgtcggcgccgacacgaaaacaaccaggcgccgggtcgcacga

SEQ ID NO: 6226 - DNA, 4431 bp, Homo sapiens
  misc_feature (1957)..(1957): n is a, c, g, or t
  misc_feature (1968)..(1968): n is a, c, g, or t
atatcaatgagtgcctgcagagtccttgcaagaatggtgccatctgccagaattttccaggaagcttcaactgtgtttgcaaaactggatacacagggaaaatgtgtgaatcttcagtcaattactgtgaatgcaacccctgctttaatggtggttcctgccaaagtggtgtggattcttattattgtcattgtccatttggtgtctttggaaaacactgcgagttgaacagttatggatttgaggagttatcatacatggaatttccaagcttggaccccaataacaactatatttatgtcaaatttgccacgattaaaagtcatgccttattgctttacaactatgacaaccagacaggcgaccgggctgagtttttggcccttgaaattgccgaagaaagactaagattctcttataatttaggcagtggtacatataagctcaccaccatgaagaaggtgtcagatggacattttcacactgtgattgccaggagagcaggaatggcagcctccttaactgtggactcctgttctgagaaccaagagccaggatattgtactgtcagtaatgtggcagtttcagatgactggactcttgatgttcagccaaatagagttacagttggaggtatcagatctctagaaccaatccttcagagaagaggacacgtggaaagccatgattttgttgggtgtataatggagtttgcagtcaatggaaggcctctggaacccagccaagctttggcagcacaaggcatcctagatcaatgccctaggctggaaggcgcttgtactcgcagcccatgccaacatggtggcacatgtatggattactggtcatggcagcagtgtcattgcaaagagggactcactgggaaatactgtgaaaaatctgttactcctgacactgccttatcattagaaggcaaagggcgcttggactaccacatgagtcagaatgagaagcgggaatatttgttaaggcaaagcttacgaggtgccatgttggagccttttggtgtgaacagtctggaagtaaaatttaggaccagaagcgagaatggcgttttaatccatatccaagaaagcagcaattacactactgtaaagattaagaatggcaaagtatattttacatccgatgcaggaattgctgggaaagtggagagaaatattcctgaagtatatgttgcagacggccactggcacacttttctaattgggaaaaatggaacagcaacagtattgtctgttgacagaatatataacagagatattatccaccctactcaggacttcggtggccttgatgtgcttactatatcacttggaggaattccacccaatcaagcacatcgagatgcccaaacaggttttgatggctgcattgcttctatgtggtatggtggagaaagtcttcctttcagcgggaagcatagcttggcctccatctcaaaaacagatccctcagtgaagattggctgccgtggcccgaacatttgtgccagcaacccctgctggggtggtttgctgtgcattaatcagtggtatgcctacaggtgtgtccctcctggggactgtgcctcccacccgtgccagaatggtggcagctgtgagccaggcctgcactccggcttcacctgtagctgcccagactcgcgcacgggaaggacctgtgagatggtggtggcctgtcttggcgtcctctgtcctcaggggaaggtgtgcaaagctggaagtcctgcggggcatgtctgtgttctgagtcagggccctgaagagatctctctgcctttgtgggctgtgcctgccatcgtgggcagctgcgcaaccgtcttggccctcctggtccttagcctgatcctgtgtaaccagtgcagggggaagaaggccaaaaatcccaaagaggagaagaaaccgaaggagaagaagaaaaagggaagtgagancgttgcttttnatgaccctgacaatatccctccctatggggatgacatgactgtgaggaagcagcctgaagggaacccaaaaccagatatcattgaaagggaaaacccctaccttatctatgatgaaactgatattcctcacaactcagaaaccatccccagcgcccctttggcatctccagagcaggagatagagcactatgacattgacaacgccagcagcatcgccccttcggatgcagacatcattcaacactacaagaagttaagaagaaaaaaaaaaaaattttcaatccagaggcacagtcccctaggctttgcaaggcaatcccccatgcccttaggagcaagcagtttgacttaccagccttcatatggtcaaggtttgagaaccagctccctaagccactcagcatgcccaactcccaaccctctgtctcgacacagtccagcccctttctccaaatcttctacgttctatagaaacagcccagcaagggaattgcatcttcctataagggatggtaatactttggaaatgcatggtgacacctgccaacctggcattttcaactatgccacaaggctgggaaggagaagcaagagtcctcaggccatggcatcacatggttctagaccagggagtcgcctaaagcagccgattgggcagattccactggaatcttctcctccagtcggactttctattgaagaagtggagaggctcaacacacctcgccctagaaacccaagtatctgcagtgcagaccatgggaggtcttcttcagaggaggactgcagaaggccactgtctagaacaaggaatccagcggatggcattccagctccagaatcctcttctgatagtgactcccatgaatctttcacttgctcagaaatggaatatgacagggagaagccaatggtatatacttccaggatgcccaaattatctcaagtcaatgaatctgatgcagatgatgaagataattatggagccagactgaagcctcgaaggtaccacggtcgcagggccgagggaggacctgtgggcacccaggcagcagcaccaggcactgctgacaacacactgcccatgaagctagggcagcaagcagggactttcaactgggacaaccttttgaactggggccctggctttggccattatgtagatgtttttaaagatttggcatctcttccagaaaaagcagcagcaaatgaagaaggcaaagctgggacaactaaaccagtccccaaagatggggaagcagaacagtatgtgtgaagtttatgtactggcactataaaatataaaaacaagaaataatactcaaaccattgtaaagttgctgactaggttgggtcacatttgaaaaacaggccagtatggactagtggtggagggaaaactttaaaaataataaccacaatgctgctgaaacagactcacaacaactcttaatttaaacatgtgtggttgaatttatttccctgcatgcattgtgttttgtaactagttatgtggcatgcagcatttggaaaatttttcttatttaccagtgtttgatttgtgatttttaaaaattgatacctttaccattgcagaaaagaacttgtgctttcccagtggcgtatgtgtattgtttcaactgtattattataattatattttgcattgcaagattcttgatgttaaaccaatccttgtaaagtgtaaaaaggaaccctcctatcgtggaatgaaagattaagtatattaacacttttcagaatgatagtttctgtatttgatgttgctcagaaatgtctgagtatttgagtaagttttacatgacagtgggtactgaaattaagtcattttgttcagcactttaacgctttcttatagaattgtcttaaaacttctggatccttgagcaaatgattatagtctcctgactttcatgaggcttccattaggaacagaatgattgcatgttgtccccagaacactgccaccttgctatgcgaatgatgttctcagcagcacttctaagaaacactcttaaaagttatttattgaaaatttttcgtatgcttttaatattttaaagaattgacctaaggaaagcttatgattggacttattttccaaccagataacatttactctaagtacccagtttttataatttatatgaaatcagatttcaacacttactttgtcattttgtagatcattttttttaaatactgtgtaaaaactttttttacacctaagctgtgtttttgatactgatattttcctatgctgaatagttttcttactttcagggaaggtaagaaaatactttttttatatttgttacttatgtaacattcatatttttctcattttgatatttgtaacatactgtatgctttctacttgtaaatgtcaacaatagaattaaaatatttatttaaaataaaaaaaaaaaaaaaaaaaaaaa

SEQ ID NO: 6227 - DNA, 948 bp, Homo sapiens
  misc_feature (822)..(850): n is a, c, g, or t
  misc_feature (854)..(854): n is a, c, g, or t
aaaaaagacagaaaatggactaaataggaacataatttcagagtttatgagtcagtttacaatatgccatattagcgatctcatgatgattcagaccacagtctgggttaaagatgtcttgacctctgaggctagcataacatatatgagaatacaacttgcctatttccagaaaatctgtatatttttatagaataactttatttacaatttctatcatccaattactcactaggcattatttgtagtactttttttctctttgaaatctcataggatagtcacacttataaacattcccaatattcggattctagaagaaatgcaattcattaaaattttcctggcactgagagttaatctttagcagattgcatgaaaatactgaattcctggtaaggagatattttgttttaaaaataatgtgttttgatacgaatcagtgtattaactgataactagaaagtactcttttttctatatatacatatttttttgaactcatattcacaatcaacatattcaatcagtgagttaagtctcattcctagctaccaaaattcctgggccacttttaaacactaaacatttcatttatcctctaagctaaaatggtgctgagttatttaaatctgaatgtaaaatgcattaaatcttagcttgtggtatataaacatttaattaatataaaactgcttgctataaactaagtaacatgtcatttggtgttaggtttttagtgaagttttagcttctcccaaatttttcaggaatgttatttgtaagacgtgtaacttttttgaagaactcttattttaaatnnnnnnnnnnnnnnnnnnnnnnnnnnnnngcantctcatattcttttattatacatctatactatgattgcaagattatataaaaatgccttgaataaatgatttcaagtgtcaaaaaaaaaaaaaa

SEQ ID NO: 6228 - DNA, 1637 bp, Homo sapiens
  misc_feature (530)..(544): n is a, c, g, or t
  misc_feature (1589)..(1608): n is a, c, g, or t
ggtagatgcggctgtgacagcagcaaagaatgacggccaagggcgacagcaggggctggccatgctgtaaaggggcttcttggtcgtcccagcctgaggaatcaaggggaactcctgagccgagaattctgaagatctcctccctccctgaagctgtggcctgggccatcggaaaactttcagttttgtttccttgcctgcaagaaacgaaactcaaccgaaagcctgcagagagcagaacatggaaggagacttctcggtgtgcaggaactgtaaaagacatgtagtctctgccaacttcaccctccatgaggcttactgcctgcggttcctggtcctgtgtccggagtgtgaggagcctgtccccaaggaaaccatggaggagcactgcaagcttgagcaccagcaggttgggtgtacgatgtgtcagcagagcatgcagaagtcctcgctggagtttcataaggccaatgagtgccaggagcgccctgttgagtgtaagttctgcaaactggacatgcagctcagcnnnnnnnnnnnnnnngagtcctactgcggcagccggacagagctctgccaaggctgtggccagttcatcatgcaccgcatgctcgcccagcacagagatgtctgtcggagtgaacaggcccagctcgggaaaggggaaagaatttcagctcctgaaagggaaatctactgtcattattgcaaccaaatgattccagaaaataagtatttccaccatatgggtaaatgttgtccagactcagagtttaagaaacactttcctgttggaaatccagaaattcttccttcatctcttccaagtcaagctgctgaaaatcaaacttccacgatggagaaagatgttcgtccaaagacaagaagtataaacagatttcctcttcattctgaaagttcatcaaagaaagcaccaagaagcaaaaacaaaaccttggatccacttttgatgtcagagcccaagcccaggaccagctcccctagaggagataaagcagcctatgacattctgaggagatgttctcagtgtggcatcctgcttcccctgccgatcctaaatcaacatcaggagaaatgccggtggttagcttcatcaaaaaggaaaacaagtgagaaatttcagctagatttggaaaaggaaaggtactacaaattcaaaagatttcacttttaacactggcattcctgcctacttgctgtggtggtcttgtgaaaggtgatgggttttattcgttgggctttaaaagaaaaggtttggcagaactaaaaacaaaactcacgtatcatctcaatagatacagaaaaggcttttgataaaattcaacttgacttcatgttaaaaaccctcaacaaaccaggcgtcgaaggaacatacctcaaaataataagagccatctatgacaaaaccacagccaacatcatactgaatgagcaaaagctggagcattactcttgagaagtagaacaaggcacttcagtcctattcaacatagtactggaagtctcgccacagcaatcaggcaagagaaagaagtaaaaggcacccaaaaagaaaggaagtcgaagtnnnnnnnnnnnnnnnnnnnntgattctatatctagaaaaccccatgatc

SEQ ID NO: 6229 - DNA, 1302 bp, Homo sapiens
gtgggttcggcgaccatcgcgcggcggccatgggggcgcggctgggccggcgggccgggcccgaggctggctctgaggccggggcggcggccggctgcgggcccgcgccctacgagcgccgggtgcggtggctccgcgagatccagtccacgctccgcgagcggcggccggagcgcgccctggtcagctgctgcgcctcctgcgccatgacctgggccttgagaggaccctccttcctgatatcctctacagagatgtggccttcctcaacccggtcgaccccatctcccatgacctgcttgtgaacctggcccgggacctgcagtgccccaagaaggactatgagctctggaagtcctcggacaagatctgccgacagctcatctaccacctcacccctcactcgaagcagcagcaagggtccagcctgcgccagaggaagacccagagctgcctcaagagcagcctccagaagactctgctggcaggggagactgtggacctctcaggcatcccgctgtcgacacaggacgtgcaacacatcacacgctacctgagcagccatggtgctgtgctggcggtgctggacctgagcttcacggggctgagtgatgagctgctgcacctcctgctgcccagcctgtgggcgctgccccgcctcacccagctcctgctcaacggcaaccgactgacgcgggccactgcccgcaagctcactgatgccatcaaggacaccaccaagttccctgctttggcttgggtggacctgggcaacaacgtggatgtggcttccctgccccagcccctgctggtcggcctgcgccggcggctgagccagcgcacctcactccccaccatctacgagggcctggaccttgagcctgagggcagtgcggccggggccaccacccctgcctccacctgggactccacagctgctgggctgggacccgagccccaggcctgctgtgccaggtgacccaccacccacctggctcattgctactgacttgtgatgctctcaagcacatgatagtgggcgatgaaggtcaaggaggactcacaggcccccagaaatccagtgtaaatgctcagcctgagattaaggggacagaagaatggactcataggtggccaggtggccagccctggctagaggctcagccttccctcagtgggaggggccccagcacccacagtgtggaccccgcaataaagagtgacacccgcaaaaaaaaaaaaaaaaaaaaaaaaaaaaaaaaaaaaaaaaaaaaaaaaaaaaaaaaaaaaaaaaaaaaaaaa

SEQ ID NO: 6230 - DNA, 3957 bp, Homo sapiens
  misc_feature (1520)..(1535): n is a, c, g, or t
ggatcctggagacaactttgccgtgtgacgcgccgggaggactgcagggcccgcggccgagggctcggcgccgcctgtgagcgggcccgcgcggccggctctcccgggcaccaagcttgctccgcgccactgcccgccggcccgcggcgaggacgacctgcccgtctccgccgccggcggcccttcctggcgcgaggcagtgagggcgaggcgctcaggtgcgagcgcggggccccgccgcagcgcccgccgcagcgccgcgccaagccgcgcccggctccgctccggggggctccagcgccttcgcttccgtctcagccaagttgcgtggacccgctctttcgccaccttccccagccgccggccgaaccgccgctcccactgacgctgctttcgcttcacccgaaccggggctgcggggcccccgacgcggaaaggatggggagaaggctgcagatgccgaggcgccccgagacgcccgtgcggcagtgacccgcgacctccgccccgcccggcgcgcccctcgggcccccggggccctcggcgccccttccctgccgcgcgggaacccccgaggcccggccggccccctccccctgcgagccggcggcagccctcccggcgggcgggcgggcggaggcccgggcgggcgcgggcgcgggcgggggcggggcggggcggcgcgcccggagcccggagcccggccctgcgctcagcggactcggctcgcctcgcggcgggcgccctcgtcgccagcggcgcaccatggacgggctgcccggtcgggcgctgggggccgcctgccttctgctgctggcggccggctggctggggcctgaggcctggggctcacccacgcccccgccgacgcctgccgcgccgccgccacccccgccacccggagccccgggtggctcgcaggacacctgtacgtcgtgcggcggcttccggcggccagaggagctcggccgagtggacggcgacttcctggaggcggtgaagcggcacatcttgagccgcctgcagatgcggggccggcccaacatcacgcacgccgtgcctaaggccgccatggtcacggccctgcgcaagctgcacgcgggcaaggtgcgcgaggacggccgcgtggagatcccgcacctcgacggccacgccagcccgggcgccgacggccaggagcgcgtttccgaaatcatcagcttcgccgagacagatggcctcgcctcctcccgggtccgcctatacttcttcatctccaacgaaggcaaccagaacctgtttgtggtccaggccagcctgtggctttacctgaaactcctgccctacgtcctggagaagggcagccggcggaaggtgcgggtcaaagtgtacttccaggagcagggccacggtgacaggtggaacatggtggagaagagggtggacctcaagcgcagcggctggcataccttcccactcacggaggccatccaggccttgtttgagcggggcgagcggcgactcaacctagacgtgcagtnnnnnnnnnnnnnnnngctggccgtggtgccggtgttcgtggacccaggcgaagagtcgcaccggccctttgtggtggtgcaggctcggctgggcgacagcaggcaccgcattcgcaagcgaggcctggagtgcgatggccggaccaacctctgttgcaggcaacagttcttcattgacttccgcctcatcggctggaacgactggatcatagcacccaccggctactacgggaactactgtgagggcagctgcccagcctacctggcaggggtccccggctctgcctcctccttccacacggctgtggtgaaccagtaccgcatgcggggtctgaaccccggcacggtgaactcctgctgcattcccaccaagctgagcaccatgtccatgctgtacttcgatgatgagtacaacatcgtcaagcgggacgtgcccaacatgattgtggaggagtgcggctgcgcctgacagtgcaaggcaggggcacggtggtggggcacggagggcagtcccgggtgggcttcttccagcccccgcgggaacggggtacacggtgggctgagtacagtcattctgttgggctgtggagatagtgccagggtgcggcctgagatatttttctacagcttcatagagcaaccagtcaaaaccagagcgagaaccctcaactgacatgaaatactttaaaatgcacacgtagccacgcacagccagacgcatcctgccacccacacagcagcctccaggataccagcaaatggatgcggtgacaaatggcagcttagctacaaatgcctgtcagtcggagagaatggggtgagcagccaccattccaccagctggcccggccacgtctcgaagttgcgccttcccgagcacacataaaagcacaaagacagagacgcagagagagagagagagccacggagaggaaaagcagatgcaggggtggggagcgcagctcggcggaggctgcgtgtgccccgtggcttttaccaggcctgctctgcctggctcgatgtctgcttcttcccagcctgggatccttcgtgcttcaaggcctggggagcctgtccttccatgcccttgtcgagggaaagagacccagaaaggacacaacccgtcagagacctgggagcaggggcaatgaccgtttgactgtttgtggcttgggcctctgacatgacttatgtgtgtgtgtgtttttggggtggggagggagggagagaagagggggctaaatttgatgctttaactgatctccaacagttgacaggtcatccttgccagttgtataactgaaaaaggacttttctaccaggtatgaccttttaagtgaaaatctgaattgttctaaatggaaagaaaaaaagttgcaatctgtgcccttcattggggacattcctctaggactggtttggggacgggtgggaatgacccctaggcaaggggatgagaccgcaggaggaaatggcggggaggtggcattcttgaactgctgaggatggggggtgtcccctcagcggaggccaagggaggggagcagcctagttggtcttggagagatggggaaggctttcagctgatttgcagaagttgcccatgtgggccccagccatcagggctggccgtggacgtggcccctgcccactcacctgcccgcctgcccgcccgcccgcatagcacttgcagacctgcctgaacgcacatgacatagcacttgccgatctgcgtgtgtccagaagtggcccttggccgagcgccgaactcgctcgccctctagatgtccaagtgccacgtgaactatgcaatttaaagggttgacccacactagacgaaactggactcgtacgactctttttatattttttatacttgaaatgaaatcctttgcttcttttttaagcgaatgattgcttttaatgtttgcactgatttagttgcatgattagtcagaaactgccatttgaaaaaaaagttatttttatagcagcaaaaaaaaaaaaaaaagaatacagttaaatgtattatacataattttggaaccaaagaggccaacagatcagttttaattttattagacggtgaggccatctgagatgaggtggacgttctgagcagtcccttgagtggcctgccaacgtttcagggtatgaatggattttgtttattcggtttgatgtgtcttttccatccttacacacccagaaggtagagtaaaaatgactatgatagaatgcaggtgtgtatccttaaatcctcatctttatgtttatttaataaagctccccttagattctgtttcataataatttaaaaccaaacaattttcccatagacttgctgttaaagtattgtacgtttgtgtacagtttaagaaaataaaagattgagtgccacgggcaaaaaaaaaaaaaaaaaaaaaaaaaaaaaaaa

SEQ ID NO: 6231 - DNA, 1265 bp, Homo sapiens
  misc_feature (40)..(67): n is a, c, g, or t
  misc_feature (1209)..(1228): n is a, c, g, or t
cagcaacggagctggcgacacgccaagcaacaaggcatcnnnnnnnnnnnnnnnnnnnnnnnnnnnncctcccttcggctcagcaccccgcagggcacaggctgtccacccggtggtctggcccttggggaatgcgtcagggtgaccagatccaccaggctagcagccaggtcactgttgggattgcacggtcgtcacgagctgcctttcctatccacacacccagccaggacccagcccaccactcccgactgctgcccctgacagctgagtgcctgctttacggacacgcagtaatgccgaagatttgcgggggaggacatagggctgtccccgggattcacctgctggctgtggtctctgcccactgcttctgtccttggaaagcaaggcaggaggcagcatccccaggggcctctatgtgggagggagggacacctggggtcacaacccagggagggagggtcacagcccagggaggctgggagctgctccaaggccctggaactctgcctcagtcgcggcatgctggagaggggtacggacttactttcttggagttgtcccaggttggaatgagactgaactcaagaagagaccctaagggactggggaatggttcggttcctgccttcaggaaagtgaaagacgcttaggctgtcaacacttaaaggaagtccccttgaagcccagagtggacagactagacccattgatggggccactggccatggtccgtggacaagacattcctgtgggccatggcacaccgggggggatcaaaatgtgtacttgtggggtctcgccccttgccaaaagccaaaccagtcccactcctgtcattggacgtttcttcccattccctcctcccaaatgcacttcccctcctccctctgccccctcctgtgttttggatttctgttcactcagaattgtaaatgtttagttgtgaccatgacgtattgtttgggtcaatgtccctttccaatgcatactaatatattatggttattatatatgaatatatttaatgacatggaaaaagttgtggattttctttctttccttttttttgggggggggtggggggttggttagagttgtaatggacccagatggaacttgtaacgtgggccccacatgatagaactaaattcagatatcattaaataaactcttgtacactaaaaaaaaaaaaaaaaaagcggnnnnnnnnnnnnnnnnnnnnagggcaagtaacggtacaccagttcttgaaaagggcc

SEQ ID NO: 6232 - DNA, 4159 bp, Homo sapiens
  misc_feature (817)..(848): n is a, c, g, or t
  misc_feature (1143)..(1157): n is a, c, g, or t
ttttttttttttaaacaggaaattctcttataagtgacttgatgctttccttttgctgtttttagaattctctctgtgtttgacttttgacaatttgattgtaatgtgccttgcagaagacctttttggtttgaatcttttttgggattactgaacatcctgtatctggatgtctgtatctcttgcaagacttaagaaatgtttgactgttattttgctaaataggttttctgtgcctcttcccttctctttcctgaaacaccgagaatttatttggtctgactgggttatttcaaaagacctgtcttcaagttcagaaaatcttagttttgctttatctagcgtacttttgaagctctcagttgcatttttaaattttattcattgaatttttcagttccaggatttgtttggttatttttctatatctatctctactgactgtcttattcagatcatgaattgttttcctactttgtattatctgtgttctcttgcaacttgctgagtttccctaagatcattattttgaattccttttctggcatttttatagatttccttttcttttgaatctgttactggagaattattgtgtctctttggaggtatcaaatttccttgctttttcatgtttcttgtgtccttacattgatatctattcagctagtggaagagttgcttcttccaattttatggattggctttcataaggaaagacttttttgtaggcatatctgtagttttggttgtgattaggatgttttggctttgattctggtgagcacaggagtgtaggctcaatgatttcttcagnnnnnnnnnnnnnnnnnnnnnnnnnnnnnnnntgtcactgtgagtcctcagtggcttaagttgccattgttagctgaggctgttgtgaggcttttctggggaaagggatgccagaggggccagtccctgggccttttggtggcatgggcaggctttagctgtggtggcgatgggctgggcatgctagtcctcaggaccccagctggtgtaagtgctggtagtggggggcccaggtgggctggtcctcaagcccccaggcagcatttatggtgctggcagtggcagtagcagcagtgggctagacactggactgtcaggtggcaatcnnnnnnnnnnnnnnnagctgtggcaggatgaatgggacagtttctagccccctaggtgatgcacttgggtgggcactggtggtaggtggggcaggcctgttcaggccttgggattgtgtgcgtgggcaccagtggtgttggatggggtgggccagtcgtcaggcccccctacagagcatataggcaccagtagtggcatgagggaaagatagcgctggagaacactggtgacagtgggtggagcaggcctgtctttaggttcttggatggcacatatggacatactggtcctcaggccccctgaaggtgcacacaggcatgctgttgccctgctgagaggggcaaggttctgttggtggcattggtgttgggaagatggctcccaggttctgggagcttcagctccctttttcctggggtagcctccctggtgtgctatactgcctgttccctgggatataagacacttcatgggtcagagtactggggacctggctgcactgctgggtgattgtgatactgcaaccttccggatggatgtgggaggatgttcttgggggtccagggatgtggactgcaggggcttattggaccccaagtgggcaggatataatctggtgggggctagcctcttaaaatggtgctgtgccacagcagcatgtttcttgggatgtgagtaggatccagtggaattccctttctggaagaacgcatttgcatggattccaggcagctccgtatactggactcagggcctgtgaaggctgacggcatcccctgtgggtgccagcatctgtgctgcgaatgtggaccaccgcagttctttgacttttcttttcccagaaatgggattcccctcctgcttctgagccagtccaagacatgctggctgctttatttactgctccctttgtgcctcagaagttccctgttgaatagtgttctgtctttggtgctctacctgacatgtggttaactacttgcttttttggtcctttgttgtgcaggagttgagtgccaggctcacggttttttgattaccatagttttgtagtttttgaaattcagaagtgtgagacctccaactttttctttttcaagattatttcggctgttgagtcaattatgattccatatgcattttagatggatttttctatttctggaattgtgccattaggagtctgatagatactgcattgaatctgtagagtgctttgggtagtattgacatcttcccactattaagtcttccagtacatgaacacatgcattttcctgatgactaatgatgttgtaccttttcatatgcttattggctatttgtagatcttcctgggagaaatgtctatgcagactttttgccaattttttaatttgtccatttaaaaatcagggttttttttgttgttgagttgtaggagttctttttgtattccttatactagtcccttatcagatatatgctttgcagatattttctcccaggtgggttgtcttcacttccttggtagtgtcttttaatacacaaagttttaaatttttatgaagtcaaatgtatctacatttttctttggttgctcatgcttttggtgttgcatctaagaatccactgccaaatccaaggtcatgaagatttactcctatgttttcttctaagaattttatagtttttgctattacataaggtctttgagccattaagatcttcgacttaacttttgtatatgatgtaaagtcactgtcaaacatcattcttttgcatttggctgtccaggtatcccagcattatttgttgaaatgcctacacttctttatattcccttgactcctctaaccaaggcagttggacctttgctactaccactgccctgaaactgctgtcactgggttactgaggactgggtagcttagttgagtagataatcttttgttgtttcctccttgtaatatacaagccttggcttctgtgacatcatactctcctagatttccccctgtcactgtggcttcttctcagtctctgtccatccctggtgctcctgaaggttctgttctcagccttacacacattacctgggtgatctcattctctgccatgacttcacttgccatatatgtgctgattttccccaaattcctatttctcccgacctttacatctattttatttgcaggtcatatatctaataaggaattgatatccagtgtacatgtagaactcctgtaattcaatacagaaaccaaacagtccaattaataaatggagaagagatttgaatgaacatttttctaaagaacatctcaagctcaagatttcccagataacttttctttcttcaaaatctgcttctgtgtttcctcatctgtaggtggcacagcatacatctgatttcccaagccagaaacctcatagttatccttgactccaggaagaaatattattgagtttttaaaaactcagcttattgactcattgttttatataataaaatgcaacagttttaagtgtatatttcaatgagttttaatacatttatgtacttgtgtcactatcctcatagatagagacaaaacatttctatcacaccggcaatttcctatgtgtcccatcccaatcaatcctttcccctttgctggctccaaacaatgactctttcctatctttttagaaagattagaattgcttttctagagttccagtaatggaatcatacagtgtctaagtctgtttgtggtgctgtaacaaaatacctgagactgggtaatttataaattataggaatttatttctcacagttctggatgctgaaaagtttatgatcaaggcactagcaggtttggtgtctgagggcccagtttctaatttgaagatggtgctttaaacactgtcctcacatggtagaaggggcagatgggcaaaaaaaaaacacaaaaacaggcccgtggtgtgcccccctaaggggaactccagggaaaacctaacaacctcaaagcccctttttttgtgggattcc

SEQ ID NO: 6233 - DNA, 2325 bp, Homo sapiens
gaggcccagaggcaggctccccccttggtccagctggagcagccctttcagggagccccgccctcccaaaaagccgtgcaaatccagctacccccccagcaggcccaggcatcgggtccgcaagcggaggtgcccacactgccgctccagccttcctggcaggcaccgcctgcagtcttgcaggcccagcccggacccccggtagcagcggcaaattttcccctgggctccgctaaatcattgatgactccatcaggagaatgcagggcctcttctatagaccgcagggctcctctaaagagcgcaggacctcctcgaaggagcgcagggccccttcaaaagaccgcatgatctttgctgccaccttctgtgctcccaaggcagtgtcagctgcgcgagcacacctgccagctgcctggaaaaacctgcctgccacaccggagacctttgctccctcctcaagtgtcttcccagctacctcccagtttcagcctgcctctctgaatgcctttaaaggcccctctgctgcctcagagaccccaaagtcactgccatatgctctgcaggatccctttgcctgtgtagaggccctgcctgcagttccatgggtcccacagcccaatatgaatgcctcaaaggcatcgcaggcagtgcccaccttcctgatggctacagcagctgccccccaggcaactgccaccactcaagaggcctccaagacctccgtcgagccgccacgccgctccggcaaggccacccggaagaagaagcatctggaagcccaagaggacagccgtggccacacgctagcctttcatgactggcagggcccaaggccctgggagaatctaaatctgagtgactgggaggtccaaagccctatccaggtctcgggtgactgggagcacccaaacaccccccgtggcctgagtggttgggagggccctagcacctccaggatcctgagtggctgggaagggcccagcgcatcctgggccctgagtgcctgggagggcccgagcacctccagggccctgggtctctctgaaagcccagggagctctctgcccgtagttgtgtctgaggtcgcaagtgtctctccgggatccagtgccacccaggataattccaaggtggaggcacagcccttgtctcccttggatgagagggcaaatgcgttggtgcagttcctcttagtcaaggaccaagccaaggtgcctgtccagcgctcggagatggtgaaagtcatcctccgagagtataaagatgagtgcttagatatcatcaaccgtgccaacaataagctggagtgtgcctttggttatcaattgaaagaaattgataccaaaaaccacgcctatattatcatcaacaagctgggctaccatacagggaatttggtggcatcctatttagacaggcccaagtttggccttctgatggtggtcttgagcctcatctttatgaaaggcaactgtgtcagggaggatctgatctttaattttctgttcaagttagggttggatgtccgggagacaaacggtctctttggaaatactaagaagctcatcaccgaagtgtttgtcaggcagaagtacctagagtacaggcgaatcccttacactgagcccgcagagtatgagttcctctggggccctcgagcattcctggaaaccagcaagatgcttgtcctgaggtttttggccaagctccataagaaagatccacagagctggccattccattaccttgaagcgctcgcagagtgtgagtgggaagacacagatgaggatgaacctgacaccggtgacagtgcccacggccccaccagcaggccccctccccgctaataggtgtagcagagatctcgctcctgtgtttccctggccagaggccactgacagggtggggggacatttttgttcctggtgtttgtgttccagttccacgagtgtaagtttggattttcaacttggtttcgtatctgccaaagctttgtacattttttatgtggtgttgatttcaatcggctactgttctgttctgtattttggcatctgtgtttttaagtgagatctgtggttctctgttttgtgttataattgttatgttttggtatcagctttgtgctggctttgtgaaatgaattgagaagctatccatctcatttctggtatagttcatgtagcattgtaatcggttgttctttgaacgttcaaatgactcatcagtaaaaactgtctacagagaagtaaatatctatatctatatatataaatatactttcagcataacaaaaaaaaaaaaaaaaaaaaaaaaaaaaaa

SEQ ID NO: 6234 - DNA, 5960 bp, Homo sapiens
  misc_feature (2132)..(2148): n is a, c, g, or t
gcgagtaacgggatagcgcggctcagagggtctggcggacgccgcctggtgagaagcaggcagccagtacccttgccacggtagaatgggtgaggaggggccccccagcctggagtacatccaagccaaggatctgttcccccccaaggaactagtgaaggaggaagagaatcttcaggtccccttcacagtgctgcagggtgagggagtagagttcctgggccgggcagccgatgccctcattgccatctctaactaccggctgcatatcaaattcaaggactctgtcatcaacgtccccctccggatgattgacagtgtggagagccgtgatatgttccagttgcacatttcctgcaaggactccaaagtggtgaggtgccacttctccacttttaagcagtgccaagagtggctctcacggctaagccgagccacagcaagacctgccaagcctgaagacctctttgcctttgcctaccatgcctggtgcctggggctgaccgaggaggaccagcacactcacctatgtcagccaggtgagcacatacgttgtcgacaggaggcggagcttgcaaggatgggctttgacgtgcagaacgtctggagagtctcacacatcaacagcaactacaaattgtgccccagttacccccagaagctgctggttcctgtgtggatcactgacaaagagctggagaacgtggcttccttccgctcctggaagcggattcccgtggttgtgtatagacacttgcgcaatggggctgccatcgcccgctgcagccagccagagatcagctggtggggctggcgcaatgctgatgatgagtacctggtcacgtccattgctaaagcctgtgccctggacccggggacaagggccactgggggctccctcagcaccgggaataatgataccagcgaggcgtgtgatgctgactttgattcttctctgactgcgtgctctggagtggagagcacagcagctcctcaaaagctgctgatcctggatgcgcgatcctacacggcagcagtggccaaccgggccaagggtggaggctgtgaatgtgaagagtactatcccaactgtgaggtcgtgttcatgggaatggccaacatccatgccatccggaacagctttcagtacctccgggctgtgtgtagccagatgccggatcctagcaactggttgtcggcactggagagtaccaaatggctgcagcacttgtcggtgatgctaaaagcagctgtgctggtggctaatacagtagaccgggaaggccggcctgtgctggtacactgctcagatggctgggaccgcacaccgcagatcgtagccctggccaaaatattactggacccatattacaggacgttggagggcttccaagtgttagtggagtctgactggctggattttgggcacaagtttggagatcgctgtggccaccaagagaatgtggaggaccaaaacgaacaatgccctgtgttcctccagtggcttgattctgttcatcagttgcttaagcagttcccctgcctgtttgaatttaatgaagcattcctggtaaaactggtgcaacacacatactcctgcctctacggcaccttcctggccaacaacccctgtgagcgagagaagcgcaacatctacaagcggacctgctctgtgtgggcgctccttcgagctggcaataaaaactttcataacttcctctacacacccagctcagacatggtcctgcatcctgtttgtcatgtccgggccctgcacctctggacagctgtttatctgccagcatcatctccatgcacacttggggaagaaaacatggatctttacctttccccagtggcccagagccaggagttctctggccgctctctggacagattacctaaaaccagatccatggatgatcttctttctgcctgtgacacaagcagccccctgactcgtacatccagtgaccctaacctgaataaccactgtcaggaggtcagggtaggcctggagccctggcacagcaatcctgagggatcagagacaagctttgtggactctggggtaggagggcctcagcaaactgtaggagaagtgggtcttcctcctcctctgcccagcagcnnnnnnnnnnnnnnnnngcaataaacctttcaagagtcacaaaagctgttctccaagttacaaactgcttaataccgcagtgcctcgggaaatgaagagcaacacctctgatcctgagatcaaagtcctagaagagactaagggaccagctccagacccttctgcccaggatgagctgggtaggactttagatggcataggggagccacctgaacattgtcctgaaacagaagctgtcagtgcactctccaaggtcatttctaacaagtgtgatggagtttgtaattttcctgagtcttcccagaactctcctacaggtacgccccaacaggcccagccagactccatgctaggtgtgccctccaagtgtgttcttgatcacagcctcagcaccgtttgcaacccaccgagtgctgcctgccaaactcctctagacccaagcactgacttcctcaaccaagatccctcagggtctgtggcaagtatctcccaccaggaacaactgagttctgtgccggatctgacccatggggaggaagacattggtaaaagaggaaataataggaatgggcagttattggaaaatcctcgctttgggaaaatgccattggaattggtccggaagccaatttctcagagccagatcagtgagttctcttttctagggtccaactgggacagcttccaagggatggtgacttcattcccaagtggggaggccacccctcggcggctgctttcctatggctgttgtagcaagaggccaaacagtaagcagatgcgggccacagggccctgctttgggggccagtgggctcagagagaaggtgtgaagtcacctgtctgttctagtcattccaatggacattgtactggcccaggaggaaagaaccagatgtggttgtccagtcatccaaagcaagtctctagcacaaagcccgttccactgaactgcccttctccagtgcctcctctgtatttggatgatgatggactcccctttcccacggatgtgatccagcataggttacggcaaatcgaagcagggtacaaacaagaggtggagcagctacgtcgacaggtgcgtgagcttcagatgaggctggacatccgtcactgctgtgcccctccagcagagccccccatggactatgaggatgattttacatgtttgaaggagtcagatggcagtgatactgaggattttggctctgatcacagtgaagactgcctttcagaagcaagctgggaacctgttgataagaaagagactgaggtgactcgctgggttccagaccatatggcatcacactgctataactgtgactgtgaattctggttggccaaacgaagacaccattgcagaaattgtgggaatgtattttgtgctggatgctgccacctgaagctgcccattcctgatcagcaactctatgacccagttctcgtctgtaactcatgttacgaacacattcaagtctctcgtgccagggaactcatgagccaacagctgaagaaacccattgctacagcttccagttgaatgccggggagaacctgccattttagaggtttgaagggaggatcttcttcagttgtagtttggaaggttccttggtgtggctcatgaaatcacagagctcagagataccatcttgagaaatcctccttggtatcatgaaactggagcagaggaattgcaatttagcaggaggtcctctactggtgataccctcaccttggggtaatggtcctaacccagacccagggtctggaagcttaatgttgagttggtgactccagcctctttctcctggaggtcacaagatgatgattgcgtagatgttgcctggtgcaaagtgccccaaacagcaatagaaagacatatgtataaccaaactccaagtgataaccagacccatctctcctccaccttgacaaaagcagattatagtatacaaggtaggaattcctgtcctatttgagatgaactatatcctgtacctctgtgctctgtgtctgcatgaaggctcagcctttagaggcactccttctagttgcattagtactgtctttctgtggagtttggtttgaagactggctcagcaagtggaggtttcaatgtatttttcagttggctcatcagccagcattggtgaatattcagtttaggggaacagttctagggagtgagacatttttgggagcagaggaaaactctgctgatgttcggtcctggcaaacattgagttattttgagctgtgaaggcagtcgtctctgttacacagtggcagctcttgagttatgcactgtgaagaatgagaagggaaaagcaaaaattatccttgtgaaatatctgctgattgtgccctactctttgcacctgacttttcctagttgtcctggtgctaacacaggagctacaccttgatcctctcctggcatgaaaataaaacaaaggttttcgttgttgttgttccattgcccatttcccccatgttgtctttcccttggctgatgcctcctctgggtcacattgcttcttatcctgaacacttgacaccttgagggtagaatttagcgtttggtttttacctcctagcatatgctgtttggtatgtgagggtttcagtacaaatgctgctgtctatttctgtgcacttaacaatggaacccaaacagaagagaataaagccttgataccaaaattgggaaagaacatgtgtccatttggaccaaacgttgttggtttttaaaaaattttattttgtttttttgtttttgtttttgttttttttcatcttaatatgtaccagtggcacttaaccaaaagatacagtgatatagccatgtactgtgggtgggacagatacagtctccttggcctataatgaaaccactaggactttatacagttttccttaatttgttgacatataaatggtaaattatatttaggcttatcctgttttgaaatgatggtagtcatctttcttactgctactttcatgttgctttctagaaaacagcatttcattccaaaataactaggatctgcatttagaacaagaatcattatttgtcctgaccttttcagtcctacagagacgcatctgtggttcttttgtacttgccatagatgtaacctaaaaagttttggcatatttaggtcagcctagcggaactttttttttcatttaaatggagctgaataatggagattttgtgtctgcaaaattcctgagatcattgaaaaagtaacaagctgttccttgtttctgatacataaaattattttaagcattttatcaatcattaaaatttactgccagttgtgagtggctttttaattaacttgtctttcattgcacttcactctgcctgttttcaaggggagtaagattggtaacatttggggagactgtatctgtctacttagcgtggctgttttgagggactgtcccatcagtgaacaaactgcatggccttggagagagactctgggctcttggctcagatgtgttcatcaaatactcctttcagagctgttgtgggtgtaagtgacatgatgtggccaaaaatccaaactgtgcagttgcgttgtgacaaacatgcaatgtgctgtaaaaattcaatacagtttaaataaaatctctatattagtgctgcaaaaaaaaaaaaaaaaaaaaaggggcccgtgaccaaattcgcctaaagggagccgattcaaattaactggccggggtttaaaacgtcgggactggaaaacctggcttaccaacttaatgctttgaaacatccccttttcccgctgcgtaattgaaaaag

SEQ ID NO: 6235 - DNA, 2224 bp, Homo sapiens
  misc_feature (201)..(231): n is a, c, g, or t
  misc_feature (758)..(829): n is a, c, g, or t
agcccagagcagccccgggcaccagcacggactctctcttccagcccaggtgccccccactctcgctccattcggcgggagcacccagtcctgtacgccaaggaactggtcctgggggcaccatggtttcggcggcagcccccagcctcctcatccttctgttgctgctcctggggtctgtgcctgctaccgacgcccgannnnnnnnnnnnnnnnnnnnnnnnnnnnnnntcccggcagctccaggccgacatcttggccgccacccagaacctcaagtcccccaccagggctgcactgggcggtggggacggagccaggatggtggagggcaggggcgcagaggaagaggaagaggaggagccgtgctcaggggtccttgagggggctgtggtggccggtgagggccaaggggagctggaagggtctctcttgttagcccaggaagcccagggaccggtgggtccccccgaaagcccctgtgcttgcagcagtgtccaccccagtgtctaacagtcctcccgggctgccagccctgactgtcgggcccccaagtggtcacctccccgtgtatgaaaaggccttcagccctgactgcttcctgacactccctccttggcctccctgtggtgccaatcccagcatgtgctgattctacagcaggcagaaatgctggtccccggtgccccggaggaatcttaccaagtgccatcatccttcacctcagcagccccaaagggctacatcctacagcacannnnnnnnnnnnnnnnnnnnnnnnnnnnnnnnnnnnnnnnnnnnnnnnnnnnnnnnnnnnnnnnnnnnnnnntgtggaggctcacgcctgtaatctcagcattttgggaggccaagtgcggacatcacttgagaccaggagttccaaaccagccctggcaacattgtgagacccatctctataaaaacaaaaaacagtccactaaatcagccacattaattgggaatcatatgtcacaggtcatttgtggggcaaacatcactgcttttccatcaagggagcaaagaataagtgggagttttggaagagtttggatgagagacgccaaggtgcccagcgttcgtaaggcaacatgcagcctggcgtgaagcagtattttgaaactgcaaatggttcccttcttgtgtcctttcaatgctgaatattttagtgtcattctgcctgtgctcagagctccagcagcagaagtgtgtgtggttaattaggacacttctgtgagaggacccctgcacacattacgacaggtccctaaatgagcatttcccaaactaggttccccgaggcactctacggaaacaagatttttttttttgagacggagtctcggtctgtcacccaggctggagtgcagtggtgcaatcttggtgcaatcttggctcagtgcaatccgcctcccaggttcaagcgattctcccgcctcagtagctgggattacaggtgcccaccactgcgcccagctaaattttgtatttttagtagagatggggcttcaccatgttggccaggctggtctggaactcctgaccttcaggtgatccacctgcctctgcctcccaaagtgctgggattacaggcgtgagccaccgtgcccggcccaaactactttttaaaacagctacagggtaaaatcctgcagcacccactctggaaaatactgctcttaattttcctgaaggtggccccctgtttctagttggtccaggattagggatgtggggtatagggcatttaaatcctctcaagcgctctccaagcacccccggcctgggggtgagtttctcatcccgctactgctgctgggatcagggtgaatgaatggaactcttcctgtctggcctccaaagcagcctagaagctgaggggctgtgtttgaggggacctccaccctggggaagtccgaggggctggggaagggtttctgacgcccagcctggagcaggggggccctggccaccccctgttgctcacacattgtctggcagcctgtgtccacaatattcgtcagtcctcgacagggagcctgggctccgtcctgctttagggaggctctggcaggaggtcctctcccccatccctccatctggggctcccccaacctctgcacagctctccaggtgctgagatataatgcaccagcacaataaacctttattccggccaaaaaaaaaaaaaaaaaaaaaaaaaaaa

SEQ ID NO: 6236 - DNA, 1149 bp, Homo sapiens
gagcctgagccctgcggaacctcggcgctcggccccaccccgcccgtacctgcacttatttattgttgttatttcttaccgcggagccccgcagtcgggtcctcccgcccgctcccgcgcagcgctagcattctccagtccctcagtcccttcccgcgcggtgcgccgcagccgaggcgatgcgcctcattcagaacatgtgcaccatcgccgagtaccccgcgccgggcaacgccgcggcctccgactgctgtgtgggcgccgccggccgccgcctggtcaagatcgccgtggtgggcgccagcggcgtgggcaagaccgcactggtggtccggttcctcaccaaacgattcatcggtgactatgaaagaaatgcaggtaatctctatactagacaagttcagatagaaggtgaaaccctggctcttcaggttcaagacactccaggtattcaggtccatgagaacagcctgagctgcagtgaacagctgaataggtgcattcgctgggcagatgctgtggtgatcgttttctccatcactgactacaagagctatgaactcatcagccagctccaccagcacgtgcagcagctacacctgggcacccggctgcctgtggtggtcgtggcccaacaaggctgaactgttgcacatcaaacaggttgacccctcggcttggactgcagctagccaggcatggtaggcttgctcattctatggaagtgttctgtccgtggaaaattataatgatgtgctacaggcgcccttccaggtcctcctggaaagaggggtggtttcaaaactgggggcttagcaagttcacccgcagaaagcgaaaaaacctccttcatttcccaggcccccagttaccccacctgcccggacctggaaaaaggagggttcaaggcgagccccccccctgccaaagcgggggacgtgggcccccccccgtcctgacacccgggcgggggccccctagggggggcctgggacccttccacggaagcgaggggctggagggcgtttcccctaaggccgggaaacctccccccatgtggacccgggtatccctggggtccccccgaagggctgtggtccccacagggctcctatagggccctcccggggaaagcccccattaaaaaag

SEQ ID NO: 6237 - DNA, 3074 bp, Homo sapiens
  misc_feature (1948)..(1962): n is a, c, g, or t
gaagtggggatcggcgagcgggtgggtgcgcctcgggccgcgggactcgcagccgccaccgccgctgccgcctctacggccgcgtcagaactgaagagaggaaggggaggagccgagtcgagcctaagctgccgcccgatcttacccctgacccgagggcggcctggagagcttggtctgtagcggtttccttcggggcaggtggggactgctcctttgggaggaaggaggaggcccaggccgcgtcttcaggcagctgcgcgcaccacccgaaggtgaggcatttggccccaaacagaccctcgaaaagccggactgatcgaggagttaccctacagcctgatctgcacctgctccagggagagagcgccccacccttcccgtggcgtggggtgagacccagcgttggataacgtgtggtcgggccgagcaaatgtttgatgaatgaatgaatgaatgaatgcctctctcacgtggcactcgtgaagctcagaggatatggtggaagtgcaagcgctttgtaaactgcagtgcattgtaaaaatgagttgtaatacattcctcccctccccctagccatgaaaggaaacaggggtgcggcttgagtacagagtcacaacctgagtctttagtggaaaaggagacgaaatgccgagcaagggaagggacccatcctcgcgcagattgttagggcggcgggaagggaggattggaagggagccatcctctgggagattgctgaaggatttttgactgtcaggggaagaatttaatagtccctcacttttacgaatggttctttcttacggtttggagctttcgagagcttctggtcttggttcatcagtgtacgttgtcatcaagaaatgttggcctgtttcaggtctgactcaaaggttattttctttctaaaataagtgttattactattatgcagcttttcctacagatgttatcctggaaaggaaagttaagtagaaactcatgaagtttaaagtgtagttctctaggaaaacaaatttaagataaaaggaccagaatcctcagaaatctgtcttcagtgaatagtatgagaaaaagattaaagcagcagcaatgatgaaagcagattccacaattctgtccctggaccctagtacactctacctccttgggaagcagtagtaatggattttacaagtctttccacctggaggagggggtaaggtaggagcaagtgtattatagacaaatgtgggaagctctgggtttctcccactactgccactaccatctgcaaacagtaaactaaggaaacttttaactgggtaaatccaagggctcgtgttcattaaaatgctgcgggaaaggtggtgagaggggcaaaggaggatgtggcaaaaccaaggagagactcacagactagcacctgaccctactgcccttgacctgaagttccaagagccaggttaaatatcctgcttaaattaccctggatttttctgtctttacgtgaccaatcccctgctacagccttccaaataagactcacaggtaatcagaccaacaagtgatggtctcacatggctacaaaataaatattttttgtttttccccctcttcctatcttacaacaggggaatggtggaaattaaaggagtaaaacacacagatttaggggattttgtgaagctaaacacctcagagagtttaacctttgtaggctttgaaggaaaagagtgcaaacatcagagttctgcagcccagcagagaacacctccagttaagtgtgtaccacatagggtttttcagcagcgtgatcttctgttttcattgtcagtggctccaccttacaacctcagtgctgaggaacagaagggcactcaggagagcctgagccacttacttagaaagtatttaataacagcacactaagcttactgggctagatacccacctcagcacccannnnnnnnnnnnnnngaaacagctggaactggagactggagagaaggaagttcatacatttccaacttggtctgcatctctttagttccttgtattgcttattaatccagaggagaaaacagctagttaattaaaaattccaaaaaatctgaagttttagctaatagttacttccctggttcatcaatttaagataaggatctaaatactgtgttaaaatatagaaaaacggagactcttataaggtttttgacctctacacttgaaagtgagctcttacaagaaactaatcagtgtttcgttattccatatcagtggcttttactgtcaaagattgtgtaagctaaattatctggcaaaattttgctttccagaaatactatctatattaattttaacatttttattgtgaaatatagtttaaatacataaagcaattatatagtataagtgattataaaggaaaccaccatgtaaccaatcaaccaggtcaagaaatggaatatttccagcaactcagaagttcccctccctgccatgaccttcccgaacacaactctttccctccctcctaagtgtagtcattattctaacatttgtgataatcatttccctgcttttctttgtcgctttgtcgcaagcatgcatccctaaacaatatattgtttagtctcactctttcttttgaactttatgtaactggaacaatataatatgtaatctgttgttcttgctgcttttgctcaacattgtttttaattcatatgttgttcaggttgttcctatagctgtaatttgtgcattttcattgctgcatattacagtgtcccattataacaatatgtgacaatatgtttagccattctattgctgatggacatctgggttgtttccagtttaggattgttataaatgctaatgtgaacattcttcatatatgtattccatcacatctacgtcagtttctgtataacatatacctgggagtgtaatatgtatcataaacttgaataaataatgccaagttcttttctagagggttacacagtcacaaaaaaaaaaaaaaaaaaaaaaaaaaaaaaaaaaaaaaaaaaaaaaaaaaaaaaaaaaaaaaaaaaaaaaaaaaa

SEQ ID NO: 6238 - DNA, 1873 bp, Homo sapiens
gagactctgtctcaaaaaaaaaaaaaaagaagtcatggtcatggtaaaaaacctatggctttggaaggctttctcggtaacgtcctagaagaacgatgggacaaacgctgcctccctgactccactgggcagcagtgaactccgctccccaagaatcagttacctccactttttttaatcgtaacacctccatttgtattacatatggtgtatgggtattgatgaggtcatggtatcatatatgggatttttttctgtgtaaatcatcaagtataagaagaaactatgggactctgagccttgctttagagaatttacagtggacaaataggtgtcatcaaaccagtttttaatcattctgactcaagtgaaaacgctcagaatttcacactgtgaatccacgtttacaacccttacaggtgggccttcaggcctggttcgctacaacaatgtcttccacaactcaaactcccaccgcgctcacacaaccggtccactcctgccttttcactcacacagctcccgactgcttcttgcagaggctgagagtcccccccccaccttttttttcatttagatgtaacaaacctagtagtttatgttcatcaattgtctgtatatctctatattttatccatgtactcttttgatgtatagaagtagtttgaaactcattgtttccttgtggtaagtgaccgagatgctgccacaggacctgagacactgatgaatggtgctattttggactttcaacatgctccttggcgaggtagctctgatggagttattttttatttccatgttctaagaaggtgttggtactctgtttccctgaatgttgttctctagactggattgacttgttttccttgtgtcttcagtgtggctttcttcctcagtgttgtaggttgagcgaatgctaccagagtgtgagagaccattgtctcgttggctggcgctcacggacatgcagtcacggtagcgggagcaatcacaaaactgtaatttacttaccaaatctcttcctttccatagcctcgcctgcctgacttagagaaagaaaagcaataattttacaggcattttgaggtgtctctttctttgggttctttctgtttgaaaggatatttgtcgaaaaaaagagcaaaaccgttttaaataaactccccctggaaaaaaacccaaaacactggcatctgagtaggaatatgaaaatgacaccttttccaaatattaaattggaaaacaaggtctacaaaatcatgatacttttttaaaaggcagagcattcttttttcggcaattttgataagcaaggtgtagatttacatttttgtccttgctcccaacgaaatggataaacaaaaataacttaccatctactcatggaatgttgttgtgttagccagtctgaaagcccaccttaatttttatataactgtctttagctcttcttttgacagggcaggccttgttctgaactgtttcgcttctgactgttaaacaccgatgacgcatgcactgcacttcttcgttttcttcttgctcccccattggcctgagtttcttgtgcattactcctctccctccttcgttagaataggtatatcagctgtgtaaatagagcaagaaaacagtattctgcatctgtggcatttatgtagagttgcagttgtgtactgctgaaaatgcaggcttttgtaacagtgtgatctttactgatgcactcatgacaagtacccaatgtattttagctattttagtagtatttgttcaataaatacgcaagctgtaaggtaaaaaaaaaaaaaaaaaaaaaaaaaaaaaaaaaaaaaaaaaaaaaaaaaaaaaaaaaaaaaaaaaaaaaaaaaaa

SEQ ID NO: 6239 - DNA, 1146 bp, Homo sapiens
gctgtggccctggcacctgcccctgggctgggacagcccactgttccatgctgcccaagaaggctcagcacaggcacaaaccattgcccggcactggcccgtgctgcctgagaaggattggcacgggcacagaccactgcccccacctgccctgcgccatctacccaagaaggctcggcacgggcaccaaccactgcctccaactgccccatgctgcctgagaaggcactgcacggccacccccaactgccccgcactgtccctacccgggcagccatgcgagcggctggaactctgctggccttctgctgcctggtcttgagcaccactgggggcccttccccagatacttgttcccaggaccttaactcacgtgtgaagccaggatttcctaaaacaataaagaccaatgacccaggagtcctccaagcagccagatacagtgttgaaaagttcaacaactgcacgaacgacatgttcttgttcaaggagtcccgcatcacaagggccctagttcagatagtgaaaggcctgaaatatatgctcgaggtggaaattggcagaactacctgcaagaaaaaccagcacctgcgtctggatgactgtgacttccaaaccaaccacaccttgaagcagactctgagctgctactctgaagtctgggtcgtgccctggctccagcacttcgaggtgcctgttctccgttgtcactgacccccgcctcttcagcaagaccacagccatgacaaacaccaggatgcatgctccttgtcccctcccacccgcctcatgacccagcctcacagaccctctcaggcctctgacgagtgagcgggtgaagtgccactgggtcaccgcagggcagctggaatggcagcatggtagcgcctcctaacagattaaatagatcacatttgcttctaaaattaaaaaaaaaaaaaaaaaaaaaaaaaaaaaaaaaaaaaaaaaaaaaaaaaaaaaaaaaaaaaaaaaaaaaaaaaaaaaaaaaagtaataagcgtgtttcctgaacccaacttttcttggaaaaaagggggaaaaaatctggcgggcctcccctataaggggaagccgcaatttaattttcccaaaaaaccccaagggtttaacccccgccaattaaaga

SEQ ID NO: 6240 - DNA, 7473 bp, Homo sapiens
  misc_feature (11)..(11): n is a, c, g, or t
  misc_feature (4326)..(4330): n is a, c, g, or t
ttcagtctgtnaaaggatacccccgttgtgaatttcgtacctgtatgaccagagacacctcaaattcaaaatgtccagaaatgaacacagtatcttcttcccttgagtaactcgccttctgtatataattggggtgaatgttccagcaatgccaacgggctagcatctactcaggcaggtacgccagacatctgaatcttaatacctcgtcgtcccccctcaatctgtcactatgtcctaattttatttcctacctttgcatcccttcctcataattatcagcaccactgccttaatttagatcctatcattccttgtctggattatttcaagtcttttgcccctctcaagtctgacctcgtcatagactgtttgtggatgattattttccctgcaacatctccacctcccaatagtctccatcacttattagccatgtgaattatggcaaattgcttaacctacctatgcctcacttttccttattgtaaagtggaaataagagtacctatctcatagggttgtgtgattaatcatgcgatgcaattagaacagtgcctaggatatgaaagtgccccaaaatgttacgttattattattattactactattgccttctcatgaacatgctatgtgtatgttcaagctgttatctctactggaaaatccttctccgtttccaatactctttccaaaaccccctcctgggttttactgcacctaccattgtgtactgacgtgattgaatgattggcttatgggactgatcctttctaccagacttaacttcttcagggcaggaactctgatacatagtaaatggtcaataaaagttggctcaactgaaaccctaaggataaactccatccacagcggaagagcgcggccccgcccgattcgggggcggggcggggagccgcgcgcggagggtgggtcgatgggggtggggtgggactctttttcctcgccgtggcggcggaggcgcacggcgtgggcttgcggcgagacgtcgtcgtcggaggctgaaaaagcccaaggtgctgccgttgcccgtacaactcggacttgctgttgctcgagccgcgtctgcacgggtctcggaccgagcggagctcgcagcctcggtcccggagcccaccttcgcctcgcccttgcccagcctgcggtgatggaggcggccaccacactgcacccaggcccgcgcccggcgctgcccctcgggggcccgggcccgctgggcgagttcctgcctccacccgagtgcccggtcttcgaacccagctgggaagagttcgcggaccccttcgctttcatccacaagatccggcccatagccgagcagactggcatctgtaaggtgcggccgccgccggattggcagccaccatttgcatgtgatggtgataaacttcattttacgccacgtatccagagactgaatgaattggaggcccaaactcgtgtaaaattgaatttcttggaccagattgcaaagtactgggagttacagggaagtactctgaaaattccacatgtggagaggaagatcttggacttatttcagcttaataagttagttgcagaagaaggtggatttgcagttgtttgcaaggatagaaaatggaccaaaattgctaccaagatggggtttgctcctggcaaagcagtgggctcacatatcagagggcattatgaacgaattctcaacccctacaacttattcctgtccggagacagcctaaggtgtttgcagaagccaaacctgaccacagacactaaggacaaggagtacaaaccccatgatattccccagaggcagtctgtgcagccttcggaaacgtgccccccagcccgacgagcaaaacgcatgagagcagaggccatgaatattaaaatagaacccgaggagacaacagaagccagaactcataatctgagacgtcgaatgggttgtccaactccaaaatgtgaaaatgagaaagaaatgaagagtagcatcaagcaagaacctattgagaggaaagattatattgtagaaaatgagaaggaaaagcccaagagtcgatctaaaaaagccaccaatgctgtggacctgtatgtctgtcttttatgtggcagtggcaatgatgaagaccggctactgttgtgtgatggctgtgatgacagttaccataccttttgcttgatcccacctctccatgatgttcccaagggagactggaggtgtcctaagtgtttggctcaggaatgtagtaagccacaagaagcatttggctttgaacaagcagccagggactataccctccgtacttttggggaaatggcagatgcgttcaaatctgattacttcaacatgccagtccatatggtccccacagagcttgttgagaaagaattttggagactagtaagcactattgaggaggatgtcacagtggaatatggagctgacattgcctcaaaggaatttggcagtggctttcctgtccgagatgggaaaatcaaactctcacctgaggaagaggagtatcttgatagtggctggaatttgaacaacatgccagtgatggagcagtctgtccttgcacatattactgctgatatatgtggcatgaaacttccttggttgtatgtgggaatgtgcttttcttcattctgttggcacattgaagaccactggagctattcaattaactacttgcactggggtgagccaaaaacctggtatggagtcccagggtatgctgctgagcagctagaaaatgtaatgaagaaactagctccagaactctttgtgtcccagccggatctcctccatcagcttgtgaccatcatgaaccccaataccctgatgactcatgaagtgcctgtttaccgaactaatcagtgtgctggggagtttgtgattacatttccaagagcctaccacagtggttttaaccagggttttaattttgctgaggctgttaacttctgcactgttgattggctgccattaggccgacagtgtgtggagcattatcgcttgcttcatcgatattgtgtgttttcccatgatgagatgatctgcaagatggcttccaaggctgatgtattagatgttgtagtggcttcaactgttcagaaagacatggccattatgattgaggatgagaaagctttaagagaaactgtccgtaaattgggagtgattgattcggaaagaatggattttgagctgttgccagatgatgaacgtcagtgtgtaaaatgcaaaactacatgcttcatgtctgccatctcctgttcttgtaaacctggccttcttgtttgcctgcatcatgtaaaagaattgtgttcctgtcctccttataaatataaattgcggtataggtacacgctggatgatctctaccctatgatgaatgcattgaagcttcgagcagaatcttacaacgaatgggccttgaatgtgaatgaagctttggaggcaaagatcaacaagaagaaaagccttgtcagcttcaaggctttaattgaagaatctgaaatgaagaaattcccagacaatgatcttttgcgacaccttcgcctagtcacacaggatgcagagaagtgtgcctctgttgcgcagcagttgcttaatggcaaaaggcaaactagatatcgatctggtggagggaaatcccaaaatcagttgacagtgaatgagctccggcagtttgtaacacagctgtatgctcttccatgtgtcctcagtcagacaccattactaaaggatctcttgaatcgtgtagaagattttcaacagcatagtcagaaactactctctgaggaaacgcctagtgctgcggagctgcaggacttgctagatgtcagctttgaatttgatgttgaacttccacagcttgctgagatgcgtatccgtttggaacaagcccgttggctagaagaggtgcagcaagcttgcctagaccccagctcccttactttagatgatatgagacgtctcatagacctaggggtagggctggccccgtattcagcagtggagaaagctatggcccggctgcaggaactgctcacagtgtcagagcactgggacgacaaagccaagagtctcctcaaggccaggccacgacattcattgaatagccttgctacggcagtaaaggaaatcgaagagatccctgcatatctgcccaatggtgcggctctgaaagactcagtgcagagagccagagactggcttcaggatgtagagggcctgcaggctggaggacgtgtgccagtgttagacacactcatagaacttgttacacgaggccgatctatcccggtacatcnnnnntctttgccaagactggaaaccctagtagctgaggttcaggcttggaaagaatgtgctgttaatacattcttgactgagaattctccatattctctcttagaggtgctgtgtcctcgatgtgatattggccttttgggattgaaaaggaagcagagaaagttaaaggagcccttgccaaatggaaagaaaaaaagcaccaaattagagagtctgagtgacctggagagagctttaactgaaagcaaggagactgcttcagctatggcaactcttggggaagctcgcctaagggaaatggaagccttgcagtctctcagactcgccaatgaagggaaattgctgtcgcctctccaagatgtggatataaaaatctgcctatgtcagaaggccccagctgcccctatgattcaatgtgaactctgcagggatgctttccacaccagttgtgtggcggtacccagtatttcacagggcctgcgaatctggctttgtccccattgtcggaggtcagagaaacctccattagagaaaattctgcccctgctcgcctcccttcagcgtatccgagttcgccttcctgagggagatgcacttcgatatatgattgaaagaaccgtgaactggcagcacagagcccagcaactgctttcgtcagggaatcttaaatttgtgcaagatcgagtgggctcaggactgttatatagcagatggcaagcctcagcaggacaggtgtcagacacaaacaaggtatctcaacctcctggcacaacatcattttctttgcctgatgactgggacaacagaacctcatatttgcactcccccttctcaactggacgaagttgtatccccctccatggtgttagtccagaagtgaatgaactattgatggaagcccagctgctccaggtatcccttcctgaaattcaggaactttaccagactttacttgcaaagccaagccctgctcagcagactgaccgaagctcaccagtgagacccagcagtgagaagaatgactgttgccgagggaagcgagatggaattaacagtcttgagagaaaactgaagagacgcctggaaagagagggcctctccagtgagcggtgggaacgagttaagaaaatgcggacccccaaaaagaagaaaatcaaactgagccaccccaaggacatgaacaatttcaagttagagagagagcgtagctatgaattagttcgttctgctgaaactcattccctgccctcagacacatcctattccgaacaggaagactctgaggatgaagatgccatctgcccagctgtgagctgcctgcagccagaaggagatgaggtggactgggtccagtgtgatggcagctgcaatcagtggtttcatcaggtctgtgttggtgtctccccagagatggcagagaaagaagactacatctgtgtgcgctgtactgtgaaggacgcaccaagccgaaagtaaaaacacaaaaacagatacccccctacttaatgtaattcaggactccaaccaagaggatttcttcaaatctcagcaaagctacaggactggtactcaagccagcctgtaaacggtgctatttctattccttatgggatcatttttccaggactctttgaagaaaagaaaaaacaactaaaaaaatttttgacactttttgtattttttccttaagagctatttgtggttgttgaggtttgaaaagctgactgttttttttgcaggggttcccaccaatttggaaggcattgaagcttgcaccttttcatgtacagcattaaaattttacctctctctgggatttaccagcttaagagtccaactcacttccagtgcccaaaagggcacccaccagaaattccagtaaatcctcatttgaggaagctctcccttgtttactctgttaccacattggggaaatttttaagtttttcactttgggagtttttgtttgtttcttcttttcctttatccacttttcttcttcctggtagactaggtttatttatctgagcaataacttctatgttggtttcagtggctggaattaaaacaaaacaaaacaaacttccaaacagtgtgttggtgctttagcgattgattgatgtacagaacacaaatgtctagtttctagtgtcactgatgaactagtgatgtagaaaagagacttctctgtaagtaattgccacagctgtattttggctttctccctgtcccttcctttctcccctattttttggtagcttgtatcaaatgttacagtttatattgtggaataaatccttcgtcctaacataacactaaatgctgattatttagagccattagagcacagcttcttctgcccctctactgttgcacagccagaaggggctgcttgcttttgcctctgcccaaccaggttgcagtagcagtggatgttagcctgcaaacaacattaggggattcttcttttgtgtcctgctctgtttggtgggccatatgcctacagccctcactaacaaagaacccctctgtcttcaaggactagaacctatctttaaagccgtgctcttttaaaataagctttctcagaatgttggcaaatcacttcaatcctcaaatcagtcttccttgtggaatgctgcctttattatatttgaattgacaggggaacttggtttagggttaagacgttggaaggaaatctaaggaaaattaatcctcacagaggtccgggtttagtatatgtcttgagaggagacttgtgaattcccagactctgcctcctggtttcctttctcatttctttctaactgtagctatcattactggctgtggatagcccatagctattttccttgcttttcttttttaaaggggtctgttctgcagtggagaagacattctggtgaccagacttttgcttaccttttcctattctgttgccaatttttgttttccccacattctatagccataaacctgaagatgagtaaaactggtgggtctttaataaaacaacaacaaaaacagcagtttgtgatatagcagaggtttaaatgtaccctccccttttatgcacttcaaataattaaatctctttaagaatgaaaaaaaaaaaaaaaaaaaaaaaaaaaagaaaaaaaaaa

SEQ ID NO: 6241 - DNA, 6195 bp, Homo sapiens
  misc_feature (1660)..(1676): n is a, c, g, or t
  misc_feature (3057)..(3072): n is a, c, g, or t
  misc_feature (4821)..(4865): n is a, c, g, or t
ggtccggaattttccaaaatcgtcgacccacgcgtccgttttcttagaggtctacagccacaccaccccaaatgtgcctgatcttgtctgatcttggaagctaagcattgttgggcctagttaggacctggataggagaaatcccttatggctaactatatgtcagaaagcatcagcttttctcgatggacccattcatctaatgaaatatgcctgtactattttaaaaagctttgtatttcgtcatagaaaagttcatccccccagaatgaaaatgaggacatttgagaaggtgatttaaggtgtggacatttgagaaggtgtcctatcaaattagtaaaccaaaggaaaagtactgaatagattaatccaaaacacttactgttttttaaacgaagaggatttcaccttgacagaaaaacaacttttattcaatatgtatttcctgaaattaaagagacaagtacagactgaaaggaaaatagattcgtaaataagctacgtcaactctatcctgctgaggatagctcagtgatgttaaatcctttacaaatccctggttgtcttcctacagacaagactgctttttgatgggactgatattaagagaaataggacctttggggcattcaactccttgataaaacttaaaagtatcggcatgagtggcttaacagaggaaataaagaagttttcaactaaatccaaaagtgcggtcattttctttactgctgttattttaaaaacctcttcataaccattgaaaaagaatcgacaactattttaaaagattaaagaaaggcagatgtctgcaaataattcccctccatcagcccagaagtctgtattacccacagctattcctgctgtgcttccagctgcttctccgtgttcaagtcctaagacgggactctctgcccgactctctaatggaagcttcagtgcaccatcactcaccaactccagaggctcagtgcatacagtttcatttctactgcaaattggcctcacacgggagagtgttaccattgaagcccaggaactgtctttatctgctgtcaaggatcttgtgtgctccatagtttatcaaaagtttccagagtgtggattctttggcatgtatgacaaaattcttctctttcgccatgacatgaactcagaaaacattttgcagctgattacctcagcagatgaaatacatgaaggagacctagtggaagtggttctttcagctttagccacagtagaagacttccagattcgtccacatactctctatgtacattcttacaaagctcctactttctgtgattactgtggtgagatgctgtggggattggtacgtcaaggactgaaatgtgaaggctgtggattaaattaccataaacgatgtgccttcaagattccaaataactgtagtggagtaagaaagagacgtctgtcaaatgtatctttaccaggacccggcctctcagttccaagacccctacagcctgaatatgtagcccttcccagtgaagagtcacatgtccaccaggaaccaagtaagagaattccttcttggagtggtcgcccaatctggatggaaaagatggtaatgtgcagagtgaaagttccacacacatttgctgttcactcttacacccgtcccacgatatgnnnnnnnnnnnnnnnnntactgaaaggcctctttcgccaaggaatgcagtgtaaagattgcaaattcaactgccataaacgctgtgcatcaaaagtaccaagagactgccttggagaggttactttcaatggagaaccttccagtctgggaacagatacagatataccaatggatattgacaataatgacataaatagtgatagtagtcggggtttggatgacacagaagagccatcacccccagaagataagatgttcttcttggatccatctgatctcgatgtggaaagagatgaagaagccgttaaaacaatcagtccatcaacaagcaataatattccgctaatgagggttgtacaatccatcaagcacacaaagaggaagagcagcacaatggtgaaggaagggtggatggtccattacaccagcagggataacctgagaaagaggcattattggagacttgacagcaaatgtctaacattatttcagaatgaatctggatcaaagtattataaggaaattccactttcagaaattctccgcatatcttcaccacgagatttcacaaacatttcacaaggcagcaatccacactgttttgaaatcattactgatactatggtatacttcgttggtgagaacaatggggacagctctcataatcctgttcttgctgccactggagttggacttgatgtagcacagagctgggaaaaagcaattcgccaagccctcatgcctgttactcctcaagcaagtgtttgcacttctccagggcaagggaaagatcacaaagatttgtctacaagtatctctgtatctaattgtcagattcaggagaatgtggatatcagtactgtttaccagatctttgcagatgaggtgcttggttcaggccagtttggcatcgtttatggaggaaaacatagaaagactgggagggatgtggctattaaagtaattgataagatgagattccccacaaaacaagaaagtcaactccgtaatgaagtggctattttacagaatttgcaccatcctgggattgtaaacctggaatgtatgtttgaaaccccagaacgagtctttgtagtaatggaaaagctgcatggagatatgttggaaatgattctatccagtgagaaaagtcggcttccagaacgaattactaaattcatggtcacacagatacttgttgctttgaggaatctgcattttaagaatattgtgcactgtgatttaaagccagaaaatgtgctgcttgcatcagcagagccatttcctcaggtgaagctgtgtgactttggatttgcacgcatcattggtgaaaagtcattcaggagatctgtggtaggaactccagcatacttagcccctgaagttctccggagcannnnnnnnnnnnnnnncctagatatgtggtcagtgggagttatcatctatgtgagcctcagtggcacatttccttttaatgaggatgaagatataaatgaccaaatccaaaatgctgcatttatgtacccaccaaatccatggagagaaatttctggtgaagcaattgatctgataaacaatctgcttcaagtgaagatgagaaaacgttacagtgttgacaaatctcttagtcatccctggctacaggactatcagacttggcttgaccttagagaatttgaaactcgcattggagaacgttacattacacatgaaagtgatgatgctcgctgggaaatacatgcatacacacataaccttgtatacccaaagcacttcattatggctcctaatccagatgatatggaagaagatccttaatcactgagctaacctaaataaggaaggatttcattttatggactgatattttgctgtgtaacttgttcttcgtagattgtcatctgcagtgctgcaaagatatgaagaaatatgataacgaataagtgacaccagtactgtagttcataatgagtaggtacaggcgggaaactgaataataagaagtcataatggaatcaaggtgaagctttttataaacttttttagcctaagcaataactggttttgtattttttcttaatccttcactttaatacaataggctcacttaatttgtcttcccatttctctttatatatatatatatatataaaaaaatataaatatatgtttgtttgtttgtttttttaaggaaaaacaagtcaagctagcatccagttactatatagcttggctaaattatacaagacttacaagattgattactcgacaggcttgtatttaagagataactgtgaggttaccattatgtgatgttactataaggacttttaacattggtttaacaaaccatagaggcattgaagggtttttcttagatgcctagaaaaagcacactgggctgttttacctttcttttttaggtcaatcaagactccaaaatagtgattcctaacctttttggagttgctctgctactctgaatatgttctatacagcataaggattgtcaccttctgtgtgttgcaacagcttctaagataattagggacaaatgatgttacaaaaggaagagtactgctggtctaagtgctgagttgtatgtctttgcatagctccactctgctgctaaatatgcatgttctgactgacaccatcttgatgccagtactggattccagcattcagcaggtgcagatctcggctttacacaatttatctttacctagggttcagtcagtaatttctgctttttagccagggccagtgcagggtcagttaatgctacagttactgtatagcaaacagtatccttttttctccttcccctagcctattgggctttgcagatatctggagtgttttaaagtcaattattttaagcagtttgaggggatgtgtaggagtggagcatgaaacagtttataaggctggggctgtattatcagcacagcaaattaaagaatgaaagaagtacttctttttacatttcagctccagcagccagctatttaaaaaatatttttaaatatcttccccaaagtttaagatgtgggaccatctacttgtaagaaacagtggcttatttcttcatttctcagtaatcattgtaaacctttttttttttcttctccactctaacaaaagtaaaagaacaaaannnnnnnnnnnnnnnnnnnnnnnnnnnnnnnnnnnnnnnnnnnnngttggcctggacagatggcaggtctgtcggcagttcctcagtctgtaaaatgaagattatcattcttgcctctccctttgtcacagtgttgtcgtgaagatcagatatgtatgaatgcagtcaaataaactaaaaactaggaaagtgttaactatcgttgcccaccgaatttgaggtagcaaaaaaaaaaaagaatgttctggtacatgaacagactgagaaggcctttcgacatccctgaagctagtctcctgtctagactaaaaatatccttgaaagaatagtagcaaacagtatgcagtactcctgtgttctaagttcttttatgttttagtacccctccaggaggcatatgttgttaagtcattatgagcttcatcttaaagataagaaaactgaggcaaggggagattaacttactgccaaatttcaaacagttagtagtatttgagaccagtagtatggctctaatcttacccttagccctcccaaccattatgctgtactatctacccataaatacctccaggaaacattcccctcttggtaatttgtccttctatagaagcttcaaagattaaatcaaattaattttcaaaaaaaatttttttttagaaatgttattttccctgtgatagaggatgacttcccagtttcaccaaagtctgtttatatcaacacacacaaaatggaataattctgagtcactaggcaatcaatctactgtggttttactatgtaaggtgaaaattaactggaacgatgtttgtttgctatacttacatagtcaaactttacaagccatgaaattaattgcactctttgtatttgttgttaaatgcctaagaagttttctaaaaattttgtaaaggcactgtcagagaatctggagttgaatgattattccagatactgtataacctgcataactttttgtctttaagtcgtgtttgtaaaagaagtaattgctagaaacatttgataatgtacaaagtagtctataatgactgttcagtacatttttaatatttttttggttatatccaactttttgtaaatatactggaagcttgataataaaatgtatttcctatcaccatacttttccatgtgaaaacctgagcctatttctagtataagtatccaaagaaaagttttacctggttgtgttattttaccagaccttggtaaaagaactattttggaaacagtatttgtaaatggaactaatgctatatttaaaaacactgatttttttttaacctgccaaaaataaaaaaaagctcattttataattttctactaaaaaaaaagtagaagggcggccgct

SEQ ID NO: 6242 - DNA, 5543 bp, Homo sapiens
  misc_feature (1478)..(1530): n is a, c, g, or t
agcggactgtgccctgctgagaagccccgggctcgtcagtcaaaccggttctctgtttgcactcggcagcacgggcaggcaagtggtccctaggttcgggagcagagcagcagcgcctcagtcctggtcccccagtcccaagcctcacctgcctgcccagcttcaggatggctaccatcacctgcacccgcttcacggaagagtaccagctcttcgaggaattgggcaagggagccttctcggtggtgcgaaggtgtgtgaaggtgctggctggccaggagtatgctgccaagatcatcaacacaaagaagctgtcagccagagaccatcagaagctggagcgtgaagcccgcatctgccgcctgctgaagcaccccaacatcgtccgactacatgacagcatctcagaggagggacaccactacctgatcttcgacctggtcactggtggggaactgtttgaagatatcgtggcccgggagtattacagtgaggcggatgccagtcactgtatccagcagatcctggaggctgtgctgcactgccaccagatgggggtggtgcaccgggacctgaagcctgagaatctgttgctggcctccaagctcaagggtgccgcagtgaagctggcagactttggcctggccatagaggtggagggggagcagcaggcatggtttgggtttgcagggactcctggatatctctccccagaagtgctgcggaaggacccgtacgggaagcctgtggacctgtgggcttgtggggtcatcctgtacatcctgctggttgggtaccccccgttctgggatgaggaccagcaccgcctgtaccagcagatcaaagccggcgcctatgatttcccatcgccggaatgggacactgtcaccccggaagccaaggatctgatcaataagatgctgaccattaacccatccaaacgcatcacagctgccgaagcccttaagcacccctggatctcgcaccgctccaccgtggcatcctgcatgcacagacaggagaccgtggactgcctgaagaagttcaatgccaggaggaaactgaagggagccattctcaccacgatgctggccaccaggaacttctccggagggaagagtgggggaaacaagaagagcgatggtgtgaaggaatcctcagagagcaccaacaccaccatcgaggatgaagacaccaaagtgcggaaacaggaaattataaaagtgacagagcagctgattgaagccataagcaatggaggttttgagtcctacacgaagatgtgcgaccctggcatgacagccttcgaacctgaggccctggggaacctggttgagggcctggacttccatcgattctattttgaaaacctgtggtcccggaacagcaagcccgtgcacaccaccatcctgaatccccacatccacctgatgggcgacgagtcagcctgcatcgcatactataagcgtgcccagttnnnnnnnnnnnnnnnnnnnnnnnnnnnnnnnnnnnnnnnnnnnnnnnnnnnnntctggcaccgccgggacggcaaatggcagatcgtccacttccacagatctggggcgccctccgtcctgccccattgaaggaccaggccagggtcaatgcgttgctgtgccgcagagatccactctgtccgtggagtggagctgctggttctcccaggtggattttgctggaattctcccatgtcatcaccccaccaccgtcacttctgtacctgcatcaagaaaacctgcttgttcacaaaagtcatcgcaacttcagagcgaacggccacatcttccccacctctcacccccaccctctcccctgccaggctggggcttcctcaggcatgggtgtccacagcactggccccctctccccagcctcagctgctgtccgcctgatctgtcttgggctgtaggctagaatgcccgggctggtgcccaccaggggctggggagaaggaggggtggcatgatgaggaaggcagcatccgtccgtccctctcccagacctctcctcttccagtgtccccggggaagggcagatgacactcccttccccctaagccaaccgcactgaaggagtggggagaagagcatacgccaggagcctcctgcctcaaagtgctcccctaagtcttcttcctcctgtgctgacctcagggtggtctgacccttccctcggtgtgggggatgtggccctctcaggtgcccctacttgctttctgcttccttctggtgaagtccacctccaacattaacctgcccaccccacccccgtcatccctggagaattccagctttgtcgtatctcagagagggaatctaattgtttttggggggcaaaagaaagcaacgtttaggtatcacttctacttggaccgcatgcctttttatagccaaatttctgtgtatttcgtaaatggatttcgcgttaatggatatttatgtaataactagacttctcagattattgtgagaagggtcaggttggaaggggtgtaggaagaggggtgaggggtagtttttttctgttctagttttttttttttttttttgtcatctctgaggtggaccttgtcacctgtggttattggggccaaggcggactcagctccggggagaagggcctctctgccatttcggtcccaaggtgagctgacacaggcgttccttttgggactgtggaagcatcagatgccagcactgactcaggaacagcaagtcagggcagagaggaggagggaggctgtcaggatggaaatacctggacttttctttgcttccctcgcaaactggggtcttctctaccgaacttcccaggatttcatctcaccatatctgtgtgccgcccccagcaccccccacccacctctggggggcccgtgagcgtgtgtcttcattgcctctctccccttggcgtctgatgaccacagcaaagcactgggaatttctactcttcatgcctcatcctgcagcctcgggttcgcattctctctttcttttcctctttccctctttccctgggattgactctgagtggaataccttgtgcacatccactaggatctactgtctgcactgttttctttgcatgactttatacgcagtaagtatgttgaaaacaaacaaaaagaagaaaacactcaacaaaaccaatctacatgttttggactaaaaaaaaaaaatagaggttgtattctcagtgtccgactcggaattatgttgctgcctctctgtgcttttggcctctgtgtggccggtatagccagcatgagatactgtcccctctggaggattttaggggaggaagagccacgtccccagggattggaggaggctccggtacccttgaccctcctgggtgttggttggagcagaactggtgaggatgtttgatccgagattttctgagctctccccgatcaccagctgtctgctgggttcttttctcaagtcctgctgcccaggcccaggtgagacaggcaacgccaggtctgcaggccaggagagatgctgcccaggcctcctggtttccaagctggtccatcactggcctctgtccttggcagagaccttgctgcccaggcccaggggcaggctcttggcctgccccaggcccagagggcttcccagtaaggcccagtgatcccattatcccaggggcaaaaccacctgtccccttttgagctgccagttccctacagccatccccagtcaagggtgagggtgtggccttcaccaggggctgctgtaattaccgagcaaggtctgagctcttcttcagcctcagttccctcattggttaaaagggttctttgttcccatccagccgatgaaggagcaaacgtctggctatgtgaagcctaatttacctgcaggaactggcagggatagtcactggctggactcctgtttacttctagacctggtcaggctccatcccctcccccacctgcccctgattcccctcgtcggtgcctgtcaactgcttttcagcagtggactgcaggggaaagagcagtgatttggggtgagtaggcttcaattcccagctctgaccagacttgctgtgtgaccttgggcaagttcctttccctctttggagcttggtttccctgccagaggaaactgagctggaggagcctgaggtcctgcctttcattggctgacacacctcctgtccactgtgtcactctccaagtgccagagaagtggaggcagatcgctaccccaggctgagatggcccccactgtgaaggccacgcctgtgggtgggcagccacctggtgccaccacagggcaccagggatgatcctgatgcggcaggcaggggagactcacagaaaaatctgcccagagcctaccctcaccagacaaactctgtgctcctccaaaacatcctttagatgcaaaataataataataataataaataaataaataaaaatccaaacccaagtcaaaaccttggctccagcatgaaaacacgtttacaggaaagtgttctcctgggtttgtgcccaccatggtgcgaatcctgacccaaggcctcctgtctcccttcaaagggagacccttttgggggatgagtttgccagactccccgtgctggtttctttgttactatttgtttggggttttgttttagttcttttttttttttcttttcttttttaaaaatatgtggctgtgaacttgaatgaacactgctcaaactttctgctattggggggggggtgggatgggaagaaggggcgtttgttttattcttggtgttttcagtgcaataaatagctacaaacttctgtgcaaaaaaaaaaaaaaaaaccgtgtctgggtcaagccccttgagcggggaggtttcggtaagttcccagttccagatctgcccctgggcaaaataaaagtccgggtctacatctcgtgatgggaaaaacacaaacaacaaagaaaccaacaaaaacaaaatacaacaaaaaaacaacaagcaacaacaaaaaaagaaggagggggggccggcgcctacaaagataccccccggggggcggccccaacacaggcgcacgcacagcccaagtctattggatgaaaggggcggggagccccccacagaggggaggccgacgtcaaaatgacagcgaacagagcgacaaggacggacgcagattaaaacaagacagcgccgcgcaggactgggaacaaacaagtgtcaccagagcggagacaccatgcggggacaggaagcccccacgtcagcaggagcgggggggggaaatcataatgggtgggcgaccacacaccttcttccatatgggaagttatatgatcgcgccgcctatgggaggcctaaaatttaaccggacgtctggcagggcatagtatagcgggtctgtaaccaacaccaccagcgctgacatactctcctcggcctgctgctacacagaatagttagtgctcagccgaggagagatgtcattatgtgagcgagactattttccacggcagccacctgctgagcagtagatcagg

SEQ ID NO: 6243 - DNA, 1463 bp, Homo sapiens
catggcgtctttccggcttctccaacccttgcgaaaaactttattggcaaagctatcagagaacggacagtgtacccactgaggcggccaaagcttaactggatcagggcaggatgacatgaccttgtggtagatcccagaactgaggccccaggatgacagaacaggagaccctggccctactggaagtgaagagggatcctggtgtacgggctgagcctgttatgcttttctgcccttcggccctttggggagccacggcgtgaggtggagatccaccggcgatatgtggcccagtcggtccagctctttattctctacttcttcaacctggccgtgctttccacttacctgccccaggataccctcaaactgctccctctgctcactggtctctttgccgtctcccggctgatctactggctgacctttgccgtgggccgctccttccgaggcttcggctacggcctgacgtttctgccactgctgtcgatgctgatgtggaacctctactacatgttcgtggtggagccggagcgcatgctcactgccaccgagagccgcctggactacccggaccacgcccgctcggcctccgactacaggccccgcccctggggctgagcctctccgccctcgccctcggagtagggggtagcggcttgggtctgacacatctttgaaccttgtggccaggcctggacttcgcccccaggcctaggaccgcggtgggtggaaccctgctactgccccaacagggactccaatcaatcggagttctccccttgccggagctgcccttcacctttggggcccgagacagtcataagggatggacttagttttcttgcagggaaaaaggtggacagccgtgtttcttaaggatgctgagggcatggggccaggaccaggggagaggcacagctccttcctgagcagcctctcaccactgccacaaggctccctaatgctggtctctgctccactccccggcttcccgtgaggcaggaggcagagccacagccaaggccctgaccacttctgtgccagttgtctaagcagagcgcctcagggacgctggaaatgccttaaggatagaggctgggcatcacatcaaatgggactgtggtgcttggtgaaaaccttctcggcgatccgcattcaggaccctccatgactggcctatttactgtttacagctggccagtgcagagctgctgctcttttacctttttaggcccctgtaacttcccacctttaaactgcccagaaggcatgcctctcccacaggaagaggggagcagacagggaaatctgcctaccaagaggggtgtgtgtgtctttgtgcccacacgtggtggctggggagtgcctggatggtgcggtggttgatgttaacctagtgtgtgtgtgtgtgtgtgtgtaacaataaattactaccagtcaaaaaaaaaaaaaaaaaa

SEQ ID NO: 6244 - DNA, 1533 bp, Homo sapiens
cattatggcggggcactagcactctgacctagcagtcaacatgaaggctctcattgttctggggcttgtcctcctttctgttacggtccagggcaaggtctttgaaaggtgtgagttggccagaactctgaaaagattgggaatggatggctacaggggaatcagcctagcaaactggatgtgtttggccaaatgggagagtggttacaacacacgagctacaaactacaatgctggagacagaagcactgattatgggatatttcagatcaatagccgctactggtgtaatgatggcaaaaccccaggagcagttaatgcctgtcatttatcctgcagtgctttgctgcaagataacatcgctgatgctgtagcttgtgcaaagagggttgtccgtgatccacaaggcattagagcatgggtggcatggagaaatcgttgtcaaaacagagatgtccgtcagtatgttcaaggttgtggagtgtaactccagaattttccttcttcagctcattttgtctctctcacattaagggagtaggaattaagtgaaaggtcacataccattatttccccttcaaacaaataatatttttacagaagcaggagcaaaatatggcctttcttctaagagatataatgttcactaatgtggttattttatattaagcctacaacatttttcagtttgcaaatagaactaatactggtgaaaatttacctaaaaccttggttatcaaatacatctccagtacattccgttcttttttttttttgagacagtctcgctctgtcgcccaggctggagtgcagtggcgcaatctcggctcactgcaacctccacctcccgggttcacgccattctcctgcctcagcctcccgagtagctgggattacgggcgcccgccaccacgcccggctaattttttgtatttttagtagagacagggtttcaccgtgttagccaggatggtctcgatctcctgaccttgtgatccacccacctcggcctcccaaagtgctgggattacaggcgtgagccactgcgcccggccacattcagttcttatcaaagaaataacccagacttaatcttgaatgatacgattatgcccaatattaagtaaaaaatataagaaaaggttatcttaaatagatcttaggcaaaataccagctgatgaaggcatctgatgccttcatctgttcagtcatctccaaaaacagtaaaaataaccactttttgttgggcaatatgaaatttttaaaggagtagaataccaaatgatagaaacagactgcctgaattgagaattttgatttcttaaagtgtgtttctttctaaattgctgttccttaatttgattaatttaattcatgtattatgattaaatctgaggcagatgagcttacaagtattgaaataattactaattaatcacaaatgtgaagttatgcatgatgtaaaaaatacaaacattctaattaaaggctttgcaacacaaaaaaaaaaaaaaaaaaaagacagcgtatgc

SEQ ID NO: 6245 - DNA, 2408 bp, Homo sapiens
  misc_feature (2170)..(2383): n is a, c, g, or t
gaggaggtagataaccctttctgcgggggacgatttcgtcggtggtagaattttggagtctgtattctttgaagtgtctagacggaactaatgacggaagtcaacttagccccagcaggcacgagggggcacgagtggctggttggaggaggtagatcaccctttctgcgggggacgatttcgtcggtggtaggctgctaccatgaggttgaatcagaacaccttgctgctggggaagaaggtggtccttgtaccctacacctcggagcatgtgcccaggtaccacgagtggatgaaatcagaggagctgcagcgtttgacagcctcggagccgctgaccctggagcaggagtatgccatgcagtgcagctggcaggaagatgcagacaagtgtaccttcattgtgctggatgccgagaagtggcaggcccagccaggcgccaccgaagagagctgcatggtgggagatgtgaacctcttcctcacagatctagaagacctcaccttgggggagatcgaggtcatgattgcagagcccagctgcaggggtaagggccttggcactgaggccgttctcgcgatgctgtcttacggagtgaccacgctaggtctgaccaagtttgaggctaaaattgggcaaggaaatgaaccaagcatccggatgttccagaaacttcactttgagcaggtggctacgagcagtgtttttcaggaggtgaccctcagactgacagtgagtgagtccgagcatcagtggcttctggagcagaccagccacgtggaagagaagccttacagagatgggtcggcagagccctgctgatggctgggccttgtgggcagccactctgtgtgagcagggtgttgggcccatacacttcaaagaccagagccctgcactgggagagtgctcctggcccaggctgggaatcacctttcgaggcccttcagactctggcggggcttgctgtggcctccctccagctagtggtgtggctgagcagactccagggccagggccagttcccttctcccctcccggccaaacccagacccagactctaggaagctggaatggagggcagggatccatgggagatgtcgggatgaaggtgggagctggaggtgcagggggacctggaacatggatgggagtggacaggcctttctccttagaggccagaggtgctgccctggctgggagtgaagctccaggcactaccagctttcctgattttcccgtttggtccatgtgaagagctaccacgagccccagcctcacagtgtccactcaagggcagcttggtcctcttgtcctgcagaggcaggctggtgtgaccctgggaacttgacccgggaacaacaggtggtccagagtgagtgtggcctggcccctcaacctagtgtccgtcctcctctctcctggagccagtcttgagtttaaaggcattagtgttagatacagctccttgtggctggaaaacacccctctgctgataaagctcagggggcactgaggaagcagaggccccttgggggtgccctcctgaagagagcgtcaggccatcagctctgtccctctggtgctcccacgtctgttcctcaccctccatctctgggagcagctgcacctgactggccacgcgggggcagtggaggcacaggctcagggtggccgggctacctggcaccctatggcttacaaagtagagttggcccagtttccttccacctgaggggagcactctgactcctaacagtcttccttgccctgccatcatctggggtggctggctgtcaagaaaggccgggcatgctttctaaacacagccacaggaggcttgtagggcatcttccaggtggggaaacagtcttagataagtaaggtgacttgcctaaggcctcccagcacccttgatcttggagtctcacagcagactgcatgtgaacaactggaaccgaaaacatgcctcagtataaaacaaacattataaaacgaaaaaaaaaaaaaaaaaaaaaaaaaaaaaaaaaaaaaaaaaaaaaaaaaaaaaaaaaaaaaaaaaaaaaaaccaacagaacaaacaaaaaaaaaaaaacaaaacagacaagaagagaaacagcacaccacaaaaaaagcacacaaaaatagggcggggggctcaacgcgagnnnnnnnnnnnnnnnnnnnnnnnnnnnnnnnnnnnnnnnnnnnnnnnnnnnnnnnnnnnnnnnnnnnnnnnnnnnnnnnnnnnnnnnnnnnnnnnnnnnnnnnnnnnnnnnnnnnnnnnnnnnnnnnnnnnnnnnnnnnnnnnnnnnnnnnnnnnnnnnnnnnnnnnnnnnnnnnnnnnnnnnnnnnnnnnnnnnnnnnnnnnnnnnnnnnnnntggggacccgttattaggcggtgcc

SEQ ID NO: 6246 - DNA, 5323 bp, Homo sapiens
  misc_feature (36)..(133): n is a, c, g, or t
  misc_feature (695)..(710): n is a, c, g, or t
  misc_feature (1190)..(1204): n is a, c, g, or t
gcgcggtgccgccgggaaagatggtcgtggcgctgnnnnnnnnnnnnnnnnnnnnnnnnnnnnnnnnnnnnnnnnnnnnnnnnnnnnnnnnnnnnnnnnnnnnnnnnnnnnnnnnnnnnnnnnnnnnnnnnnngtcatcacggaacagtctccacggcgcctggttgtcttccccacagatgacatcagcctcaagtgtgaggccagtggcaagcccgaagtgcagttccgctggacgagggatggtgtccacttcaaacccaaggaagagctgggtgtgaccgtgtaccagtcgccccactctggctccttcaccatcacgggcaacaacagcaactttgctcagaggttccagggcatctaccgctgctttgccagcaataagctgggcaccgccatgtcccatgagatccggctcatggccgagggtgcccccaagtggccaaaggagacagtgaagcccgtggaggtggaggaaggggagtcagtggttctgccttgcaaccctcccccaagtgcagagcctctccggatctactggatgaacagcaagatcttgcacatcaagcaggacgagcgggtgacgatgggccagaacggcaacctctactttgccaatgtgctcacctccgacaaccactcagactacatctgccacgcccacttcccaggcaccaggaccatcattcagaagnnnnnnnnnnnnnnnngggtcaaggccaccaacagcatgattgacaggaagccgcgcctgctcttccccaccaactccagcagccacctggtggccttgcaggggcagccattggtcctggagtgcatcgccgagggctttcccacgcccaccatcaaatggctgcgccccagtggccccatgccagccgaccgtgtcacctaccagaaccacaacaagaccctgcagctgctgaaagtgggcgaggaggatgatggcgagtaccgctgcctggccgagaactcactgggcagtgcccggcatgcgtactatgtcaccgtggaggctgccccgtactggctgcacaagccccagagccatctatatgggccaggagagactgcccgcctggactgccaagtccagggcaggccccaaccagaggtcacctggagaatcaacgggatccctgtggaggagctggccaaagaccagaagtaccggattcagcgtggcnnnnnnnnnnnnnnnaacgtgcagcccagtgacacaatggtgacccaatgtgaggcccgcaaccggcacgggctcttgctggccaatgcctacatctacgttgtccagctgccagccaagatcctgactgcggacaatcagacgtacatggctgtccagggcagcactgcctaccttctgtgcaaggccttcggagcgcctgtgcccagtgttcagtggctggacgaggatgggacaacagtgcttcaggacgaacgcttcttcccctatgccaatgggaccctgggcattcgagacctccaggccaatgacaccggacgctacttctgcctggctgccaatgaccaaaacaatgttaccatcatggctaacctgaaggttaaagatgcaactcagatcactcaggggccccgcagcacaatcgagaagaaaggttccagggtgaccttcacgtgccaggcctcctttgacccctccttgcagcccagcatcacctggcgtggggacggtcgagacctccaggagcttggggacagtgacaagtacttcatagaggatgggcgcctggtcatccacagcctggactacagcgaccagggcaactacagctgcgtggccagtaccgaactggatgtggtggagagtagggcacagctcttggtggtggggagccctgggccggtgccacggctggtgctgtccgacctgcacctgctgacgcagagccaggtgcgcgtgtcctggagtcctgcagaagaccacaatgcccccattgagaaatatgacattgaatttgaggacaaggaaatggcgcctgaaaaatggtacagtctgggcaaggttccagggaaccagacctctaccaccctcaagctgtcgccctatgtccactacacctttagggttactgccataaacaaatatggccccggggagcccagcccggtctctgagactgtggtcacacctgaggcagccccagagaagaaccctgtggatgtgaagggggaaggaaatgagaccaccaatatggtcatcacgtggaagccgctccggtggatggactggaacgccccccaggttcagtaccgcgtgcagtggcgccctcaggggacacgagggccctggcaggagcagattgtcagcgaccccttcctggtggtgtccaacacgtccaccttcgtgccctatgagatcaaagtccaggccgtcaacagccagggcaagggaccagagccccaggtcactatcggctactctggagaggactacccccaggcaatccctgagctggaaggcattgaaatcctcaactcaagtgccgtgctggtcaagtggcggccggtggacctggcccaggtcaagggccacctccgcggatacaatgtgacgtactggagggagggcagtcagaggaagcacagcaagagacatatccacaaagaccatgtggtggtgcccgccaacaccaccagtgtcatcctcagtggcttgcggccctatagctcctaccacctggaggtgcaggcctttaacgggcgaggatcggggcccgccagcgagttcaccttcagcaccccagagggagtgcctggccaccccgaggcgttgcacctggagtgccagtcgaacaccagcctgctgctgcgctggcagcccccactcagccacaacggcgtgctcaccggctacgtgctctcctaccaccccctggatgaggggggcaaggggcaactgtccttcaaccttcgggaccccgaacttcggacacacaacctgaccgatctcagcccccacctgcggtaccgcttccagcttcaggccaccaccaaagagggccctggtgaagccatcgtacgggaaggaggcactatggccttgtctgggatctcagattttggcaacatctcagccacagcgggtgaaaactacagtgtcgtctcctgggtccccaaggagggccagtgcaacttcaggttccatatcttgttcaaagccttgggagaagagaagggtggggcttccctttcgccacagtatgtcagctacaaccagagctcctacacgcagtgggacctgcagcctgacactgactacgagatccacttgtttaaggagaggatgttccggcaccaaatggctgtgaagaccaatggcacaggccgcgtgaggctccctcctgctggcttcgccactgagggctggttcatcggctttgtgagtgccatcatcctcctgctcctcgtcctgctcatcctctgcttcatcaagcgcagcaagggcggcaaatactcagtgaaggataaggaggacacccaggtggactctgaggcccgaccgatgaaagatgagaccttcggcgagtacaggtccctggagagtgacaacgaggagaaggcctttggcagcagccagccatcgctcaacggggacatcaagcccctgggcagtgacgacagcctggccgattatgggggcagcgtggatgttcagttcaacgaggatggttcgttcattggccagtacagtggcaagaaggagaaggaggcggcagggggcaatgacagctcaggggccacttcccccatcaaccctgccgtggccctagaatagtggagtccaggacaggagatgctgtgcccctggccttgggatccaggcccctccctctccagcaggcccatgggaggctggagttggggcagaggagaacttgctgcctcggatccccttcctaccacccggtccccactttattgccaaaacccagctgcaccccttcctgggcacacgctgctctgccccagcttgggcagatctcccacatgccaggggcctttgggtgctgttttgccagcccatttgggcagagaggctgtggtttgggggagaagaagtaggggtggcccgaaagggtctccgaaatgctgtctttcttgctccctgactgggggcagacatggtggggtctcctcaggaccagggttggcaccttccccctcccccagccactccccagccagcctggctgggactgggaacagaactcggtgtccccaccatctgctgtcttttctttgccatctctgctccaaccgggatgggagccgggcaaactggccgcgggggcaggggaggccatctggagagcccagagtccccccactcccagcatcgcactctggcagcaccgcctcttcccgccgcccagcccaccccatggccggctttcaggagctccatacacacgctgccttcggtacccaccacacaacatccaagtggcctccgtcactacctggctgcggggcgggcacacctcctcccactgcccactggccggcctcttccagccgcccccaccccccaggaccccttagcagccctgccctccctatcgtctgaacagttgtcttcctcagcctcctcccgcccccaccttgggaatgtaaatacaccgtgactttgaaagtttgtacccctgtccttccctttacgccactagtgtgtaggcagatgtctgagtccctaggtggtttctaggattgatagcaattagctttgatgaacccatcccaggaaaaataaaaacagacaaaaaaaaaggaaagattggttctcccagcactgctcagcagccacagcctccctgtatgcctgtgcttggtctactgataagccctctacaaaaaaacaaaagtatatatatatatgtacataatatcagaattataacaggcaaataaaacctgaaaatcaaaaaaaaaaaaaaaaaaaaaaaaaaaaaaaaaaaaaaaaaaaaacaaaaaaagaaaaacaaaaaaacaaagacaaacaaaagaaaacacaaaaaacaaagaaggaggggcgcgcgcgcgcagacgacaaactctcctcccgcgcgcggcgcaccacaaaagacgcaagccgccgcgcatgctatctagtgaaagacagggaggcccaacacaaaggggaaaggcaataaaaagaaacaaagagacggggcgcgagataagacaaacacattataacggagagaacaaacaggacaacgagtaatgatgtggaggagggaaccacgcaagagggagggagcaacacagaagcagacagaaaaccatcacagcgaga

SEQ ID NO: 6247 - DNA, 2707 bp, Homo sapiens
agcgggggtgggtggccggcgccggctcttgcggccgagcacggccgcgtcgacgggaaagagccgctagagcagaccgcgccgccgccggagccgcgcctgcccaggcccggggagggaggaggcgggcgtcagggtgctgcgccccgctcggcgtccgagcttccggccgggctgtgccccgcgcggtcttcgccgggatgaagcgcccctgcgaggagacgacctccgagagcgacatggacgagaccatcgacgtggggagcgagaacaattactcggggcaaagtactagctctgtgattagattgaattctccaacaacaacatctcagattatggcaagaaagaaaaggagagggattatagagaaaaggcgtcgggatcggataaataacagtttatctgagttgagaagacttgtgccaactgcttttgaaaaacaaggatctgcaaagttagaaaaagctgaaatattgcaaatgacagtggatcatttgaagatgcttcaggcaacagggggtaaaggctactttgacgcacacgctcttgccatggacttcatgagcataggattccgagagtgcctaacagaagttgcgcggtacctgagctccgtggaaggcctggactcctcggatccgctgcgggtgcggcttgtgtctcatctcagcacttgcgccacccagcgggaggcggcggccatgacatcctccatggcccaccaccatcatccgctccacccgcatcactgggccgccgccttccaccacctgcccgcagccctgctccagcccaacggcctccatgcctcagagtcaaccccttgtcgcctctccacaacttcagaagtgcctcctgcccacggctctgctctcctcacggccacgtttgcccatgcggattcagccctccgaatgccatccacgggcagcgtcgccccctgcgtgccacctctctccacctctctcttgtccctctctgccaccgtccacgccgcagccgcagcagccaccgcggctgcacacagcttccctctgtccttcgcgggggcattccccatgcttcccccaaacgcagcagcagcagtggccgcggccacagccatcagcccgcccttgtcagtatcagccacgtccagtcctcagcagaccagcagtggaacaaacaataaaccttaccgaccctgggggacagaagttggagctttttaaatttttcttgaacttcttgcaatagtaactgaatgtcctccatttcagagtcagcttaaaacctctgcaccctgaaggtagccatacagatgccgacagatccacaaaggaacaataaagctatttgagacacaaacctcacgagtggaaatgtggtattctcttttttttctctcccttttttgtttggttcaaggcagctcggtaactgacatcagcaacttttgaaaacttcacacttgttaccatttagaagtttcctggaaaatatatggaccgtaccatccagcagtgcatcagtatgtctgaattggggaagtaaaatgccctgactgaattctcttgagactagatgggacatacatatatagagagagagtgagagagtcgtgtttcgtaagtgcctgagcttaggaagttttcttctggatatataacattgcacaagggaagacgagtgtggaggataggttaagaaaggaaagggacagaagtcttgcaataggctgcagacattttaataccatgccagagaagagtattctgctgaaaccaacaggttttactggtcaaaatgactgctgaaaataattttcaagttgaaagatctagttttatcttagtttgccttctttgtacagacatgccaagaggtgacatttagcagtgcattggtataagcaattatttcatcagttctcagattaacaagcatttctgctctgcctgcaggcccccaggcacttttttttttggatggctcaaaatatggtgctgctttatataaaccttacatttatatagtgcacctatgagcagttgcctaccatgtgtccaccagaggctatttaattcatgccaacttgaaaactctccagtttgtaggagtttggtttaatttattcagtttcattaggactatttttatatatttatcctcttcattttctcctaatgatgcaacatctattcttgtcaccctttgggagaagttacatttctggaggtgatgaagcaaggagggagcactaggaagagaaaagctacaatttttaaagctctttgtcaagttagtgattgcatttgatcccaaaacaagatgaatgtatgcaatgggatgtacataagttatttttgcccatgcctaaactagtgctatgtaatggggttgtggttttgtttttttcgatttcgtttaatgacaaaataatctcttaatatgctgaaatcaagcacgtgagagtttttgtttaaaagataagagacacagcatgtattatgcacttcatttctctactgtgtggagaaagcaataaacattatgagaatgttaaacgttatgcaaaattatacttttaaatatttgttttgaaattactgtacctagtcttttttgcattactttgtaacctttttctatgcaagagtctttacataccactaattaaatgaagtcctttttgactattaaaaaaaaaaaaaaaaaaaaaaaa

SEQ ID NO: 6248 - DNA, 3035 bp, Homo sapiens
  misc_feature (1424)..(1451): n is a, c, g, or t
gaggcaggtgccagcggagagtgggtgggggtgccggcgccaggccaggctcggggaggccccgcgctacctctgcctctaggagtccaggcgcacagacaagctccccggagccgctcctgcttcgccaactccccactcgcgccgcccgtgccagccgcgggcactggcgtctccgcggcccgcaggaggagtcgcgggagcactagcagccgccgccgagcgaaagcatcctcaggagagaagccccgggctttgcagccggcggcctccgtccgccctccgcggtcgccccccgccccgtcgcccgtccgcccgcggtggcagccggcgccggcgccccggggcccttcacctgccgcgagcgtccgggcgggggggcgcacgggagaaaaggcgcaagaagcgggcacaccgggaaaaccattaactcggctcactcggcgcggagaagcgacgcccgctgactaagagagcaccggtgctacgtgcacctggtccccaagttgaggagcgaaaaccctccaaaggggaatagaccgcgcggggagcattccggtctcactgaccccggcccacccgcgggactccaggcacctcttctgcccgcaccccgcgacccctcccgggaccccggagacagccggcctgcccccggcgtcccccttggccagcacgccatgccggggctgcgccgggaccgcctactgactctgctgctgctgggcgcgctgctctccgccgacctctacttccacctctggccccaagtacagcgccagctgcggcctcgggagcgcccgcgggggtgcccgtgcaccggccgcgcctcctccctggcgcgggactcggccgcagctgcctcggaccccggcacgatcgtgcacaacttttcccgaaccgagccccggactgaaccggctggcggcagccacagcgggtcgagctccaagttgcaggccctcttcgcccacccgctgtacaacgtcccggaggagccgcctctcctgggagccgaggactcgctcctggccagccaggaggcgctgcggtattaccggaggaaggtggcccgctggaacaggcgacacaagatgtacagagagcagatgaaccttacctccctggaccccccactgcagctccgactcgaggccagctgggtccagttccacctgggtattaaccgccatgggctctactcccggtccagccctgttgtcagcaaacttctgcaagacatgaggcactttcccaccatcagtgctgattacagtcaagatgagaaagccttgctgggggcatgtgactgcacccagattgtgaaacccagtggggtccacctcaagctggtgctgaggttctcggatttcgggaaggccatgttcaaacccatgagacagcagcgagatgaagagacaccnnnnnnnnnnnnnnnnnnnnnnnnnnnncagagacacaatgctgagatcgcagctttccatctggacaggattctggacttccgacgggtgccgccaacagtggggaggatagtaaatgtcaccaaggaaatcctagaggtcaccaagaatgaaatcctgcagagtgttttctttgtctctccagcgagcaacgtgtgcttcttcgccaagtgtccatacatgtgcaagacggagtatgctgtctgtggcaaaccacacctgctggagggttccctctctgccttcctgccgtccctcaacctggcccccaggctgtctgtgcccaacccctggatccgctcctacacactggcaggaaaagaggagtgggaggtcaatcccctttactgtgacacagtgaaacagatctacccgtacaacaacagccagcggctcctcaatgtcatcgacatggccatcttcgacttcttgatagggaatatggaccggcaccattatgagatgttcaccaagttcggggatgatgggttccttattcaccttgacaacgccagagggttcggacgacactcccatgatgaaatctccatcctctcgcctctctcccagtgctgcatgataaaaaagaaaacacttttgcacctgcagctgctggcccaagctgactacagactcagcgatgtgatgcgagaatcactgctggaagaccagctcagccctgtcctcactgaaccccacctccttgccctggatcgaaggctccaaaccatcctaaggacagtggaggggtgcatagtggcccatggacagcagagtgtcatagtcgacggcccagtggaacagtcggccccagactctggccaggctaacttgacaagctaagggctggcagagtccagtttcagaaaatacgcctggagccagagcagtcgactcgagtgccgaccctgcgtcctcactcccacctgttactgctgggagtcaagtcagctaggaaggaagcaggacattttctcaaacagcaagtggggcccatggaactgaatctttactccttggtgcaccgcttctgtcgtgcgttgccttgctccgtttttcccaaaaagcactggcttcatcaaggccaccgacgatctcctgagtgcactgggaaatctgggtataggtcaggcttggcagccttgatcccaggagagtactaatggtaacaagtcaaataaaaggacatcaagtggatacctgacttctcaggatccttattctagctacaagtcaaagataactcctggtccagacaaaacacctggcctatcacaagctgactaaaaatctgcactttgggccagcgcaggcaacagtaactctgacaggttcaaattagacctcacactttctactcatattctagtcactggacccatctgaatcagtaatccctactgcccggtcctggagtaacttcttagagatattataacaagtggcaaaaataaaagagggatttgctaagaatatcagaaaaggagtgttccaatttgaagagtattacaattgaaataacatcaaatatgtcacactaagcagccagtaacagaataaataattacaacg

SEQ ID NO: 6249 - DNA, 3348 bp, Homo sapiens; identical to SEQ ID NO: 4605

SEQ ID NO: 6250 - DNA, 1170 bp, Homo sapiens
agactgagtttcgctcttgtcgcccaggctggagtgcgatggcctgatctcagctcacggcaaactctacctcccaggagaatcgcttaaacccaggcggcagaggttgcagtgagccaggatcgcgccactgcactccagcctcagcaatagagtgagactgtctcaaaaaaaaaaaaaaaaaaaaaaacctgccaattttcaaacataccgtagagattattttcaggtgccattttatagtatagcagcagggcttttactctgtgtatgcacagatgcagtctggggcatggtttgtgtgctggactttctcatggccatcatcagtatgcttatggatttgatgacaggcatagcctggggcatatcacctcattggtaaagggctagagcctttcttttttatggcacttctttttttgagatagggtcttactctgtcaccctggctagagtacactggtacaatcacggctcaatgtaggcttaacctcctgggctcaggtgtgagccactgcacccagcctttgttttattttttattttttgagaggtatgattctttctagagatttttctcatggctactattagatccaggaatgggtgattggagattattagattctaggttaacttctaccactttaccctaatacataaaactttttcctaaataaatgatggaaggaataatacttggttacctggcattatttttcagtaagaaaaaagctttactaaccactacatttatggaaatttgtaggggtaagtattttataggtcataaaaaacaccataatataacgaatctcattttctttaaatgtgaattaaatcctaacagtcatctttataaaatgaccataggctaaaatcttacgtgtaagtactactacaataaataatttctgaaacctttaaatcatatgagttgggccttttttataacttggaatcaacattttttaataaagtatccatagaaaatgatagatctggccgggcgcggtggctcacacctgtaatcccagcactttgggaggccgagatggctggatcatgaggtcaggagaatgacacgaacctaggaggcggagcttgcagtgagccgagatcatgccactgcactccaggctgggcaacagagtgagactccatctc

SEQ ID NO: 6251 - DNA, 2227 bp, Homo sapiens
  misc_feature (1926)..(1943): n is a, c, g, or t
tcggtacccccgcggagtatcgcggagacaggtggtggctacgacggcgaagggagctgagactgtccaggcagccaggttaggccaggaggaccatgtgaatggggccagagggctcccgggctgggcagggaccatgggctgtggctgcagctcacacccggaagatgactggatggaaaacatcgatgtgtgtgagaactgccattatcccatagtcccactggatggcaagggcacgctgctcatccgaaatggctctgaggtgcgggacccactggttacctacgaaggctccaatccgccggcttccccactgcaagacaacctggttatcgctctgcacagctatgagccctctcacgacggagatctgggctttgagaagggggaacagctccgcatcctggagcagagcggcgagtggtggaaggcgcagtccctgaccacgggccaggaaggcttcatccccttcaattttgtggccaaagcgaacagcctggagcccgaaccctggttcttcaagaacctgagccgcaaggacgcggagcggcagctcctggcgcccgggaacactcacggctccttcctcatccgggagagcgagagcaccgcgggatcgttttcactgtcggtccgggacttcgaccagaaccagggagaggtggtgaaacattacaagatccgtaatctggacaacggtggcttctacatctcccctcgaatcacttttcccggcctgcatgaactggtccgccattacaccaatgcttcagatgggctgtgcacacggttgagccgcccctgccagacccagaagccccagaagccgtggtgggaggacgagtgggaggttcccagggagacgctgaagctggtggagcggctgggggctggacagttcggggaggtgtggatggggtactacaacgggcacacgaaggtggcggtgaagagcctgaagcagggcagcatgtcccccgacgccttcctggccgaggccaacctcatgaagcagctgcaacaccagcggctggttcggctctacgctgtggtcacccaggagcccatctacatcatcactgaatacatggagaatgggagtctagtggattttctcaagaccccttcaggcatcaagttgaccatcaacaaactcctggacatggcagcccaagtaaggagactggggaggggggctgggcaagggaacagaccagtgacgtgaagacatctggctcaggaccgctgatctgtgtttggcctgcagattgcagaaggcatggcattcattgaagagcggaattatattcatcgtgaccttcgggctgccaacattctggtgtctgacaccctgagctgcaagattgcagactttggcctagcacgcctcattgaggacaacgagtacacagccagggagggggccaagtttcccattaagtggacagcgccagaagccattaactacgggacattcaccatcaagtcagatgtgtggtcttttgggatcctgctgacggaaattgtcacccacggccgcatcccttacccagggatgaccaacccggaggtgattcagaacctggagcgaggctaccgcatggtgcgccctgacaactgtccagaggagctgtaccaactcatgaggctgtgctggaaggagcgcccagaggaccggcccacctttgactacctgcgcagtgtgctggaggacttcttcacggccacagagggccagtaccagcctcagccttgagaggccttgagaggccctggggttctccccctttctctccagcctgacttggggagatggagttcttgtgccatagtcacattggccatgcacatatggactctgcacatgaatcccacccacatgtgacacataatgcacctgtgttctgtacacgtgtcctgaannnnnnnnnnnnnnnnnngcacatttttgacatggggagcctggcatgtaatgtcttgacactgtacaaggtacccctttctggctctcccatttcctgagaccacagagagaggggagaagcctgggattgacagaagcttctgcccacctacttttctttcctcagatcatccagaagttcctcaagggccaggactttatctaatacctctgtgtgctcctccttggtgcctggcctggcacacatcaggagttcaataaatgtctgttgatgactgccgtaaaaaaaaaaaaaaaaaa

SEQ ID NO: 6252 - DNA, 2462 bp, Homo sapiens
cgcccgggcaggtgagaaattggagaagataaaactggacactggggagaccacaacttcatgctgcgtgggatctcccagctacctgcagtggccaccatgtcttgggtcctgctgcctgtactttggctcattgttcaaactcaagcaatagccataaagcaaacacctgaattaacgctccatgaaatagtttgtcctaaaaaacttcacattttacacaaaagagagatcaagaacaaccagacagaaaagcatggcaaagaggaaaggtatgaacctgaagttcaatatcagatgatcttaaatggagaagaaatcattctctccctacaaaaaaccaagcacctcctggggccagactacactgaaacattgtactcacccagaggagaggaaattaccacgaaacctgagaacatggaacactgttactataaaggaaacatcctaaatgaaaagaattctgttgccagcatcagtacttgtgacgggttgagaggatacttcacacatcatcaccaaagataccagataaaacctctgaaaagcacagacgagaaagaacatgccgtctttacatctaaccaggaggaacaagacccagctaaccacacatgtggtgtgaagagcactgacgggaaacaaggcccaattcgaatctctagatcactcaaaagcccagagaaagaagactttcttcgggcacagaaatacattgatctctatttggtgctggataatgccttttataagaactataatgagaatctaactctgataagaagctttgtgtttgatgtgatgaacctactcaatgtgatatataacaccatagatgttcaagtggccttggtaggtatggaaatctggtctgatggggataagataaaggtggtgcccagcgcaagcaccacgtttgacaacttcctgagatggcacagttctaacctggggaaaaagatccacgaccatgctcagcttctcagcgggattagcttcaacaatcgacgtgtgggactggcagcttcaaattccttgtgttccccatcttcggttgctgttattgaggctaaaaaaaagaataatgtggctcttgtaggagtgatgtcacatgagctgggccatgtccttggtatgcctgatgttccattcaacaccaagtgtccctctggcagttgtgtgatgaatcagtatctgagttcaaaattcccaaaggatttcagtacatcttgccgtgcacattttgaaagataccttttatctcagaaaccaaagtgcctgctgcaagcacctattcctacaaatataatgacaacaccagtgtgtgggaaccaccttctagaagtgggagaagactgtgattgtggctctcctaaggagtgtaccaatctctgctgtgaagccctaacgtgtaaactgaagcctggaactgattgcggaggagatgctccaaaccataccacagagtgaatccaaaagtctgcttcactgagatgctaccttgccaggacaagaaccaagaactctaactgtcccaggaatcttgtgaattttcacccataatggtctttcacttgtcattctactttctatattgttatcagtccaggaaacaggtaaacagatgtaattagagacattggctctttgtttaggcctaatctttctttttacttttttttttcttttttctttttttttaaagatcatgaatttgtgacttagttctgccctttggagaacaaaagaaagcagtcttccatcaaatcaccttaaaatgcacggctaaactattcagagttaacactccagaattgttaaattacaagtactatgctttaatgcttctttcatcttactagtatggcctataaaaaaaataataccacttgatgggtgaaggctttggcaatagaaagaagaatagaattcaggttttatgttattcctctgtgttcacttcgccttgctcttgaaagtgcagtatttttctacatcatgtcgagaatgattcaatgtaaatatttttcattttatcatgtatatcctatacacacatctccttcatcatcatatatgaagtttattttgagaagtctacattgcttacattttaattgagccagcaaagaaggcttaatgatttattgaaccataatgtcaataaaaacacaacttttgaggcaaaaaaaaaaaagttctcttccttactatagatactattctttattctcttttccctcttccttcctccctcttctttctccttctccttcctctttttttatctttttccttcttccttttttctctttcgctcttcgccgttctctcctttctttttctcttcttttcctattctcatctccctcctttttttcctccatctcattgtcccctcttcttccttcccattcctcttttttttttctttatttttttatcttacaatataactt

SEQ ID NO: 6253 - DNA, 4119 bp, Homo sapiens
  misc_feature (851)..(867): n is a, c, g, or t
  misc_feature (920)..(938): n is a, c, g, or t
  misc_feature (2248)..(2262): n is a, c, g, or t
aattcggcactagggctgctcgcccgtgtgataggtttccacagtaatctttatgctgcattagagacatagatacagaggtgctgtactgtgttcttgcaacggtggaggtgctcggctggtaacgttaaagaaggaataaggcgcccgacagaaggcgtttgtctttgttgtggagcatcagcgttaaggacagccggctgctgtgggagcaatttcctgctgcagagagcattttaagaaaggacagcattcctgtgacctctgcctaccatccataaaatactcattcccctctcagctctgcctgcagttgaacacaaagacctggaggagactcccacctccttcagggagaagaaaggaggcagcgaagcagattaaaggaacttgtggcttgtggcctttttgtgcaagggccgcctggaaggggagaaaagtgtatgaaagccaccgtggcggttaatgagctgtgagatgaggcgctgctgcggccgctgctgctgacactcgctcccaggctgcacccgccgcccttggcgcttcatgtacatgtgtctattcaggccttgcggaggcgcccagaagagcatccaacacggctgccggggaaagaccgcccaccatgcccacggagaccctacagacaggtagcatggtgaagccggtcagccccgcgggcaccttcacctctgctgtgcccctgcgcatcctgaacaaggggccagactacttccgcaggcaggccgagcccaaccccaagaggctcagcgccgtggagaggctggaggccgacaaggccaagtacgtcaagagccaggaggtgatcaacgccaagcaggagcccgtgnnnnnnnnnnnnnnnnnccaagcccccggtgtgcccggctgccaagcgcgcactgggcagccccacgctnnnnnnnnnnnnnnnnnnnacgccaagaccgagagcggcgtgcagagggagaacctgaagctggagatcctgaagaacatcatcaatagctccgagggctctagctcgggctcggggcacaagcacagctcccgcaactggccgccccaccggtcggaagccactgacctgcaccgtcactccttcgcggagtccctgaaggtctaccccacgcagggccgcaggagcccgcaggagggcggctcccacgtgggcaggagactgctggagcagtcagccgagtccttcctccacgtgtcccacagctcttcggacatccgcaaggtgaccagcgtgaagcccctcaaggccatcccctgcagtagctctgcccctcccctgcctcccaagcccaaaatcgcagccatcgcctccatgaagtcccccgaggccgaccctgtggaaccagcttgtggagtcagccgaagaccctccctccagcggtctaagtcagacttgagtgacagatatttccgagtggacgcggacgtggagaggttcttcaactactgtggactggacccggaagagctggaaaacctgggaatggaaaactttgcaagggctaattctgacataatatccctcaacttccgcagcgcaagtatgatcagctcagactgtgaacagtctcaggacagtaacagtgaccttagaaatgatgacagtgccaatgaccgcgtgccgtatggcatttctgccatcgaaagaaatgctagaatcatcaagtggttatatagcatcaaacaagctagagagtcacagaaggtctcccatgtgtaagacagtgcgtggaaaggagggagcgtgggtctctgtgcttacgcagttgtgaaggttgtgaggtctccttgaagtgttgtgagcttctccactctttgtgttgcttgttgtgcaatgttttcaagttgcatgcttgtcaacatggggactgacctggcttccacgtcaccatcgctacagagcctggctgaacacgcgtcatctgccaaaagtttcaggccagaatctaattagggctttgctcgtaagcaaaactgtttacatgaaaatggtatacaacttcttcgatatttatgtggttcttgtgtttttatatcccgcgctattgtgtcttaattaaaagttttatcaactggcttttaagttgagagcggaatctttttgaaataaaaagccactttgcctacatgtgagactattccagtgggacagtaaatgggatctgctaccaaacagataatgactgaccaaacatagaaccaggctgggttttctgtggaataaagnnnnnnnnnnnnnnntaatcgtttacatgttgaaattctcttgccacttagtgaagcagtcattggggtaacaatgctacgttttgtgtccgattcagtgtgtaaacgttggtggttctatgtaatactgaccccaaggaaagacgatcagatacaaagaaagatggttaaatctaggaggttgggtgtttgggggttttgttgatgttgttctgattgggataattcagaaattcctaatattatctttcgacagaatgaccaccctaaaacaaatactgaatgcctttaaaaaaaaaaaagttgtggttttttgtttttttttttttttttttttggtcgagaactactaatttcatgctatttctttctctctccctttgttgttatttgatttgggggaagggagtgaggcttgtgcagatttgagctatctgaagacatgaacagaagtcaaataccagccatatcagtagagccttccattcaaaagtgaacacacttggtagctgaaccatatctgagcagcgtgattctgttgtcttgcatatgttattctctcaggctgtggatctttgttacagctctaggaaactgtagaaatacaatgctatgtagcttttccaccccatggtctctagtgctgcctatcaacttgtccccttttttcccaataacctgtcttccaggtggtacagttagctgtcactcagctgacaccatgatgtggcagcagagagggaaacctacaagtggtttgcctcattgcctttgccacatctgaagttctcagcagcactaccttagacttcatgagctaataggaaactttttatggtgtaaatgctgtaagactttgtacatacttcagttgttatgaaatctttaaagaaaaaaagaaaaagttacgctaataaattgctgtggtgcaggcaaaaaaaaaaaaaaaaaaaaaaaaaactgtattgcacaaaagtttaactttggactatgaaacagaagcagacttttgataggcttgaagaaacattatttcattaagttattttcaccatattccaattactctaaacaccagtgttcttaattgtggctctagcaatgtgcttttgctaaactgattacatcaaggttcctaaaatgtgctgcagcatctcagttcacacttgtgttatttttgtcttttcttaaacatcaggattttttacatcttccacacaactcttcagttataaatattttgagttctcaccttggaggcacacctttgaaatgtatggcttcgtttttatttgtaccagcccaacatccctaccatggcatgtgttcacacactcgctcctccactccttccttcattcctcttcaaaatgtcactgtttgagtgactcatttcaggtatcatggtaggcacgggactgccatagtcaacaacacagtctctgcctcaaggaacttagattttcccctttattttaagagaaataacattactcttagtggacatgctctatctgttatatttggacaatgagtattccatgattatttattgcatcaagttatttgaaatttaatgcttcttacaaaattccatatactatgcaaatgtaaaatgaagccctatttaaaaggtaattttcagaaacaaattatatgattctcagctattactgtttataaatatcttgcttctgaaaagcaagtttgcttccttgactctttcccctggttttgaattctgcctggattttttattcatgttcagtaaaactaaaaccctgcttcccagaagaactgttttggagtgcagctatgagtgggggtgatacaatgtgttcaatataatagaataaaaataagttttctaaa

SEQ ID NO: 6254 - DNA, 1756 bp, Homo sapiens
ttttttttttttcctgttttctagaaacattttatttaaaatttaaaaccatattacttcatacagcaaactgtgcactttgatatatcacagtgtcttaaaaaggaaaataatcagatttgtttggaaatttatttacatcagcctagaatgattggcaagtaacacagttactatgaaacccaaattgttacaaaatgtttacaaaaaactatattcatagaaattctgcatgtccacaaagggcatcccctgaatggcccagagaccagtgtgtgggaaccatgttgagtgggagtggggggcgtccaggcactctggtctgggtggtgggacaggtctagggtctcagaggcccatggtgctccctgggggctcagcccagagcctgggaactgaggcccctaccatgggaggcccaaccaggaagtcggcccaggcagaggtgggctgggggcttggcgcacagtggtaagaggacccatgatccctacggaaccaagacaggatgctcctcatggggctggagtcaggcgtgcttggtcagggccccagaggcagacccagagttcagtgcagaccagcctgacgcctgaggctgaagctggggcaggctgctgactgcacggaagcccacctcagatatctcctcccctgcatgctccagagatgctcagacctgcgaaagaggctaaaggaatggaactgcagagaacagaccgatctgggtgagccagggacagagatctgcagcctcctggggagggggcactctgccaactgccctgccaggatgccgcaggggagagaaaggcagacagatggagcctgggctgtgctaggataggagctaccttcttgcctctcatctttcacccctctggctctgaggtcgctccctgacagctggtctctgggtcaaatggggctggggaggttgtctgaggcaaggcaaacccttggctggcatttgactgaatctatggctgcttcttcatgtctggaggcctcagagtttcaatccataaaatggagacaatctgggaggtgatgtgaggtccactgttctagaaggcaggaggacaggatcagtaacaggggcatgggaacactgtatcggcatgctggccatgccctgggggcattctctttaaacaagtgctttccctagttgtgagctgtgttgtgtgcaagttgtgaactgcttctgcatgtgggtgagaatcagaggcagaggcttttgctacctagaatagccccgccttctagggtatcctagatggagcctgaaacctacctgtgattctgcaggcaggtgtgagaacaggcctggggagtggcctgctctttcccagcccttctgctcctgatgaattgccccagaactagaatgtaatattggcacaggggctgagtactagcatgacattgcttctcagacacacccagctgtcctgcctcagacaggctcggatggagatgaggtccgttggccattcctgcccctcccacaggaggcctggcggtgcaggactcacctggcagcaccatgtagctctgccctcttcttcagggtctggagctctgatgtgtggagggccttcgccaacccaaggggctctctgagacctccgtcccagactttgctgctgcagcccccatctctcatctggtcctcacccgtgctggctgggttctggttactccgtgtgcagacgtgcaggaaagggttgtatacacatgggctacaggtcat

SEQ ID NO: 6255 - DNA, 998 bp, Homo sapiens
  misc_feature (217)..(260): n is a, c, g, or t
gcacacgtttgtaatcccagctactcgggaggctgaggcaggagaattgcttgaacctggggggcagaagttgcagtgagccgagaccgtgccactttactccagcatgggtgacagagcaagactctgtctaaaaaaaaaaaaacaacaaaaaaatctgagactcgcagtcaagaggtctggctgagggattatgatgaggaccaggcgagggcannnnnnnnnnnnnnnnnnnnnnnnnnnnnnnnnnnnnnnnnnnntcagtccagtgtgttgagaagtcataggtggaataccaggctaaggatcccctccaaatgcccctgtagagctcactaccagcacagacagaccgtctcctggaggaacaaagagagacaccaggtgggctttttaaccatcgtctctttatttacagctcaagagcacatgcaacatgacatcatgaaactacaagggcgtggcacttccccctccccctgccgctccccaactttaaaaaggaagtacagcaccctaggaagttgcctaagagtcagaaaaccctacactgagggtcccaggccgaggtgctccattcattgcctccaaaaataaagaccagttgcagcccaggaggcttgggcctcagagcctgggagtttgtcattgctggtaattagctacgcaaaacaggtctcggatttgccagctcacacctgaatacaaatagcccgaattatccgaatgtccctgaccaccccacatttctgttttccccgtcgtatcctagacctgtgattctcaaatttgatcgtgcccaagaatgacctggagaacttgtgaaaagccaaatggctgggccccacccccagagattctggctcagtaggcgtggggtggtggggcccaagaatctgcatttctttttgttttttttgtctttttttgagacaaggtctcgctgtattgcctaagctggagtgaaactctgtctcaaaagaaaaaaaaaaaaaaaa

SEQ ID NO: 6256 - DNA, 2926 bp, Homo sapiens
  misc_feature (33)..(33): n is a, c, g, or t
  misc_feature (42)..(42): n is a, c, g, or t
  misc_feature (308)..(323): n is a, c, g, or t
gacatcttgaagggagcagttcagttacagcantctctccanacccaactataccatctctctactctttatcttgccctcacatacacataagtttgtcattgttcttcagttctttgggtaatctcttcctagaaactgcatctaacaaatagaccacatccccaaattccatcatgtccaaaaagaagcacggtatttccatcaacaccccagctgccatcaccaagccaactcgcctgacttccattcacttactagcaaacatttaccaagtatctgccatgttcattttgtcaatgagaatnnnnnnnnnnnnnnnnctctaggagatcacagtctaatgagatcaatgtttatatagaaaatgtaaataggttgtgataagtactaaatgcacgctgctaatggcatcatcacctctggctcttctcaatcctgcgtttcccatgttgtgtcatgcaacagagctgtcacactgcctcttcctcttcatctctggtgccacctgtgatttacttgcacactaccttgtttctgaactattgcagcccctcccaacttatctcactgcctcattcacctgcctttcaaaactggcccacctcctgctgcccaataacctgatgttgtcactctcatatttaaaacccataagtgctgccgggagcggtggctcacgcctgtaatcccagcactttgggaggccgaggcgggcggatcacaaggtcaagagatcgagaccatcctggccaacgtggtgaagcccagcctctactaaaaatacaaaaattagctgggcggggtggcacacacctgtagtcccagctacttggcaggctgaggcaggagaattgcttgaacccggaggcagaggttgcagtgagccgagattgcactactgcactccagactggtgacggagcgagacgctgtcaaaaaaacaaaacaaaacaaaaaacatatcaatgctgatgaaccaagtgcaaagccctgagcttggccaggcaacatagcctggaaacctgacttttaatccttactttgctctattcccccaacatacacacacttcatacaccacacctaaaagagacttcccacagttttccaaaaatgactcacatttatatttcctgtttttccctttgcccaccctgccctctctccctctgccttcatttttttaattaacctctggaactcaggtgctcctgctccaaggtttaggtcaaaagttacctcctccatgaagctttctctcattctcccacaatgtgtgaaagccccattctcagatttgcttagttgtgcatttgtatattctaccttgcactacagtcatttgtatatttatcttatggtttctgtgccttaggaaaggtacactgtcttaatcatctttgttcaatacagtgcctagcagagtgcctcaagtataatatgtgctcaataaataatagatgcatttttccatgcatattttctactatatcgaagtggaaaatatatccatgtgatatagtggaaaatatctcatgaagagagatacagtgaggaaaatatctcatgaagaccaaaaagcagaaatccaagttttttcttttcattactatcatcagtgattattaattttatgtgtcaacttggttgggcttagggatgctcagatagctggtaaaatattatttctggatgtgtctctcagggtgtttctgggggaaattagcatttgaatcagtagactaaataaagaaaatctgccctcacaaatgtgagccagcatcatccaatttattgacagtttagatacaacaataaggcagaagaaggtgaactctctttccttgagctgggacatccatcttctcctgctctgacattggagttcctagttcttgggacttcagattctcccctgaagtttctcaggccttttggcatcagactggaagttatgccattggctcccctggttctcagacctttggactcagactgaattataccactggctttcctggttctccagcttcaagatgacatattgtgagacttttcaacctccataattgcatgagccaatttccacaatatatctcctcttatgtatctatatatttcctattggttttgtttctctacagaatcctaatagatcatctaattgtttatctaacaagtattttcctccctagacgatatgttgggcactagggacacaaaaataaaaacacagacatctgcactcaataaacttacattcaatatcagagagattggcacagaatacaaataaaatgagatacatgcaaaataatatgaattgcaaaattacggcaattcaccaccaactaggtgtgtgaccgtgggaaaatcacactgtgagctaaatattagcaagtttaaaatgcaaaatcagaggcagtctatgaattggactttgctaatggcctcctttgctgatggatggcacattggtgttagaaagtgcttatttttgcaaaggtccattattgatgctttaattctaaggaaattatgtaggcagaaactaaagaaaggttaaaaaaacagcagctaaaattgatacttagacaataaaaaactaattataagtgatttatcagcaccactagataactacattggtgaaatttaaggccatgaaatgcaggacaagcctcgtaggaagcaaggtcccagtggatgagatgctgtcctctgggctcctaaccttccaccactagtattcaccatatctgattggaaatgtgtgcatgtgagtcggcctcccctctatgatgtgagtagggacctatttttgctcatctctgtatcctctacacacgatgcttggcacacagcaagtattcaataaatgtttatgaatgaagcaatcaaaaaaaaaaaaaaaaaaaaaaaa

SEQ ID NO: 6257 - DNA, 1363 bp, Homo sapiens
  misc_feature (1083)..(1083): n is a, c, g, or t
atgatgtatgctttgtttctgttgagtgtggtgttctagatgatgggttttgtgaggttttcttctaagccttctcctatttatgggggtggaaatggaggatcccagaacacacagccctggcccctttgattctagggcctgcacagatctctggttcaaatgcacaggccctcagaatagaggaacatgaagagagatcttagagcacacagtagaatgtgagagcctgggtgtctgagaccgggagggcccagcagtgaggggcaggctcttctggtcaccaggctgttcagtggactcagttcttcatcttgtaatgtcgatggctttgccacaccaggccaagcccatgccataccttgtcaagactgtcaaagtggttgtggttaggtcaaactggttttggttctgatggttaggaagaaacaggtcagccctcagatcacctggcccgggacagctgaccccctagaaccctggctctgccattagctaggacctaagactctgcccacattttggtctgttctctcccattacacataggtttgtctcagcatgcaagagtttttcctttaaaaaaaaaaaaaaaaaaaaaaaaaaaaagcaaggttttctctaaaatcaaagggggggctttttttttcccaaaagtgttttatcccttttacgtgttaaaaaaccaacgcttaaaattcttttttcagactatctgaaagggaggggatcttcaccctcccggtctcccaccggtggctcatagtgcgtcatactggttgtgtttgtgccccgaacattttgttttccacattgaaagcccggttgtggcccaactgcttccttgcgtgcgtgggcaccccctcacggtgttgacggaccaagcggccccatggaccccctgtgaagggctgcgtgtgtaatatttcggcgcccgcttggggaaggggggacaccctaattttcccccccttttctatggacgccttccgagtcccaggtttttacactttgaaggccgtgcggacatcgggaaaggcggggctttaccaggaacctccattaaaatttcctacaccaagnattctgttatcggggcgacctcactctgtgtatacacctgtttccccgcgtgcacctccgttcctctttgttcccttctcacggcgtcaacactcggcggactacaggcgacaaattggcctgcgctctgtggaaaattgtgtcctccaacttgtgcaggcacaaccacactaatataaaaaaaaagagggcgcgatatatctgcgggcgatagtacacgtttaaaggaccatggtggtaataagagcgggtcaacagagaaggtttgcaccttgttgta

SEQ ID NO: 6258 - DNA, 2281 bp, Homo sapiens
atggcttatatagtatgtatctagtcgtgacgtgatttgttttccttgtgttttttcattttttattattatgtactttctatttttctccttatttctctgtttttctacgtcatgttgtttcattattttcttttaattatttgtttctttcgtcattttgttcttcttgtgctttcttaggtttccatgagtttctgctgtttgttgcttttgtgtctcatcgtattttggtggtcctccgtcattcttttgtgtagtcattttcctttgcatttcatcttgttctcttgtggaattttggtggactttgagttcatgttatctcatccagctgtttgcagtcttctattgccacgggttctgaatccgtgtgtgctattccatgtattgtgggtcttccccgtttctattggtctatgggggtacccctctcttccgacggtgattccctaccagcagtttcaagcctcggagcactcaatagtttggtgtccgtgtaggaatcttgatctgatagattgggtagtgcagaaatcagatatctagtttctttccttatcttttggaccttaatcccagtttcaaaatgaagactactatagtggaaactattctatcataatctatcctcaaggactatctgaataaggaataaattgtgttacttttttgtaaattccctgttaagttcccctccataatgttttatgttcttgtgaggaaacaaagtaataacatgtttaattttatttgactttcgcattgcttttcaacaagcaaatgttaaatgtgttaagacttgtactagtgttgtaactttccaagtaaaagtatcccctaaaggccacttcctatctgatttttcccagcaaatgaggcaggcaattctaagatcttccacaaaacatctagccatctaaaatggagagatgaatcattctacctatacaaacaagctagctattagagggtggttggggtatgctactcataagatttcagggtgtcttccaactgaaatctcaatgttctcagtacgaaaaacctgaaatcacatgcctatgtaaggaaagtgctattcacccagtaaacccaaaaaagcaaatggataatgctggccattttgcctttctgacatttccttgggaatctgcaagaacctcccctttcccttcccccaataagaccatttaagtgtgtgttaaacaactacagaatactaaataaaaagtttggccaaaaccaaccatgaagctgcaaaggtgcttgctcttactgtttcaaatttttccaactctgtagtgtctcacttttaaaggaacagcttgattgcaaaggagaaaatagataagcaatgaagttatctccaacttcctaaaggcttatgacttctaaaagtgaatctatcagcattccacatcagatttaaagcatcaaatgcctgtgaaacagcaaagatggttggtgattttgctcattatggtcgtggagtgctgattgattcacagtagataaagctggcagtaagaaatgctaagagttgttgaagcagaaggcggctgattgtcaataagtcactacagttgcataagcagtgctgtcagaattggttttggtgcaggcaatagattttgccttcaggggttcctgtggatctgaggaaggcatcagtgttgattaacactcattactagggagtgactggtagttacttaaagcaagtaattgaccaaatggaaaaggggaagtaattaaggaaattggtaagtggaggagtaagagcagaaaagttatgaggagaaaaaattacaatagagtttaggtttgggttgtcaaataaaaagaaaaaaaaaaagaagaaaaaaaagaagagaaaagaaaaagagacggatagaagaaggaaggtgagtaatgacagaacaaaaaagagatgaagtgggataggagcagaaggagcgcggaataagaaagagagaaaaaactaagagggcaaaaagaaaaacaaaagaaaaaaagaacaaagaaacacaagagagcaaccagagagacaagagaggagcagagaaggagagagaaaacaaaaaggagcaaagaagagagaaccagaaagacggaagagaagaaaagaacagcacacagtggagaagaacgacaaacgcgcgaaagatagagaaacaaaaaagaagacacaaacaaagaacacagaaaaacacggagacacacaagacagcagagagagacacagaaagcagagcacacgacacacgacacaggaaac

SEQ ID NO: 6259 - DNA, 546 bp, Homo sapiens; identical to SEQ ID NO: 4617

SEQ ID NO: 6260 - DNA, 3044 bp, Homo sapiens
gcacgaggaagaccacagtgtgagtgaagcccagggcagtgcggacgtggggctttgttgctgtgtgtgtccccaccctgctgagccccaacacccctgtccccccagctctcctatgtggacgccgagggcaacactgtgggtgtggtacagatgaccttcctgcggctgctgagcgcctctgcccaccagaacgtcacctaccactgctaccagtcagtggcctggcaggacgcagccacgggcagctacgacaaggccctccgcttcctgggctccaacgacgaggagatgtcctatgacaacaacccctacatccgcgccctggtggacggctgtgctaccaagaaaggctaccagaagacggttctggagatcgacacccccaaagtggagcaggtgcccatcgtggacatcatgttcaatgacttcggtgaagcgtcacagaaatttggatttgaagtggggccggcttgcttcatgggctaggagccgccgagcccgggctcccgagagcaacctcgtgacctcagcatgccattcgttcgtgagtgtcccgtgcacgtcctgatcctggacagtgaaggcttctccctcccctcccacctgacttcatctacgcctcggcaccacggggtgtgggaccccagcccggagagaacagagggaaggagccgcgcccccacctggagctgaatcacatgacctagctgcaccccagcgcctgggcccgccccacgctctgtccacacccacgcgccccgggagcggggccatgcctccagccccccagctcgcccgacccatcctgttcgtgaataggtctcaggggttgggggagggactgccagatttggacactatatttttttctaaattcaacttgaagatgtgtatttcccctgaccttcaaaaaatgttccaaggtaagcctcgtaaaggtcatcccaccatcaccaaagcctccgtttttaacaacctccaacacgatccatttagaggccaaatgtcattctgcaggtgccttcccgatggattaaaggtgcttatgtttttgtgagttttaagtaaatatttgtattgtattgttataaatgttaagtgtgcctggctttcaatcatgcacggaaacccagtctcagtcccacggacagaatgggcgaggcatggattctgggttgcagtaccgttctgattagaaataggaagtctccccaccccagccctggccaagaacgtgcaataaattggaagtttgccccggggcagcaagaatttatgctgccattgaaaagcaggtaccagtgccccttttcagacagtttttgattcgctctagactttttttttttttaatagggagggaaaaaatttgataattttcttttttctacatgcacttaagactaaaacacaggtttggattaattttatttgcttcctttttccgcttttcttcccgcagagcctgatgggagaatgtccagggcagggaaaccacattttttgtaggtgataactcaatgaaaattggtgcttattttttacacttctctcttgtggctctcttgtggtgctatctgttttaaggtctccttgaaggcgcactggggtccctggccatgcctcgttctccctgctttctttatcctgttattgcctccacagtctgttgccaaggactctaagatcaatgcacgtcactttcctttccactgggcaggatagccaagcacactccctcctgcgctctcccgccccggtgcgtccactcccgagggctgttatgaggactgggttgtgcctacttgatttgaaaacacacacaagcaataaaaagcctcttcctgcattgtctgtggtgtgaccatagcagattatatttggttcctgaatgtttgtggtgctaatttctgtgtttgttccaagccgttcagtcatgccatgcgctgcctcggtagatggagtaatgtacaatgaactccatgagtctctccagggctgcctgcagcacgtcttttccaagtagcctatttggattcccatctcaaatgtcctggatgcgagcgtcagcggctccagagctcggggcgggtgaggtcccctttggggaaccctttcctggccatcgaggtcggggggctgccgtctgtgggcaggaggacccgaggggcagccaggaaaggcgatctcttcactgtgaaaagttgcccgggtgcagcgccttttccttctaccatgggaaatgcaggctgggcccttggggtgagcctgcggggctctggtgctgtccccgacccccaccaccaccagaatgcagttccagcttaggaagccacaaacaagccacccaggaggaacaaaacaccgccagcgtggattttccaaatttccctggaaagtaagtctcgctcttgccaaagaaaagtctggcttggagagtctctggagcccaggatgccagcatgtgccaatgactgtcaccttcatctcttcaaaagaaaagccatagccgaggactgtcccgcgacccccgtggactgcgtctaggtcatgtgattctgttttcatttctcatcccatccaatttgtccttttctcctgtcattttcttcctctgtggtcccttcaaagttgttataatttgtactgaacttcaaaatgtgtcccgttctccccagaccactctagccacagtatattgcaataaaattacttcttatatttgcagaaaaaaaaaaaaaaaaattttattttttcctctcaatatatataattggacaaacgctggcaaaaagaaaaaaatggtaagcaaaaaacccaagataaagtttcgaggacatcaggccttttgaaatacaatgtcaaatgacacattgtacgttttcaaaaaatccgctagacatgtcataagttttaactgtaatgcccaggaaaggatatcttaaaatattctaaacttgtgtaacaaaggaataattaactgtaacagtttttcaataaatcgagttgggtgtttccaccgtaaaaaaaaaaaaaaaaaa

SEQ ID NO: 6261 - DNA, 943 bp, Homo sapiens
  misc_feature (705)..(705): n is a, c, g, or t
ttttttttttttttgtgtgtgctctttttgctttgttaatcagcaaggttttgaaaatcaggagatgtcaatttaaacaaacaaaccaatgaaaagtagtcaagactggaggtggggattgggcggagttggcggggggatgctcttcagcaatgagagactgtgccaagctggtgtagccaccaaaggggtgggctgggtagaagctgtctcctatcagctgggcaggagcgcccccaccaggtacactgacatgtttgcaacacctgccagctcctgggcacttaccggtcttcaacacctgcaaatgggtgatatgtaaaatatgtgcagagagctggcagtggcctagcctctgatccatcaaatcagacaccttctgaagggtcccggaggctcctggaggtggctcctgttaatcctttagttgctggacagtagggtggtccaggggtaccagggctggaatagattgatgggaacagcagggagtccagatgggtgcactcccccctgaaaatcagccctgcctataaaccacagcggagttccatctcgtcgggattcctggcacagctggcccagggtggagatttcctcatttaaggactgtagttaaaggtcggcttattctattcattcttagtctagatccaccccaagaaaacttgaatacaaggtaaaattaatgagtgagtcagaacntgggctgtggacaagggctttctcatatctgcaccaagacagtgtgtgaaacatgtcataaaaacactgtggaaatatgcagtccatttattagtctgacattctactgggaggctttagaaaaaaaaaaaaaacagagctttctaaattcccagcatccactacaagcctgttaatatcttattcagaaagtattaggctctgttcccatgccacacatttctatggaggaacttta

SEQ ID NO: 6262 - DNA, 952 bp, Homo sapiens
ggcacgaggatttccctcgcgtgccgcgctcacccacccggtgaatgccctctgctggggtggggaagggaggggagcgcgggaagactgcgagcccctggcagccgggtccagagctaggccgggtccagcccccgggttcttcatccgctacccaggttgggcaggctgtgtgtggctcgaaacggggctcttgagacgctgagctcgcgtgccgcgctcacccacccgcggcatgagcagcgcccccgcgccgggcccggcgcccgccagcctcacgctctgggacgaggaggacttccagggccgtcgctgtcggctgctaagcgactgtgcgaacgtctgcgagcgcggaggcctgcccagggtgcgctcggtcaaggtggaaaacggcgtttgggtggcctttgagtaccccgacttccagggacagcagttcattctggagaagggagactatcctcgctggagcgcctggagtggcagcagcagccacaacagcaaccagctgctgtccttccggccagtgctctgcgcgaaccacaatgacagccgtgtgacactgtttgagggggacaacttccaaggctgcaagtttgacctcgttgatgactacccatccctgccctccatgggctgggccagcaaggatgtgggttccctcaaagtcagctccggagcgtgggtggcctaccagtacccaggctaccgaggctaccagtatgtgttggagcgggaccggcacagcggagagttctgtacttacggtgagctcggcacacaggcccacactgggcagctgcagtccatccggagagtccagcactaggctccacggccccagacaccttccctgaggacactcaataaaggttcctgaatcttcctgccaaaaaaaaaaaaaaaaaaaaaaaaaaaaaaaaaaaaaaaaaaaaaaaagaaaaaaaaaagg

SEQ ID NO: 6263 - DNA, 1427 bp, Homo sapiens
  misc_feature (33)..(33): n is a, c, g, or t
  misc_feature (63)..(67): n is a, c, g, or t
  misc_feature (86)..(88): n is a, c, g, or t
  misc_feature (92)..(92): n is a, c, g, or t
  misc_feature (94)..(95): n is a, c, g, or t
  misc_feature (100)..(100): n is a, c, g, or t
  misc_feature (108)..(108): n is a, c, g, or t
  misc_feature (123)..(123): n is a, c, g, or t
  misc_feature (131)..(131): n is a, c, g, or t
  misc_feature (143)..(143): n is a, c, g, or t
  misc_feature (147)..(147): n is a, c, g, or t
  misc_feature (152)..(152): n is a, c, g, or t
  misc_feature (155)..(156): n is a, c, g, or t
  misc_feature (161)..(161): n is a, c, g, or t
  misc_feature (319)..(325): n is a, c, g, or t
ctccttttcctcccccttctccccctccttttncttttttttttttttttcccctcccccccnnnnnttttcccctttcctttctnnncttntnnccccncccccccntctcattataatttnttaatatnttttttattaanctcnctttnccnnacatnactcccttaatccccattttgctttgatttcctcttctttcctttatacttttaacctctgtctcatcctcctggaaccttgctttcctgatctgtgatagttcaccccctgagatcccctgagccccaggtgcccagaacttccctgatttaccctnnnnnnntccgctgctccttggcttacctgacctcttgctttctctgctcgccctcctttctgtgccctactcattggggttccgcactttccacttcttcctttctctttctctcttccctcagaaactagaaatgtgaatgaggattattataaaagggggtccgtggaagaatgatcagcatctgtgatgggagcgtcagggttggtgtgctgaggtgttagagagggaccatgtgtcacttgtgctttgctcttgtcccacgtgtcttccactttgcatatgagccgtgaactgtgcatagtgctgggatggaggggagtgttgggcatgtgatcacgcctggctaataaggctttagtgtatttatttatttatttattttatttgtttttcattcatcccattaatcatttccccataactcaatggcctaaaactggcctgacttgggggaacgatgtgtctgtatttcatgtggctgtagatcccaagatgactggggtgggaggtcttgctagaatgggaagggtcatagaaagggccttgacatcagttcctttgtgtgtactcactgaagcctgcgttggtccagagcggaggctgtgtgcctgggggagttttcctctatacatctctccccaaccctaggttccctgttcttcctccagctgcaccagagcaacctctcactccccatgccacgttccacagttgccaccacctctgtggcattgaaatgagcacctccattaaagtctgaatcagtgcaaaaaaaaaaaaaaaaaaaaaaaaaaaaaaaagaaaaagcaaccaaaagacacgggggggcgcggaaggaataaccccccgggggcccacgtagtgctgaaccacgtctttgttatgaagagagggcccacacgaggcggagcatataacaagagtgagaggccggccgaaaaccagcttgcagcggacaagtgcttcagtgggctatgggagaagacccatcgcgcggggacagggggcaccacaccccaggaattaggcgcaggcacacatacatgcgtgctttgtggcacacagcgtatacgcgacaagaatctgccggaattgatgacagtca

SEQ ID NO: 6264 - DNA, 2059 bp, Homo sapiens
gagatgcctgcccacagcctggtgatgagcagcccggccctcccggccttcctgctctgcagcacgctgctggtcatcaagatgtacgtggtggccatcatcacgggccaagtgaggctgcggaagaagagtctggctctgttgcccaggctggagtgcagtggcaagatcacggctcattgtagcctcgacctcccaggctcaagcaatcctcctgcctcagccctcctgccaagtagctgggaccacaggcctttgccaaccccgaggatgccctgagacacggaggcccccagtattgcaggagcgaccccgacgtggaacgctgcctcagggcccaccggaacgacatggagaccatctaccccttccttttcctgggcttcgtctactcctttctgggtcctaacccttttgtcgcctggatgcacttttcctggtcttcctcgtgggccgtgtggcacacaccgtggcctacctggggaagctgcgggcacccatccgctccgtgacctacaccctggcccagctcccctgcgcctccatggctctgcagatcctctgggaagcggcccgccacctgtgaccagcagctgatgcctccttggccaccagaccatgggccaagagccgccgtggctatacctggggacttgatgttccttccagattgtggtgggccctgagtcctggtttcctggcagcctgctgcgcgtgtgggtctctgggcacagtgggcctgtgtgtgtgcccgtgtgtgtgtatgtgtatgtgtgtgtgtatgtttcttagccccttggattcctgcacgaagtggctgatgggaaccatttcaagacagattgtgaagattgatagaaaatccttcagctaaagtaacagagcatcaaaaacatcactccctctccctccctaacagtgaaaagagagaagggagactctatttaagattcccaaacctaatgatcatctgaatcccgggctaagaatgcagacttttcagactgaccccagaaattctggccagccaatctagaggcaagcctggccatctgtatttttttttttccaagacagagtcttgctctgttgcccaagctggagtgaagtggtacaatctggctcactgcagcctccgcctcccgggttcaagcgattctcccgcctcagcctcctgagtagctgggattacaggcgcgtatcaccatacccagctaatttttgtatttttagtagagacgggttcaccatgttgcccaggagggtctcgaactcctggcctcaagtgatccaccggcctcggcctcccaaagtgctgggatgacaggcatgaatcactgtgctcagccaccatctggagttttaaaaggctcccatgtgagtccctgtgatggccaggccaggggacccctgccagttctctgtggaagcaaggctggggtcttgggttcctgtatggtggaagctgggtgagccaaggacagggctggctcctctgcccccgctgacgcttcccttgccgttggctttggatgtctttgctgcagtcttctctctggctcaggtgtgggtgggaggggcccacaggaagctcagccttctcctcccaaggtttgagtccctccaaagggcagtgggtggaggaccgggagctttgggtgaccagccactcaaaggaactttctggtcccttcagtatcttcaaggtttggaaactgcaaatgtccccttgatggggaatccgtgtgtgtgtgtgtgtgtgtgtgtgtgtgtgtgtgtgtgtgtgttttctcctagacccgtgacctgagatgtgtgatttttagtcattaaatggaagtgtctgccaaatgagaacagaaaaaaaaaaaaaaaaaaaaaaaagggtactatattgtgggggggaagagggaacaaagaggtaattaaaatggcacgagtggcccataggttgttcccggccccaagttttgttgcacaagggggtggtaaaaatggggcgggggcccccaaataagggggggggagcgaataaattgcgaaacgccggtcactttaa

SEQ ID NO: 6265 - DNA, 958 bp, Homo sapiens
  misc_feature (14)..(53): n is a, c, g, or t
gtcagcccgcacannnnnnnnnnnnnnnnnnnnnnnnnnnnnnnnnnnnnnnnctcctcacacaacaaaacttatagtggggtgttttctccccactggaggagaaaagaaccaacacagctcccccaaggaccctgtgcattaggatttacattcaatgtagctccacgagattcttccccttacctgatgatgttcatggtgataccttacaatatggcaacaggacctgaatgcccgcacaagagttttcaagtgctgtgccccatagcacatagtctgtgtcctgaaccagctccccgtggctgtgtggggaagttgttgccggctttgttctgatggcttggaactggcttcagtgacgaggagctggaggagcatcaccagagcctcaaggcgctggtgctgcccagcccacgcccttacgtgcggatagatggcgctgtgattcccgaccactggctggaccccagcgctgtgtgggaggtgaagtgcgctgacctctccctctctcccatctaccctgctgcgcggggcctggtggatagtgacaagggcatctcccttcgcttccctcggtttattcgagtccgtgaagacaagcagccggagcaggccaccaccagtgctcaggtggcctgtttgtaccggaagcaaagtcagattcagaaccaacaaggcgaggactcaggctctgaccctgaagatacctactaagccctcgccctcctagggcctgggtacagggcatgagttggacggaccccagggttattattgcctttgctttttagcaaatctgctgtggcaggctgtggattttgagagtcaggggaggggtgtgtgtgtgagggggtggcttactccggagtctgggattcatcccgtcatttctttcaataaataattatcggataaaaaaaaaaaaaaaaaaaaaaggggaggaaaaaagaatccc

SEQ ID NO: 6266 - DNA, 535 bp, Homo sapiens
  misc_feature (356)..(372): n is a, c, g, or t
  misc_feature (475)..(493): n is a, c, g, or t
ttttttttttttttttttaatatataaattttttttttaaatgcatggttgttaagaactcaggatagagagtcacacagactcaaatcctggttccactactaaaagtcagcaagtgagctcgtcaccacatctgtaacacgggacaaataacagtacctggctaggacctgggaattaaaggagatgatgtataacgcactcagcaaatgcaagcataattcttcctctggatgcagatgtgggaggtgaggaccacagaggcaaagctggcagaggggtccatgctcatgccctgccccaccctgcccgcaggctgaacatgatagcgctcctgggtcatctcactgtgatgnnnnnnnnnnnnnnnnnttttgaattcaagctcggctgtacccttctgtgccacctccctaggcctgttttctcatctacaccaggaggaccataatctgcacctcattaggaggttgtnnnnnnnnnnnnnnnnnnncattgaagtcagtaagcccaggaagtggtcttcagcaaatgg

SEQ ID NO: 6267 - DNA, 2087 bp, Homo sapiens
  misc_feature (75)..(98): n is a, c, g, or t
  misc_feature (128)..(129): n is a, c, g, or t
  misc_feature (428)..(429): n is a, c, g, or t
aacaaagtgcgcggcggacacgtggaactactctgtcctatggagggttctgtggagacgggttgcggcactacnnnnnnnnnnnnnnnnnnnnnnnngagaggggtagaagagagcgagcgagacannatgagcaagagtcatggactcgtgtgtgagagagaaggtgcgagagtgcggaaaagcgggaggctcagagggcaatagtagaataacgatgaacttagcgagtgtagcttacgtcgtggtattaaaaaaggggggagaggagggtggaggaataaggggggggaataaggggggagagaaagtgaaaaagtgggggggggggaaaaaaacaggtggggggtgtgcgggggggggaaaacataaataatcacatggatgtgtgacaaagaatggaggtgtcagggggaggaggcgatgtnnatgcctgtggaatgagaaggtgtgaggggggaccacacacaaacgagaaagaggtaggcagtgtagggggatgagcgatggccgtctatgatatcttggagagcgagtcgattcaatagtacgcggtgttgagacacatatataaaagaggtgtgttagagaagtcgtagtgatggctgagtggaaaagtatgtacgcaggggtgtggtggtggaatacgagcgaaaagaggatggtgaggggggagggagcgggaatatgaggtaaagaggggtgtgtggtaggttggggggtataaggaaatggggtgttggtgggaagggagcaggatgtgtaaacagagaaggaaggagagaggcggggaaaaaaggggaaaagggcccgacgtgggggatgggagaggggtcaggcatgttgcagagcgcggccgctggccgggaggctttggtgggagagacgcgatcgccgatttcggtctggcgccccttctgcggccgggacccaggcctttcacatcagctctccctccatcttcattcataggtctgcgctggggccgggacgaagcacttggtaacaggcacatcttcctcccgagtgactgcctcctaggaggacatttaggggagggcagaggcctgcagtttggcttcacggctggctatgtggacagcaagagtcgttttcgcggaagccgactggcagccaggcctgtcgggccccccgacgccgccccatttcccttccagcaaactcaactcggcaatccaagcacctagataccagcacaagtcggttaatccctgtctggactgagcctccgttggcttctgaactggaattctgcagctaacccttccacgactagaaccttaggcattggggagttttagatggactaattttattaaaggattgttttttttttaaaaaaaaaaaaaaaaaaaaaaaaaaaaaaaaaaaaaaaaaaaaaaaaaaaaaaaaaaaaaaaaaaaaaaaaaaaaaacagacacaaagacaaaaaggacacccagagaacagagaggacgggcgagagaaagcaggacggcacagcacacacaggagcgccaacagggaaacacacaaagaagggcgcaaacagaacacagcgggcaaaaaacaggcgacaggagaccaaggtgaaagagcagcgacaggagaaaaaacagacacgacggacacacagcccagaagaggggagcacaaaacgggggagagcagacagaggagacagacgaccggccgaaacgaaggacgcaggagcagaagaagcggcagatgactgagcggaagacagcgaagaggcagggcaccgatagagcaaggaagccaacaagaggaccgagcgagcgaagaacagacagaacaaaaagcgcgcggaccgccgagcccgagccccgccgggccgacgggaatcaacaccagcacacggaacgacgcagcgcgaaagaggccggacggggagcgcggacgccgaggccgggagagcggcgacaggtaacagggccacagagcagaccggaggccacgaggaagacgaagacacgcggcaccaccgacgaagacaagcaccaggcgaaagagagcggccaaacgcagaagagaagggcaggacggaggagagaacgcgcagaggt

SEQ ID NO: 6268 - DNA, 1938 bp, Homo sapiens
  misc_feature (1736)..(1736): n is a, c, g, or t
  misc_feature (1759)..(1760): n is a, c, g, or t
  misc_feature (1779)..(1779): n is a, c, g, or t
  misc_feature (1798)..(1798): n is a, c, g, or t
  misc_feature (1807)..(1807): n is a, c, g, or t
ttggcccactgcaggctccgcctcccgggttcacgccattctcccgcctcgggagctgggacaacaggtgcccgccaccacgctcggctaattttttgtatttttggtacagacggagtttcaccgtgttggccgggatggtctcgatctcctgacctcgtgatgcacctgccttgacctcccaaagtgctgggattacaggcgtgagcactgcgcccggccaataatttttttagtttaagttcatttttgtccccgctgatgaaagttagagctgcttcctccaggcagccctgggagtaggggcacagacttgtgcctcgcttcccagcagctgcccagtgcctctgtccacacccacctccctggtgtacttgccccctacagcagcagcccagatcctcccctggattaaaattgcaactggtgccctaacccaaaacttgagaaaaaattctctatcacatccactcttctggcatttgtagaatctctggccctgggtgtgtcttttcctgtagctgttacagatttcttaagcagatttcttaagcagatggacatgtccagattcatgcctaaatatccagttgataactggaaaatgctggttcacggttctttagtaaagattaataagggatccccatgtgctggggagtgtgcttccatttgagtggggatatcagaagaaaaagaggggcttgtgtagtaaaccttactttgccaattcagctgtagagcccaaattgttacaagatgcaaagatgtactccactttttgaccaagcatcagcacctttggcttaccatccagtccttacttctgtgactgtaagggccccaccagtgtcagcagacttgtttgtgctttgggggaactctcttctcagctccctttgccagtcccaagcctggtggatctgcatctcacgcccactgcacaccgttcctctccatctgcccttccctcccaggcccccggtcgggggagcaggtgtggcaagtgttaggaactcccttctggtgacagctggtcttcctagagtgttgctggtaactatcgcctcttggtcttctgacatcattgccaggaacggggcactttttcgtcttgtagtttggccctcgggtttcctcactaggtattgtgtaactccctcaaaaaaaggtttatgaaatgctgaacctcaggtttcatagacgtctttgtacactaaaaattctgcagcagaatatttttaaacattcgcagttttttgtaagctatatttttgtatatttaattgctattttaaaattttaatgcattttgctaatcactcctcaaaaataaaacatgcatgtaattgactcaaacgtgtaaataaaagcaaattttgaaaaaagcaccttcagcaagacttggaaactcaaggtgagtaattctatcagagctggtaactagtactgagtgattgtgatggaagcccctgcccttcctgtggcatagtgtgcaagcgggggtggggtcagtggtgaagagtgtgtcaggccaccacagccagagaacagagaatcctggaatgcagagtacagtggagtctgaagccccctggccttcctgagctctgaaacagctggatacagataagcagtctttcacgtgaacgccagcaccagggtgacctgaaatagcctcgtgccgaattcggcacgagcacacatcacaggcttaaactgtcttagagactttncaagtgattggatcacaggctannggatctgtgcatggtgccngttgaaacccaagtcttcncagtgctangtgagggagggctcaaccggggtaatgtgaatggggctgttgtcttttgcaatcccttaacatattaactttggacaaaccttgataggcttgcaccaaacctttctaaacatttttatggatcatctcct

SEQ ID NO: 6269 - DNA, 1619 bp, Homo sapiens
  misc_feature (1406)..(1406): n is a, c, g, or t
cctttctgtcattctagatgtgtgtgtgtgtgcacttatgttttatgggtccatatgtacgtgtgtatagtatatatattgtatgtgataatatgagcgtattctataaatacatatacacacggtactcctttccagaagttcctggggctccgtgttgcagttcaggactccttgcttcttggaccctactatttatcctggactagcttgggttggtgatcatgtctcctcttgtcaggctacagagtggtggaagaggacacacacacatctcctccatgttcctgccacagggccccttccttaagtaatgacttatctccttccagttgccacctgttggagccaagaatgtattagtttgtggtgacactgggttagctcagcatggatttcccttatccgatgatttttctacatttacttggccaatttggggaacagacctccactgtgattccatactctctctttgctttcactatcccagggatgggaggcggagggtagagatgaactcactgagcagccagagccaaatgcaatcggtacgaatcttagaaggaaggagggggagcccaggtatgagaaagaaaaaaccactaagaaaatacctccctgggaggatgagctggggccctttttcttttgctggatggttcctttatgcagcttggccctgtctaccgagatgcccatctcttcctgcctgctagcctgctagaccctcaaactgggtgggttctgtgtcaataaaaagcttcacccctggctgagtgaggtggtcccctgcaatcactgtttgtcccctacccacccaacctgtccctgcctgctcccagcccactcatccttatgtgctagggataaatcaagagtcctcagcactccacattcccaaaaaatcccaggaactcctaaaccttcccctgtgacagaagatgaggttggcagctgatcagacctcaataattttatactgtaataagctctttgaatgtgtatattattattttttacaatcatttcattttgtatttaatatcaatggactgagtctgattcagaaaataattgtaatgttcatattcaatatcttacagtgatacagttttgtatttacatataaatataccgacatgatcaaaaaaaaaaaaaaaaaaatcgcccccgggggggggtttttttttttttggttggttatttttttttttttttatttattgttgggaaaatttttttttttttttttttttttttttttttttttttttattttaagatgtgtttatattttttttttttttttaaagtttttattttgttgtggttttagtttttttgttgttgggtttttttaggttttattttatttttatttaagttttttttttttttttggntatatttatttttttttttttttttttttttattttgatttttttttttttttgatttagagattgtgtaaaaaattggggttgttatgttttgagttatttaagattttgtggtttttttttttttttgttttttgttaggtttttttttttttttttgttttattttttatttttttttgttttatttttttaaaagttttttatttattg

SEQ ID NO: 6270 - DNA, 1347 bp, Homo sapiens
  misc_feature (5)..(6): n is a, c, g, or t
  misc_feature (9)..(9): n is a, c, g, or t
  misc_feature (12)..(12): n is a, c, g, or t
  misc_feature (14)..(14): n is a, c, g, or t
  misc_feature (17)..(17): n is a, c, g, or t
  misc_feature (21)..(21): n is a, c, g, or t
  misc_feature (23)..(23): n is a, c, g, or t
  misc_feature (28)..(28): n is a, c, g, or t
ccccnnacnacncnacnggancnaccgnaactactgtcaccccccaagctcggcttgtcacctgccctaggagacgcagccgccggaccctgcccagggcacccacgcctcggcgaccaccatgtcccagaccaaaatgctgaaggtccgcgtgaccctcttctgcatcctggcaggcatcgtgctggccatgacagccgtggtaaccgaccactgggctgtgctgagcccccacatggagcaccacaacactacctgcgaggcggcccacttcggcctctggcggatttgtaccaagcgcatccccatggacgacagcaagacctgcgggcccatcaccctgcccggggagaagaactgttcctacttcaggcattttaaccccggcgagagctcggagatcttcgaattcaccactcagaaggagtacagcatctcggcagccgccatcgccatcttcagccttggcttcatcatcctgggcagcctctgtgtcctcctgtccctcgggaagaagagggactatctgctgcgacccgcgtccatgttctatgcctttgcaggtctctgcatcctcgtctcggtggaggtcatgcggcagtcggtgaagcgcatgattgacagtgaggacaccgtctggatcgagtactattactcctggtcctttgcctgcgcctgtgccgccttcatcctcctctttctcggcggtctcgccctcctgctgttctccctgcctcgaatgccccggaacccatgggagtcctgcatggatgctgagcccgagcactaaccctcctgcggccctagcgaccctcaggcttcttccccaggaagcggggtcttggcctggaaccttccagagaggaggcgggagcaattttagccccaccctgctcccatctgcccccctgcaacagtcgcaggctgcttcctctctctgagttcctctgggctgccgcaggctcccctgggaatagagcaagacgtgagtcctaacctggccacagttgggggaggcagagccagcaggtggacaggtgtttgcaggggcccaacttcccctggagctcagaggtgtccccactgtaccagcctctgataagctgcctccagttgtcctttatgaacattgcagggacaacctgtgtttgccagctgggtgttccgtgtaaatagccagcctgtctctttctcggtgataaaacacaccctctctggtgagcccagcgtcccctccttggcttccaggagccctgggaagcatttttaactgggtagaatctgactgtggcttgaaataaaaagctctcagaaaaaaaaaaagaataaaaaaaaaaaaaaaaaaaa

SEQ ID NO: 6271 - DNA, 2406 bp, Homo sapiens
  misc_feature (1875)..(1875): n is a, c, g, or t
  misc_feature (1886)..(1886): n is a, c, g, or t
  misc_feature (1908)..(1908): n is a, c, g, or t
  misc_feature (1916)..(1916): n is a, c, g, or t
  misc_feature (1931)..(1931): n is a, c, g, or t
  misc_feature (1954)..(1955): n is a, c, g, or t
  misc_feature (1970)..(1971): n is a, c, g, or t
  misc_feature (2015)..(2015): n is a, c, g, or t
  misc_feature (2388)..(2388): n is a, c, g, or t
cgcagcgcccagcagcacccggagtcgcttggacgccggttcggggctattgcggggtggcgtcgctgggcccgggaaagttcgggactggagagtggcgacgccgggcggcgggacccatggaggcgcgcggggagctgggcccggcccgggagtcggcgggaggcgacctgctgctagcactgctggcgcggagggcagacctgcgccgagagatcccgctgtgcgctggctgtgaccagcacatcctggaccgcttcatcctcaaggctctggaccgccactggcacagcaagtgtctcaagtgcagcgactgccacacgccactggccgagcgctgcttcagccgaggggagagcgtttactgcaaggacgactttttcaagcgcttcgggaccaagtgcgccgcgtgccagctgggcatcccgcccacgcaggtggtgcgccgcgcccaggacttcgtgtaccacctgcactgctttgcctgcgtcgtgtgcaagcggcagctggccacgggcgacgagttctacctcatggaggacagccggctcgtgtgcaaggcggactacgaaaccgccaagcagcgagaggccgaggccacggccaagcggccgcgcacgaccatcaccgccaagcagctggagacgctgaagagcgcttacaacacctcgcccaagccggcgcgccacgtgcgcgagcagctctcgtccgagacgggcctggacatgcgcgtggtgcaggtttggttccagaaccgccgggccaaggagaagaggctgaagaaggacgccggccggcagcgctgggggcagtatttccgcaacatgaagcgctcccgcggcggctccaagtcggacaaggacagcgttcaggaggggcaggacagcgacgctgaggtctccttccccgatgagccttccttggcggaaatgggcccggccaatggcctctacgggagcttgggggaacccacccaggccttgggccggccctcgggagccctgggcaacttctccctggagcatggaggcctggcaggcccagagcagtaccgagagctgcgtcccggcagcccctacggtgtccccccatcccccgccgccccgcagagcctccctggcccccagcccctcctctccagcctggtgtacccagacaccagcttgggccttgtgccctcgggagcccccggcgggcccccacccatgagggtgctggcagggaacggacccagttctgacctatccacggggagcagcgggggttaccccgacttccctgccagccccgcctcctggctggatgaggtagaccacgctcagttctgacccaggcccggctccaccctgcacctcacacgagggagctgcccctgggtgggcggctcggggctgctggggtttccgaggaagtggggccagggcgtcaagggagggctggtgccttcggagcctcccactgccgaccgcacagctccctctctgggggctgagggacccacctggcccctcctctgacacagggctggcccgccaggtggcctcccagcaagccagccttttttgtaagcaaatttctcccctttattgaccaattaactgagcacttgctgctatttctagacatgaaatgtcaccttgctgaggcccagcccagcccagcatagcccgagggctggaaaaacgctttcatctctaaaactgagaaatcatcataattgtgctttcacttcccaggctccatgtgtcttggagccgtcaccccgaggctccctctttaggtcggagattggccttgcctgtcgaggcaagaggctgcagaggcggggacacacctgtgtcttccgggagaggccccctcttctccccagacccncagggggcctntgtgcctccagccccacttccncgggagangctttccccaatccncaggtctctagatcattctgttnntcgagtatcctgtgnnaggaggcaaaaatgcctggcgccccttctctccaagctcaattntctaagcccctcagggtctcctcctcaccccaccccaggcccttggtgtccaggctgcacccacagatgtctgttgccaaacagcctgccctccctgccggagccggctctgccagccccagattgggaagtctccccgctggagaagggtggggctcctctgagcctgccctgcctcctccatcagatcctttgggaagaagtttctgggagatgcccgcagctgtgcgtgccccagacacaaaggctggcctgtgtgtaagtcaaagtcactcccgcaaacctgaatctcgagctacctattggttctgtgaatgttctgtgtcttttatttattctcgggtgatcagctctttccaagacttcaaaaaantgtcagttacctcgtgcc

SEQ ID NO: 6272 - DNA, 3209 bp, Homo sapiens
gagcggccttttcattgcaggagaagaggacaaagatactcagagagaaaaagtaaaagaccgaagaaggaggctggagagaccaggatccttccagctgaacaaagtcagccacaaagcagactagccagccggctacaattggagtcagagtcccaaagacatgggcttgttagagtgctgtgcaagatgtctggtaggggccccctttgcttccctggtggccactggattgtgtttctttggggtggcactgttctgtggctgtggacatgaagccctcactggcacagaaaagctaattgagacctatttctccaaaaactaccaagactatgagtatctcatcaatgtgatccatgccttccagtatgtcatctaatggaactgacctctttacttctttaccttttatggggccctcctgctggctgagggcttctacaccaccggcgcagtcaggcagatctttggcgactacaagaccaccatctgcggcaagggcctgagcgcaacggtaacagggggccagaaggggaggggttccagaggccaacatcaagctcattctttggagcgggtgtgtcattgtttgggaaaatggctaggacatcccgacaagtttgtgggcatcacctatgccctgaccgttgtgtggctcctggtgtttgcctgctctgctgtgcctgtgtacatttacttcaacacctggaccacctgccagtctattgccttccccagcaagacctctgccagtataggcagtctctgtgctgacgccagaatgtatggtgttctcccatggaatgctttccctggcaaggtttgtggctccaaccttctgtccatctgcaaaacagctgagttccaaatgaccttccacctgtttattgctggcatttgtgggggctgcagctacactggtttccctgctcaccttcatgattgctgccacttacaactttgccgtccttaaactcatgggccgaggcaccaagttctgatcccccgtagaaatccccctttctctaatagcgaggctctaaccacacagcctacaatgctgcgtctcccatcttaactctttgcctttgccaccaactggccctcttcttacttgatgagtgtaacaagaaaggagagtcttgcagtgattaagtctctctttggactctcccctcttatgtacctcttttagtcattttgcttcatagctggttcctgctagaaatgggaaatgcctaagaagatgacttcccaactgcaagtcacaaaggaatggaggctctaattgaattttcaagcatctcctgaggatcagaaagtaatttcttctcaaagggtacttccactgatggaaacaaagtggaaggaaagatgctcaggtacagagaaggaatgtctttggtcctcttgccatctataggggccaaatatattctctttggtgtacaaaatggaattcattctggtctctctattaccactgaagatagaagaaaaaagaatgtcagaaaaacaataagagcgtttgcccaaatctgcctattgcagctgggagaagggggtcaaagcaaggatctttcacccacagaaagagagcactgaccccgatggcgatggactactgaagccctaactcagccaaccttacttacagcataagggagcgtagaatctgtgtagacgaagggggcatctggccttacacctcgttagggaagagaaacagggtgttgtcagcatcttctcactcccttctccttgataacagctaccatgacaaccctgtggtttccaaggagctgagaatagaaggaaactagcttacatgagaacagactggcctgaggagcagcagttgctggtggctaatggtgtaacctgagatggccctctggtagacacaggatagataactctttggatagcatgtctttttttctgttaattagttgtgtactctggcctctgtcatatcttcacaatggtgctcatttcatggggtattatccattcagtcatcgtaggtgatttgaaggtcttgatttgttttagaatgatgcacatttcatgtattccagtttgtttattacttatttggggttgcatcagaaatgtctggagaataattctttgattatgactgttttttaaactaggaaaattggacattaagcatcacaaatgatattaaaaattggctagttgaatctattgggattttctacaagtattctgcctttgcagaaacagatttggtgaatttgaatctcaatttgagtaatctgatcgttctttctagctaatggaaaaatgattttacttagcaatgttatcttggtgtgttaagagttaggtttaacataaaggttattttctcctgatatagatcacataacagaatgcacccagtcatcagctattcagttggtaagcttccaggaaaaaggacaggcagaaagagtttgagacctgaatagctcccagatttcagtcttttcctgtttttgttaactttgggttaaaaaaaaaaaaagtctgattggttttaattgaaggaaagatttgtactacagttcttttgttgtaaagagttgtgttgttcttttcccccaaagtggtttcagcaatatttaaggagatgtaagagctttacaaaaagacacttgatacttgttttcaaaccagtatacaagataagcttccaggctgcatagaaggaggagagggaaaatgttttgtaagaaaccaatcaagataaaggacagtgaagtaatccgtaccttgtgttttgttttgatttaataacataacaaataaccaacccttccctgaaaacctcacatgcatacatacacatatatacacacacaaagagagttaatcaactgaaagtgtttccttcatttctgatatagaattgcaattttaacacacataaaggataaacttttagaaacttatcttacaaagtgtattttataaaattaaagaaaataaaattaagaatgttctcaatcaaaaaaaaaaaaaaaaaaaacaaaaacacaaaaacaacaaaaaaaaaagaaaaagaagaaacaaaaaacaaaaaacacaacaaacaagacaaacaaacaagaaacaaaagaaggagagaagaaaaacaacgaacaaagaagagagaaagaagagaagcacacaccccctcccgcgcgcccgggagc

SEQ ID NO: 6273 - DNA, 1781 bp, Homo sapiens
  misc_feature (1123)..(1143): n is a, c, g, or t
ggaagcggccgggttgggcgattaacaggccgtggttaggaaggacggagaaggggcgttcgctcctttgggacttttcatgcctcgttttttctcagatgtggcttggtctgggcgcaaggtcccagcagccagcttaagcttactcttctgtgaaaggggaaagtatcccctgtggaaaatccgtaccacccaactctgctgtctccccatgagtttaagaaaatattttcttaaactcatggggagacagcagattcttgccttggtgaggtcattgctgtgccatatgtcctacccccctgtcttcagcaaatattttcttaaactcatggggagacagcagagttgggtggtacggattttcaactggccaaccctttgcctccactattgaatttttttcagacccccattcttcatgctggaaatgggattgctggacttggcagctttctttcccctcgtctttgactaggaaccggactcttaatttcctcaggacagactagctggcacattatccctaccttagttctttctctctgactcctggaagaatactcctgtaatctctgtaaaggtttttgggggataagggtgtttaaccacctcccagctttcttcttctttttttttttctgaaaaaaggaaaaagcacacagcacacaatttcaagccattttcagatcagaactccagaagtgttgacaagatgcctattcgtagagttccctcagaagagccatggtgtttatgaagagaagagtagtgattgctctgccagaagcagctcctctttaaactcctcctctcttgatgaatttcttaaggctgaaggaatgaagagagtgggacatggggtaatctttatcccttttgttaaaacaggaggcagccatgggctgggagatcatagcccttcctaggcagaatcctgttcactgccaggctatagtaattattactattttgcaatttgaaatatattctggttgtttttctaaatgtgaagacttaccaaatgaattttagatcattctccagaggagattttttttgctcttctcatcttttccaacagtgttctcctgtttgtggagctaaggtaaagaggggacannnnnnnnnnnnnnnnnnnnngtccatatctgtgaggccagcaaatattttcttaaactcatgggaagttggaaatgggggctacatatgccctctcctccccgtctacaagagttgtggttttccatctgatccttccactcttgtcaggggaagaagggggcctggtatctcaggcagattgttgaattcctgttctatcccttctctatcccaccctgccttgataatatgttagcccataccccaaataactgtctatattagacacccccagccagtttctggctgcctgtctttgctgccatgttttttacaagaaggaaagaattcttgctatttttttttcataatttactatttatgatgtatttaagtgttttattaaggacagagttctgttaggggtgggagggaatatttgagggagggctgggtcttagggaaaggaatggggaagcaacatttttattaagtgttactatttgcctctactttgtattgttcagaaatggcaaatacaatataaaagtgatatatggttttaatgtaataaactttaatgagttatttaaaaaaaaaaaaaaaaaaaaaaaaaaaaacggccgctctagagtatccctcaaagggcccaagcttacgcgtacccagctttcttg

SEQ ID NO: 6274 - DNA, 6142 bp, Homo sapiens
  misc_feature (3497)..(3513): n is a, c, g, or t
ggagagggctgcgcgcttctcgccaagcaagcgggaggcgcactggggccgccgccgttcccgcgctcctccctctcctctgcacccactgtcacgctacccgcccgcgggggagcctcgagagcctccaggtgaattgaaagtcgtttccgggggaggacggagagggtgctgcagtcctggcatgccctgaaactgcaagtcgggcagaaacgacccggcggaggagcagggcgcgcagcgccctgcgcagcatccccgggctgccagaagaggccaccactcggctggcagccgcgagcggcggccgaacctcggccccagactcgggcccccggcacgctcgcccgggagataccccttccccctcttgcgcatttcgcagctgcgctggtgtggggcatgagagcgaggtggctccaggtctccgcggagcagctgccagtgggagagcgaggagaggcgagggggcggcagcctcggcccgaaacggagatcctggggtcctaaatttgtggccgattgcactgtgtcctggagacggagtggaaccacagcccagagcccctgggaatcatccctgaaagactgcattacttctccatggagtcttcctcctcctgcttattttctttttggaacaaggcaaaggcaatctgcatgtaacatcaccagaagatgcagaatgccgcagaaccaaggaacgcctttctaatggaaacagtcgtggttcagtttccaagtcttcccgcaatatcccaaggagacacaccctaggggggccccgaagttccaaggaaatactgggaatgcaaacatctgagatggatcggaagagagaagcgttcctagaacatctgaagcagaagtacccccaccacgcctctgcaatcatgggtcaccaagagaggctgagagaccagacaaggagccccaaactgtctcacagtcctcaaccacccagtctgggtgacccggtcgagcatttatcagagacgtccgctgattctttggaagccatgtctgagggggatgctccaacccctttttccagaggcagccggactcgtgcgagccttcctgtggtgaggtcaaccaaccagacgaaagaaagatctctgggggttctctatctccagtatggcgatgaaaccaagcagctcaggatgccgaatgaaatcacaagtgcagacacaatccgtgctctcttcgtaagtgcctttccacagcagctcaccatgaaaatgctggaatcgcccagtgtcgccatttacatcaaagatgaaagcagaaatgtctattatgaattaaatgatgtaaggaacattcaagacagatcactcctcaaagtgtacaacaaggatcctgcacatgcgtttaatcacacaccaaaaactatgaatggagacatgaggatgcagagagaacttgtttatgcaagaggagatggccctggggcccctcgccccggatctactgctcatccaccccatgcgattccaaattccccaccgtctactccagtgccccattccatgcccccctccccgtccagaattccttatgggggcacccgctccatggttgttcctggcaatgccaccatccccagggacagaatctccagcctgccagtctccagacccatctctccaagcccaagcgccattttagaaagaagagatgtcaagcctgatgaagacatgagtggcaaaaacattgcaatgtacagaaatgagggtttctatgctgatccttacctttatcacgagggacggatgagcatagcctcatcccatggtggacacccactggatgtccccgaccacatcattgcatatcaccgcaccgccatccggtcagcgagtgcttattgtaacccctcaatgcaagcggaaatgcatatggaacaatcactgtacagacagaaatcaaggaaatatccggatagccatttgcctacactgggctccaaaacaccccctgcctctcctcacagagtcagtgacctgaggatgatagacatgcacgctcactataatgcccacggcccccctcacaccatgcagccagaccgggcctctccgagccgccaggcctttaaaaaggagccaggcaccttggtgtatatagaaaagccacggagcgctgcaggattatccagccttgtagacctcggccctcctctaatggagaagcaagtttttgcctacagcacggcgacaatacccaaagacagagagaccagagagaggatgcaagccatggagaaacagattgccagtttaactggccttgttcagtctgcgctttttaaagggcccattacaagttatagcaaagatgcgtctagcgagaaaatgatgaaaaccacagccaacaggaaccacacagatagtgcaggaacgccccatgtgtctggtgggaagatgctcagtgctctggagtccacggtgcctcccagccagcctccacctgtgggcacctcagccatccacatgagcctgcttgagatgaggcggagcgtggcggaactcaggctccagctccagcagatgcggcagctccagctgcagaaccaggagttgctgagggcaatgatgaagaaggccgagctggaaatcagtggcaaagtgatggaaacaatgaagagactggaggatcccgtgcagcgacagcgcgtcctagtggagcaagagagacaaaaatatcttcatgaggaagagaagatcgtcaagaagttgtgcgagttggaagactttgttgaagacttgaagaaggactccacggcagccagccgattggttactctgaaagacgtggaagacggggctttcctcctgcgtcaagtgggagaggctgtagctaccctgaaaggagaatttccaaccttacaaaacaagatgcgagccatcctgcgcatagaagtggaggccgtgcggtttctgaaggaggagccacacaagctggacagtctcctgaagcgtgtgcgcagcatgacagacgtcctgaccatgctgcggagacatgtcactgatgggctcctgaaaggcacggacgcagcccaagccgcacagtacatggctatggaaaaggccacagccgcagaagtcctgaagagtcaggaggaggcagcccacacctccggccagcccttccacagcacaggtgcccctggcgatgcgaagtcggaagtggtgcctttgtccggcatgatggttcgccacgcgcagagctcccctgtggtcatccagccctcccagcactccgtggccctgctgaaccctgctcagaacttgcctcacgtggccagctccccagccgtcccccaggaagcaacctccactctgcagatgtcgcaggctccgcagtccccacagatacccatgaatgggtctgccatgcagagcttgttcattgaagaaatccacagtgtgagtgccaagaacagggcagtgtctatcgagaaagcagaaaagaaatgggaggaaaaaagnnnnnnnnnnnnnnnnnataatgggaaagagtttgagaagctcctagaagaagctcaggccaatatcatgaagtcaataccaaatctggagatgccgccagccacaggcccactgccaaggggagatgccccagtggacaaggtggaactttcagaagattctccaaattcggaacaggacttggaaaagctggggggaaagtcgccccctcctcctccgccacctcctcgtcgaagctacctgccaggatcgggactcaccaccacgaggtcaggcgatgtggtctacaccggcagaaaggagaacatcaccgctaaggcaagcagtgaagatgctggaccaagcccacagaccagagctacaaaatatccagcagaggagcctgcttcagcctggaccccatccccaccgcctgtcaccacctcctcctcaaaggatgaggaggaagaagaagaagaaggagacaaaataatggcagaactccagggctccagcggggccccacagacgagcaggatgcctgtccccatgagtgccaagaacagacccggaaccctggacaaacccggcaagcagtccaaactgcaggatccccgccaatatcgtcaggctaatggaagtgctaagaaatctggtggggactttaagcctacttccccctccttacctgcttctaagattccagccctttctcccagctctgggaaaagcagttctctgccctcttctagtggtgacagctctaacctccctaatccacctgctactaaaccatcgattgcttctaaccctctcagcccccaaacaggaccacctgctcactctgcctccctcatcccttctgtctctaatggctctttgaagtttcagagcctcactcatacaggtaaaggtcaccatctttcattctcaccgcagagtcaaaatggccgagcaccccctcctttgtcattttcctcctcccctccttctcctgcctcctccgtctcactgaatcaaggtgccaagggcaccaggaccatccatactcccagcctcaccagctacaaggcacagaatggaagttcaagcaaagccaccccatccacagcaaaagaaacctcttaaaggtcaaatcctattaggcacaagtcggagttacatttaaaaaaaattaacagtctacaacaactgttttcacaagagaatgtaacatattgctgtatcgtttgaggcttaatgctaaatatgtgctaaatactggattaatagatttcagtaaagctcgttcgttttgtttggttttctttttacctagttgctatagtgtctacagtctatactcaatacctataaaatgcagtaagcatgtgttacagaaagaggttctggtgggagagaaaggtgcgtgtgagacaggagaattgtcttaagcatataaaacatgtatgattccagaattttagtatgttttgtataaaactatttttcattacggagactagaagtgaacagagaattacacaagtgtgactatacaaattgtaaaacagatactataatatttccttttattttagtgttatttagctttattacagatttctatttttgtcaaaacttcatggttcctttcaagatcttttttgccaaaacattttgatactatagcattgtacatttgaaagtagtgttctagactataaaaccaatgaacttctacatgagccctacagacaggcatgtgtagaaggcaatttatcaaacctattgcactgccatgaaaagtgtgtataataatttgctagcccaagcaagctagttttctttgcttgcttcttttctttcttttttccttccttttttttttttttttcttttttaacatgttgagattctctagttgttttctttggcgtatctaaccccttcttttgttttctgagacctggtaacccacgctcttgcattgtggattttaaaatgtatactctgtacggttctgtaaaccgaaaaacttttgtaaatatataaatatacatagacataaaaatactgtatgtgacagcacatagagtagttttcccacaccaaagttaatttttatgcatgctttaaaagtatatatcgggaccggcagaaatggaagtatccatacatttttaaaaagcaacaagtttgcacagctagagtgtttttgtaaataaatgtatttgtataacacagtcatgtaatatacagaactataagcagagactttgcaaaactaaataaagggctgcatgcttattattttttgtaccttgtcactataactacttcctagtcaaagaacgaaatgtaactgttaccgagttaaatgtttttccgctttgagggatgtaaccacatccactcagaggacactacttttctgaaagctctggggtgactaatgatgagttcctaataaattaattgcaagtgtggtgccttggatgtggcctgttggctcgctttcttctctgtggcttatcaaggtgtagatgacagaaagcaaacctggatacagagtttccaccctcagttcctggaggggctcttattattttctctctttttaaaaaacttccagtagaagtaaagtggaaataaaatgtctttatcaattggaaaaaaaaaaaaaa

SEQ ID NO: 6275 - DNA, 4606 bp, Homo sapiens; identical to SEQ ID NO: 4614

SEQ ID NO: 6276 - DNA, 442 bp, Homo sapiens
  misc_feature (317)..(317): n is a, c, g, or t
ttttgtatttttagtagagacgggatttcaccatgctggccaggctggtcttgaacgcctgacctcaggtgatctgcctgcctcagcctcccaaagtgctggtttgattacaggtgtgagccaccacatctggccatttgccagatcttattctttgaaactatacaagcaatttttaaaaaattaaaataagatttcctaattacatatttctgagaggtttaaggcaatgattctctgacgaggattaactcttacatctgggttgcactcatagggtaggtaaagaaaagaaaaagtgtactgttgagagttgntccataaagcagatggggaaatatgaaaaggcagcagaggctgggtgtaatcccagcactttgggaggccgaggggggtcatcacgaggtcagaggtttgagaccagtctggccaacatggcaaa

SEQ ID NO: 6277 - DNA, 3880 bp, Homo sapiens
  misc_feature (1204)..(1224): n is a, c, g, or t
  misc_feature (3407)..(3426): n is a, c, g, or t
gcggcacgagggcggagccagcccctcccctacccggagcagcccgctggggccgtcccgagcggcgacacactaggagtcccggccggccagccagggcagccgcggtcccgggactcggccgtgagtgctgcgggacggatggtggcggcggggcgcgggccagcgcgggcgccgtgagccggagctgcgcgcggggcatgcggctgcggcccccggccctcggcccccgcgctccggccccagccccggccgccggcccccgcggagtgcagcgaccgcgccgccgctgagggaggcgccccaccatgccgcgggccccggcgccgctgtacgcctgcctcctggggctctgcgcgctcctgccccggctcgcaggtctcaacatatgcactagtggaagtgccacctcatgtgaagaatgtctgctaatccacccaaaatgtgcctggtgctccaaagaggacttcggaagcccacggtccatcacctctcggtgtgatctgagggcaaaccttgtcaaaaatggctgtggaggtgagatagagagcccagccagcagcttccatgtcctgaggagcctgcccctcagcagcaagggttcgggctctgcaggctgggacgtcattcagatgacaccacaggagattgccgtgaacctccggcccggtgacaagaccaccttccagctacaggttcgccaggtggaggactatcctgtggacctgtactacctgatggacctctccctgtccatgaaggatgacttggacaatatccggagcctgggcaccaaactcgcggaggagatgaggaagctcaccagcaacttccggttgggatttgggtcttttgttgataaggacatctctcctttctcctacacggcaccgaggtaccagaccaatccgtgcattggttacaagttgtttccaaattgcgtcccctcctttgggttccgccatctgctgcctctcacagacagagtggacagcttcaatgaggaagttcggaaacagagggtgtcccggaaccgagatgcccctgaggggggctttgatgcagtactccaggcagccgtctgcaaggagaagattggctggcgaaaggatgcactgcatttgctggtgttcacaacagatgatgtgccccacatcgcattggatggaaaattgggaggcctggtgcagccacacgatggccnnnnnnnnnnnnnnnnnnnnncaacgagtacactgcatccaaccagatggactatccatcccttgccttgcttggagagaaattggcagagaacaacatcaacctcatctttgcagtgacaaaaaaccattatatgctgtacaagaattttacagccctgatacctggaacaacggtggagattttagatggagactccaaaaatattattcaactgattattaatgcatacaatagtatccggtctaaagtggagttgtcagtctgggatcagcctgaggatcttaatctcttctttactgctacctgccaagatggggtatcctatcctggtcagaggaagtgtgagggtctgaagattggggacacggcatcttttgaagtatcattggaggcccgaagctgtcccagcagacacacggagcatgtgtttgccctgcggccggtgggattccgggacagcctggaggtgggggtcacctacaactgcacgtgcggctgcagcgtggggctggaacccaacagcgccaggtgcaacgggagcgggacctatgtctgcggcctgtgtgagtgcagccccggctacctgggcaccaggtgcgagtgccaggatggggagaaccagagcgtgtaccagaacctgtgccgggaggcagagggcaagccactgtgcagcgggcgtggggactgcagctgcaaccagtgctcctgcttcgagagcgagtttggcaagatctatgggcctttctgtgagtgcgacaacttctcctgtgccaggaacaagggagtcctctgctcaggccatggcgagtgtcactgcggggaatgcaagtgccatgcaggttacatcggggacaactgtaactgctcgacagacatcagcacatgccggggcagagatggccagatctgcagcgagcgtgggcactgtctctgtgggcagtgccaatgcacggagccgggggcctttggggagatgtgtgagaagtgccccacctgcccggatgcatgcagcaccaagagagattgcgtcgagtgcctgctgctccactctgggaaacctgacaaccagacctgccacagcctatgcagggatgaggtgatcacatgggtggacaccatcgtgaaagatgaccaggaggctgtgctatgtttctacaaaaccgccaaggactgcgtcatgatgttcacctatgtggagctccccagtgggaagtccaacctgaccgtcctcagggagccagagtgtggaaacacccccaacgccatgaccatcctcctggctgtggtcggtagcatcctccttgttgggcttgcactcctggctatctggaagctgcttgtcaccatccacgaccggagggagtttgcaaagtttcagagcgagcgatccagggcccgctatgaaatggcttcaaatccattatacagaaagcctatctccacgcacactgtggacttcaccttcaacaagttcaacaaatcctacaatggcactgtggactgatgtttccttctccgaggggctggagcggggatctgatgaaaaggtcagactgaaacgccttgcacggctgctcggcttgatcacagctccctaggtaggcaccacagagaagaccttctagtgagcctgggccaggagcccacagtgcctgtacaggaaggtgcctggccatgtcacctggctgctaggccagagccatgccaggctgcgtccctccgagcttgggataaagcaaggggaccttggcgctctcagctttccctgccacatccagcttgttgtcccaatgaaatactgagatgctgggctgtctctcccttccaggaatgctgggcccccagcctggccagacaagaagactgtcaggaagggtcggagtctgtaaaaccagcatacagtttggcttttttcacattgatcatttttatatgaaataaaaagatcctgcatttatggtgtagttctgagtcctgagacttttctgcgtgatggctatgccttgcacacaggtgttggtgatggggctgttgagatgcctgttgaaggtacatcgtttgcaaatgtcagtttcctctcctgtccgtgtttgtttagtacttttataatgaaaagaaacaagattgtttgggattggaagtaaagattaaaaccaaaagaatttgtgtttgtctgataaaaaaaaaaaaaaaaaaaaatnnnnnnnnnnnnnnnnnnnntgtgtggcgcccacgtggggcattgaacgggcgcgtgtacttcctcagggatgtgcacccgggcgggtctgggattcccgactggcgctgtgtcagtctaccttcacggggccgcggcctcacgccgtgtcccgcgggagcccgtcgccaatcctttggggccctccgcgagtctgtgcgccagagatctcggcggtcaccacttgaagagacccggtgtggttctgccccgtgtctgacaggggaggactgcacagaatatgtgtccacacagacacgtggtggcgccaggacacagttctactttctaacagacatcagctcccgctctgaatcactctagtccgccgcgcaaacgaagattctacggggtacggacattagtatgatcccatccagcgcctcaagcagcgggcgctgcacatctccactcgtcttcttcttcacttctcgg

SEQ ID NO: 6278 - DNA, 8729 bp, Homo sapiens
  misc_feature (265)..(282): n is a, c, g, or t
  misc_feature (2612)..(2632): n is a, c, g, or t
atggtggccctgtccttaaagatttgtgtgcgccactgcaacgtggtgaagaccatgcagtttgaaccatctacagctgtgtacgatgcgtgtcgagtcattcgggaacgggtgcctgaggcacaaactgggcaagcttctgactatggactctttctttcggatgaagacccgaggaaagggatttggctggaagcgggcagaacactggattactacatgttgcggaatggggatattttggaatataaaaagaaacagagtnnnnnnnnnnnnnnnnnnctggatggatctgtgaagacagtgatggtggatgattccaagactgtgggggagctcctggtcactatttgtagcagaataggaataacaaattatgaagaatactccttaatccaagaaactattgaagaaaagaaagaggaaggaacgggcacactcaaaaaagacaggacactgttacgagatgagaggaaaatggagaagttgaaggccaagctgcacacagatgatgacctaaattggctggatcacagccgaacattcagagaacaaggagtagatgaaaacgaaacgttgctgcttagacggaagttcttttactctgatcagaatgtagattcgagagaccccgtgcagctgaacttgctttatgttcaggcacgggatgacatcctgaatggctctcaccctgtctccttcgagaaagcttgtgagtttggtggatttcaagcccagatacaatttggacctcatgtggaacataaacacaaacctggatttttagacctgaaggaattcctgcccaaagaatatatcaagcagagaggagctgaaaagaggatctttcaggcacataagaactgcggagagatgagtgagatagaagccaaggtcaagtacgtcaaactcgcacggtccctccgcacatatggcgtgtccttcttcctggtgaaggagaagatgaaaggcaagaacaagctggtgcctcgcctgctggggatcaccaaagactcggtgatgcgcgtggatgagaagaccaaggaagtgctgcaggagtggcccctcaccaccgtcaagcgctgggcagcctcacccaagagcttcacactggattttggggagtatcaggaaagctactattcagtacaaaccaccgagggagagcagatatcccagctgattgcaggctacattgacatcatcctgaaaaagaaacaaagtaaagatcgatttggactagaaggtgatgaggagtcaaccatgttagaagagtccgtttccccaaaaaagtccaccatcttgcagcagcagttcaaccggaccgggaaggcagagcacggctcagtggcgctgccggccgtgatgcgctcgggctccagcgggcctgagaccttcaacgttggcagcatgccctcgccacagcagcaggtcatggttgggcagatgcaccgaggccacatgccgccactgacttcagcccagcaggccctgatggggaccatcaacacaagcatgcacgccgtccagcaggcccaggatgatctcagtgagctcgactcgctgccacctctcggccaggatatggcatctagggtatgggttcagaacaaagtcgacgaatccaaacacgaaatccattctcaagttgatgctatcacggccggaacggcttcagttgttaacctcacagctggtgaccctgcagacactgactacacagctgtgggatgtgcgatcaccactatttcttccaacctgacggagatgtccaagggtgtgaagctattggccgccctcatggatgatgaggtgggcagcggggaggacttgctcagagctgccaggaccctcgctggggcggtgtcagacttgctgaaagctgtgcagcctacttctggagagcctcgacagacagttttgactgctgctggcagcatcggacaagccagtggggatcttctgagacagattggagagaatgagactgatgagcgattccaggatgttttaatgagtttggccaaagctgttgccaatgcagctgccatgttggtactaaaggcaaagaatgttgcccaagtggccgaagacactgtcctacagaacagggtaattgctgctgccacccagtgtgccctctccacctcccagcttgtggcatgtgccaaggttgtgagccccactattagctcccctgtgtgccaggagcagctgattgaagcagggaagctggtggaccgctcggtggagaactgtgtccgtgcctgccaggcggccactaccgatagtgagctcctgaagcaggtcagcgcagcggccagcgtggtcagccaggccctccatgatctcctgcagcatgtgcggcagtttgccagccgaggcgagcccatcggccgctacgaccaggctactgacaccatcatgtgtgtcaccgagagcatcttcagctccatgggtgacgctggtgaaatggtgcgccaggcgcgggttctggcccaagccacatcagacctcgtcaatgccatgaggtcagatgcagaagccgaaatcgacatggagaattcaaagaagctcctggcagcagcaaaactcttagctgactccactgnnnnnnnnnnnnnnnnnnnnnagggggctgcagccaacccagagaatgaggaccagcagcaaaggctgagagaagctgcagaaggcctccgggtagcaaccaacgcagctgcccagaatgctattaagaaaaaaattgtcaaccgactggaggttgcagccaagcaggccgcagcggcagctacacagaccatcgccgcctcccagaatgcagctgtttccaacaagaaccctgcggcccagcagcagctggtccagagttgcaaggcagtggctgatcacatccctcagctggtccagggagtgagggggagccaagctcaagctgaagacctgagtgcccagctggctctcatcatctccagccagaacttcctccagcctggaagcaagatggtgtcctctgccaaagccgcagtgcccaccgtgagtgaccaggccgcagccatgcagctgagccagtgtgccaagaacctggccaccagcttggcggagctgcgtaccgcctcgcagaaggcccatgaagcttgtggtccgatggaaatcgattcagctctgaatacggtgcagacgcttaagaatgaactgcaggatgccaagatggcagccgtggagagccagctgaagccacttccaggggaaacgctggaaaaatgtgctcaggacctgggaagcacatccaaggcggtgggctcctccatggcacagctgctgacctgtgctgctcaaggcaacgaacactacacaggggtggctgctagagagacggcccaagctctgaaaacactggcccaggccgcccgtggagtggctgcatcgacaaccgaccccgcggccgcccatgccatgttagattctgctcgagacgtgatggagggctccgccatgctcattcaagaggccaagcaggccctgattgcacctggagatgcagagcgtcaacaaagactggctcaggtggctaaagccgtctcacactccttgaataactgcgtaaattgcctccctgggcagaaggatgtggacgtggccttgaagagcatcggggagtccagcaagaagctgcttgtggattcgctacctccaagcacgaagcctttccaggaagcccagagtgaactgaaccaggcagcagctgatctgaaccagtctgctggggaagtggtccatgccacccggggccagagtggagagttggctgcagcctctggaaagttcagtgatgattttgatgaattcctcgatgctggcattgagatggctggccaagctcagacaaaagaagaccagatccaagtgatagggaacctcaagaatatctcgatggcatccagcaagctgctgttagctgccaagtctctctctgtagatccaggagctcccaatgcgaaaaatctcctggctgcagctgcaagagctgtgacagagagcatcaatcaactcatcactctgtgtacccaacaagctccgggccagaaagagtgcgataatgccctgcgggagctcgagactgtgaaggggatgttggacaatcctaatgaacctgttagtgacctctcttactttgactgcattgagagtgtgatggaaaactccaaggttctgggtgaatcgatggcagggatttcacagaatgccaagaccggagacctccctgcctttggggaatgtgtggggattgcatccaaggctctctgtgggctgacagaggctgcagcccaggctgcatacttggttggcatctctgatccaaacagccaggcaggccaccagggcctggtggaccccatccagtttgccagggctaaccaggccatccagatggcatgccagaacttggtggaccctggcagcagcccatcacaggtcctgtcagccgccacaattgttgccaagcacacgtcagccttgtgtaatgcctgccgcatcgcctcatccaagacggccaacccagtagccaagaggcacttcgtccagtcagccaaggaagtcgccaacagcactgccaacctggtgaagaccatcaaggccctggatggggatttctctgaagacaaccgcaataagtgtcgcatcgccaccgcacccttgattgaagctgtggagaacctgacagcgttcgcctcaaaccctgagtttgtcagcattcctgcccagatcagctccgagggttcccaggcacaggaaccaatcctggtctcagccaagaccatgctggagagttcatcgtacctcattcgcactgcacgctctctggccatcaaccccaaagacccacccacctggtctgtactggctggacattcccatacagtgtccgactccatcaagagtctcatcacttctatcagggacaaggcccctggacagagggagtgtgattactccatcgatggcatcaaccggtgcatccgggacatcgagcaggcctcgctggccgccgtcagccagagcctggccacgagggacgacatctctgtggaggccctgcaggagcagctgacttcggtggtccaggaaatcggacaccttatcgatcccatcgccacagcggctcggggagaagcagctcagctgggacataaggtgacacaactggcaagctattttgagcccttgatcttagccgcagttggtgtggcctccaagattcttgatcatcagcagcagatgacggtgctggaccagaccaagactctcgcagagtctgccttgcagatgttgtatgcagccaaagaaggtggcggaaaccccaaggcacaacacacccatgacgccatcacagaggccgcccagttgatgaaggaagccgtggatgacatcatggtgacgctgaacgaagctgccagtgaagtggggctggttgggggcatggtggacgccattgcagaagccatgagcaagctggatgaaggcactcctccagaaccaaagggaacatttgtcgactatcagacgactgtggttaaatactccaaagccattgcggtgacagctcaggaaatgatgactaagtcggttactaacccggaggagttgggaggactggcttcacaaatgaccagtgactatgggcacctggctttccagggccagatggcagcagccacggcggaaccagaggagatcggattccagattcgcactcgtgtgcaggacctgggccacggctgtatcttcctggtgcagaaggcaggggccctccaggtctgccccacagacagctacaccaagagggagctgatcgaatgcgcccgtgccgtcacggaaaaggtctccttggtgctctcggctctccaggccgggaacaaaggaacccaggcatgcattacagccgccaccgctgtgtctgggatcattgccgacctggacaccaccattatgtttgcaacagcggggacgctgaatgcagagaacagtgagaccttcgcagaccacagggagaacattctcaagacggccaaggccttggtagaagacacgaaactacttgtgtcaggagctgcgtccactcctgacaagctggcccaggcggcccagtcctcagcagccaccatcacccagctcgcagaagtggtcaagctgggggcagccagcctgggctccgacgaccccgagacccaggtggttttgatcaatgccatcaaagatgtggccaaggccctttctgatctcatcagtgctaccaagggagctgccagcaagccagtggacgacccttccatgtaccagctcaagggggctgccaaggtgatggtgaccaatgtcacctcgctcctcaagactgtaaaggcagtggaggatgaggccacccggggcaccagggcgcttgaggccacaattgaatgcataaagcaggagcttacggtgttccagtcaaaagacgtacctgaaaagacatcatcacctgaagaatccataaggatgacgaaaggcatcaccatggcaacagccaaagccgtggcagctgggaactcatgtagacaggaggacgtgattgctactgccaacctgagccggaaagccgtgtcagatatgttgacggcttgcaagcaagcatccttccaccccgatgtcagtgacgaggtgagaaccagagccttgcgtttcgggacggagtgcacccttggctacttggacctcctggagcacgtcttggtgattcttcagaaaccaaccccagaattcaagcagcagctggccgctttctccaagcgagtcgccggcgctgtgacagagctcatccaggcggcggaagccatgaaaggaacagagtgggtggatccagaagacccaactgtcattgcagaaacagagttactgggggctgcagcatccatcgaagctgctgctaagaagttagagcaactgaagccaagagcaaaaccaaaacaagcggatgagaccctggactttgaggaacagatcttggaagctgctaaatccattgctgctgccacaagcgccctggtcaaatcggcctcagcagcccagagggagctggtggcccaaggaaaggtgggctccatccctgccaatgctgcagacgacggacagtggtcacaggggctgatttctgctgcccggatggtggcggctgcgaccagcagtctctgtgaggcggccaatgcctccgttcagggacacgccagcgaggagaagctcatctcatctgccaagcaggtcgccgcttccacggctcagctgctggtggcctgcaaggtgaaggccgaccaggattcagaggccatgaggcggctacaggcggcaggaaatgctgtgaaaagagcctcagacaatcttgtccgtgcagcccagaaggcagcttttggcaaagctgatgacgacgatgttgtagtgaaaaccaagtttgtggggggcattgctcagatcatcgccgcccaggaagaaatgctaaagaaagagcgagaactggaagaagcaaggaaaaaactggcccaaatccgccagcagcagtataagtttttacccaccgagctgagggaagatgagggctaaaggtgcgagcccagatggcgagccccaggggatggccctggctgaactggacagacagtgttcctgagaggctgggcacttagctggaaaccgcccacctccctcccgggtgagcctggagccctgcgtgcttgttctcacatctctgtcccgtcggcactggctgcatgatcgtgatgtcacacggtacaatgtcctacccacaactcctctgccgcctcccctcatgcctcaccgtgtctcaggagagaggggtgcacgtttcatggactgttaccaacaaagaaaagtcagtattatgttgttctcagacactttggcttttgttggtccttctcttaggcctgctcctggacctctttatgatattgtgatagggaaaaaaatcattgacgtcatagaatattcttcttcctctcaggagaagacggaagctggagttggacatggttcataaaagccagaaacacaaacccgtgtggactccgggagggtgactcaggtcctccttccatgtcttgagcactggctcacccagggggtgaaaaattcccgcccctgtttgcacgctttcttgcctccgtgtgtaagctccttgtacaacccagacccatcttgtattttgtggcccagaaaactgaacgattattttgttcctccgtagtccaaagggcagagttgcggaaggccgtcggggcttggtgagcaggggctgtaatacagtctgtgggctccttaccctgcagaggctgtttcagctcacacagagtcatccacacaaacccacggctcccagttgacagtcagtggaatgctcgtctccttagcgtccagggtggggattctgctggaataaagagcttcctcagtgactcatctttaaaaaacaaacgctggtttctgtgccttcagaatggtcacaagcccggattggaaaggatctgcttacaaacctgtcccctgtcctccaacccaaaacgcctttttttctgtcttaatatccagaaaatctaaatgcatcctaaaatcaatgtgaacctttaacaagatagttttacttattatcaaaaaaaaaaaaaaaaaaaaaaaaaaaaaaaaaa

SEQ ID NO: 6279 - DNA, 2302 bp, Homo sapiens
  misc_feature (90)..(198): n is a, c, g, or t
  misc_feature (1611)..(1611): n is a, c, g, or t
agcggagtagttgatggagatcggccgttgggatgctgtctaagcttggatacctgagtaataacggacaacagataaagctccgcatcnnnnnnnnnnnnnnnnnnnnnnnnnnnnnnnnnnnnnnnnnnnnnnnnnnnnnnnnnnnnnnnnnnnnnnnnnnnnnnnnnnnnnnnnnnnnnnnnnnnnnnnnnnnnntggaaggcacctcttgttttggggagcatgtatatttccctcctgtgacgcactgcttccacagagaggtgcaaacgtgcaaacgctcagcgaccgcagcgctcctgcccctcccccaccgtaactccggggtcgcggatctgcccgccccgctctcccgaagctgttcgggcagtgtccgaacggcttcggaggggcgagaagccagcatccgagccgcctctccggaataccagcagcctgacgcacgcgtgctgtcgggggagggatgctgggacagctgctcccgcacacggctcgcggtctcggcgccgcggagatgcccggccagggtccggggtccgactggacggagcgtagctcttctgcagagccgcccgctgtggccgggaccgagggtggcggcggcggatcagctggatactcttgttaccagaattccaaaggttctgatagaatcaaagatggatacaaagtgaactcacacatagctaagctgcaagagttatggaaaactccccaaaatcaaacaatccacctctctaaatcaatgatggaggcgtcctttttcaagcatccagacctcaccacaggccagaagcgttacctgtgcagcattgctaaaatctataatgcaaactatctgaagatgttaatgaagaggcagtacatgcacgtacttcagcacagctcacaaaagccaggtgtcctcactcatcacagaagccgccttagctcccgttactcacagaaacagcattacccttgcactacatggcgacatcaactggagagagaggactcggggtcttctgatatcgcagctgcatctgcacctgaaatgctcatacagcattccctttggcggccagtgagaaacaaagaagggataaaaactggatatgcatctaaaacaagatgtaagtcactgaagatttttagaagaccaaggaaactgttcatgcaaacagtttcttcagatgattctgaatcacacatgagtgaagaaaaaaaggaagaagatttactaaataattttatgcaatcaatgtcaattgaagaacagggagaacatctgatgttaacttgacagtcttgtctcgtgtattgaattcgtgccaaaggtgagggtaaggggttgtgagttgtgtcctgtatgtttaggatggtattgttatttattaaatcattaagtaattttggtttgttcagaaacttaaaacaatgtaattggtctgatgtagttccatgtaccaatgatagttatgtaagaaaatttacatgtaacatatacttgtacttctagctagatacaattaaaacttttcttgcattcaaaaaaaaaaaaaaaaaaaaaaaaaaaaaaaaaaaaaaaaaaaaaaaaaaaaaaaaaaaaaaaaaaaaaaaaaaatnaaaaaaaacataaaccataaaaaaaactttctaaacctttcctttggccccgggggcccctttaggaagcgtgaacttggcccccaagctgccccccctaggagaaccccggagttcgtgaattaagggctttgggtctcccccccccaattaaaaaaagccccctggggggggagacctaaccggtctcaagaaacaaatccccccaagggggatttcccgggaggggccccttaaaagggagattctcaataaaaacgagggtttcccccgagagcgctaaatcttcgcgagattccaatatttacccggccccgcggcccatgtggcacaccctttctataacaatggacctggcgcggcgcaactcctcttttaaaacccattctcgcgccccagaacagtgtggaaagccccacctcccgcaaagccggcgtgtgtggagaaacacctttgaacatccccccaacccgggaaatctgctcaacccctagtggtcccccatatttgagcaaaaaaaaaatattgccccccacacgcggggttaaacaaccctgtggcggcacacaaaaaatatgttccccccccgtgggtgggacccaccctcgtttataataacaaaaaggtggggcgccacactcttccccccccggcgttattgtggctttggcatatgggagacacccctccc

SEQ ID NO: 6280 - DNA, 3138 bp, Homo sapiens
gggagcgggggagatcgggaatcctctcagtccttagttacaaggctccatcctcactttgttcgctcctcagtcgtccaggcggattcctttttcgccaggcaccaaggcacagcttagagtagacccgagtcctgctctgcggagttcgtcttcccagcgaaggtacagaggcggatgaactgctgagacttgattgacgtattttaagatttttttaacttctgaagtctagcaggcctgtaagaacaaaaatcattctgtaggaattaaaaacagaatccagtcttgacaacatatccacaatgtctgatgtatctactagtgtacaatcaaaatttgctagacttgcaaagaaaaaggaaaatatcacctatatgaaaagagagcagttaacagaaactgataaggacatagctccggtattagatttaaaatgcaaggacgtatcagcaattatgaataagtttaaggtcttaatggaaattcaagacctgatgtttgaggagatgagggaaactcttaaaaatgacctaaaagcagttttaggaggaaaagctacaatacctgaggtaaagaattcagagaactccagtagtaggacagagtttcagcaaataatcaatttagcattacaaaaaacagggatggtagggaaaatagaaggagaaaactctaaaataggtgatgataatgaaaatttaacctttaaattagaagtaaatgagctgagtggtaaattagacaacactaacgaatacaatagtaatgatggtaagaaattaccccagggtgaatcacgaagttacgaagtcatgggaagtatggaagaaaccttatgcaatatagatgacagagatggaaatcgcaatgtccatttagaatttacagaaagagagagtaggaaggatggagaggatgaatttgtcaaagaaatgagagaggaaagaaaatttcagaaattgaagaataaagaggaggttttaaaagcctccagagaagaaaaagtgttgatggatgaaggagcagtacttaccctggcagccgacctttcatcagcaacactggatattagtaagcaatggagtaatgtcttcaacattctgagagaaaatgattttgaacctaaatttctgtgtgaagttaaattagcatttaaatgtgatggtgaaataaagacattttcagatctgcaaagccttagaaaatttgccagccaaaaatcttctatgaaagaattactgaaagatgtactcccacaaaaggaagaaataaatcaaggaggaagaaaatatggaattcaagaaaaaagggataaaaccctaatagactcaaagcatagagctggagaaataaccagtgatggcttgagcttcctatttcttaaagaagtaaaagttgctaagccagaggagatgaaaaacttagagactcaagaggaagagttttccgagctagaggagctggatgaagaggcctcagggatggaggatgactgaagatacctcgggctggaggaggaggaggaagagccctcagggctggaggaggaagaagaagaagaggcttcagggttggaggaggatgaggcctcagggctagaggaggaagaggaacagacttcagaacaggactcaacctttcagggtcatactttggtagatgcaaagcatgaagttgagataaccagtgatggcatggaaactactttcattgactctgtagaggattctgaatcagaggaggaagaagaaggaaagagctctgaaacaggaaaggtaaagactacctccctgactgagaaaaaagcctcacgtagacaaaaagaaattccctttagttatttggttggggactctgggaagaaaaagttggtgaaacaccaggtggtgcacaaaacccaggaggaagaggaaacagctgtgcccacaagtcaaggaactggcacaccctgtctgaccttatgtttggcctctccctcaaagtcactagagatgagtcatgatgagcataaaaagcattcacatacaaatttgagtatttcaacaggagtcaccaaacttaagaaaacagaagaaaagaaacacagaactctgcacacagaagaactaacatccaaagaagcagacttaacagaggaaacagaagaaaacttgagaagtagtgtgattaatagcatcagagagataaaagaggagattggaaatttgaaaagttcccattcaggtgtcttggaaattgaaaattcagtagatgatctgagtagcagaatggacatacttgaagaaagaatagacagtctagaagatcaaattgaagaattctctaaggatacaatgcaaatgaccaaacagataattagtaaagaaaggcaaagagatatagaggagagatctagaagttgcaacattcgtttgataggaattccagaaaaggagagttatgagaatagggcagaggacataattaaagaaataattgatgaaaactttgcagaactaaagaaaggttcaagtcttgagattgtcagtgcttgtcgagtacctagtaaaattgatgaaaagagactgactcctagacacatcttggtgaaattttggaattctagtgataaagagaaaataataagggcttctagagagagaagagaaattacctaccaaggaacaagaatcaggttgacagcagacttatcactggacacactggatgctagaagtaaatggagcaatgtcttcaaagttctgctggaaaaaggctttaatcctagaatcctatatccagccaaaatggcatttgattttaggggtaaaacaaaggtatttcttagtattgaagaatttagagattatgttttgcatatgcccaccttgagagaattactggggaataatataccttagcacgccagggtgactacaaacaatatgctttcctcccccagcatgcatccaaaaatcaacaagtaaaacgaaaatacacttctacccagaaggatggacagctaatagcgtacttggggatgaggagcaaggaatattacagatattacctagatgttaataaagggtatgtttaaaaaaaaaaaaaaaaaaaaaaaaaaaaaaaaaaaaaaaaaaaaaaaaaaaaaaaaaaaaa

SEQ ID NO: 6281 - DNA, 3031 bp, Homo sapiens
agcccgtcctctagcccagctcctcggctcgcgctctcctcgcctcctgtgctttccccgccgcggcgatgccagggccttcgccagggctgcgccgggcgctactcggcctctgggctgctctgggcctggggctcttcggcctctcagcggtctcgcaggagcccttctgggcggacctgcagcctcgcgtggcgttcgtggagcgcgggggctcgctgtggctgaattgcagcaccaactgccctcggccggagcgcggtggcctggagacctcgctgcgccgaaacgggacccagaggggtttgcgttggttggcgcggcagctggtggacattcgcgagccggagactcagcccgtctgcttcttccgctgcgcgcggcgcacactacaggcgcgtgggctcattcgcactttccagcgaccagatcgcgtagagctgatgccgctgcctccctggcagccggtgggcgagaacttcaccctgagctgtagggtccccggcgccgggccccgtgcgagcctcacgctgaccctgctgcggggcgcccaggagctgatccgccgcagcttcgccggtgaaccaccccgagcgcggggcgcggtgctcacagccacggtactggctcggagggaggaccatggagccaatttctcgtgtcgcgccgagctggacctgcggccgcacggactgggactgtttgaaaacagctcggcccccagagagctccgaaccttctccctgtctccggatgccccgcgcctcgctgctccccggctcttggaagttggctcggaaaggcccgtgagctgcactctggacggactgtttccagcctcagaggccagggtctacctcgcactgggggaccagaatctgagtcctgatgtcaccctcgaaggggacgcattcgtggccactgccacagccacagctagcgcagagcaggagggtgccaggcagctgatctgcaacgtcaccctggggggcgaaaaccgggagacccgggagaacgtgaccatctacagcttcccggcaccactcctgaccctgagcgaacccagcgtctccgaggggcagatggtgacagtaacctgcgcagctgggacccaagctctggtcacactggagggagttccagccgcggtcccggggcagcccgcccagcttcagctaaatgccaccgagaacgacgacagacgcagcttcttctgcgacgccaccctcgatgtggacggggagaccctgatcaagaacaggagcgcagagcttcgtgtcctatacgctccccggctagacgattcggactgccccaggagttggacgtggcccgagggcccagagcagacgctgcgctgcgaggcccgcgggaacccagaaccctcagtgcactgtgcgcgctccgacggcggggccgtgctggctctgggcctgctgggtccagtcactcgggcgctctcaggcacttaccgctgcaaggcggccaatgatcaaggcgaggcggtcaaggacgtaacgccgggggagtaacgcaccagcgcttggacagcgtgggctgccccagaacgcattacttggctggagggaacagaagcctcgctgagctgtgtggcgcacggggtaccgccgcctgatgtgatctgcgtgcgctctggagaactcggggccgtcatcgaggggctgttgcgtgtggcccgggagcatgcgggcacttaccgctgcgaagccaccaaccctcggggctctgcggccaaaaatgtggccgtcacggtggaatatggccccaggtttgaggagccgagctgccccagcaattggacatgggtggaaggatctgggcgcctgttttcctgtgaggtcgatgggaagccacagccaagcgtgaagtgcgtgggctccgggggcgccactgagggggtgctgctgccgctggcacccccagaccctagtcccagagctcccagaatccctagagtcctggcacccggtatctacgtctgcaacgccaccaaccgccacggctccgtggccaaaacagtcgtcgtgagcgcggagtcgccaccggagatggatgaatctacctgcccaagtcaccagacgtggctggaaggggctgaggcttccgcgctggcctgcgccgcccggggtcgcccttccccaggagtgcgctgctctcgggaaggcatcccatggcctgagcagcagcgcgtgtcccgagaggacgcgggcacttaccactgtgtggccaccaatgcgcatggcacggactcccggaccgtcactgtgggcgtggaataccggccagtggtggccgaacttgctgcctcgccccctggaggcgtgcgcccaggaggaaacttcacgttgacctgccgcgcggaggcctggcctccagcccagatcagctggcgcgcgcccccgggggccctcaacatcggcctgtcgagcaacaacagcacactgagcgtggcaggcgccatgggaagccacggcggcgagtacgagtgcgcagccaccaacgcgcacgggcgccacgcgcggcgcatcacggtgcgcgtggccggtccgtggctatgggtcgccgtgggcggcgcggcggggggcgcggcgctgctggccgcgggggccggcctggccttctacgtgcagtccaccgcctgcaagaagggcgagtacaacgtgcaggaggccgagagctcaggcgaggccgtgtgtctcaacggagcgggcggcggcgctggcggggcggcaggcgcggagggcggacccgaggcggcggggggcgcggccgagtcgccggcggagggcgaggtcttcgccatacagctgacatcggcgtgagcccgctcccctctccccgcgggccgggggacgccccccagactcacacgggggcttatttattgctttatttatttacttattcatttatttatgtattcaactccaagggcgtcacccccattttctacccatcccctcaataaagtttttataaaggaaaaaaaaaaaaaaaaaaaaaaaaaaaa

SEQ ID NO: 6282 - DNA, 1964 bp, Homo sapiens
gaagaaaaagagaataaaatattggtcaaagaaactggtcacttttttatatatggtcaggtaggttgaaaccctaattctggttttactgttcaaagcctcccattttgtgttcatttctgacacagttttttggtttgtttcttaggttttatatactgataagacctacgccatgggacatctaattcagaggaagaaggtccatgtctttggggatgaattgagtctggtgactttgtttcgatgtattcaaaatatgcctgaaacactacccaataattcctgctattcagctggcattgcaaaactggaagaaggagatgaactccaacttgcaataccaagagaaaatgcacaaatatcactggatggagatgtcacattttttggtgcattgaaactgctgtgacctacttacaccatgtctgtagctattttcctccctttctctgtacctctaagaagaaagaatctaactgaaaataaaaaaaaaaaaaaaaaaaaagtagttaccattgccttttctgtgagctatttgttttggtttgctgaaactagtccaaaacaggaaatttaacagacagccacagccaaagagtgtcatgtgaattacaagaaatagagcccatttagggaaagatagaactagaaaggcttttcattataattccatgttgaacaattagtcatagctgtttaccttggaggaaggacacaattcaaaggggcagtaaggattttgtaaaacgtggcatccataatttactatggagcaagtgcccacatctctaggacattaagacatttatgagaaatctcaggattcatcttctgtttttatgttaaatgcactccctccttttcagttaacattataaaaagtaaaaaatgaaaattttagaaatcttgcattagacacatgaaaaaataactaaaagtttaaatttaaatatgaaacaattttgctgaaaatagtatccatatactatttaagtcttttatggttatttcaagtatacaatttctatctgtaatgtaatatattacccacacatttttttcacaggagagagagaatatcctcatttgtttatgctcatgtgtattttctatagtgaatttcagaaacttttaatatcaggtaatttcaatttatgcctataaagcattgattgaaaaataactagaattgtgcatatataacacataatctccaacagaagttactgaatacattcatactaatgtaatgtaatttccctttatttcttgctcttctgtttcaaactgctgctattgtagtttacatatcccaacctttaaaaatattcctcttattagctttatattcactttatagaagttgagttttaattaaaattcttggcatcctgaagtatgtcacatagcatgtgctccttataaatatgttgatatctcagaagacagcatcccggttttcattttataaagtaccatacttaagaatgctgtaatacttatcttttataacatgtttccttcgctttgcttgtcttttatgtcatcagttttaactgtttacttcatttaacagtttacatcattcaacagtttacttcattaaacagtaggtggaaaaatagatgccagtctatgaaaatcttcccatctatatcaaaatacttttcaaggatatacttttcaaaacaaacgatttaaattttatgtttaaaatataaactttagatttaaactttatttaaatatctggttcctatgattttgacttcagtaagttcaaataaaatatattttgcaattcatttttacattataatttaaaaagaagaagcgataagtggagtcagtttcaatgctaggtggggtggttaatgatttttctggtgttgctgctaatgtggattaacaaataaaaacattcattgccttttaaaaaaaaaaaaaaaaaaaaaaaaaaa

SEQ ID NO: 6283 - DNA, 5544 bp, Homo sapiens
  misc_feature (817)..(839): n is a, c, g, or t
  misc_feature (1421)..(1496): n is a, c, g, or t
  misc_feature (2336)..(2353): n is a, c, g, or t
acagcttgcaacactcggcatcttttctggaggcgcctccttcagcagccgcagatggcatccggctgcgggctcggggctcgcaattgattctcccccttgcccacctcgagtccacggacgcacctctcccttcccctcctcccttcgcgcttctgggtctgagcccagctcgcgaccgccgggcagaggatcagtcgcggcggccgaggctgagcagcagcgctctcgctccctgacctggggagaagcgcccacccgggagagctgatccccggctgcctccagcgccccccaccttttgcactccaagccgggggctccagagaccccgctccccaggcgccactatgctggacccttcgtccagcgaagaagaatcggatgagatcgtggaggaggagagcggcaaggaggtgctcggctcggccccgtccggcgcgcgcctgtctcccagccgtaccagcgagggctcggccggcagcgccgggctggggggcggcggcgccggcgccggagccggggtgggtgcaggcggcggcgggggcagcggcgcgagcagcggcggcggggccggggggctgcaacccagcagccgcgctggcggcggccggccctccagccccagcccgtcggtggtgagcgagaaggagaaggaagagttggagcggctgcagaaagaggaggaggagaggaagaagaggctgcagctgtatgtgttcgtgatgcgctgcatcgcctacccctttaatgccaagcagcccaccgacatggctcgccggcagcagaagatcagcaaacagcagctgcagacagnnnnnnnnnnnnnnnnnnnnnnnctcaatggggaaacccagatcatggctgacgaagccttcatgaacgctgtgcagagttactatgaggtgttcctgaagagcgaccgtgtggcccgcatggttcagagtggaggctgttccgccaacgactcccgggaggtcttcaagaagcacattgagaagagagtgcgcagcctgcctgagattgacggcctcagcaaggagactgtgctgagctcctggatggccaaatttgatgccatctaccgtggagaagaggacccgcggaagcagcaggcccggatgacagccagcgcagcctccgagctgattctgagcaaggagcaactctatgagatgttccagaacattcttgggatcaagaagttcgaacatcagctcctttacaatgcctgccagctggacaatccagatgagcaagcagcccagatcagacgagagctggatggacgtctacaaatggcagaccaaatagccagggaacgcaaatttcccaagtttgtatccaaagaaatggaaaacatgtacattgaggagctgaagtcatctgtcaacctgctcatggccaacttggagagcatnnnnnnnnnnnnnnnnnnnnnnnnnnnnnnnnnnnnnnnnnnnnnnnnnnnnnnnnnnnnnnnnnnnnnnnnnnnngaggagagtgagaaccagctctccaagtcagatgtcgtgctgtctttctcattggaggtggtaattatggaagtccaaggcctcaaatctttggctccaaatcgcatcgtatattgcacaatggaggtggaaggaggagagaaactacagactgatcaggccgaggcttctaaaccaacctggggcacccagggtgacttctccacaacccatgcactgccagctgtgaaggtgaagctgttcacagagagcacaggcgtcctggcgttggaggacaaggagcttgggcgggttattctccatcccaccccgaacagccccaaacagtcagagtggcacaaaatgacagtctccaaaaactgccccgaccaagatctcaaaatcaaacttgctgtccgaatggataagcctcaaaacatgaagcattctgggtatttatgggccatcggtaagaatgtctggaagagatggaagaaaaggttttttgtattggtgcaggtcagtcagtacacgtttgccatgtgcagttatcgggagaagaaagcggagcctcaggaacttctacaattggatggctacactgtggattacaccgacccccagccaggtttggagggtggccgagccttcttcaatgctgtcaaggagggagacaccgtgatatttgccagtgacgatgaacaagaccgcatcctgtgggtccaggccatgtatcgggccacggggcagtcacacaagcctgtgcccccgacccaagtccagaaactcaacgccaagggaggaaatgtacctcagctggatgcccctatctctcaattttacgcagatagagctcaaaannnnnnnnnnnnnnnnnntatctcttccaacccctgtaactttgaccacgcttccctctttgagatggtacaacgccttactttggatcacagacttaatgattcctattcttgcctgggctggttcagtcctggccaggtgtttgtactagacgagtattgcgcccgaaatggagtccgggggtgtcaccgacatctctgctacctcagagacttgcttgaacgggcagaaaatggcgccatgatcgaccccacccttcttcactacagctttgccttctgtgcatcccatgtccatgggaacaggcctgatggaattggaactgtgactgttgaagaaaaggaacgttttgaagaaatcaaagagaggctccgagttctgctagaaaatcagattacacattttaggtattgctttccatttggtcgacctgaaggtgctttgaaagctactctctcactcttggaaagggttttgatgaaagatattgttaccccagtgccacaagaggaggtaaaaacagttatccgtaaatgtctggaacaggctgcgttagtcaactattctcggctctcagagtatgccaaaatcgaagagaatcaaaaggatgcagaaaatgtaggccggttaatcactcctgccaaaaagcttgaagatacaatacgtcttgctgaactagtcattgaagttcttcagcaaaatgaggagcaccacgcagagccacatgttgataaaggagaagcctttgcgtggtggtcagatttaatggtggagcatgcggagacgttcctgtcactctttgcagtagacatggatgcagccttagaggtgcaacctccagacacatgggacagttttccactatttcagctgctggaatgattttctccgtactggactataatttgtgcaatggaaaatttcacaaacacctgcaagacctgtttgccccacttgttgttagatatgtggatctgatggagtcctcaattgcacaatccattcacaggggctttgagcgggagtcatgggaaccagtcaagagtttaaccagtaacctacccaatgtgaacctacccaatgtgaaccttcccaaagtaccaaatctaccagttaacatccctctaggcatcccacaaatgcctactttttcggcaccgtcatggatggctgctatatatgatgcggataatgggtcaggcacctcagaagatctgttttggaaacttgacgcccttcagaccttcattcgggacctgcactggcctgaagaagagtttggaaagcacctggaacaacggctgaagttgatggcaagtgacaagcttggcacgagggtcaaaagaaccaggattgcatttgaagttaagctgcaaaaaaccagtcgatcaacagattttcgagtcccacagtcaatatgcaccatgtttaatgttatggttgatgccaaagctcaatcaacaaaactttgcagcatggaaatgggccaagagtttgctaaaatgtggcatcaataccattcaaaaatagacgaactaattgaagaaactgttaaagaaatgataacactcttggttgcaaagttcgttactatcttggaaggagtgctggcaaaattatccagatatgacgaagggactttgttttcttcttttctgtcatttaccgtgaaggcagcttccaaatatgtggatgtacctaaacccgggatggacgtggccgacgcctacgtgactttcgtccgccattctcaggatgtcctgcgtgataaggtcaatgaggagatgtacatagaaaggttatttgatcaatggtacaacagctccatgaacgtgatctgcacctggttgacggaccggatggacttacagcttcatatttatcagttgaaaacactaattaggatggtaaagaaaacctacagagatttccgattgcaaggggtcctggactccaccttaaacagcaagacctatgaaacgatccggaaccgtctcactgtggaggaagccacagcatcagtgagtgaaggtgggggactgcagggcatcagcatgaaggacagcgatgaggaagacgaagaagacgattagaccatttggtcctagagtctgctgggacagagtcctgtaatcagtgcatgtccttagtctgttagttaaacccattaggaattttctgtcaactaccatgcccatgagatgtttatcaatacaactgccattttagctatgtggtaccaagattagcaaatgaccttcatatccactgatttcctgatgtccatgtctatatgtttacaagcaatatggagcaccattctttaaatactgttcatggagaatacatagtctaaccactaggcgtgtccctgttatcagcaaagatcaatgatgcttcattcatgtactatgtatgcattggtggtaaatggatgtgagggcaagtacatcaagtacattcactctgtttcacgtatgtggatgccagttaattaaatgagtacgtaaataaattaattaaaacacatagatctgctttgtgtttttatttttattttttgaaaaacaaaaggcaagtctccaacaattaacttttgatgctttctgttcccctaaaaccaaaaaatgaaccccttgtgtcgttgttaacccatcctttcatttactcatataattagccaaaaaaaaaaggatggctacataccaatggattgattctcttaattgccacggcaagggggcgatcctatcatgacttaacatcaagcgcgcagtttcaaaactactgtcttctgtcaaagttttctcctcttaaatgttattttgcttttacgtctcaactgtgtatgtaaaaaaaacgaatatttaaattacaaccctagactaaaaatgtgtttataataagatgtggatatttccttcagtagattgtaaccataatttaaattattttgttccacactgttttttatatctgtcatgtacattgcattttgatctgtaactgcacaaccctggggtttgctgcagagctatttctttccatgtaaagtagtggatccatcttgcttttgccttatataaagcctacagttatggaagtgtggaaaactgtggcttctcaataaatattcagatgtcctaagaatataaaaaaaaaaaaaaaaaaaaaaaaaaaaaaaaaaaaaaaaaaaaaaaaaaaaaaa

SEQ ID NO: 6284 - DNA, 1957 bp, Homo sapiens
caatagatggcattaaaacatattgtagtgtggatatatattttttcttttttaaaatgtgatattgacgttttattaatattttttaaattgttacgtttataaatttggtacttaaggcccagccagtatgagaccctgaatgcgccatttattataaagagctgctgccctcctatttttataaattttactaacaaagtagactaatgtagacattcaccagacatggtagggcaaaagcatcttcaaactaaagactccaaaatgctaactcagaaagaaagaaaaaacccgttttcaattctaatgaaacagcaacaacattttttttaattaaaaaaaaaaatcatgttctttgtttttctaataaaatgttaggttgtttggtgaggtttttttgttgtttttttcctttctttgtttcttttcttttcccccaaacaaccagattaaatgctgagcgcttttaaaatatcaaaacttgttcaagtcataaaacaacaaaacataagttttatttaaaaaaaaaaaaagaaagaaaaaatagtaaattcccagaaattcagtgtttagacgagggaatttaattcctattttgtccatgttggtgatgtactgtacttcccttccttttctctgcatcccccatcacctcatagaagactctttgttgatcattgtatgttaataatgtataaaatggctatcttgtaagcgtgctgtcctggtactagtgtagcgactttttttctcctctttcttctagtacatattgataggtataacataattaaggtttcaaaaaaaattagacatagttattcagatttaggaccagtaaggatagaactttctcttatttatgaaaaaaaatgctaataattttggggcagttttttcctttaattatttttttcaatttcaagtttaattttattttagctgatctgatgtggtttcaactaacccaaggtctcaccatgttaaaatgccggcggactctacggcgttttgtagatcccccccccccacccactgtgaaggggtgccatactaccttaaatgctaatgctagatatgcaaaactggatttttttaatttattttttaaaagagggaggcatggtatattaaaatgattttactaagagaaaaaatatttttttaagaatgctcagaagaaattgataatctgtgtgaatatgttttagatgtttatataccttttgaagagacccagtagcccatagcacaaatcttgtggaaatccgatatgttttaatgtggctacctaggtttaaggttcacgttagtccccccattccatctagaagtccattttgaaagatttttgtaaattcttttaacactgatgtttcagcctcgtctttgtttcagttaagctcaatggcgaacatgggaaccacctttcgccttccctgggggagaaaccctcttggctgatggcttttccccggaattatcaaacagccaccgggtgactttctggcttccagatccatctgcctgagacccccgaactcctctcctcccaagcagaggcgagtgagtggcattagctcccggacccattcccggtcctagctgggcatggggcctgacggagatgaccaagccttggtctgctctctagcagctttccacagacttgggctcgtgggccttccttattatccattggggaacaaaacagcctcgcgctctataccaaacagcctcgcgctctatcccagtcgcccattagcttgattcaaacaaagccccagcaggcctttgcgttattatccttcataaccttcatcttaatttgaacttgtagcctggactttaaggtagcatggctctattgctgtcaatttactgtttcactgcacagcaatcacagcagtgaatgttacacacatcttgctagactagtataacactcattggg

SEQ ID NO: 6285 - DNA, 4432 bp, Homo sapiens
  misc_feature (190)..(217): n is a, c, g, or t
  misc_feature (2140)..(2154): n is a, c, g, or t
tgaggagtcctgctcaagacacggtcactggatctgagaaacttcccaggggaccgcattccagagtcagtgactctgtgaagcacccacatctacctcttgccacgttcccacgggcttgggggaaagatggtggggaccaaggcctgggtgttctccttcctggtcctggaagtcacatctgtgttgnnnnnnnnnnnnnnnnnnnnnnnnnnnntaagaagagtccagcctgggaagaagaaccccagcatctttgccaagcctgccgacaccctggagagccctggtgagtggacaacattgttcaacatcgactacccaggcgggaagggcgactatgagcggctggacgccattcgcttctactatggggaccgtgtatgtgcccgtcccctgcggctagaggctcggaccactgactggacacctgcgggcagcactggccaggtggtccatggtagtccccgtgagggtttctggtgcctcaacagggagcagcggcctggccagaactgctctaattacaccgtacgcttcctctgcccaccaggatccctgcgccgagacacagagcgcatctggagcccatggtctccctggagcaagtgctcagctgcctgtggtcagactggggtccagactcgcacacgcatttgcttggcagagatggtgtcgctgtgcagtgaggccagcgaagagggtcagcactgcatgggccaggactgtacagcctgtgacctgacctgcccaatgggccaggtgaatgctgactgtgatgcctgcatgtgccaggacttcatgcttcatggggctgtctcccttcccggaggtgccccagcctcaggggctgctatctacctcctgaccaagacgccgaagctgctgacccagacagacagtgatgggagattccgaatccctggcttgtgccctgatggcaaaagcatcctgaagatcacaaaggtcaagtttgcccccattgtactcacaatgcccaagactagcctgaaggcagccaccatcaaggcagagtttgtgagggcagagactccatacatggtgatgaaccctgagacaaaagcacggagagctgggcagagcgtgtctctgtgctgtaaggccacagggaagcccaggccagacaagtatttttggtatcataatgacacattgctggatccttccctctacaagcatgagagcaagctggtgctgaggaaactgcagcagcaccaggctggggagtacttttgcaaggcccagagtgatgctggggctgtgaagtccaaggttgcccagctgattgtcacagcatctgatgagactccttgcaacccagttcctgagagctatcttatccggctgccccatgattgctttcagaatgccaccaactccttctactatgacgtgggacgctgccctgttaagacttgtgcagggcagcaggataatgggatcaggtgccgtgatgctgtgcagaactgctgtggcatctccaagacagaggaaagggagatccagtgcagtggctacacgctacccaccaaggtggccaaggagtgcagctgccagcggtgtacggaaactcggagcatcgtgcggggccgtgtcagtgctgctgacaatggggagcccatgcgctttggccatgtgtacatggggaacagccgtgtaagcatgactggctacaagggcactttcaccctccatgtcccccaggacactgagaggctggtgctcacatttgtggacaggctgcagaagtttgtcaacaccaccaaagtgctacctttcaacaagaaggggagtgccgtgttccatgaaatcaagatgcttcgtcggaaagagcccatcactttggaagccatggagaccaacatcatccccctgggggaagtggttggtgaagaccccatggctgaactggagattccatccaggagtttctacaggcagaatggggagccctacataggaaaagtgaaggccagtgtgaccttcctggatccccggaatatttccacagccacagctgcccagactgacctgaacttcatcaatgacgaaggagacactttcccccttcggacgtatggcatgttctctgtggacttcagagatgaggtcacctcannnnnnnnnnnnnnnggcaaagtgaaggtccaccttgactcgacccaggtcaagatgccagagcacatatccacagtgaaactctggtcactcaatccagacacagggctgtgggaggaggaaggtgatttcaaatttgaaaatcaaaggaggaacaaaagagaagacagaaccttcctggtgggcaacctggagattcgtgagaggaggctctttaacctggatgttcctgaaagcaggcggtgctttgttaaggtgagggcctaccggagtgagaggttcttgcctagtgagcagatccagggggttgtgatctccgtgattaacctggagcctagaactggcttcttgtccaaccctagggcctggggccgctttgacagtgtcatcacaggccccaacggggcctgtgtgcctgccttctgtgatgaccagtcccctgatgcctactctgcctatgtcttggcaagcctggctggggaggaactgcaagcagtggagtcttctcctaaattcaacccaaatgcaattggcgtccctcagccctatctcaacaagctcaactaccgtcggacggaccatgaggatccacgggttaaaaagacagctttccagattagcatggccaagccaaggcccaactcagctgaggagagcaatgggcccatctatgcctttgagaacctccgggcatgtgaagaggcaccacccagtgcagcccacttccggttctaccagattgagggggatcgatatgactacaacacagtccccttcaacgaagatgaccctatgagctggactgaagactatctggcatggtggccaaagccgatggaattcagggcctgctatatcaaggtgaagattgtggggccactggaagtgaatgtgcgatcccgcaacatggggggcactcatcggcggacagtggggaagctgtatggaatccgagatgtgaggagcactcgggacagggaccagcccaatgtctcagctgcctgtctggagttcaagtgcagtgggatgctctatgatcaggaccgtgtggaccgcaccctggtgaaggtcatcccccagggcagctgccgtcgagccagtgtgaaccccatgctgcatgagtacctggtcaaccacttgccacttgcagtcaacaacgacaccagtgagtacaccatgctggcacccttggacccactgggccacaactatggcatctacactgtcactgaccaggaccctcgcacggccaaggagatcgcgctcggccggtgctttgatggcacatccgatggctcctccagaatcatgaagagcaatgtgggagtagccctcaccttcaactgtgtagagaggcaagtaggccgccagagtgccttccagtacctccaaagcaccccagcccagtcccctgctgcaggcactgtccaaggaagagtgccctcgaggaggcagcagcgagcgagcaggggtggccagcgccagagtggagtggtggcctctctgagatttcctagagttgctcaacagcccctgatcaactaagttttgtggtacttcaccctcttctgccctcatttcatgtgacagccattgtgagactgatgcacaaactgtcacttggttaatttaagcacttctgttttcgtgaatttgcttgtttgtttcttcatgcctttacttactttgtcccatgctactgattggcacgtggcccccacaatggcacaataaagcccctttgtgaaactgttctttaaatgaaacacaagaaattggccactggtaaaactctgcagcttcaactgtacttcatttaatgccattaatgcaaatatacttcctcttctttttgcatggttttgcccacctctgcaatagtgataatctgatgctgaagatcaaataaccaatataaagcatatttcttggccttgctccacaggacataggcaagccttgatcatagttcatacatataaatggtggtgaaataaagaaataaaacacaatacttttactggaaaaaaaaaaaaaaaaaatatttctttgctaaatttggaattctagtgcacattcaaagttaagctattaaatatagggtgatcatagttcctctaccaagtctggaaagaacatctcctggtatccacaattacaccaggttgctaactgtatttgtacatttccctttgcattcgcttttgttcttgctagaaacccagtgtagcccagggcagatgtcaataaatgcatactctgtatttcgattctgaaaaaaaaaaaaaaaaaa

SEQ ID NO: 6286 - DNA, 2069 bp, Homo sapiens
ctagcagcgggtcggagatcgaaggaacgggccaattgcggctgaaacgtctttggaaggaggaagggggtgagggagcatccctttgagtttcgcctcttctcgaggcggtggtgggaagggagacatacttaatactgccctcttaatccaacggaccttacatcgtgtagactgccgggagggcggcgggaaaagggcaagacgggagttggggaagggaaggagccaggaagccgcgcgggagggcgcgcgcgcgcgcccctttttcagcagtgtggcggggtcgcacgcacgcccgcctcggcggctgggcgcgatttgcgacagtggggggggcggtggaggtggcggcggcagcggcaactttgcggcaagctcgggccgggcttgcttgacggcggtgtggcggaggccccgccccaggcggcaggaacctggagggaggcggaggaatatgtccgagagggaagtgtcgactgcgccggcgggaacagacatgcctgcggccaagaagcagaagctgagcagtgacgagaacagcaatccagacctctctggagacgagaatgatgacgctgtcagtatagaaagtggtacaaacactgaacgccctgatacacctacaaacacgccaaatgcacctggaaggaaaagttggggaaagggaaaatggaagtcaaagaaatgcaaatattctttcaaatgtgtaaatagtctcaaggaagatcataaccaaccattgtttggagttcagtttaactggcacagtaaagaaggagatccattagtgtttgcaactgtaggaagcaacagagttaccttgtatgaatgtcattcacaaggagaaatccggttgttgcaatcttacgtggatgctgatgctgatgaaaacttttacacttgtgcatggacctatgatagcaatacgagccatcctctgctggctgtagctggatctagaggcataattaggataataaatcctataacaatgcagtgtataaagcactatgttggccatggaaatgctatcaatgagctgaaattccatccaagagatccaaatcttctcctgtcagtaagtaaagatcatgctttacgattatggaatatccagacggacactctggtggcaatatttggaggcgtagaagggcacagagatgaagttctaagtgctgattatgatcttttgggtgaaaaaataatgtcctgtggtatggatcattctcttaaactttggaggatcaattcaaagagaatgatgaatgcaattaaggaatcttatgattataatccaaataaaactaacaggccatttatttctcagaaaatccattttcctgatttttctaccagagacatacataggaattatgttgattgtgtgcgatggttaggcgatttgatactttctaagtcttgtgaaaatgccattgtgtgctggaaacctggcaagatggaagatgatatagataaaattaaacccagtgaatctaatgtgactattcttgggcgatttgattacagccagtgtgacatttggtacatgaggttttctatggatttctggcaaaagatgcttgcattgggcaatcaagttggcaaactttatgtttgggatttagaagtagaagatcctcataaagccaaatgtacaacactgactcatcataaatgtggtgctgctattcgacaaaccagttttagcagggatagcagcattcttatagctgtttgtgatgatgccagtatttggcgctgggatcgacttcgataaaatacttttgcctaatcaaaattagagtgtgtttgttgtctgtgtaaaatagaattaatgtatcttgctagtaagggcacgtagagcatttagagttgtctttcagcattcaatcaggctgagctgaatgtagtgatgtttacattgtttacattctttgtactgtcttcctgctcagactctactgcttttaataaaaatttatttttgtaaaaaaaaaaaaaaagttactttcattgtggtgaaaaaaagttaaaagtaataaaattatgccttatcttttaaa

SEQ ID NO: 6287 - DNA, 2011 bp, Homo sapiens
  misc_feature (48)..(72): n is a, c, g, or t
gctctcattatctgggaagtgttcttaaaaataagaattaatagcaannnnnnnnnnnnnnnnnnnnnnnnnatttgcctgatattttttttctttgctcttgtgttttgtatgtagttataaatactgtagatttttttttggtgatttttggccaaagttgttgttctatttatacattttaatgtcttaagacattttttcaatatcacaaaaagattttactgcgtattttgcaaagaaaaaaagctcactacctttagcttgcacatacttgcaaagttaattaaaaggctttttgttttaaaggggattttgtaaaatatccatataaataatgtatttatctttcgaatttgtacattgcttttcccttcttcctcttccttccacccccaatttattttattgtgtatgtttgctacgtgaaaagtgcgtatttgtttggtcacctacacttgtattagctgtttcaatgtgatttttaaacatttcatttatagttatttttagtattgttataaaccatgcttcagtttttttaatttccacccaaaagtcattgtctatttttgtattatttgtaagttaagaagttttttccaatatatggcaaaaaaaaaaaaatagtagcatattattcttgtagtatttagttcagtagatttaaaaaaaaatgtatcctttgctttggaagcttacaaaacaaccctaatgctgttttactctattaatatgcatggaatctctccctttggagtgacgcattttgtgcattaaattctagggagaaacttcatagaaatcaatgaacatactttctttcttaagtctgcttgtatatttcctctgtctttcacataaatataaaccagcagattggatgccttaacaatgcaaatcatattcatttcacttgtacattgtaactgtgcaccagaactgtcagtcatcactaacattctaagaaaaaaagaaaaagaaaaaaagaaaaaaaaaaaaacaaagaaatcgaaaagcacaaaagaactgttttgttaccttaagacaatgtaactttttctagtagagcaagaaatcatttacaacaatgctgcaactgtgcatgcccccatatggattttgcaatggtcttcactaggctgtcaagagtgcgatttttatgggttggggtgggtgggggaggggagttgtgggagggtaggggagggaggaaagctgtttttcatggtgagaaataataatgatgactaataataataaaaaaaactggaaaatgtaagcaaggtggacgcattgcttctcggtactcagaaaggttatctgaatttgcgtggtaagcgctggcctgaagatgtacacaagttaaagccatattttatctggtgagccccttaactgtttctgaaggaatgaacggtcagccgggaaggtgtccggcttagaccttgacaacagacactacccatctgtcagccatgtgcagtggttagaactcttcttgaaagtccaaagagcctttaaaatgtgtataatttgtgttttgttgcttctatttctatcgattagatgaaaagacattctggctctctgatcctctttcttctccacaaaagttttacaaataaaagatgttcccctaaatacagaatatggctttaagaagaaaatgaaatgaagaattaaattaagatttcagtgttgggggaaaaaatacagcttctggatgactggattgcataacattgccctggcctcacattgtactaggatgcagcttaaatgaagtcatctctaaatctactaacctttcaccttcttatcaaaactttttgaatagacacacactgtacagttcaattgttagagaacctaactactgtagagattgttaaatttttttttttttttttgcaaaaattcaagctgtaaaaacttttcaactttcacaatatttaattaaagttacttcctgtttgtgaaaaaaaaaaaaaaaaaaaaaaaaaaaaaa

SEQ ID NO: 6288 - DNA, 1538 bp, Homo sapiens
caacttgggctactgaactacatgcataaactaaaaactaacagctacaaacttttaagatttctctaatattggtatgtaacacaggataaagttattcttgtcattttgaactgtagagtcctatttcagtgtgatgaatcactgttgctttgaaaaatctcattatttctgggccgggcatggtggctcacccctgtaatcccagcactttgggaggccaaggcgggtggatcatgaggtcaggagatcaagaccatcctggccaacatggtgataccccgtctctactaaaaatacaaaaaaattagttgggcatggtggcatgcacctgtagtcccagctacctgggaggctgaggcaggagaattgcttgaacctgggaggcagaggttgcagtgagccaaaatcatgccactgcactcccgcctggcaacagagcaagagtctgtctcaaaaaaaaaaaagaaaaaaggaaaaaagaaaaatctcattatttcaaaatgatagacatataccaaaaacaagtctataatgtgagtagttactaaaatttacacatcttaaaagtgtgtaaatgcttaaatttcagaattaccatcagaacctcaattgacattcctttgaataggctaataagtgacaaataagattaataagatttttcaaaatcgccaggactggtgaatataaatgatgattgaactggaataatattggggaccaaatcaaatgaatgattaaattatgaagctcatatccttttgaaggtagttgcaaagagacatttcaaaactgccctaggccattgcagcatccttagatgggacgcataatcattaccttaaagcatcaccactcattttgaccatatagattttattatgttagtttaaaaggtcaatcagcctcatgactttatagttatgtcttgtatttaaaaacattttttatacatttggttatgttgataaaccaaaaacatttgattaataaaatatctatttgaataaattatgagctatcctttcaaacagctattggcaagttttaaacccaaaatatatacacatagttctgtaataaaactgtttgacttctcaagtaacatgacttccttatttctgaacgtactggttactttcaaaatgaatttttattgagattttccattaactatttttttcaaagactcaaattttgtaccaagtaaatccaggcctttatgtacaaacatgttgtttgttttatttggggctgggggaggtatatgatgagcagacttctcggaattcataataaattttctaaaagcctaaaaaaaaaaaaaaaaaaaaaaaaaaaaaaaaatacaaaaaacataacccacgccccaatatcccccccggggcgggccccatcaaaaaaattccccccaagggggcccaggcttaacgcgtaccccacttttttttggtaacaaaaggggtgccccaataaaggggggacccccacatttaacacccctggggccccttgggcccccccccacttataac

SEQ ID NO: 6289 - DNA, 2386 bp, Homo sapiens
agacacctctgccctcaccatgagcctctggcagcccctggtcctggtgctcctggtgctgggctgctgctttgctgcccccagacagcgccagtccacccttgtgctcttccctggagacctgagaaccaatctcaccgacaggcagctggcagaggaatacctgtaccgctatggttacactcgggtggcagagatgcgtggagagtcgaaatctctggggcctgcgctgctgcttctccagaagcaactgtccctgcccgagaccggtgagctggatagcgccacgctgaaggccatgcgaaccccacggtgcggggtcccagacctgggcagattccaaacctttgagggcgacctcaagtggcaccaccacaacatcacctattggatccaaaactactcggaagacttgccgcgggcggtgattgacgacgcctttgcccgcgccttcgcactgtggagcgcggtgacgccgctcaccttcactcgcgtgtacagccgggacgcagacatcgtcatccagtttggtgtcgcggagcacggagacgggtatcccttcgacgggaaggacgggctcctggcacacgcctttcctcctggccccggcattcagggagacgcccatttcgacgatgacgagttgtggtccctgggcaagggcgtcgtggttccaactcggtttggaaacgcagatggcgcggcctgccacttccccttcatcttcgagggccgctcctactctgcctgcaccaccgacggtcgctccgacggcttgccctggtgcagtaccacggccaactacgacaccgacgaccggtttggcttctgccccagcgagagactctacacccgggacggcaatgctgatgggaaaccctgccagtttccattcatcttccaaggccaatcctactccgcctgcaccacggacggtcgctccgacggctaccgctggtgcgccaccaccgccaactacgaccgggacaagctcttcggcttctgcccgacccgagctgactcgacggtgatggggggcaactcggcgggggagctgtgcgtcttccccttcactttcctgggtaaggagtactcgacctgtaccagcgagggccgcggagatgggcgcctctggtgcgctaccacctcgaactttgacagcgacaagaagtggggcttctgcccggaccaaggatacagtttgttcctcgtggcggcgcatgagttcggccacgcgctgggcttagatcattcctcagtgccggaggcgctcatgtaccctatgtaccgcttcactgaggggccccccttgcataaggacgacgtgaatggcatccggcacctctatggtcctcgccctgaacctgagccacggcctccaaccaccaccacaccgcagcccacggctcccccgacggtctgccccaccggaccccccactgtccacccctcagagcgccccacagctggccccacaggtcccccctcagctggccccacaggtccccccactgctggcccttctacggccactactgtgcctttgagtccggtggacgatgcctgcaacgtgaacatcttcgacgccatcgcggagattgggaaccagctgtatttgttcaaggatgggaagtactggcgattctctgagggcagggggagccggccgcagggccccttccttatcgccgacaagtggcccgcgctgccccgcaagctggactcggtctttgaggagccgctctccaagaagcttttcttcttctctgggcgccaggtgtgggtgtacacaggcgcgtcggtgctgggcccgaggcgtctggacaagctgggcctgggagccgacgtggcccaggtgaccggggccctccggagtggcagggggaagatgctgctgttcagcgggcggcgcctctggaggttcgacgtgaaggcgcagatggtggatccccggagcgccagcgaggtggaccggatgttccccggggtgcctttggacacgcacgacgtcttccagtaccgagagaaagcctatttctgccaggaccgcttctactggcgcgtgagttcccggagtgagttgaaccaggtggaccaagtgggctacgtgacctatgacatcctgcagtgccctgaggactagggctcccgtcctgctttgcagtgccatgtaaatccccactgggaccaaccctggggaaggagccagtttgccggatacaaactggtattctgttctggaggaaagggaggagtggaggtgggctgggccctctcttctcacctttgttttttgttggagtgtttctaataaacttggattctctaacctttaaaaaaaaaaaaaaaaaaaaaaaaaaaaaaaaaaaaaaaaaaaaaaaaaaaa

SEQ ID NO: 6290 - DNA, 959 bp, Homo sapiens
ggggaccctgctttctgcattcttctctccacatgcctctctgtacttacagcccccaatggcccccaaaaagccagagcccaagaaggatgatgccaaggcagcccccaaggcagctccagctcccgcacctccccctgagcctgagcgccctaaggaggtcgagtttgatgcttccaagatcaagattgagttcacacctgagcagattgaagagttcaaggaagccttcatgctgttcgaccgcacacccaagtgtgagatgaagatcacctacgggcagtgtggggatgtcctgcgggcgctgggccagaaccccacacaggcagaagtgctccgtgtcctggggaagccaagacaggaagagctcaataccaagatgatggactttgaaactttcctgcctatgctccagcacatttccaagaacaaggacacaggcacctatgaggacttcgtggaggggctgcgggtcttcgacaaggagggcaatggcactgtcatgggtgctgagcttcgccacgtgctggccacgctgggtgagaggctgacagaagacgaagtggagaagttgatggctgggcaagaggactccaatggctgcatcaactatgaagcatttgtgaagcacatcatgtccagctaaacctcgtgcccaggaagcccagggaaggctgtgcagggacgtctcatctcccatgtgtgatgctgacaccagcggcctggagtcgtgggaaggaggggagccttaccaagactcctgcaaaaacccttggacctctccacgtggttgccgtctctggcccctctcaggctgtgcttacctgtgacagcagctctgtccccaccccatgggcctcatgaataaatggcttcttgccggcaaaaaaaaaaaaaaaaaaaaaaaaaaaaaaaaaaaaaaaaaaaagaaaaaaaaaaaaaaaaaaaaaaaaaaaaaa

SEQ ID NO: 6291 - DNA, 4408 bp, Homo sapiens
actaactcgcggctgcaggatcagcgtctggaagcagacgtttcggctacagacccagagaggaggagctggagatcaggaggcgtgagccgccaagagtttgcagaatctgtggtgtgaatgaactgggggcacctgggcgcacagatcgccccccttcccccgccccgggccacagttgagtagtggtacatttttttcaccctcttgtgaagaatttctttttattattatttgtcgtaaggtcttttgcacaatcacgcccacatttggggttggaaagccctaattaccgccgtcgctgatggacgttggaaacggagcgcctctccgtggaacagttgcctgcgcgccctcgccggaccggcggctccctagttgcgccccgaccaggccctgcccttgctgccggctcgcgcgcgtccgcgccccctccattcctgggcgcatcccagctctgccccaactcgggagtccaggcccgggcgccagtgcccgcttcagctccggttcactgcgcccgccggacgcgcgccggaggactccgcagccctgctcctgaccgtccccccaggcttaacccggtcgctccgctcggattcctcggctgcgctcgctcgggtggcgacttcctccccgcgccccctccccctcgccatgaagaagtccattggaatattaagcccaggagttgctttggggatggctggaagtgcaatgtcttccaagttcttcctagtggctttggccatatttttctccttcgcccaggactttctcaaggacagaagaaactgtgccacttgtatcaggaccacatgcagtacatcggagaaggcgcgaagacaggcatcaaagaatgccagtatcaattccgacatcgaaggtggaactgcagcactgtggataacacctctgtttttggcagggtgatgcagataggcagccgcgagacggccttcacatacgcggtgagcgcagcaggggtggtgaacgccatgagccgggcgtgccgcgggggcgagctgtccacctgcggctgcagccgcgccgcgcgccccaaggacctgccgcgggactggctctggggcggctgcggcgacaacatcgactatggctaccgctttgccaaggagttcgtggacgcccgcgagcgggagcgcatccacgccaagggctcctacgagagtgctcgcatcctcatgaacctgcacaacaacgaggccggccgcaggacggtgtacaacctggctgatgtggcctgcaagtgccatggggtgtccggctcatgtagcctgaagacatgctggctgcagctggcagacttccgcaaggtgggtgatgccctgaaggagaagtacgacagcgcggcggccatgcggctcaacagccggggcaagttggtacaggtcaacagccgcttcaactcgcccaccacacaagacctggtctacatcgaccccagccctgactactgcgtgcgcaatgagagcaccggctcgctgggcacgcagggccgcctgtgcaacaagacgtcggagggcatggatggctgcgagctcatgtgctgcggccgtggctacgaccagttcaagaccgtgcagacggagcgctgccactgcaagttccactggtgctgctacgtcaagtgcaagaagtgcacggagatcgtggaccagtttgtgtgcaagtagtgggtgccacccagcactcagccccgctcccaggacccgcttatttatagaaagtacagtgattctggtttttggtttttagaaatattttttatttttccccaagaattgcaaccggaaccattttttttcctgttaccatctaagaactctgtggtttattattaatattataattattatttggcaataatgggggtggggaccaagaaaaatatttattttgtggatctttgaaaaggtaatacaagacttcttttgatagtatagaatgaaggggaaataacacataccctaacttagctgtgtggacatggtacacatccagaaggtaaagaaatacattttctttttctcaaatatgccatcatatgggatgggtaggttccagttgaaagagggtggtagaaatctattcacaattcagcttctatgaccaaaatgagttgtaaattctctggtgcaagataaaaggtcttgggaaaacaaaacaaaacaaaacaaacctcccttccccagcagggctgctagcttgctttctgcattttcaaaatgataatttacaatggaaggacaagaatgtcatattctcaaggaaaaaaggtatatcacatgtctcattctcctcaaatattccatttgcagaaatgacagtacttattaattgagtccctaaggaatattcagcccgctacatagatagctttttttttttttttttttttaataaggacacctctttccaaacagtgccatcaaatatgttcttatctcagacttacgttgttttaaaagtttggaaagatacacatctttcataccccccttaggcaggttggctttcatatcacctcagccaactgtggctcttaatttattgcataatgatattcacatcccctcagttgcagtgaattgtgagcaaaagatcttgaaagcaaaaagcactaattagtttaaaatgtcacttttttggtttttattatacaaaaaccatgaagtactttttttatttgctaaatcagattgttcctttttagtgactcatgtttatgaagagagttgagtttaacaatcctagcttttaaaagaaactatttaatgtaaaatattctacatgtcattcagatattatgtatatcttctagcctttattctgtacttttaatgtacatatttctgtcttgcgtgatttgtatatttcactggtttaaaaaacaaacatcgaaaggcttatgccaaatggaagatagaatataaaataaaacgttacttgtatattggtaaaaggtttcaattgtccttcagataattcatgtggagatttttggagaaaccatgacggatagtttaggatgactacatgtcaaagtaataaaagagtggtgaattttaccaaaaccaagctatttggaagcttcaaaaggtttctatatgtaatggaacaaaaggggaattctcttttcctatatatgttccttacaaaaaaaaaaaaagaaatcaagcagatggcttaaagctggttataggattgctcacattcttttagcattatgcatgtaacttaattgttttagagcgtgttgctgttgtaacatcctagagaagaatgaaaagggcacatgcttttatccgtgaccagatttttagtccaaaaaaatgtatttttttgtgtgtttaccactgcaactattgcacctctctatttgaatttactgtggaccatgtgtggtgtctctatgccctttgaaagcagtttttataaaaagaaagcccgggtctgcagagaatgaaaactggttggaaactaaaggttcattgtgttaagtgcaattaatacaagttattgtgcttttcaaaaatgtacacggaaatctggacagtgctgcacagattgatacattagcctttgctttttctctttccggataaccttgtaacatattgaaaccttttaaggatgccaagaatgcattattccacaaaaaaacagcagaccaacatatagagtgtttaaaatagcatttctgggcaaattcaaactcttgtggttctaggactcacatctgtttcagtttttcctcagttgtatattgaccagtgttctttattgcaaaaacatatacccgatttagcagtgtcagcgtattttttcttctcatcctggagcgtattcaagatcttcccaacacaagaaaattaataaaaaatttatatataggcagcagcaaaagagccatgttcaaaatagtcattatgggctcaaatagaaagaagacttttaagttttaatccagtttcatccgttgagttctgtgcacctactgacctcccgcaactggaactgtgcaagactttaatatgccacactaaaaacttctcccccgacagattacccccaaacccacacttacattctgaccttcccaacacatctactcacccacccctgtaattcctctacaccacgtaccctaataaccgtaatgtgcatactcataactttaaaccaccctctccctctcctcctctccaccactagatccaccctccctcaacacgaacccacccgtccccaccaccaccatcctcctctacatctcccacccacactccatcccctccactaataccgtacccaactttaaactcactctcaactgacctactttatgcactgacaagcaccagcaccacccatccgacgcgcatag

SEQ ID NO: 6292 - DNA, 4120 bp, Homo sapiens
  misc_feature (1338)..(1406): n is a, c, g, or t
  misc_feature (2326)..(2341): n is a, c, g, or t
ttaaagaagggggggcctgagcgaaggggttggaagcggagtgattccccacccctgctccatctagctctttccagtgcagccactgccgccgcccaggagccctcgtcccctgccttgtccccctactcgttcccgctcccacggcatggagcaggacactgccgcagtggcagccaccgtggcagccgcggatgcgaccgccactatcgtggtcatagaggacgagcagcccgggccgtccacctctcaggaggagggagcggccgccgcggccaccgaagccaccgcggccacggagaagggcgagaagaagaaggagaaaaacgtttcttcatttcaactcaaacttgctgctaaagcgcctaaatctgaaaaggaaatggacccagaatatgaagagaaaatgaaagccgaccgagcaaagagatttgaatttttactgaagcagacagaactttttgcacatttcattcagccttcagcacagaaatctccaacatctccactgaacatgaaattgggacgtccccgaataaagaaagatgaaaagcagagcttaatttctgctggagactaccgccataggcgcacagagcaagaagaagatgaagagctactgtctgagagtcggaaaacatctaatgtgtgtattagatttgaggtgtcaccttcatatgtgaaaggggggccactgagagattatcagattcgaggactgaattggttgatctctttatatgaaaatggagttgggaaaactttacaaacaattgctttgcttggttacctgaaacactaccgaaatattcctggacctcacatggttttagttccaaagtctactttacacaactggatgaatgaatttaaacgatgggtcccatctctccgtgtcatttgttttgtcggagacaaggatgccagagctgcttttattcgtgatgaaatgatgccaggagagtgggatgtttgcgttacttcttatgagatggtaattaaagaaaaatctgtattcaaaaagtttcactggcgatacctggtcattgatgaagctcacagaataaagaatgaaaaatctaagctttcagagattgttcgtgagttcaagtcgactaaccgcttgctcctaactggaacacctttgcagaataacctgcatgaactgtgggccttactcaactttttattgcctgatgtctttaattctgcagatgactttgattcttggtttgacactaaaaattgtcttggtgatcaaaaactcgtggaaagacttcatgcagttttaaaaccatttttgttacgccgtataaaaactgatgtagagaagagtcnnnnnnnnnnnnnnnnnnnnnnnnnnnnnnnnnnnnnnnnnnnnnnnnnnnnnnnnnnnnnnnnnnnnntcctgatgaaagatattgatgttttaaactcttctggcaagatggacaagatgcgactcttaaacattctgatgcagcttcgaaagtgttgtaatcatccatatctgtttgatggtgctgaacctggtccaccttataccactgatgagcatattgtcagcaacagtggtaaaatggtagttctggataaactattggccaaactcaaagaacagggttcaagggttctcattttcagccagatgactcgcttgctggatattttggaagattattgcatgtggcgtggttatgagtattgtcgactggatggacaaaccccgcatgaagaaagagaggataaattcctagaagtggaatttctgggtcaaagggaagcaatagaggcttttaatgctcctaatagtagcaaattcatctttatgctaagtaccagggctggaggtctcggaattaacctggcaagtgctgatgtggttatactatatgattcagactggaacccacaggttgatctacaagctatggatcgagcacatcgtattggtcagaagaaaccagtacgtgtattccgtctcatcactgacaacactgttgaagagaggattgtagaaagagctgagataaaactgagactcgattcaattgttatacaacaaggaagactcattgaccaacagtctaacaagctggcaaaagaggaaatgttacaaatgatacggcatggagccacccatgtttttgcttctaaagagagtgagttgacagatgaagacattacaactattctggaaagaggggaaaagaagactgcagagatgaatgaacgcctgcaaaaaatgggagagtcttctctaagaaattttagaatggacattgaacaaagtttatacaaatttgagggagaagattatagagannnnnnnnnnnnnnnnatggtggaatggattgaacctcctaaacgagaacgcaaagcaaactacgcagtggatgcctactttagagaggctttgcgtgtcagcgagccaaagattccaaaggctccacggcctccaaaacagccaaatgttcaggattttcaatttttcccaccacgcttatttgagctcctggaaaaggaaattctttattatcggaagacaataggctataaggttccaaggaatcctgatatcccaaatccagctctggctcaaagagaagagcaaaaaaagattgatggagctgaacctcttacaccagaagagactgaagaaaaggaaaaacttctcacacagggtttcacaaactggactaaacgagattttaaccagtttattaaagctaatgagaaatatggaagagatgacattgataacatagctcgagaggtagagggcaaatcccctgaggaggtcatggagtattcagctgtattttgggaacgttgcaatgaattacaggacattgagaaaattatggctcaaattgaacgtggagaagcaagaattcaacgaaggatcagtatcaagaaagccctggatgccaaaattgcaagatacaaggctccatttcatcagttgcgcattcagtatggaaccagcaaaggaaagaactatactgaggaagaagatagattcttgatttgtatgttacacaaaatgggctttgatagagaaaatgtatatgaagaattaagacagtgtgtacgaaatgctccccagtttagatttgactggtttatcaagtctaggactgccatggaattccagagacgctgtaacactctgatttcattgattgagaaagaaaatatggaaattgaggaaagagagagagcagaaaagaagaaacgggcaactaaaactccaatggtaaaattttcagcattttcctaacttttagatttaacattgttgggccatttaaaatgtgcatattggagcagaacattaaatctgtttccattttagtcacagaaaagaaaagcagagtcagctactgagagctctggaaagaaggatgtcaagaaggtgaaatcctaaagcctagaaataaagttttaaatgggaaactgctattttcttgttcccatcttcaaatgctaattgccagttccagtgtattcatggtactctaagaaaaatctctttggttttgatttcttgcatattttatatattttacaatgctttctacctgaaatgtgtagctttatattttatggcattctagtatttttgtgtactgtattttgtgcatttcatgtcttcatcaaaatcctctcagtccttgttcttttgaagcttgtgctgaggttttagcttttctatgttttatatgccgctgctttgaaagagaacctagattctatagttgtattattgttgtttcatactttaaatttatatggctgtggaaaaacgaattaaaatgttttgaggagaaagactttttcacttctttgttgctttcttttctattgagtctgggcttgtttgtgttactgcatactgtgattagcataataattgtttctttgaggtcatctaaatatttttttcctaaaggaataaagggtgaggaaagaaaaatattaaaaaagctaatatttgatactgtgcttgctgtcagtatgcattacatttaaattattctctattcaagtgggaaaatataataaagaaatgtctataagaaatttaaaaaaaaaaaatcaagggttggcgatccgg

SEQ ID NO: 6293 - DNA, 4272 bp, Homo sapiens
  misc_feature (801)..(825): n is a, c, g, or t
  misc_feature (1197)..(1214): n is a, c, g, or t
  misc_feature (3179)..(3193): n is a, c, g, or t
  misc_feature (3365)..(3395): n is a, c, g, or t
tacggctgcgagaagacgacagaaggggagtcaccatgagggcgctggtcctgctcggctgcctcctggcctcgctcctgttctcaggacaagcagaagagacggaggatgcaaatgaagaagccccattgagggaccgctcccacatcgagaagaccctcatgctgaatgaggacaagccatccgatgactactctgcggtgctgcagcggcttcggaagatctaccactcatccatcaagcctctggagcagtcctacaagtacaatgagctccggcagcatgagatcacagatggagagattacctccaagcccatggtactgttcctgggaccgtggagtgttggtaaatctaccatgataaactacctccttgggctggaaaatactcgctatcagctctatacaggcgctgaacccaccacctctgagttcacggtcctcatgcatgggcctaagctgaaaaccatcgagggcattgtcatggctgctgacagcgcccgctccttctcaccccttgagaagtttggccagaatttcctagagaagctgattggcattgaggttccccacaaacttctggagagggtcacttttgtggatacaccaggcatcatcgagaaccgcaagcagcaagaaagaggctaccccttcaacgacgtgtgccagtggttcatcgacagagctgacctcatctttgtcgtctttgacccaacaaagctggatgtgggtctagagctggagatgctcttccgccagttgaaggggcgtgaatcccagataaggatcatcctgaacnnnnnnnnnnnnnnnnnnnnnnnnntgctcatgcgggtttacggggccctcttctggagcttggcccctctcatcaatgtcacagagcccccaagggtttacgtcagctccttctggccacaagagtataagccggacacccatcaggaactgttcctccaagaagagatctccctcctagaagacctgaatcaggtgatcgagaacagactggagaacaagattgccttcatccgccagcacgccatccgggtccgcatccacgccctcctggttgaccgctacctgcagacttacaaggacaaaatgaccttcttcagtgatggagaactggtctttaaggacattgtggaagatcccgataaattctacatcttcaagaccatcctggcaaagnnnnnnnnnnnnnnnnnngaccttcccaaccgcgaggcctataaggacttcttcggcatcaatcccatttccagtttcaaactgccctcccagcagtgctcctacatgggaggttgctttctggagaagattgagcgggccatcactcaggagcttccgggcctcctgggtagcctcgggctcgggaagaatccaggtgctctcaactgtgacaaaacagggtgtagcgaaacaccaaaaaagtcgctacaggaagcactaggtggtggagcggtccttgggttcctgttggtgaatcagcttgtgtcctaactgtctgagaagtcctggtttattaaccctttgagccacactggcaggaattattacacagtggagagttgggagatcattgaggccaggggtcggggcaggtgtgtgggtctagggaggagagtggaaactgtgaattcctgtgtgcttgtcttgttgcttcaatgaggaggcctgattgaggcaagtcagcctccacctgcttttcctgggtcctgtcttggaaggacagagagcagctaaattctagtgtatcttaaatcagtgagggtcaaataagctaaaagcagctgaaattcctttgttccctgtgagctgggaaaacagcgaaggcctgagtcgtagagattgtcaggtccattttggcttctttccacacccacagtctcgcgtttgttccccagccctcggctgcctcttaactttgggttgactttcaacagtgaatagtctcttgggtctgaatatacctgggtttgtttttgtgtttttgagacggagtctcgctctgtcggccaggttggagtgcagtggtgcaatctcagctcactgcaacctccccctcctgggttcaagcgattctcctgcctcagcctcctgagtagctgagattataggcctaccaccatgcccagccaatttttgtatttttagtagaaacgggacttcaccatgttgcccaggctggcctcgaactcctgacctcaagtgatccacccgcctcggcctcccaaagtgctgggattacaggcatgagctgccgcacccggcctccacctgggttttgagccaatcccccggacttgctcctggtttcctcaaggggtggggcagtggtttaggacactcgacaactaagaacaggagttcccaggaaggacaaggatctgcctcccccactgccacttctctgatgtgttcctcaaagctggctcgagggctcgatcccttcatcggacccaggaggggactggttggtgtatccaggtaatttactcttgggagtgactgtagtgaaggtcgtggaagggctcagagggttaattggcttgcagtgcgtctttgtctattgcatgtcttggaaaactcagatcccaaaggcgctgggtttcagagaggacagtggagaccttgctccttttccttaggccgccagtctctcaaatttcagaggaggctgtttccacaactcccctatggaaacacttggcagcggagttgctcctttgcagtttccacaccatggcttttcctttcctttcttctccattccctgatgcatcaacacttacttggagcaatttcctaggagtcagaaccagcaccagccactcggtgtcggtggccaccaaggcttaacattgaccttcccgcctgaccttgatgcagatgtccactgaacacaccgcaggaaagccagggccttcaataccaataagtgtgaatatgtgtgtatgttgtccaagagagattagggagatcacatagactctagggagtagagaacttgtaacagtcttgcaaggctagcatgcacggctccacagcaggtggtggggagcagaggggcaggacctgcagggaagaagcagcctttggatggtgaattgtgcatggtgcacagtctgtgcatgcccaggagacccagcccgggctgcctcgaggggctcnnnnnnnnnnnnnnngccgcttctcttgggaacaagctgtcctgggggccttacccacgaggcaggagtcaggatgcaccagctcagcaccaggaagtcatcctggacccaggacagtggaaaggcaggcagagggagaggcactctgaggtcaggcagggtaagccagttggcagtcaggttaggnnnnnnnnnnnnnnnnnnnnnnnnnnnnnnncggttctcagaattgttatcactctggtgcatgctgtcacaggggccgttgcgtttggctttgtggagggcctggacccttccacaagaacacccgaggttccagggcactcaggacaatgtttccaaggaacgagtcgaccaggaaagaacagtgagttctgcaaggggcatccacggagcctgtgataggggctgatgagatggaatctgtcctggacttttcttctcattaaccaccctccgcaaaccccagaacccctcgcctcatctctgtactgtctgccctcttgggggaggggccctcccactttcccctgcctgctcctccatgctgtgagctgctttggcagatctgtttttctgtgtagtcaggggaaaaacaaaaaaagatgcacaactgtgtgggcattgtcatagctgttggtgtcaccactgctttgggggaaatggctgggatgaggctaatacattcatgcaatatttatattttcagggggctgcgttatcagcatgctctccctgccttgggcttttctttccgtcatgttttccttttcgtgttccttctctgatttctcttgtctctgctgctcacaggcctgcccatcagtcagtacagatactcagtgtctggtttctggccagctccgtggagggggctttaagcagaattctgactctttggggtgggggattaggaactgggggaaacttaatgatccagagattcccccaagaggagtgtctggaaggatctgtgcctggacagtggcagaacctttccagtgttcttttggttctgatttcatcagtctcaataaagttccgatctctcttcaaaaaaaaaaaaaaaaaaaaaaaaaaaagtatacgcg

SEQ ID NO: 6294 - DNA, 1898 bp, Homo sapiens
  misc_feature (1474)..(1514): n is a, c, g, or t
ggtggcgaattcggcacgaggctctggttcccttccacgctgtggaagctttgttcttttggtcttcatgataaatcttgctgctgctcactcgttgggtccgtgccacctttaagagctgtaacactcaccgcgaaggtctgcaacttcactcctggggccagcaagaccacgaatgcaccgagaggaatgaacaactctggacacaccatctttaagaaccgtaatactcaccgcaagggtctgcaacttcattcttgaagtcagtgaggccaagaacccatcaattccgtacacattttggtgactttgaagagactgtcacctatcaccaagtggtgagactattgccaagcagtgagactattgccaagtggtgagaccatcaccaagcggtgagactatcacctatcgccaagtggcctgattcagcaggaagcatctcagacaccaaccactatgctgtcagcagttgcccggggctaccagggctggtttcatccctgtgctaggctttctgtgaggatgagcagcaccgggatagacaggaagggcgtcctggctaaccgggtagccgtggtcacggggtccaccagtgggatcggctttgccatcgcccgacgtctggcccgggacggggcccacgtggtcatcagcagccggaagcagcagaacgtggaccgggccatggccaagctgcagggggaggggctgagtgtggcgggcattgtgtgccacgtggggaaggctgaggaccgggagcagctggtggccaaggccctggagcactgtgggggcgtcgacttcctggtgtgcagcgcaggggtcaaccctctggtagggagcactctggggaccagtgagcagatctgggacaagatcctaagtgtgaacgtgaagtccccagccctgctgctgagccagttgctgccctacatggagaacaggaggggtgctgtcatcctggtctcttccattgcagcttataatccagtagtggcgctgggtgtctacaatgtcagcaagacagcgctgctgggtctcactagaacactggcattggagctggcccccaaggacatccgggtaaactgcgtggttccaggaattatcaaaactgacttcagcaaagtgtttcatgggaatgagtctctctggaagaacttcaaggaacatcatcagctgcagaggattggggagtcagaggactgtgcaggaatcgtgtccttcctgtgctctccagatgccagctacgtcaacggggagaacattgcggtggcaggctactccactcggctctgagaggagtgggggcggctgcttaacttgttgggtccccggcccaggagcctgagggggtgtctaggtgatcatttggatctggaggcagagtctgccattctgccagactagcaatttgggggcttactcatgctaggcttgaggaagaagaaaaacgcttcggcattctccnnnnnnnnnnnnnnnnnnnnnnnnnnnnnnnnnnnnnnnnncaatggggttcttggtgtgggtctggggagctgaaggattttatggagctggtgctttggaggaatcttaagggaaaggagtagaagctcaggcctttgaaggatttcagctcctcctctctgtaatttggtgctttaagcatttttttcctaaaataaactcaaatttatcctcaaaaaaaaaaaaaaaaaaaaaaaacaaaaactccgaagactaaggttctccttcttggcttccgccctgggtgggcgggatcttaccccgggcccccggggcctttccggccccccttgcgccccgcgggaaccccccccggttcccaacgggccgggtgtcctaggggccctccttccccagaaatcggccgcctctttcgggcaatg

SEQ ID NO: 6295 - DNA, 2377 bp, Homo sapiens
  misc_feature (12)..(26): n is a, c, g, or t
  misc_feature (853)..(866): n is a, c, g, or t
  misc_feature (1472)..(1490): n is a, c, g, or t
  misc_feature (1793)..(1813): n is a, c, g, or t
  misc_feature (2007)..(2022): n is a, c, g, or t
  misc_feature (2097)..(2113): n is a, c, g, or t
  misc_feature (2224)..(2238): n is a, c, g, or t
ttcccttaggcnnnnnnnnnnnnnnnattgtttctgccatcaaggaaaacttccaattcaagaaggatggacactgcttgaaagaaatctaccttgtggatgtatctgagaagactgttgaggcctttgcagatgctgttggtgaaagagggtgtgcagaatgctaagaccgatgttgttgtcaactccgttcccttggatctcgtgcttagtagagggcctctttctaagtccctcttggaaaaagctggaccagagctccaggaggaattggacacagttggacaaggggtggctgtcagcatgggcacagtgctcaaaaccagcagctggaatctggactgtcgctatgtgcttcacgtggtagctccggagtggagaaatggtagcacatcttcactcaagataatggaagacataatcagagaatgtatggagatcactgagagcttgtccttaaaatcaattgcatttccagcaataggaacaggaaacttgggatttcctaaaaacatattcgctgaattaatcatttcagaggtgttcaaatttagtagcaagaatcagctgaaaactttacaagaggttcactttctgctgcacccgagtgatcatgaaaatattcaggcattttcagatgaatttgccagaagggctaatggaaatctcgtcagtgacaaaattccgaaggctaaagatacacaaggtttttatgggactgtttctagccctgattcaggtgtgtatgaaatgaagattggctccatcatcttccaggtggcttctggagatatcacgaaaggagaggcagatgtgattgtaaattcaacatcaaactcattcaatctcaaannnnnnnnnnnnnntgcaattttagaatgtgctggacaaaatgtagaaagggaatgttctcagcaagctcagcagcgcaaaaatgattatataatcaccggaggtggatttttgaggtgcaagaatatcattcatgtaattggtggaaatgatgtcaagagttcagtttcctctgttttgcaggagtgtgaaaaaaaaaattactcatccatttgcctcccagccattgggacaggaaatgccaaacaacacccagataaggttgctgaagccataattgatgccattgaagactttgtccagaaaggatcagcccagtctgtgaaaaaagttaaagttgttatctttctgcctcaagtactggatgtgttttatgccaacatgaagaaaagagaagggactcagctttcttcccaacagtctgtgatgtctaaacttgcatcatttttgggcttttcaaagcaatctccccaaaaaaagaatcatttggttttggaaaagaaaacagaatcagcaacttttcgggtgtgtggtgaaaatgtcacgtgtgtggaatacgctatctcctggctacaagacctgattgataaagaacagtgtccttacaccagtgaagatgnnnnnnnnnnnnnnnnnnngatgaaaaggagtatcaggagttgaatgagctgcagaagaagttaaatattaacatttccctggaccataagagacctttgattaaggttttgggaattagcagagatgtgatgcaggctagagatgaaattgaggcgatgatcaagagagttcgattggccaaagaacaggaatcccgggcagattgtatcagtgagtttatagaatggcagtataatgacaataacacttctcattgttttaacaaaatgaccaatctgaaattagaggatgcaaggagagaaaagaaaaaaacagttgannnnnnnnnnnnnnnnnnnnnctacacagtgaacttgaacacatacactgccacagacacaaagggccacagtttaatctgttcagcgcctcacgaaatccaaagttgacattccctgcacactgggagtgatatgaagcagcagaatttctgtgttgtggagctgctagcctagtgaatcctgaagttacaaacacggtggccaagcaaagttnnnnnnnnnnnnnnnnccacacttcagaatagaggaaggtgaactgtgatgaatacgggcctgtaagtcccagctatggggaagctgaagnnnnnnnnnnnnnnnnngcccaggagttgtagcccagttggggtacctagtgagaaccggtctcactatacaacccagttatctcttcggccaaacaaacaagacacacaaaaaaaagggggcccgcnnnnnnnnnnnnnnncgccacataccgcggcccccctgtgtaaaagggcccaaggggagaataacaacgacgcggagacaacagcagtagaaacaacgtaggcattcgaaagccccaccggcgtagatgacaacacagtcatcgcaaaacatct

SEQ ID NO: 6296 - DNA, 3961 bp, Homo sapiens
  misc_feature (1423)..(1444): n is a, c, g, or t
  misc_feature (1619)..(1619): n is a, c, g, or t
  misc_feature (1621)..(1622): n is a, c, g, or t
gtcgcgcgcgtggatctgccgccgggttgctgtgcgactattctccgggagccgtccgtgtcaccgccggaacctggcgcaggttaattatagaaaatgccaagtaggaaatttgccgatggtgaagtggtaagaggtcgatggcctgggagttcactttattatgaagtagaaattctgagccacgacagcacctcccagctttacactgtgaagtataaagatggaacagagcttgaattgaaagagaatgatattaagcctttaacttcctttaggcaaaggaaaggtggctcaacttccagttccccttccagacgccgagggagtcgatcaaggtcacgctcccgatcccctggtcgaccacctaaaagtgcccgccgatctgcttctgcttcccaccaggccgacattaaggaagcaaggagggaagtggaagttaaattgactccgctgattctgaagccatttggaaatagcatcagcagatataatggggagcctgagcatattgagagaaatgacgcacctcataaaaatacacaggaaaaattcagtttgtcacaagaaagcagttacatagcaacacagtatagccttcgtccaagaagagaagaagtcaaattaaaagaaatagattctaaggaagaaaaatacgttgcaaaagaactggcagtgagaacctttgaagtgacccccatccgggcaaaggacttggagtttggaggagtacctggtgtgtttctcatcatgtttggcctgcctgtgttcctcttcctgttgctgttgatgtgtaaacagaaagatcccagtcttctgaatttccctcctcctttgccagctttgtatgagttatgggaaaccagagtatttggggtctacctcctgtggtttttgattcaagtcctgttctacctactgccaattggaaaggttgtagaaggaacgcctcttattgatggaagaagactcaagtatagattaaatggattctatgcttttatcctgacatctgcagtcatcggaacatctctcttccagggcgtagagtttcattacgtgtacagtcattttcttcagtttgcacttgcggccactgttttttgtgtggtcttgagtgtgtatctctacatgcgctctttgaaagcgccccggaatgacctgtcgcctgccagctctggaaatgctgtctatgatttcttcattggccgtgaattaaaccctcgaattggtacttttgatctcaaatacttttgtgaattgcgccccggattgattggatgggtggttattaacttggtgatgcttttggctgaaatgaaaatacaggaccgcgctgttccatccttggccatgattttagttaatagtttccagcttctctatgtggtggatgctctctggaatgaggaagcgttgttgnnnnnnnnnnnnnnnnnnnnnncacgatggatttggattcatgctggcttttggagacttggtgtgggttccctttatttacagcttccaagccttttatttagtcagtcatccaaatgaagtgtcttggccaatggcttctctaattattgttctgaaactttgtggttatgtaatcttccgaggtgcaaattctngnngtctcgacatcatgaaaaatcccagtgatccaaagcttgcacatttaaaaaccattcatacttcaacgggaaaaaatcttctagtttctggatggtggggctttgttcgccaccccaattacttgggtgatctcatcatggccttggcgtggtccctcccatgtggttttaaccacattctgccttatttctacataatttatttcaccatgttgcttgtccaccgagaagctcgtgacgagtaccactgtaagaagaaatacggcgtggcttgggaaaagtactgtcagcgtgtgccctaccgtatatttccatacatctactaatgctcttctggcttttctacaaaatactcctgcaattccagctgccatttgcaaaaacaaggaaaaaaatccgaaactttcttttgttgcactgacagggtctgtacttttttttttctttttgagtcaggactatggagccgagtagttgatcttttaatatagccgtgtttacttgtattaacttacagttaacataggaaaaatacaagtaaggatgtgagaatttgcattttaatgggaaattttcaaccgttaatctgaaaacagaagacagtcttaatataaatgtactgtgaagaatgctattgatgtttatggtttctgattacttttcaaattttgatgtttttttgccagttggcttttcttaaatgaaaacactgttccatttaaagtacatttatgttttattcagtaagagaatagaattttcatttgtttttctttaaatcctttactaattatataatttgaaagcaaaaagaagggcctatattaaatgctgaaagtgaaaagtgatgacattattagcagacactgcttaaaggagaccatttgtagcagttggcttaacctcaacttctaaaactacattgaaaatgtaaatacatagcttagttttttgtaatatatggtgacttcagatttttttgtacagtattttgaatgtgagatgattgtcaggactaactgtctttttaacaaaacattttcagtaaattaaataaaattttgtaaagtaatgtgaattaaaaattttggaacaattagaattcattcactattgtatagaagatgctgttaaaacataggaagggtatttttcttgatccaaagtttgtgaatttggctttgctacctcaattgcaggtgtttgtttgcctttataaactgttgcaaatagaaaaaaaatagaataagtatatatttttggagtaacatcaatatttaaacatttttacacagatcggtgtttgaaaatttgccatttcaggctaatatttttatatatttttgactttttaaaagttcatcagtgtttttgctactgttaagcttatgcagtttatactgtattttttatgtatcctttatatttaccaaacctgactccctgtaaaggagtgctgtcttaaaaacaactgaaggggttaaagtcgtttcttttagtttaatagatgtgcataaggtagctttagcaattaaattctagtgaagttgatatagtctcatttttaattgtcctgtaatggaacagtagcaaattcactaaacttttgtgttcagagttaaattgttctcagtactttcaatgtaggggaatgtaataaacatagtgtgtatgtttgggttttaattacacattttatatatgagccatttagatatgcagtgttaattctatactgcatttgaagtgtatgtaacttagcttatgttaatgcagtcatgaagttggtttgctccagcatccggtagtctttaaacattcttttagtgaaattgtcattgttttatcagtgctaatgtgtgcaagcagtttttttattttgcttttctcctggcatcagaaagtggtggcgttttctgtactggattgcaccaaggaagcttttggggaggaaggaaggacattaaattctttccctggtaatgaaaagagccctttatcaatacagtgctgcaatttctggatatcagctacactttgtttttaagtttgtttttgacatgtttatttggcaaattttataatgaagttttaagttgaaaataaaatgtagcaacattttgatcaaaaaaaaaaaaaaaaagaaacaaacaaacatcaaaaaaacctttttgtgggcgcgcggcattggggccccttgagaaaaccgttttctaaaaaccactccgttgtgggggcgcggggccccaaatgggttaagttaacccattgggacaaacgcttgttcccaaagagagagactccggggcaagagccatcagggttcggagtctccccag

SEQ ID NO: 6297 - DNA, 1863 bp, Homo sapiens
tcagcttactccagcctccgtcgccctgggttcaagtgattctcctgccgcaaacttcccatatagccgggattacgggcatgtgccacattgcccggctaatttgtgtatgtttattagagatgggtcttcatcacgttgtccagtctggtctcgaactcctgacctcaagtgctccacctgcctcagccttccaaagtgctgggattacaggcgtgagccactgcacccggctagaactcactttctccaaatccctctgcttcgaatttcaccgtcttcagctctttctagttctgggcctcaccagcctctcattctgcctgttttcaaaccttacgatccccaaaaattgtctggttctgggcctctaactccctctggctctatagtctatgactaccagattcttttggttctagaattcactaacttcctctggttctagacctcttcctataaattaatccctcttgttttagatctcacaccctccaacgccctctggttccagatcttatattcagtgatttcctctggttctggaccccacaactccaagcttcctattggttccagttctcctgatcggtaatacatttggttccaaatccagacctcttaatctctctcttttttttttttttttttttgagacagagtcccactctgtcacccaggctggagtacagtggctcaatctcggctcactgcagcctccacctcctgggttcaagcaattcttgggcctcagcctcccaaatagctgggattacaggcatgtgccgccacgcccagctaagttttatatttttagtagagacagtgtttcaccatgttggccaggctggtcttgaactcccgacctcaactgatccacccgcctcagcctcccaaagtgctgaaattacaggagtgagcctggccagacttcttaatttctaaatcacttttgttttagaccttatgaggctcagcttattcttctgcagttctctataaccaagactcattttctctcatcaaaaacaagtacagagagtttgatgtgtttatctcttttttcttcctcttcttttttttttttttcttttttgagatggagtctctctctgttgcccaggctggagtataatggtgccatctaggctcactgcaacctccgcctcctgattcaagtgattctcctgcctcagcctcctaaattggtgggattacaggagcccaccaccacatccggctacctttgtgtatttttttagtagagacggggttttgccaagttggaggggctggtcttgaactcttgacctcagatgatccacccgcctcagcctcccaaagtgctgggattacaggcataagccaccgtgcccgaccctgtccttatcttataataaccagttcttctagaaccagacgatgctctagttctcctagattctgaacctcatgacctgtaccactcactagttccagactacacaacttctagaaggtgccacctccagggtcctgattcaagatctggtgatctgctgtttctctggttctagaactgacttacaagtgccttctgattctagacctcattccgtaagttcccttggctctagacttcatcatttccagctcctcctcactcaagatctgactccaaattaccctgggtctagaattcagccttcaaatatcttctgattttagactttgccttatacatttctctggttttagaccttaccaccctcaactccttctgattctagatcttatggttcccaaatctctctggttctagaactcagattttaggcttttgtttttccttttttttgttaaaaaaaaaaaaaaaaaacgcgg

SEQ ID NO: 6298 - DNA, 1301 bp, Homo sapiens
ccccctttttttttcttttgttttttttttttttttttttttttttttttttttttttttttttttttttttttttttaccaaaaacgcaggggatttatttgaggtttgggtgaaaaataatcttgtgggtggtggtaggccgacagatggggacaggaagctgtggacgaaagccccaggtcccgtgggagaggtgacagcagcaggggcacgcagccacgtgggtccccaggggaatgtgaaggcggagggctccaggcgaactggggattaaacaaatatttacaggcagcagggaagtgcccagcgcacgtgacgggggcggggcgggactttggggagggcggggcctaacggtatcgagcgagccggttgtagacgtggtccaggtttctgcacaggaatatcgagagcgtcatgaacccgagctcgagtaggccgacgcccaggcaaatgcccactatggaaataaggttgttgtgcagccacttctggaggccctgcgcgcagccctcgcggtagatgtggctctctgcagggacagcgcagatgtctgcactgtgtctggaccgcgccaggtgtccaagcctgctgagctggggcaagatcaccttatctaggattgtggagtcgttggtcgccgacaagttgtagcaggagcagggcacgcggtgcgcctccgacccgttacctctcaggatgaggacttggaaccagtcctgcgggtagtgccagccgcagcagcgcagctggaactgcacatagtcccagctctcctcggccgcggtctcctcggggttggtgccgtacttttggatggttttctctacgacgtcccgcaagcttcgctccagctgggcccgctgagtggagatgaggattcccagggtgatctgtgtggcaaacaggagcagcagcatcccaaaatacaggcccaggaggcagcggagctccttgagggcccccacacaacccaggagggcgatgcccatggtgaagattcctgagatggccaggactttggaccagatctgcagaggcacgaaggccaagcccacaaaggacacgaagctggtcttgtcgatgaggatccagatgccgaagcagaagatcaggctgccgaggacgaagaagaagaggttgaaaacgaagaggaagtacttgatgaggctgaggcagctctcctgggctgacatcttcacctagtggggtaagcggtccactcaccacacagaagaggtgctgacagtgggggagacagggagaaagaaagaggctgagagagaaagagagacgggc

SEQ ID NO: 6299 - DNA, 1940 bp, Homo sapiens
agcgggtgcgcggtttccggcgggagcgtgggccgccagactcgggagaggctccgtcttgtgcaagggtcctgtgggctggctgcactggcctctgcggtggtgcctgccagaatgccccacttggaaaacgtggtgctttgtcgcgagtctcaagtgtccatcttgcagtccttgtttggagagagacatcatttcagctttccatccatttttatttatggacatactgctagtggaaagacctatgtaacacaaacgttgttgaaaactttagagctcccacatgtgtttgtgaattgtgttgaatgctttacattgaggctgcttttggaacaaattttaaacaaattgaatcatcttagttcttcagaggatggatgttctactgaaataacctgtgaaacatttaatgactttgttcgcttgtttaaacaagtaaccacagctgaaaatcttaaagatcagactgtatatattgttctagataaagcagagtatctaagagatatggaagcaaatcttttgcctggatttcttagattacaagaattggctgacagaaatgtgactgttctctttctcagtgaaattgtttgggaaaagtttcgtccaaatactggatgctttgagccgtttgtcttatatttccctgattacagcataggcaaccttcaaaagatcctgtcccatgatcatcctccagagtattcagctgatttctatgctgcctacattaacattcttcttggagttttctacactgtttgtcgagatttgaaagagctcagacatctggcagtacttaattttcctaaatattgtgaacccgtggttaaaggagaagcaagtgaacgtgatactcgcaaactgtggagaaatattgaacctcatttgaagaaagctatgcagactgtttatctcagggaaatatcaagttcccagtgggaaaagctacagaaagatgacacagatccggggcaactgaaaggcctctcagcgcatactcatgtggaacttccatattactctaagttcattctaattgctgcataccttgcttcatacaatccagcaagaactgacaagaggttttttcttaagcatcatggaaaaatcaagaaaaccaactttctaaaaaaacacgaaaagacaagcaatcatctccttgggccaaaaccatttccactagacagattattagcaatattatatagtatcgtggacagcagagttgctccaacagcaaatattttttcccagattacctctctagtgacccttcagctgttaaccctggttggccatgacgatcagcttgatggaccaaaatacaaatgcacagtgtctctagacttcatcagagctattgcaaggacggtgaactttgacataataaaatacttgtatgatttcttgtgaaaacaagcttcaaagccatatggacactgtgacaatgactaagccaagctgtgttcatccagctacttagctggccaaggagaggagttctttggctctattggatttgtccaaacaggtgctggcccagcatggaatctgatgaaaatattctgattggtctgggtggatgtgagcagaagactatttaccagggaccctggagtatttggaagcaacgtgttaattataaacagcagggtttgagcacaatctgttctactcttaatgatgttatcttaacactgaaattgcctgaaacccatttacttaggactacattttgctctgtgaactatcccctgcgctttgaacgtgccagcagcccttgtttatatgcccattcttttcacttcctctccacaggagcctctgcagtcgcttgccaaagcagattttcctaaggccactgttttaaaagatcatagttgcaaaatataataaatacaagttctttttaaaatccaaaaaaaaaaaaa

SEQ ID NO: 6300 - DNA, 2297 bp, Homo sapiens
ggagagaaggaagaacggaaggggcgaacggcgtgagctggcggcacgagggagaaagcagcgagtgagaggggaaggggcgccaggcgagcacccgggagccagcgggacctgggcaggggcgcccggagcaggcgcgcatggcgggccccgcgcggggatccggctggaagagagcgtagcacggctcgcacgagtccggggccgatgtaccaggtgagcggccagcgcccctctggctgcgacgcgccctatggagcccccagcgcagccccgggcccagcccagaccctatccctccttcctgggctggaggtagtaacaggatccactcaccctgcggaggcagcaccagaggagggctccctggaggaggcggcaacccccatgccccaaggcaatggccctggcatcccccagggcctggacagcactgacctcgacgtccccacagaagctgttacatgccagcctcaggggaaccccttgggctgcaccccacttctgccgaatgactctggccacccctcagagctgggcggcaccagacgggcggggaatggtgccctgggtggccccaaggcccaccggaagttgcagacacacccatctctcgccagccagggcagcaagaagagtaagagcagcagcaaatccaccacctcccagatccccctccaggcacaggaagactgctgtgtccactgcatcctgtcctgcctgttctgcgagttcctgacgctgtgcaacatcgtcctggactgcgccacctgtggctcctgcagctcggaggactcgtgcctctgctgctgctgctgtggctctggcgagtgtgccgactgcgacctgccctgcgacctggactgcggcatcctggatgcctgctgcgagtccgcggactgcctggagatctgcatggagtgctgtgggctctgcttctcctcctgagcctctgtcgggggctaagccagcctggcgcccctgcagattccagcagggtccctctgagtggggccaggcccaggactgtcacacaaggcttgagaagccccctctccctggtcctctcctacccacccatgtcctctcagaaccccagccttgaaaatagtggggggcactcagaggggccacctcctcagccgtgggtggtgggcccatggcagagaagcctgaactctttactgggttaccaggttcatacattgctgaggacctgacaggacaacctaggggcagggctggggtgggggccgcagagggcagccagggctggggaacactgtgaaagttacttggggagggtgggccggtggggccgtagctctctacctctccctgctcctggtgcctgcctctctcctccaccccaggcttagaggacagaaaaatgtgaagagacgccccacccaccctcagccagccctctccagtctcctttcctaggcttttttgggggcctaacccacgcagtgaccccagagggcagggctaggcgagagcctggggtggggcgggagggggaacagtatggaaaagactggaaggggaaaggaagggaagggagggagggtctgttctatctgttgctgtaaataaagatatttgtccatctctaaaaaaaaaaaaaaaaaaattcgaaattagtttctctccgaaagaatggcggagggtgcaggctccggggtgcattgagtggtcgaggaccatctccgggagccgccgtggcggaccatcggtggctaaacaggatacgtgcgtgggccggaaagggtgggggctcgaacgctgtgaagggcgatcaacatttcttgggcaatttctacaggaaacaagtgttggaagtacctgggctttcctccggaaagcgggatgaacaccaaaccctttcccagaggccccttaccatttccggggcccccaagccggaatcttctggggggaccgtggcagaggtatgcgtgcgcccacaaaaaccaaggcggaggccaggccgctctgggaccggtctcaagggggttaggacgggaatcccaccggacctagggacaaggaaaaacggggaaggggggtaccctggtgccctcaaaggtcgtgcagtctgaagcctacaagaaaagttggccaaatcgggggacgcatggctcacgaaggtgggcttggaaagttcccaggcagttgacaagacaccccgtggaggagaagaaggaaaggaaaaagccaagatcccattaccggaagaaagaaccagcccaagaaggcaacggaaacaggcccgaaaacaccgtgcagaagaa

SEQ ID NO: 6301 - DNA, 1296 bp, Homo sapiens
attgaatgcttgccatgtgccaggcactgtgctgagtgccatacatacatttcatttaattatccaataatcctacttactattgtttattctcaatttacaggtgaggaaactgagacatagaaagcttaaataatttgctctaggtccctatactaattgagatgttttcagcagacaaaaataagtcactcttacgcatgtaaaaatattctttcactcataataaaagaaatgcaacttaaaaccatactgagatcctttttaaaactgtcagattggcaaagatcaaaaagcttgttaagactcctagctggcaagcatgtgggaaataggtactctcataacagctgacagaagtacatattgaagaggacaatatggtaatgtccttcaaaattataaaagcactaactctttgatccagtagtttccacttctaggaacttaaccttcagatatattttcaccagatataaaatgacatacgtaagaagttattactgcatcatttgtaatagctaaagattagaaacaattaattgctatggaacccttaaaaaaggtggctctaaattccttaagaaagatatccaaaacaaattaaggggaaaagggagggttgcataacagcatgtaacataacactatttgtctaaagaatggggaaagagaagcggttgtctgttcacctcatccttgccactccgccttatacctcaccatcggagaacttaccatcccccaaatatatcctgctggcactacaccttcgtaactgctgttcccactgcccccacaacactccaatctccaccttcctgccaaccttgagatattgtatgcatatatacatatttcctttgtttaaaatacaaatagcatactatgcatgctgttctgcactttgctttttttttatacttgcaattagagctgcctcatttcattttacagctgtatactattccattgaatggataaaccataatttatttaatcagtccctcactgacagacgtttccattgtttcctgtcttttgctataaataatgctgtaatgaatattcttgtgcatatttcacattaatttatgggattacatctgcaggataaattcttagaaccaatggtggtttgtggggagggtgacagggtggataggtacaggattgggagacttttcactgtatctccttttgtatttttttgaattttgtaccatatgtatcacctattcaaaaaaaataaaatatttttaaatacaaaaaaaaaaaaaaaaaaaaaaaaaaaaa

SEQ ID NO: 6302 - DNA, 3742 bp, Homo sapiens
gacttcccctgtccaggcacgagggcttccacatgtgtcaagcggctggctcagcccagagtccctgtctcccgcccgccggcccgagccgccgcccctcccccgcctcccgtgcgcccgggacaatcctcgccttgtctgtggcgccggcatctggagctttctgtagcctccggatacgcctttttttcagggcgtagccccagccaagctgctccccgcggcggccgcacagcagcccgagcgccccctttccggagctcccctccggagctgggatccaggcgcgtagcggagatcccaggatcctgggtgctgtctgggcccgctccccaccatgacctcctcggggcctggaccccggttcctgctgctgctgccgctgctgctgccccctgcggcctcagcctccgaccggccccggggccgagacccggtcaacccagagaagctgctggtgatcactgtggccacagctgaaaccgaggggtacctgcgtttcctgcgctctgcggagttcttcaactacactgtgcggaccctgggcctgggagaggagtggcgagggggtgatgtggctcgaacagttggtggaggacagaaggtccggtggttaaagaaggaaatggagaaatacgctgaccgggaggatatgatcatcatgtttgtggatagctacgacgtgattctggccggcagccccacagagctgctgaagaagttcgtccagagtggcagccgcctgctcttctctgcagagagcttctgctggcccgagtgggggctggcggagcagtaccctgaggtgggcacggggaagcgcttcctcaattctggtggattcatcggttttgccaccaccatccaccaaatcgtgcgccagtggaagtacaaggatgatgacgacgaccagctgttctacacacggctctacctggacccaggactgagggagaaactcagccttaatctggatcataagtctcggatctttcagaacctcaacggggctttagatgaagtggttttaaagtttgatcggaaccgtgtgcgtatccggaacgtggcctacgacacgctccccattgtggtccatggaaacggtcccactaagctgcagctcaactacctgggaaactacgtccccaatggctggactcctgagggaggctgtggcttctgcaaccaggaccggaggacactcccgggggggcagcctcccccccgggtgtttctggccgtgtttgtggaacagcctactccgtttctgccccgcttcctgcagcggctgctactcctggactatccccccgacagggtcacccttttcctgcacaacaacgaggtcttccatgaaccccacatcgctgactcctggccgcagctccaggaccacttctcagctgtgaagctcgtggggccggaggaggctctgagcccaggcgaggccagggacatggccatggacctgtgtcggcaggaccccgagtgtgagttctacttcagcctggacgccgacgctgtcctcaccaacctgcagaccctgcgtatcctcattgaggagaacaggaaggtgatcgcccccatgctgtcccgccacggcaagctgtggtccaacttctggggcgccctgagccccgatgagtactacgcccgctccgaggactacgtggagctggtgcagcggaagcgagtgggtgtgtggaatgtaccatacatctcccaggcctatgtgatccggggtgataccctgcggatggagctgccccagagggatgtgttctcgggcagtgacacagacccggacatggccttctgtaagagctttcgagacaagggcatcttcctccatctgagcaatcagcatgaatttggccggctcctggccacttccagatacgacacggagcacctgcaccccgacctctggcagatcttcgacaaccccgtcgactggaaggagcagtacatccacgagaactacagccgggccctggaaggggaaggaatcgtggagcagccatgcccggacgtgtactggttcccactgctgatgcactgctgtcatgatgagctggtggcagagatggagcactacggccagtggtcaggcggccggcatgaggattcaaggctggctggaggctacgagaatgtgcccaccgtggacatccacatgaagcaggtggggtacgaggaccagtggctgcagctgctgcggacgtatgtgggccccatgaccgagagcctgtttcccggttaccacaccaaggcgcgggcggtgatgaactttgtggttcgctaccggccagacgagcagccgtctctgcggccacaccacgactcatccaccttcaccctcaacgttgccctcaaccacaagggcctggactatgagggaggtggctgccgcttcctgcgctacgactgtgtgatctcctccccgaggaagggctgggcactcctgcaccccggccgcctcacccactaccacgaggggctgccaacgacctggggcacacgctacatcatggtgtcctttgtcgacccctgacactcaaccactctgccaaacctgccctgccattgtgcctttttagggggcctggcccccgtcctgggagttgggggatgggtctctctgtctccccacttcctgagttcatgttccgcgtgcctgaactgaatatgtcaccttgctcccaagacacggccctctcaggaagctcccggagtccccgcctctctcctccgcccacaggggttcgtgggcacagggcttctggggactccccgcgtgataaattattaatgttccgcagtctcactctgaataaaggacagtttgtaaaacaaaaaaaaaaaaaaaaaaaaaaaaaaaaaaaaaaaaaaaaaaaaaaacaacaaaaaaaaaaaagggggggcccccacaaaatcccccgcggagggcccacagacagtcacaggtcacaccacgaatatcagtagacaccaagagggccccccaaaaagggagcgcacacacaaaacacagccgagaaccacgcgcgcccctcataaaaaaagagggcgcggggagagggagaaacaaacgtgtcgaaggggggaaacacccgcgagagcaacaacgcccactaaacccactgggcggcgaggagaaacacactgcgggccgcgacaaccccctctcccgacgggagacgaattaccaacgaccacgagagaggccgacacaactaagcaccacatccgccacacacacaccaaaacaggggtgctaacaacacaacgcgaagaaaaactacctcgactgcccgccgacaaaagcaatacggcacacaccggcggacgcacggcagctcagttccaagacagaacataattagctaccagggagagcgccggcacagaataaacaccaagcaacagacaaccaagagagagacacaggcgacaaacacgagccgacgacagcagagaacacacgccagcgcacgcagagacgcaggtgcgcagccggggaggagtggcggagtcgccgcccaggatagggggggaggacggggagctacgacgcgagagtgagcaggaggcacgaagaagcacgacagtctcgaggagagagcgagcaggacgcacgaagtcggtcggactgtgcaccggtagagggcggacgcagccacgggcggcgcgctcggaccgcgacgcaacagggcgggggcggatcgacacgacgcgtccg

SEQ ID NO: 6303 - DNA, 3421 bp, Homo sapiens
gccgcggccagctccggcgggcagggggggcgctggagcgcagcgcagcgcagccccatcagtccgcaaagcggaccgagctggaagtcgagcgctgccgcgggaggcgggcgatgggggcaggtgccaccggccgcgccatggacgggccgcgcctgctgctgttgctgcttctgggggtgtcccttggaggtgccaaggaggcatgccccacaggcctgtacacacacagcggtgagtgctgcaaagcctgcaacctgggcgagggtgtggcccagccttgtggagccaaccagaccgtgtgtgagccctgcctggacagcgtgacgttctccgacgtggtgagcgcgaccgagccgtgcaagccgtgcaccgagtgcgtggggctccagagcatgtcggcgccgtgcgtggaggccgacgacgccgtgtgccgctgcgcctacggctactaccaggatgagacgactgggcgctgcgaggcgtgccgcgtgtgcgaggcgggctcgggcctcgtgttctcctgccaggacaagcagaacaccgtgtgcgaggagtgccccgacggcacgtattccgacgaggccaaccacgtggacccgtgcctgccctgcaccgtgtgcgaggacaccgagcgccagctccgcgagtgcacacgctgggccgacgccgagtgcgaggagatccctggccgttggattacacggtccacacccccagagggctcggacagcacagcccccagcacccaggagcctgaggcacctccagaacaagacctcatagccagcacggtggcaggtgtggtgaccacagtgatgggcagctcccagcccgtggtgacccgaggcaccaccgacaacctcatccctgtctattgctccatcctggctgctgtggttgtgggccttgtggcctacatagccttcaagaggtggaacagctgcaagcagaacaagcaaggagccaacagccggccagtgaaccagacgcccccaccagagggagaaaaactccacagcgacagtggcatctccgtggacagccagagcctgcatgaccagcagccccacacgcagacagcctcgggccaggccctcaagggtgacggaggcctctacagcagcctgcccccagccaagcgggaggaggtggagaagcttctcaacggctctgcgggggacacctggcggcacctggcgggcgagctgggctaccagcccgagcacatagactcctttacccatgaggcctgccccgttcgcgccctgcttgcaagctgggccacccaggacagcgccacactggacgccctcctggccgccctgcgccgcatccagcgagccgacctcgtggagagtctgtgcagtgagtccactgccacatccccggtgtgagcccaaccggggagcccccgccccgccccacattccgacaaccgatgctccagccaacccctgtggagcccgcacccccaccctttggggggggcccgcctggcagaactgagctcctctgggcaggacctcagagtccaggccccaaaaccacagccctgtcagtgcagcccgtgtggccccttcacttctgaccacacttcctgtccagagagagaagtgcccctgctgcctccccaaccctgcccctgccccgtcaccatctcaggccacctgcccccttctcccacactgctaggtgggccagcccctcccaccacagcaggtgtcatatatggggggccaacaccagggatggtactagggggaagtgacaaggccccagagactcagagggaggaatcgaggaaccagagccatggactctacactgtgaacttggggaacaagggtggcatcccagtggcctcaaccctccctcagcccctcttgccccccaccccagcctaagatgaagaggatcggaggcttgtcagagctgggaggggttttcgaagctcagcccacccccctcattttggatataggtcagtgaggcccagggagaggccatgattcgcccaaagccagacagcaacggggaggccaagtgcaggctggcaccgccttctctaaatgaggggcctcaggtttgcctgagggcgaggggagggtggcaggtgaccttctgggaaatggcttgaagccaagtcagctttgccttccacgctgtctccagacccccaccccttccccactgcctgcccacccgtggagatgggatgcttgcctagggcctggtccatgatggagtcaggtttggggttcgtggaaagggtgctgcttccctctgcctgtccctctcaggcatgcctgtgtgacatcagtggcatggctccagtctgctgccctccatcccgacatggacccggagctaacactggcccctagaatcagcctaggggtcagggaccaaggacccctcaccttgcaacacacagacacacgcacacacacacacaggaggagaaatctcacttttctccatgagttttttctcttgggctgagactggatactgcccggggcagctgccagagaagcatcggagggaattgaggtctgctcggccgtcttcactcgcccccgggtttggcgggccaaggactgccgaccgaggctggagctggcgtctgtcttcaagggcttacacgtggaggaatgctcccccatcctccccttccctgcaaacatggggttggctgggcccagaaggttgcgatgaagaaaagcgggccagtgtgggaatgcggcaagaaggaattgacttcgactgtgacctgtggggatttctcccagctctagacaaccctgcaaaggactgttttttcctgagcttggccagaagggggccatgaggcctcagtggactttccaccccctccctggcctgttctgttttgcctgaagttggagtgagtgtggctcccctctatttagcatgacaagccccaggcaggctgtgcgctgacaaccaccgctccccagcccagggttcccccagccctgtggaagggactaggagcactgtagtaaatggcaattctttgacctcaacctgtgatgaggggaggaaactcacctgctggcccctcacctgggcacctggggagtgggacagagtctgggtgtatttattttcctccccagcaggtggggagggggtttgggggcttgcaagtatgttttagcatgtgtttggttctggggcccctttttactccccttgagctgagatggaacccttttggcccccgagctgggggccatgagctccagacccccagcaaccctcctatcacctcccctccttgcctcctgtgtaatcatttcttgggccctcctgaaacttacacacaaaacgttaagtgatgaacattaaatagcaaagaaagaaaaataaaaaaaaaaaaaaaaaaaaaaaa

SEQ ID NO: 6304 - DNA, 1876 bp, Homo sapiens
gcattgtgaagaaactgcttgcttccctctcaccctctgcagtttcctgaggcctccccagccatgcggaacggccagatgcagtgcctcatgcctgtaatcccagcactttgggaggctaaggagggaggattgcttgagcctgcttccatatcgtaaactgccttggaaccaattaccactaccagggagacaaactattgcttagaggatgctgacaggagcagcatgccaaaattggaagaaggagaaagtttaagctctcctcactatgagttttcaagtataaaagactttttcttccacgattttgagaacaactgaggactcttgtgaccaggacaacagggaagcttgcagcaagatagctccaggttggattcatgcttcgcaccccaagggctgccagccagagaggaggagaagcaatcactcctgcagtttctgaacactacacagacgccaggtagcttcttcaggagaacagccctctgaggaggcaggaagaggaggcttctctttcagcagccggagctgctagatctctgggcagattaagctctctctaatggatgggctccagcctggcacattcagtggagagggatccactcatccatcatcaacataatatggtcctccctgcacttcacagtgtcctcttgctattgaaaaggcttttttgccttctcaagtttctttgtcaacagtctacaggaagaagctcaggccgccaccggcagaggtgaatgcaagctcacgttttatttctgactgcttaatcattgcctcgatcactgctcaagctctgcctttgtttccaaaggttacctgtgggaaaacttctttttctatgctgaaattaatagggaggcaaagatgagtccactgataagcagagccttaaaactcacatagagaaacaactttgctggagtgtgtgtgagtgaaccactaaggaatcagatagtgtgatggcagttatcattgcaggttaagacatttctacaaatatttcgacatctccatatactcactcctttcccccctgagtggagagactcagctaccaagagaggaagctcaaaaaaaacagaagcttcaaacaaacaaccaaccaaaaaaaaaaaaaaactgtgggttcatcagaaggtggtagggaagacaaaaacatgggaggagcagcctgggcacggtggctcaagccttgtaatcccagcactttgcgaggctgaggtgggtggatcacctgaggtcaggagttcgagaccagccgtggccaacattggtgaaaccccatctctactaaaaattacaaaaaattagccgggcgttgtggtacgcacctgtaatcccagctactccggaggctgaggcagcagaaactcgctttgaacccaggaggcagaggttgcaacgagccaagatcgcaccattggcactccagccggggcaacaagagcgaaactccattctaaaaaaaacaaacaagcaaacaaacaaaaaacacgggaggagcaataaaagggaatccagtgctttgatttttaaaaaaaacaaaaacaaacagaaaacaaacaacaaaaaagcaacaaacgaacaagaaaaacaaaaaggggggggcgcgcgccaataaaaattcccccatcagaggggcacccaaatatgatgacacaacaacacacaatattgtatgatcaaaagagggggccccccaaaggaagacgccgctaaataatagccaaaagccagcgacccgggatgtaacaaacacagcgtgtgtgggggaaacaacgctggccagcgaaggactcatggggaagaagaccaccactacccggggggagggacaaaatgctggagcagcagatgcacg

SEQ ID NO: 6305 - DNA, 1362 bp, Homo sapiens
acttccggccggtggccggcccggcgcgcaccgccccttccggcacgaggagcgagcccagctccggtcccagccccggccgtcccggcgtcgcttcggagcgcggcggcagctgactgcgccttcacgatccgctgggacccgcgagccccgccgccgttatgaacatccgcaatgcgaggccagaggacctaatgaacatgcagcactgcaacctcctctgcctgcccgagaactaccagatgaaatactacttctaccatggcctttcctggccccagctctcttacattgctgaggacgagaatgggaagattgtggggtatgtcctggccaaaatggaagaggacccagatgatgtgccccatggacatatcacctcattggctgtgaagcgttcccaccggcgcctcggtctggctcagaaactgatggaccaggcctctcgagccatgatagagaacttcaatgccaaatatgtctccctgcatgtcaggaagagtaaccgggccgccctgcacctctattccaacaccctcaactttcagatcagtgaagtggagcccaaatactatgcagatggggaggacgcctatgccatgaagcgggacctcactcagatggccgacgagctgaggcggcacctggagctgaaagagaagggcaggcacgtggtgctgggtgccatcgagaacaaggtggagagcaaaggcaattcacctccgagctcaggagaggcctgtcgcgaggagaagggcctggctgccgaggatagtggtggggacagcaaggacctcagcgaggtcagcgagaccacagagagcacagatgtcaaggacagctcagaggcctccgactcagcctcctagagcctgccccatcccctcctcaccccacgagctttcacaataaattcgctccgtggcactgggaaaaaaaaaaaaaaaaaaaaaaaaaaaaaaaaaacaaaaaaaaaaaaaaaaaaaccgcagggggaaaatatatagaagggaaggaaaaaaaggggcaatataaggacaaggaggtacaaagaggatatcagtaaacacaatttgtttataaaaggagaaaataggaggaaccacaaaggagggcgataacccgaaaaaccacgggcaccctgtaagaacaccacacgcacaacaggcagaacaacacaacacaaacacgacaagaaacagaggggccacacatgtgcacaaagaagccgcgacacagaacaccaaacgaacaaaagacaaaacaaccacacgcacaaaaagaaaacacaagaagaccaaaagaaaacaaaagaataaacaaacacaaaaacaagacacgacagaaaagaagcaaaaacaa

SEQ ID NO: 6306 - DNA, 6694 bp, Homo sapiens
  misc_feature (149)..(182): n is a, c, g, or t
  misc_feature (313)..(330): n is a, c, g, or t
  misc_feature (1160)..(1188): n is a, c, g, or t
  misc_feature (1738)..(1760): n is a, c, g, or t
  misc_feature (4287)..(4314): n is a, c, g, or t
  misc_feature (5769)..(5783): n is a, c, g, or t
ggcggttaagtcctgtacctaggaaagagggcgagctctggggcgctctccggtgtcatgaggagcttcaaaagagtcaactttgggactctgctaagcagccagaaggaggctgaagagttgctgcccgacttgaaggtgggggtgcnnnnnnnnnnnnnnnnnnnnnnnnnnnnnnnnnngagctgttttgtgtttgccttttgaagagatggataagagttcctgtccaaccctccagctggttttcccagcagccgatctgatgctgagaggagacaagcttgtgatgccatcctgagggcttgcaacnnnnnnnnnnnnnnnnnnctagcttgccctaggcatctggggagcctgctggagctggcagagctggcctgtgatggctacttagtgtctaccccacagcgtcctcccctctacctggaacgaattctctttgtcttactgcggaatgctgctgcacaaggaagcccagaggccacactccgccttgctcagcccctccatgcctgcttggtgcagtgctctcgcgaggctgctccccaggactatgaggccgtggctcggggcagcttttctctgctttggaagggggcagaagccctgttggaacggcgagctgcatttgcagctcggctgaaggccttgagcttcctagtactcttggaggatgaaagtaccccttgtgaggttcctcactttgcttctccaacagcctgtcgagcggtagctgcccatcagctatttgatgccagtggccatggtctaaatgaagcagatgctgatttcctagatgacctgctctccaggcacgtgatcagagccttggtgggtgagagagggagctcttctgggcttctttctccccagagggccctctgcctcttggagctcaccttggaacactgccgtcgcttttgctggagccgccaccatgacaaagccatcagcgcagtggagaaggctcacagttacctaaggaacaccaatctagcccctagccttcagctatgtcagctgggggttaagctgctgcaggtcggggaggaaggacctcaggcagtggccaagcttctgatcaaggcatcagctgtcctgagcaagagtatggaggcaccatcacccccacttcgggcattgtatgagagctgccnnnnnnnnnnnnnnnnnnnnnnnnnnnnnaccaagaggcgctatagacttgatgccattctgagcctctttgcttttcttggagggtactgctctcttctgcagcagctgcgggatgatggtgtgtatgggggctcctccaagcaacagcagtcttttcttcagatgtactttcagggacttcacctctacactgtggtggtttatgactttgcccaaggctgtcagatagttgatttggctgacctgacccaactagtggacagttgtaaatctaccgttgtctggatgctggaggccttagagggcctgtcgggccaagagctgacggaccacatggggatgaccgcttcttacaccagtaatttggcctacagcttctatagtcacaagctctatgccgaggcctgtgccatctctgagccgctctgtcagcacctgggtttggtgaagccaggcacttatcccgaggtgcctcctgagaagttgcacaggtgcttccggctacaagtagagagtttgaagaaactgggtaaacaggcccagggctgcaagatggtgattttgtggctggcagccnnnnnnnnnnnnnnnnnnnnnnncatggctgagccagtcactttctgggttcgggtcaagatggatgcggccagggctggagacaaggagctacagctaaagactctgcgagacagcctcagtggctgggacccggagaccctggccctcctgctgagggaggagctgcaggcctacaaggcggtgcgggccgacactggacaggaacgcttcaacatcatctgtgacctcctggagctgagccccgaggagacaccagccggggcctgggcacgagccacccacctggtagaactggctcaggtgctctgctaccacgactttacgcagcagaccaactgctctgctctggatgctatccgggaagccctgcagcttctggactctgtgaggcctgaggcccaggccagagatcagcttctggacgataaagcacaggccttgctgtggctttacatctgtactctggaagccaaaatacaggaaggtatcgagcgggatcggagagcccaggcccctggtaacttggaggaatttgaagtcaatgacctgaactatgaagataaactccaggaagatcgtttcctatacagtaacattgccttcaacctggctgcagatgctgctcagtccaaatgcctggaccaagccctggccctgtggaaggagctgcttacaaaggggcaggccccagctgtacggtgtctccagcagacagcagcctcactgcagatcctagcagccctctaccagctggtggcaaagcccatgcaggctctggaggtcctcctgctgctacggattgtctctgagagactgaaggaccactcgaaggcagctggctcctcctgccacatcacccagctcctcctgaccctcggctgtcccagctatgcccagttacacctggaagaggcagcatcgagcctgaagcatctcgatcagactactgacacatacctgctcctttccctgacctgtgatctgcttcgaagtcaactctactggactcaccagaaggtgaccaagggtgtctctctgctgctgtctgtgcttcgggatcctgccctccagaagtcctccaaggcttggtacttgctgcgtgtccaggtcctgcagctggtggcagcttaccttagcctcccgtcaaacaacctctcacactccctgtgggagcagctctgtgcccaaggctggcagacacctgagatagctctcatagactcccataagctcctccgaagcatcatcctcctgctgatgggcagtgacattctctcaactcagaaagcagctgtggagacatcgtttttggactatggtgaaaatctggtacaaaaatggcaggttctttcagaggtgctgagctgctcagagaagctggtctgccacctgggccgcctgggtagtgtgagtgaagccaaggccttttgcttggaggccctaaaacttacaacaaagctgcagataccacgccagtgtgccctgttcctggtgctgaagggcgagctggagctggcccgcaatgacattgatctctgtcagtcggacctgcagcaggttctgttcttgcttgagtcttgcacagagtttggtggggtgactcagcacctggactctgtgaagaaggtccacctgcagaaggggaagcagcaggcccaggtcccctgtcctccacagctcccagaggaggagctcttcctaagaggccctgctctagagctggtggccactgtggccaaggagcctggccccatagcaccttctacaaactcctccccagtcttgaaaaccaagccccagcccatacccaacttcctgtcccattcacccacctgtgactgctcgctctgcgccagccctgtcctcacagcagtctgtctgcgctgggtattggtcacggcaggggtgaggctggccatgggccaccaagcccagggtctggatctgctgcaggtcgtgctgaagggctgtcctgaagccgctgagcgcctcacccaagctctccaagcttccctgaatcataaaacacccccctccttggttccaagcctcttggatgagatcttggctcaagcatacacactgttggcactggagggcctgaaccagccatcaaacgagagcctgcagaaggttctacagtcagggctgaagtttgtagcagcacggataccccacctagagccctggcgagccagcctgctcttgatttgggccctcacaaaactaggtggcctcagctgctgtactacccaactttttgcaagctcctggggctggcagccaccattaataaaaagtgtccctggctcagagccctctaagactcagggccaaaaacgttctggacgagggcgccaaaagttagcctctgctcccctgagcctcaataatacctctcagaaaggtctggaaggtagaggactgccctgcacacctaaacccccagaccggatcaggcaagctggccctcatgtccccttcacggtgtttgaggaagtctgccctacagagagcaagcctgaagtaccccaggcccccagggtnnnnnnnnnnnnnnnnnnnnnnnnnnnnggtgaacttcagtgatgacagtgacttggaagaccctgtctcagctgaggcctggctggcagaggagcctaagagacggggcactgcttcccggggccgggggcgagcaaggaagggcctgagcctaaagacggatgccgtggttgccccaggtagtgcccctgggaaccctggcctgaatggcaggagccggagggccaagaaggtggcatcaagacattgtgaggagcggcgtccccagagggccagtgaccaggccaggcctggccctgagatcatgaggaccatccctgaggaagaactgactgacaactggagaaaaatgagctttgagatcctcaggggctctgacggggaagactcagcctcaggtgggaagactccagctccgggccctgaggcagcttctggagaatgggagctgctgaggctggattccagcaagaagaagctgcccagcccatgcccagacaaggagagtgacaaggaccttggtcctcggctccagctcccctcagcccccgtagccactggtctttctaccctggactccatctgtgactccctgagtgttgctttccggggcattagtcactgtcctcctagtgggctctatgcccacctctgccgcttcctggccttgtgcctgggccaccgggatccttatgccactgctttccttgtcaccgagtctgtctccatcacctgtcgccaccagctgctcacccacctccacagacagctcagcaaggcccagaagcaccgaggatcacttgaaatagcagaccagctgcaggggctgagccttcaggagatgcctggagatgtccccctggcccgcatccagcgcctcttttccttcagggctttggaatctggccacttcccccagcctgaaaaggagagtttccaggagcgcctggctctgatccccagtggggtgactgtgtgtgtgttggccctggccaccctccagcccggaaccgtgggcaacaccctcctgctgacccggctggaaaaggacagtcccccagtcagtgtgcagattcccactggccagaacaagcttcatctgcgttcagtcctgaatgagtttgatgccatccagaaggcacagaaagagaacagcagctgtactgacaagcgagaatggtggacagggcggctggcactggaccacaggatggaggttctcatcgcttccctagagaagtctgtgctgggctgctggaaggggctgctgctgccgtccagtgaggagcccggccctgcccaggaggcctcccgcctacaggagctgctacaggactgtggctggaaatatcctgaccgcactctgctgaaaatcatgctcagtggtgccggtgccctcacccctcaggacattcaggccctggcctacgggctgtgcccaacccagccagagcgagcccaggagctcctgaatgaggcagnnnnnnnnnnnnnnngcctgacagtaccaagcaatagccaccttgtcttggtcctagacaaggacttgcagaagctgccgtgggaaagcatgcccagcctccaagcactgcctgtcacccggctgccctccttccgcttcctactcagctactccatcatcaaagagtatggggcctcgccagtgctgagtcaaggggtggatccacgaagtaccttctatgtcctgaaccctcacaataacctgtcaagcacagaggagcaatttcgagccaatttcagcagtgaagctggctggagaggagtggttggggaggtgccaagacctgaacaggtgcaggaagccctgacaaagcatgatttgtatatctatgcagggcatggggctggtgcccgcttccttgatgggcaggctgtcctgcggctgagctgtcgggcagtggccctgctgtttggctgtagcagtgcggccctggctgtgcatggaaacctggagggggctggcatcgtgctcaagtacatcatggctggttgccccttgtttctgggtaatctctgggatgtgactgaccgcgacattgaccgctacacggaagctctgctgcaaggctggcttggagcaggcccaggggccccccttctctactatgtaaaccaggcccgccaagctccccgactcaagtatcttattggggctgcacctatagcctatggcttgcctgtctctctgcggtaaccccatggagctgtcttattgatgctagaagcctcataactgttctacctccaaggttagatttaatccttaggataactcttttaaagtgattttccccagtgttttatatgaaacatttccttttgatttaacctcagtataataaagatacatcatttaaaaccaaaaaaaaaaaaaaaaaaaaaagtt

SEQ ID NO: 6307 - DNA, 4149 bp, Homo sapiens
  misc_feature (2703)..(2776): n is a, c, g, or t
taggggcaagattagaagctgggagaccatggatattaggcaagaaattatgagtatttgttggcaagatacagtgctattaattggaaagagttatttaggagattagcaaataattacatattgggtgacatggttgggagacagctcagtgcagagataagagaaagaagttttggtgaattgcatggttttgccccaggcaactgggtggacggtggaactgtaaattgagaatgattacaataatgctaacatttaaggggtatttagtatgttccaagcactgtgctgtatgctttacacaaagtaacttattcctcataataacctgtgaagtcggtaaactattacccccattttatagatggggaagctgagacctggagacaaaacggaagtcccacttagctaagattctaaaccagacattctgactccagaacccagcgcatagactctatattacggcaatattatagcccataccattgtcaataatagtatgaaatttgacatctcctaatcaactttatatctcacacatatggagtgatgacaaataatgccttaggtcaccacattagttggagaaatgtagcattaaattaccgtctcttatagtaaattaccatcaaataatgaatttgtgccaagtacaagagcactgaatttcccaacaatagatttataaataacaattggaggaaagtttagaagtaggcagtattttgaaaatttggcagttgctttttatattgcttgttttacatttttaatacaaatgtagggggaattctcagcatattagtacttctcttcacatagctaacctagtgtcttacagtggaaacgcatgtattccgttggaaacaggaagacaggaagtagaggcagtggataaagacaaccctttgaagaatttttttctttctttttttaatgggagcagtgcacaagtgcagggacttgagacgggagtactggcagcggagcggtgggagcggtagggaagctcagtacgtgaggggtgcagctgcagagagttgatcagtgtggtgttggagcgtgtgcttccgtattttcaaggaaataaaagaaatgaggttatgaggccttcccttccactagtcctttgggaccgttcttgtcaagaaccctggtgatgcccatactgctagactcccggtcagttcaccattctcctcctcctccatttgacagttcgtgattccctcctcttttctgaaatgctttcttcacttgctggtgaccattctcttttcccttctgcctcaccgccacttcttctcagcctcatttgcctcttgcctctttatcttctggacttcaaggtccagtgcacagtagatggactgcctttttctctgtttgcagccgctccccaggggacctcatgaagcccggtgattctgaatgccgtggatctgccgaggattcccagatgcgtatttctcctccgtacttccccacaggacagcaggcttgaatagctgattgcctatgcaggacaacaggcttgaatagctgactgcctatgcattctctttgcttgccagttttttggacatcaaacttgacagatccaagattattactttgatcttccccacacccctcccacccccgagtctactatggtcccatcatagtattctgaaaatcagtgaatggccactctaccagttatttctaccagtttttaggttctaaacctcaggcattctggactcttctgttcattatcatattttgaaggcattatcttcaaaatctatctagactctgaccctttctcccatctccaccattactgccgtggctcttctgctggtcggctctctcctggtggatcgtaataacctgcagtcagctatcctggtccagagggagcccgttaaaccctgtggaatcttatcacgcttctgctcagaacgagccagtgtctttctgtctcactcagagtgtaagctacagtccttattgtggccatcaggtgctgtgtgttctccagccccctccccatcaccgcagtcctgccggtgatcttagctgctctcccctcggcaccccctgcggccccctctgccgcagcactcgtggcctgctgttccttgaacatgcttggtgttttctctcctcaaaggcttctttctgtttacctgaaatgtactttcctagggaatctatctggctcactcgcttactttttccacatctttgcttaagtattgccttattggagaggcaccctaccataaactagaatcccttgccccagctgctctttgtcctccgtattgggctttgtttttgttcttaccagttagaaccacttgacacacgatacatgtgtttgttacccttttctaccactagaacagacgctccatggtggtatagacttatttccgcaaaccaccccccccaactttttttacacaatggttaaataacacacatatttttaatgcaatgcctgatatcacaaagcctaaaataacaatgtttggcacattatagctgtttagtaaaaggttattaaacgaattgactatatgaatgaatgcttagtaaatagcttttccatttatctgtagttgctctataaatcagtattgatgtaattgagtgtttttcttcctccacagtacaatggtcagttccgttcaaggaaacacnnnnnnnnnnnnnnnnnnnnnnnnnnnnnnnnnnnnnnnnnnnnnnnnnnnnnnnnnnnnnnnnnnnnnnnnnnactctgtaccagaatgcaggacctaatatgccccaggtgccaaactataacttaacatcatcaactctgcttcagcccggaggcagccaacagccacctcagccacagcaaccatattctcagaaggctctgctataggacccggtgttcctcttggtggcagatacctgctaaatgccactgacaatgttatgagattcattactatcttaagatgtgtttatcctcagcttataggaatctctccaggtcaacaggttcaaatattcaagaaggtagaactctcctcaatttacactgactttttagaggttcttccccccccgcccctgcagaggaatgaaactacttacaacatttaattcctttcataatatgaaagaattgatacaaggctatttgtctcgtaaacctggtctgcagaaagtcaaacttacagaaactgttgtgacaaatgttatgtacatatattgatatgtaactgcattagtggccattttgaatcacagtggtgatcgtgtgaatatatttaacactgtgttaaattaatttacgttgctattttattttaatcataaacaactaccatgtttcttaatgttttgtgtaaatttaatgtaattatactatccttttaaacttcaagaaaacaaagttgttagcgtatttacatgaaggcgcattatgttgtcgtgtgtttcagtttcacattaaactgaaccttttactaattgtgagctaaagagatatatatatatatgtgtgtgtatatatatatatctacatgtctttctgtagcctctgcatactactggctgtcatcacaccagcgtacagtagctaaatttttggtgcaattatagcaaatgataatgttcccttttgaacttttacattttggcatgacatttcagagtattgtgggaccatgagacaaaattaagtacgatcacattctttatttctcattttaaagaaatgatgttggtttaccttttcctagttgaagatagtaattaggtttctaagctgtatactgtgtttattggtggcagtgacaccaaagatagaggcaatggatagaaatttttaaactggaaagaaaacctgaattacactacattttcgaagtctcttgtaattatttgggatatcaacaaaatttgattcgtctgtctaatcccttgctagtattttaaatatgtctttaacacattgtatcctttaattcttcattaaaatggaaataagtagatgtttaaaaaaaaaaaaaacaaaaagaaagaaaaaaagaaaaaaaaaagaagaaaaaaaaaaaaaaaaaaaaaaaaaagaaaaaaaaaaaaaaggggggggggggagaaaaaaaaggg

SEQ ID NO: 6308 - DNA, 2059 bp, Homo sapiens
gcagtgatataaatatatttttttcttagactaaatatgagctgactatctcttttgatgtgtgtacataggtgtgagtgtgtgtgtatgcgtgcctgtctgtgtgcgggtgtgtgtatgtgcatagcctcatgcttaggactacccatgaatgttgtggaatgctacacctggagagttctggttttccaccagtttcaagatgaagaactacatgatacagtggacctggagaccatccccttggaaagacaacccagagatgttcagcatcctgtatctacacgcatcctgtatctacacgtgtattttgtagctgtcacactaaccttaataagaattctacagctttggacagaggcattttcaccttaatggtgaagtaatttaaaatataaatccattcaggtgacaacccatcatcaaaattacaaattttctgattgaactcatctgaatcatcagttccttgatggagagagagaaggagatggaatgtgtctggtaaccccaaatggagtacaagtagcctttgttttcctgcataaatggacttgttgaatgcgaacgaatatatgcaattcatatacttttggagatgaacgtagatatgtgtgtcagctttgagatggtgtgtcctggattaatactttgtctcccaatatcacagaaaaatacatgccagtgactcttgaggttaaggtagttgggatgaaatggcctcaggcaatttcacattccctaattacctggaaagttctacagtaattaatatgcagctaactcctgttgccctcacaagagcatcagccttctagaatcggagctccggagtgtgaagattcagtattgatatgatatgtataccaaactccagccaacttactgccatttttcataatctgagtggctgccttgcttatcctaagctgtggttgcagaaaccgtggccatttatataagctataacatcaaatcagggaaaaatgaggaaaaaaaatagattctgaaccatttattgttgaataagtagagaaaatcatcaataaatatttattacattctgacagggtgtgtggcattgtgttctatgccagagtgacaaagttgattcacccctttttggggaccttaatatattttttaagggatgtgcctatgcattgatgcctgaaaaatatgtataaagaaatgaggttgactcttctgagcagttcatcttttccagaggtaagggtaggaggccaacttcaggatctgggtctaagcccgtgggcaagccctggccgagtgagctccaatgctaactcatgtgccgatctctagagcagtgggaaactaccccgctgcaccaaatcaagtagcttcaccttgtgtatgcaggccccaagttattttttagcaatcttacgagtgaaatgttctggtgggttgaaaaacgttcttattttaaagaaaggttgtgctcgctacactgctggtgtgtgcgttctgagacctcttgtattcaatctgtgaaggatatgtgtattaatccgtacacccgtatagcctcaatatttgtctgaagacacttaaattctgacccataaaggaaagttctagaagcaatattttcacttatttaacattctccaaacaacatcaagcattgatacacactgaagagtgcgtttattttttgtatcactctaagtatgttggaatatgcaaggactgtggttcaaattagaatgtataaggcatattataatttagttcatactgaaaaagaaattaacagaacattgttcggttcacacgttccaaaatttgagtgatttctggagttagacatagattttctattttgttttaatttgtcaaggtatttttcttcccttcatgaactttaggtacacataacttatgtcatttatttatggtcttttatacctagtttgtaaaattgtaaaatagcaaactaaatgcaaagagtttgcatttgaaaataataaagtagttaccgtatacaaaaaaaaaaaaaaaaaaaaaaaaaaaaaaaaaaaaaaaaaaaaaa

SEQ ID NO: 6309 - DNA, 800 bp, Homo sapiens
  misc_feature (724)..(742): n is a, c, g, or t
acgaagcaatgactttctcagggagaaagatttgcatccatgctgaggaaacagacagggccagtaatcacacagcaacaatcatctgtaacttgcagaaattcaatgtatgaataagtgtttaaagcctagatagagggcaattatctggttatctgtttttcatatttctatcagagataaaaacctctttagggaaatttatgaagggccatttgaaagaaggtttccctcttttgtagaaaagaattctcttaaaaattaaaacaaatttgggaggctgggggatttttgagagtttaaaagagtgaggaagatggggggcgggaagcaactatttccagctgcgagaaaccgatcaacctcacagcaaggtgtggtggctctgatgcaagcaacattcccatagatacagggctgtctggttttctattgctcattctaacttgaggagacgctcaagtgtgatttggggctttgacactgaaaataggtgtgaacttggatccatttaacctagccccttccaccacctcatcccttctcctgtccagtttgctttcaatgggtcaacaataaatattcacccttggcatccatctgcaacttccaagagggaatgaaggaagaacataaagtttctctgcatttgtttccaaagcccagctggcacagaaaacaaatgatacaagatatgactgggaaggcacacagcctgtctttnnnnnnnnnnnnnnnnnnngtggctctgggttcacgagacaactgctcccagctaccttcctctctgcttccctcca

SEQ ID NO: 6310 - DNA, 1718 bp, Homo sapiens
aactatgttacttgaaacgttgttacatttttaaagattgtttagtacttagggtgagttgttgagtgtgagtagaaattaagaattcggcacgagtgaaaatgtaagattatctgagtaatggacaatttctaatattcattttttaaagtagctaactctgccttattatccccttccacttttcccctggatgggtgatttatataatggaatgcagtgtcattgattgtgtttgaaggaggcacactaaatagcacactattgttatcttgaaaatttgttttattttgtttttgcccattttttaaatcatttcattctatttttgcccatgtctcttgtaatgagctacacatgtaattagtacacagagttctggtgatgtattcattcatgagtttaggaagtgagattttcagcttcatttccttctaagcatctcaactaggagcacaggggagacaaaaaagattgcaacctctttatacagttgtgtttgacccttggcactctattcttacttcaattatcgtccattgtaatgatcccttttcatgtctagcttaaccctaaactgtgagttccttgagaataagaactttgtcacagtgatgttttaatatattctcaccacacaataaaggatctaagtgtgtgctcaataaatgggtatttgttgggaaatttaaacaagaaatagtgaattattttctattcactatttggataccctttctccaaagatattttttatttgagagtatcttatttacagtaaaaatcacaaatattatatatacaatttagttttgacaaatgtctacatttctatcctttacccaggccttcaataagaaaataataataatttttttcccaaagacataatctggttatttggttatttggctgaaacaatgaatatctttgatacatggattctttaataatgaatctgttatttagtatttagtcattacttcataatgattccaaatttcctaataacttcttcccccactatccacccccatcccctgcccctgcaaaaaagacaaaacaaatctccctttccctcaggaagtagttgatttggtgcctgtgtaaggtagttcatgcatttccttcttctgttttgttaccataccgtatgcttggcactcagtacaccaagaaaacaaagaggcattgcctgtctcgaagttgcttagagtctagtgggggagataatgcacacctgcatccatagcacagcaatgtgtacataataacaaagatctgaaaaccccagtcagttttctatgttttgtcctctttcacacccttccgagagttctatctaatgtaactatgaatggtcactgtgtctttatttttggcccagactcttctcaatgcttcagcctcacgtatccaactacctactgattattctgcttggacatacatcagccattttaaatttggcctgagttgaactcattctctttctctcccacattcattgtgttttcatttgttttcttgaaatctcctggttaagtcagttcaggttgctatagaaaaaaattttgggtctggcgtggtgtcttgtgcctgtaatcccagaatgttgggaagcctaggtgggcagattgcttgagcctcaggagttcgagaccagccagggtgattatgaggaaactctgtctctgcaaaaaaaaaaaaaaaaaaaa

SEQ ID NO: 6311 - DNA, 287 bp, Homo sapiens
  misc_feature (4)..(4): n is a, c, g, or t
  misc_feature (239)..(239): n is a, c, g, or t
gtantttgctatctgtaacagttttggtagtggtattacagaggatttgtaaaatggattggagtacttaccactatttcatctgctctgaaatagttcactaaccaaactactgacaacagtttaatttttgttctttccttaaaattatacagactgcaccaagaacaccatatggacctagtaacacttcagatttttagaccttacaacctttgcaagtgcttctatggatttcnggggctctttaggattttctactgcttgaggtcactttgggtaattga

SEQ ID NO: 6312 - DNA, 3060 bp, Homo sapiens
cgtagttgatctccggagtttcgccatgcggaacttgggggctttcgcggcccgcgtcggtgcggagtagttgatttagccccgaccaaaccgtcctctacagcctcctggccccggcgcaggctgcccgtactgcccgtggcatgagggagccggaagagctgatgcccgattcgggtgctgtgtttacatttgggaaaagtaaatttgctgaaaataatcccggtaaattctggtttaaaaatgatgtccctgtacatctttcatgtggagatgaacattctgctgttgttaccggaaataataaactttacatgtttggcagtaacaactggggtcagttaggattaggatcaaagtcagccatcagcaagccaacatgtgtcaaagctctaaaacctgaaaaagtgaaattagctgcctgtggaaggaaccacaccctggtgtcaacagaaggaggcaatgtatatgcaactggtggaaataatgaaggacagttggggcttggtgacaccgaagaaagaaacacttttcatgtaattagcttttttacatccgagcataagattaagcagctgtctgctggatctaatacttcagctgccctaactgaggatggaagactttttatgtggggtgacaattccgaagggcaaattggtttaaaaaatgtaagtaatgtctgtgtccctcagcaagtgaccattgggaaacctgtctcctggatctcttgtggatattaccattcagcttttgtaacaacagatggtgagctatatgtgtttggagaacctgagaatgggaagttaggtcttcccaatcagctcctgggcaatcacagaacaccccagctggtgtctgaaattccggagaaggtgatccaagtagcctgtggtggagagcatactgtggttctcacggagaatgctgtgtatacctttgggctgggacaatttggtcagctgggtcttggcacttttctttttgaaacttcagaacccaaagtcattgagaatattagggatcaaacaataagttatatttcttgtggagaaaatcacacagctttgataacagatatcggccttatgtatacttttggagatggtcgccacggaaaattaggacttggactggagaattttaccaatcacttcattcctactttgtgctctaattttttgaggtttatagttaaattggttgcttgtggtggatgtcacatggtagtttttgctgctcctcatcgtggtgtggcaaaagaaattgaattcgctgaaatacctgatactccgcttatcttgtggcgacttttctgccgtatagcagtttaacctcaggaaatgtactgcagaggactctatcagcacgtatgcggcgaagagagagggagaggtctccagattctttttcaatgaggagaacactacctccaatagaagggactcttggcctttctgcttgttttctccccaattcagtctttccacgatgttctgagagaaacctccaagagagtgtcttatctgaacaggacctcatgcagccagaggaaccagattatttgctagatgaaatgaccaaagaagcagagatagataattcttcaactgtagaaagccttggagaaactactgatatcttaaacatgacacacatcatgagcctgaattccaatgaaaagtcattaaaattatcaccagttcagaaacaaaagaaacaacaaacaattggggaactgacgcaggatacagctcttactgaaaacgatgatagtgatgaatatgaagaaatgtcagaaatgaaagaagggaaagcatgtaaacaacatgtgtcacaagggattttcatgacgcagccagctacgactatcgaagcattttcagatgaggaagtagagatcccagaggagaaggaaggagcagaggattcaaaaggaaatggaatagaggagcaagaggtagaagcaaatgaggaaaatgtgaaggtgcatggaggaagaaaggagaaaacagagatcctatcagatgaccttacagacaaagcagaggatcatgaattttctaaaactgaggaactaaaactagaagatgtggatgaggaaattaatgctgaaaatgtggaaagcaagaagaaaactgtgggagatgatgaaagtgttcctacaggttatcacagtaaaacagaaggagcagaaagaaccaatgatgatagctcagctgaaactattgaaaagaaagaaaaagccaacctagaggaacgggccatttgtgagtacaatgaaaacccaaaaggatacatgcttgatgatgcagatagcagttcattagaaatcctagaaaacagtgaaacaacaccaagcaaagacatgaaaaaaacaaagaagatttttctgttcaaaagagtcccctcaataaatcaaaagattgtcaagaataacaatgagccgctcccagagataaaatccataggagaccagatcattttaaaaagtgataataaagatgccgaccagaaccacatgagtcagaatcatcagaatatcccaccaacaaatacagagagaagatcaaaatcctgtacaatactataaatatatatttatgttttcacagtcaccaagtgtattgtaatgtatacttgaaaaatgttataacttatgaagtaaagtttctgatagtagtctttaaaagatataagacttaatatgttttattcagcttctataagtgtgaccagttttgatatttatttatgctaatatttttaacaagtcatttcaaaatatgtgtatctcaaattctccctaaagtgttgtggccttaactgttcagtattgcaataaaaaatatatttttatatgtggaaaaaaaaaaaaaaaaaaaaaatagtttttactaaacaattttacttctttataattttataaggcaatatttgcaatcttacgacactgtaacagtttttgatgtatttacaatttttacaaaactgaggtaaaattgtttataatgaacatattttaataaactatatctggtcagttaaaatgttaaaaaa

SEQ ID NO: 6313 - DNA, 2959 bp, Homo sapiens
tccatccccacctctctgacggccctgtccctggccagcgcgtccccaccactcagcggccgctccacacctaagctcacctcccgcagtgctgcccaggacctggaccgaatgggggtcatgaccctgcccagtgacttaagaaagcataggaggaagctgctgtcgccagtgtctcgggaagagaaccgagaggataaagccaccataaaatgtgagacttctcctccttcctcacccaggacgctgcggctagagaagcttggccacccagccctgagccaggaagaaggcaagagtgccttggaggatcagggcagcaaccccagcagcagcaacagcagccaggactccctgcacaagggcgccaagcgcaagggcatcaagtcgtccattggccgcctgtttgggaagaaggagaagggcaggctgatccagctgagtcgggatggagccacaggccatgttctgctaacagactccgaattcagtatgcaggagcctatggtgcctgccaagctggggacccaggcagagaaggaccggcggctaaagaagaaacaccagctgcttgaagatgcccgcaggaaaggaatgccctttgcccagtgggatggtcctactgtggtctcctggttggagctctgggtggggatgcctgcctggtatgtggcagcctgccgggccaacgtcaagagtggtgccatcatgtccgctctgtcggacacagagatccagcgggagatcggcatcagcaatgccctgcaccggctcaagctccgcctggccattcaggagatggtgtcattgaccagcccctctgccccacccacctccaggacttcttctgggaatgtctgggtcacccatgaagagatggaaactctggaaacatctactaaaacaaccctggcctatggggacatgaaccatgagtggattgggaatgaatggctacccagcctggggctcccgcagtaccgcagctacttcatggagtgcctggtggacgcccgcatgctggaccacctcaccaagaaggacctgcgggtccacctgaagatggtggacagcttccatcgaaccagtcttcagtatggcatcatgtgtctgaagaggctgaattatgaccggaaggagctggagaagaggcgagaggagagccagcatgagatcaaggatgtgttagtctggaccaacgaccaggtggttcattgggtccagtctattgggctccgggactacgcaggaaacctgcatgagagtggtgtgcatggagccttgctggccctggacgagaacttcgaccacaacacactggccctgatcctccagatccccacacagaacacccaggcacgccaagtgatggaaagagagttcaataacctgttggccttgggcacagaccggaagctggatgacggggatgacaaggtgtttcgccgcgcgccctcctggaggaagcgcttccggccgcgggagcaccacggtcgcggcggcatgctcagcgcttccgcggagaccctcccggcgggcttccgtgtgtccaccctggggaccctgcagcccccaccggccccgccaaagaagatcatgcctgaaggtgagtaacaggcgggctgggcatggccgaggcccagccgagcgcgggcttcttcctggcaccccagggccgggccgggtggagaggggcgaggccgaggctggtgccccgcgctcctgcgctgcagctgcactaacgctccgcggggagcgtgtgtgcgcactaacccgccgctctgtgtgttctcccgcggctgccgacttctcccagctgggacggcggggtcgcagagactggagacctccacggttcggacctactcctgctgaccccccatcctcccgccccgggtctgacgggggagtgcccgtggctcggggtaagtgggccaggcccggggacgcgggcaccttgctgctggccctcggccccacgcacctgcccttggctgccggcctggccctgccgctccagtcccgcttaccagcactgcctggcttgccccttcctgcttcgtctggcctggggcgctttgcgcttggagcacgctgcgttgccgctgtcgcacacatcctacaacctctctcgcagctgctttgcaacctgatcaccttgagttctgagcagggactaggcttgcaggtgagataatgggccagggcacccagtccagaaggagcaatggcacctgggcagtgccagggcttaaagcccgctgctccttttcggtagaggagaggcccatcactggtgtggtggggtgggctctcccttaggcttgggcaaggcagccacctgcccttgctctcccttagtgttccctggcctccctgccatcaggttgctgggagtggagatggagggattattgagcagaaaatgagttggatggagataaacagctcccatccctgggtaatggatggtaagatgatggagattcctaagattggtggagttgggcaatgcatagccatctgactccttcagggtgctcttgatgggctggctgtaagggagactcagtcccagcctctcccctctacaactcctgccactgttggccatgtcgtaaggcagcagctgtgccaggatagctgggtccattcagagcaccttgagaagtgttgcagggaggtgttaagaagagaactctgtgcaaacagtgatggaaggctgttgtcttggtgtatcccttgcctcatagtcaatatattttttttttggcgagtcaccagtgacccgagccctccacaccagcctcccgtatctcatcaggtcccttctcagtactgtatttgctcagtgcatcaggaatgggtgtatgggtgtgtgtgggtgggtgtgagtgtgggtgtgtacgtaccaataaacaacctggttttaagacaatgtaaaaaaaaaaaaaaaaaa

SEQ ID NO: 6314 - DNA, 2688 bp, Homo sapiens
tagattccaccatgaccagtgatgacattaccttccagaatccactacacctgacagagacatcctctactgaaatccactaggactgatgattccaccatttcccataatccctcatgattttggtgtcatcacctcccaagacccatgatgcccaatagtgtcatcatcatttgcagggatgcatggtgtcatcatctccagggatccacttcaaccatgtgccaccacctcccaggatttcattcaaacatgtgccactacctcccagtatccacttcaactatggtgttatcacctgccaggatccacgagagccaatgctgtcaccatccactaggatccaccataaccctggtgtcatcatctcctgtgatccatgaggtccagtgctgtcaccatccactaggatccaccatgaccctggtgtcatcatctcctgtgatccatgaggtccagtgctgtcaccatccactaggatccaccataaccctggtgtcatcatctcccaggatccatgaggtccagtgctgtctgtcaccatccactagtatccaccataaccctggtgtcatcttctcccaggatccatgaggtccagtgctgtcaccatccactaggatccgccataaccctggtgtcatcatccgtgatccatgaggtccagtgctgtcaccatccactaggatccaccataaccctggtgtcatcatctcccaggatccatgaggtccagtgttgtcaccatctactaggatccaccatgaccctggtgttatcatctcccaggatccatgaggtccagtgttgtcaccatctattaggatccaccatgaccctggtgttatcatctcccaggatccatgaggtccagtgctgtcaccacccactaggatccaccataaccctggtgtcatcccagagtccactgtaaccatgtgccatcatcccccaagagccatcatcttaggagccaagtaccgtgacgggctgtatttcagttgtcctctggggccgcatggtacttacagttgttcacttaaggggaaccagcacaacaggccatattcccgtttccactaaaaggacaggggtggggccagctgtccccctctgaagacttcacccctactctggccctccttatgtcactgcctcactcctgaccgaggatgatgcctgcatcaatcccaccacagatgtggcctcagccaacctcaccttaccccccggtgaggcacccaggccccccctgacagcagcgctgtccctcacccagccatctgattggtgacagggtcaacccagcaacctctcattatcaccagagaggaagcatttcaaccctcaggtgacgccactgccccctgcccaatccctgtcacttgggcccctaccaggatcagcactccactggccccggccaaattctcctcagagatccctgacccccgcgggatgggtcaaagctggtgaccgactggggccttcagtgctgtcttctgctggcctcatcctgcagcagggacactggagagcaatggtccctgccagcacatctgcggggaccaggggtgctccttcacctccctccctaacaccttaacacccggggagcctccgggggtggcaggaagtccccagcacccaatgcacaatcttccctcaattctctttgtacatagccatgttgcgggggcggccattcccccactcttaaagggctacacgcccctcccccagcccctagggcgaggtggggggggcctcttcttcctcccctgggccgtccccctccctcttatgtctccccgcaaacactggcacctcacactccttcttgtcaggagcttggggcagacaactggcccttggttcccaccacactgaggaaatgggggttacccaaatccacctgggccctggtgccagtttttcaaccccacggcttctagctgctctgaggggctcctcccatcccttccagggcctccccagccccgcactgctcaggccaactgtgacttccccagaaaggagccagcttgagcacccaccccctcccagccccctcccctctgctcaacacctccgcggaacactcagctttctccagctgccgggatttgggggtctgggcctttcagcttttttatcccccctccactagctctagcccagcctggattccagggatcccacccctagccctgtccctattcagttggcacaggctgcctgaccctggggccttgatttgatctcaaataagccatagaggagagaggtcttgaggggtgggagcaggtgtgtactgacaattcccctccacatgtcttgagctgggacctcgtcatctgagacttccccatgccccaacaaatgcaaatgcacacaaacccatgcatacacaagcacacacacacaggcatctccccgtctggttgggggagcatgggagggggcacttcacagggagaagataaatagttccacacctgaagaccctccaacagcttctgcctccctcctcatcacttcctctctccaccccctctccaacactggccccttcccctaattaattccctggtgaggacagccagaggagctgcgacttggtattttttggaataaatagacattttcctgataaaaaaaaaaaaaaaaaaaaaaaaaaaaaaaaaa

SEQ ID NO: 6315 - DNA, 2357 bp, Homo sapiens
  misc_feature (1056)..(1058): n is a, c, g, or t
agcggttaaacggggcacgagtaggggtggcgggtcagtgctgctcgggggcttctccatccaggtccctggagttcctggtccctggagctccgcacttggcggcgcaacctgcgtgaggcagcgcgactctggcgactggccggccatgccttcccgggctgaggactatgaagtgttgtacaccattggcacaggctcctacggccgctgccagaagatccggaggaagagtgatggcaagatattagtttggaaagaacttgactatggctccatgacagaagctgagaaacagatgcttgtttctgaagtgaatttgcttcgtgaactgaaacatccaaacatcgttcgttactatgatcggattattgaccggaccaatacaacactgtacattgtaatggaatattgtgaaggaggggatctggctagtgtaattacaaagggaaccaaggaaaggcaatacttagatgaagagtttgttcttcgagtgatgactcagttgactctggccctgaaggaatgccacagacgaagtgatggtggtcataccgtattgcatcgggatctgaaaccagccaatgttttcctggatggcaagcaaaacgtcaagcttggagactttgggctagctagaatattaaaccatgacacgagttttgcaaaaacatttgttggcacaccttattacatgtctcctgaacaaatgaatcgcatgtcctacaatgagaaatcagatatctggtcattgggctgcttgctgtatgagttatgtgcattaatgcctccatttacagcttttagccagaaagaactcgctgggaaaatcagaggaaggcaaattcaggcggatttccataccgttactctgatgaattgaatgaaattattacgaggatgttaaacttaaaggattaccatcgaccttctgttgaagaaattcttgagaaccctttaatagcagatttggttgcagacgagcaaagaagaaatcttgagagaagagggcgacaattaggagagccatagaaatagaatgattccagccctgtnnngagtgagctgaaactgaaggaaattcagttacaggagcgagagcgagctctcaaagcaagagaagaaagattggagcagaaagaacaggagctttgtgttcgtgagagactagcagaggacaaactggctagagcagaaaatctgttgaagaactacagcttgctaaaggaacggaagttcctgtctctggcaagtaatccagaacttcttaatcttccatcctcagtaattaagaagaaagttcatttcagtggggaaagtaaagagaacatcatgaggagtgagaattctgagagtcagctcacatctaagtccaagtgcaaggacctgaagaaaaggcttcacgctgcccagctgcgggctcaagccctgtcagatattgagaaaaattaccaactgaaaagcagacagatcctgggcatgcgctagccaggtagagagacacagagctgtgtacaggatgtaatattaccaacctttaaagactgatattcaaatgctgtagtgttgaatacttggttccatgagccatgcctttctgtatagtacacatgatatttcggaattggttttactgttcttcagcaactattgtacaaaatgttcacatttaatttttctttcttcttttaagaacatattataaaaagaatactttcttggttgggcttttaatcctgtgtgtgattactagtaggaacatgagatgtgacattctaaatcttgggagaaaaaataatgttaggaaaaaaatatttatgcaggaagagtagcactcactgaatagttttaaatgactgagtggtatgcttacaattgtcatgtctagatttaaattttaagtctgagattttaaatgtttttgagcttagaaaacccagttagatgcaatttggtcattaataccatgacatcttgcttataaatattccattgctctgtagttcaaatctgttagctttgtgaaaattcatcactgtgatgtttgtattctttttttttttctgtttaacagaatatgagctgtctgtcatttacctacttctttcccactaaataaaagaattcttcagttaccctgtaaaaaaaaaaaaaaacaaaaacatcatgaaaagacaaaaacagaaaaaagaggggggggcgcgttataaatacaccgagggcgacataacacaacccgtttgcaagggcccaaagtggaaaaaaagaagggcgcgggacaaacagtggaagtcgtggtgggaactcttggtgtaaagaaacaacaaagcgaaaattaggttaaactgccgtgaaaa

SEQ ID NO: 6316 - DNA, 3539 bp, Homo sapiens
  misc_feature (1013)..(1030): n is a, c, g, or t
  misc_feature (1615)..(1703): n is a, c, g, or t
  misc_feature (3394)..(3394): n is a, c, g, or t
ggcacgaggaagacaaaaaaaaaataagcgtaacttccctcaaagcaacaacccccccccccacccctcgcccgctgcctggctcggggcagccagctgtgccggcgtttgttggctgccctgcgcccggccctccagccagccttctgccggccctgccgcgatggaggtgccccagccggagcccgcgccaggctcggctctcagtccagcaggcgtgtgcggtggcgcccagcgtccgggccacctcccgggcctcctgctgggatctcatggcctcctggggtccccggtgcgggcggccgcttcctcgccggtcaccaccctcacccagaccatgcacgacctcgccgggctcggcagcgaaaccccaaagagtcaggtagggaccctgctcttccgcagccgcagccgcctgacgcacctatccctgtctcgacgggcatccgaatcctccctgtcgtctgaatcctccgaatcttctgatgcaggtctctgcatggattcccccagccctatggacccccacatggcggagcagacgtttgaacaggccatccaggcagccagccggatcattcgaaacgagcagtttgccatcagacgcttccagtctatgccggtgaggctgctgggccacagccccgtgcttcggaacatcaccaactcccaggcgcccgacggccggaggaagagcgaggcgggcagtggagctgccagcagctctggggaagacaaggagaatgatggatttgtcttcaagatgccatggaagcccacacatcccagctccacccatgctctggcagagtgggccagccgcagggaagcctttgcccagagacccagctcggcccccgacctgatgtgtctcagtcctgaccggaagatggaagtggaggagctcagccccctggccctaggtcgcttctctctgacccctgcagagggggatactgaggaagatgatggatttgtggacatcctagagagtgacttaaaggatgatgatnnnnnnnnnnnnnnnnnntggagagtctcattagtgccccactggtcaagaccttggaaaaggaagaggaaaaggacctcgtcatgtacagcaagtgccagcggctcttccgctctccgtccatgccctgcagcgtgatccggcccatcctcaagaggctggagcggccccaggacagggacacgcccgtgcagaataagcggaggcggagcgtgacccctcctgaggagcagcaggaggctgaggaacctaaagcccgcgtcctccgctcaaaatcactgtgtcacgatgagatcgagaacctcctggacagtgaccaccgagagctgattggagattactctaaggccttcctcctacagacagtagacggaaagcaccaagacctcaagtacatctcaccagaaacgatggtggccttattgacgggcaagttcagcaacatcgtggataagtttgtgattgtagactgcagatacccctatgaatatgaaggcgggcacatcaagactgcggtgaacttgccccctggaacgcgacgccgagagcttcctactgaagagccccatcgcgccctgtagcctggacaagagagtcatcctnnnnnnnnnnnnnnnnnnnnnnnnnnnnnnnnnnnnnnnnnnnnnnnnnnnnnnnnnnnnnnnnnnnnnnnnnnnnnnnnnnnnnnnnnactaccccagcctctactaccctgagatgtatatcctgaaaggcggctacaaggagttcttccctcagcacccgaacttctgtgaaccccaggactaccggcccatgaaccacgaggccttcaaggatgagctaaagaccttccgcctcaagactcgcagctgggctggggagcggagccggcgggagctctgtagccggctgcaggaccagtgaggggcctgcgccagtcctgctacctcccttgcctttcgaggcctgaagccagctgccctatgggcctgccgggctgagggcctgctggaggcctcaggtgctgtccatgggaaagatggtgtgggtgtcctgcctgtctgccccagcccagattcccctgtgtcatcccatcattttccatatcctggtgccccccacccctggaagagcccagtctgttgagttagttaagttgggttaataccagcttaaaggcagtattttgtgtcctccaggagcttcttgtttccttgttagggttaacccttcatcttcctgtgtcctgaaacgctcctttgtgtgtgtgtcagctgaggctgggggagagccatggtctctgaggatgggtcagagctaaactccttcctggcctgagagtcagctctctgccctgtgtacttcccgggccagggctgcccctaatctctgtaggaaccgtggtatgtctgccatgttgcccctttctcttttcccctttcctgtcccaccatacgagcacctccagcctgaacagaagctcttactctttcctatttcagtgttacctgtgtgcttggtctgtttgactttacgcccatctcaggacacttccgtagactgtttaggttcccctgtcaaatatcagttacccactcggtcccagttttgttgccccagaaagggatgttattatccttgggggctcccagggcaagggttaaggcctgaatcatgagcctgctggaagcccagcccctactgctgtgaaccctggggcctgactgctcagaacttgctgctgtcttgttgcggatggatggaaggttggatggatgggtggatggccgtggatggccgtggatgcgcagtgccttgcatacccaaaccaggtgggagcgttttgttgagcatgacagcctgcagcaggaatatatgtgtgcctatttgtgtggacaaaaatatttacacttagggtttggagctattcaagaggaaatgtcacagaagcagctaaaccaaggactgagcaccctctggattctgaatctcaagatgggggcagggctgtgcttgaaggccctgctgagtcatctgttagggccttggttcaataaagcactgagcaagttgagaaaaaaaaaaaaaaaaaaaactcggagggcttctatgtgcgtgggcgggagagaagcgcgagcgggatcgtctcagtggcgacgagggtggggcgtggagcgcggctttgccgtggacggcggcgggcggtaatggggccgaacggtgcgcggcggagggggcgttgaggcagagtggggacgggccggattggcgcgccccgcggtggagcgaaagggggggcggcaggggcggcgggggggcgtgtgcgtgggcggcggggggccacggagggtgggagtggcggcgggaggtggtagccgagggcgcggcggtggagagcangtatggtagtaggccggcggtcggaggttggcggaagggcggcatgtgtgcggtagccagaccctcagaaaataatgtagccgaggcgcgggggcgggggcggcgaacgaaggagaggtgcgcgaactggtacggcgccgccggc

SEQ ID NO: 6317 - DNA, 6742 bp, Homo sapiens
  misc_feature (3002)..(3002): n is a, c, g, or t
  misc_feature (3092)..(3150): n is a, c, g, or t
  misc_feature (3414)..(3466): n is a, c, g, or t
  misc_feature (3546)..(3587): n is a, c, g, or t
  misc_feature (3793)..(3856): n is a, c, g, or t
  misc_feature (4434)..(4479): n is a, c, g, or t
  misc_feature (4861)..(4945): n is a, c, g, or t
  misc_feature (5079)..(5102): n is a, c, g, or t
gggagcgcccaggaaaatccgggcgcccgcgggggtgccggccgctcctcccgccgccccgcgtcccggcccggccgcgccaacccccacggcggcccgcaagggggcggggggaggcggggcggaggaggagccgcgggcgcggcgccgcgctgtccccggccgccgcccgccccactccgcaccgcatgtaaacagtcccagccggcccagcccggccccggaggagcccgcgcaggccgagccgagcgccgcgctgcccgcccgggaggagggcgcctaggagcgggagggcgggcggcggcgggaggcgggcgcggggccgcgatggatttccagcagctggccgacgtggtttctcaatggtgctccaacacgcccttcgagctcatcgccaccgaggagaccgaacgcaggatggatttctacgccgaccccggcgtctccttctatgtgctgtgtccggacaacggctgcggcgacaattttcacgtgtggagtgagagcgaggactgcctgcctttcttgcagctagcacaggattacatctcctcctgcggcaagaagacgctccacgaagtcctggaaaaagtcttcaagtctttcagacctttactggggcttccggatgcagatgacgatgcgtttgaagagtacagtgctgacgtggaagaagaggagccagaggcggaccacccccagatgggggtcagccagcagtaaatctgggggctcccctgagaaggagagtgagccccacagtaacctaggtggggtcactgcccctcctgggttagcattttgcattagcacttcgaaataggacatctggctcccagcatccaaattaaaatgaaatacctttttaacgaccacatatctgtgatgagctttgctcagaagtgaccctgaatttcactcccgcttcagtgggggtttctatggagttgtcttggtagcctttgccattttgaatttagagtccattttgtggctgactattctcttaagtttatgttggagaattaacattcgctgactcgaatgtagagaactctgaatgtattaaggataggttttgagtcctcacaggtgaccttactgagggaaagcatggcagagaagaaatgcagtctgcactttttatgtactttttaagtgtccgtaagtgaaaggttttgcttataaagcatgaattttaatatctagtcattaaactgcacaagtgcaaatacaagggcaggaaaggataatcacttagctttggactaagagggtaagagaggcccagaagcctttaagtgttttgccattactgagttacctgggtatgtagcgactggttcgtggttaggtgtaaatgttacttgcttgttcgactgtttcaaaacatgctaattccaaagccacttttgaagtctatagtggaaaatatagatggggtgaaagatataatgtattgatttttaaagctgtttataagccgtcccacgtataaaatgaaacattttaccttctctctttctaatgagatggccgcttgttaaatcatgaaaacatccagaattcaagtgccgcttaaactttgaagccatagataaatttgttagaaaagtaaaccaggattaaaagtttttaaaaatatggtagaatccttctttactttttaagtcttttatttaaaaaaaaaaaaaagtcaaaaaaaggattccattgtgtaatttatttaaaaatttaatcacatgtttcgagggacttaattgtggtgtatttgtaaagggacacgaaggtaggaatcttttaatcgtgggttagcttggttaacagggaacgttttaataatcaagatactcagacaactcacagaaacaacttctgtaataactggaaatactgctgttatcgtttagccaacaattacttactggggacatcctttgtaatgctaacatggaattattcctggacccttctgcatccctggttttagttaacctaggatgcggaatgcctcctttacaacactagattaaacctagcatctggggtgggtacgtttaaacagtcacacatgtgcctgttaggttgtgaaagttttgaattaaaaacaagcagtagcagcagaggccacagaacttatgggagtcttgtatatcttccaggcatgtcggtgtaaacctgattgtctcgacattttctgtttaattgattggtgctgtgaggagttcggctgctcgtggtaaaacagcgtactccagttttaagtcatcgggtaaaataataggacagtgatttccatctgtgcttcagtacccactttgtgttcttttcttgaaaagtcatactaaaggttaatttcaagtaaaatgaatttccttccaagtagcctattagtaaaacacaacttagtgtttcatccattggggtgagcatatactgccctttgcagccctgcctgtgttctgattggctccattcatgaagcaaaggtgattgtgagctgtatattacacaggtgtcgcccaggtttcgtaacctccactttaatgcagtaagccgcaagaatgacttctgcaagtgaaatgaggaagcttcactagcttgctccattggaaggtaaactgaaattttatacgttgaagcttaaaatctaaatttatgtatgtttggaaatggaatggacattaacataaaatgtattttatcaaaaaggtgtttagactttgaccaaatacatgttggtattatcatgttaatgttctctgtttataaaaattgagtggagatagatagactcggccattctgtgggctgatgagaattctgggctttgttttgcaccaggggtaggaaacagagaacatgtctgtatgttacttaatctccatagcaaaatcccaaacagcattagcagatcgaattgtttcttctaagacttcctttttctgaatgtgtgcacatcccttctcgtgctcacacacttgcccacacactcacttctncctgcgctgtggctgctctaagcagggctgtgcatggtgcaaagctgcagtcagtgagcctggcagcctgtggtttctgttatggaaatnnnnnnnnnnnnnnnnnnnnnnnnnnnnnnnnnnnnnnnnnnnnnnnnnnnnnnnnnnngaggtggcagcggtgtgggaggaggagtgttgaccttggacgcaggagagacacctgggttctagttcaagtcggccaaggactgtgtgaccttgacaagtctaactggtctgtgaacaaggggcatttgcccttccagctgtaaacactgcccttctgtgcctgccttatgtgtgtgtgtgagtaaggagcaacagtcaaggaaacttttagggattcgagaagaaaatacatgtgggatcttgccaaggtgctgcctttagnnnnnnnnnnnnnnnnnnnnnnnnnnnnnnnnnnnnnnnnnnnnnnnnnnnnnagcccctgagggctcgatctcatggggcagatgaaattctcttccttagaggaaagggaaaggtgaggccccagaggacnnnnnnnnnnnnnnnnnnnnnnnnnnnnnnnnnnnnnnnnnnttttctttgtgctgtggcagactggggctttggaagtggtgtatgtttaacttacctgagagtgagagatgtgtaggaagaatagctggaagaaagtgaaagatgagtgccagtacttttggcctgttatccagtagagagaaagtgacagtgaaagtaacgtgagagagaaagagtgtgtgtgtatatgtgagagagagaaagannnnnnnnnnnnnnnnnnnnnnnnnnnnnnnnnnnnnnnnnnnnnnnnnnnnnnnnnnnnnnnnttgataacattacaaaaccgtgatcctgggtttgagtgaatcctagagacattgttcttatggccgcctggtttccgcagcctgatcaccatatcgagcagacgtcaaggaatcagagtgaagtacggagccagggagggaggtgaggccccgtgtagtgcctgtcaccactgtggattcacctgcactcaggtgtccactcctgtctcccaggcccaaagcagcacatggtgcaatggaaaagtctcttatgtagggatcctccttgtgtcctggtgccagaattagatttccagtgtacttcaacgaaaacttctctcctttatagttgctgtcatctttcatgtataaacagaaaccgtctctagcacaatatatttctgaatattgtttctgtttcataagagcacaatgtacatggacctaggggagctgtggtcccaagtgtcattggaatttatattttaggaataggctttgcatgttaaaattcacaagttgggaaactggtatgaacagatctgatttcttacagagaggcatgaaggaataggcaggacttaacttggggtgggagnnnnnnnnnnnnnnnnnnnnnnnnnnnnnnnnnnnnnnnnnnnnnncctgagccccaggaaaactgttttcattttcacggctgtctcactgggggcctgctttcctcaaaggaactgactgtatgttgagaggcaatgccttgtgttggcatggctttgccactttaaaagtgccccccagccaaggagaccaacaggaaccctgctcatctggtagggctctttccttcagtaaaaccagctgccagcctgagaagcctgtctttcccaaatgcaggcagatctgagaggggctccaggcacccggcaggtaaatcacaaagcaaacttgggtgtccttggcagcggggaggaagcaggagtgccccctcaggccagagggcagggccaacctcctcactgtgcttcaaggttgtagaaagagcannnnnnnnnnnnnnnnnnnnnnnnnnnnnnnnnnnnnnnnnnnnnnnnnnnnnnnnnnnnnnnnnnnnnnnnnnnnnnnnnnnnnccagtcttcggagaagcctaaaatttctttgaattaaaaactgatcctttttcataaagacccagtcacttctcccagtttagtgataacaggtatgacacaagaagctgaagtcttttagattttatagagannnnnnnnnnnnnnnnnnnnnnnnctggtagcctgtggtgtccatggcaatgggtgtccatggtaaaatatctatagcttctgctcactgggcaaatataaaagacaacatattatttaacataatatgttgtcttttatatttttatttaaatctggattatgaaaatatagtacccatgagcatttcatgttagaaaccccatttaaagcactataaggctgaataggcacaagcgattaaaagtagatgccaggccacataaaaataaatgttttaatttacttagagctgtattcaagttgtttgataccagacagaaagctgacagtctgttctttgtaaactgcctttccctgtttttctgttttgttttgtttctcaagtttcattttttactaagccccttctgacacctaggcagataaagataagagtagtgcgcagtacaaatgtcagctctgaagaggaggaagtaaatcttcaatgctagggcagatcttcactatccgtgatccagtcttaatttgagcatgagagcaaaatttagtcatctacacaagaagcaaaagcaaggaatagttgttgggtttttgttttttggttgttgtttttttttttttttaggcaagaagtgttgccggtagggtatgtgtgctttctttgccttcctatttcctttcaaagaaatctcttgtaaattacaaaactgtgaattgggttgccaaaaactgttgcccttcgttagatgcttcaaacagtgtaaatcctatactgcaccctgtccacctctgctccctcctccctcccctgagagtgaggacctcatccgaccatgtaattaccattcgcttgctattaaagagcctttcaaactctggaagaaaaaaaaaaaaaaaaaaaaaaaaaaaaaaaaaaaaaaaaaaaaaaaaaaaaaaaaaaaaaaggaaggaaggagagaaacaaaaaacaaaacctgcagcacaaggagagaagacacataataatgaggcgaggagcacaagaatgacaatgtatgtctgcaaggcagcgggagagaactagagagagagagcgaagcggagccgcgaatatatgaatgacggagcatggagagacgacgcgacgaatcaatgacagtggtccgcaatgcaggacgaggatacaaacgagcatcagatgagagaagggtgctacatcataggaggaggcgagacgaatgagctagcatgtcagagatggaggtgaaagagagaaaaaagaagaaggtgagagtgaggagataaagacgacacgccaaattacaggaaagtcaagtaaatgagaataagcaaaggaacaaagaaggatagaagataagaacaaagtaaaaagacagagaagtgagaaaagccaagaaagagaggatgaagacgacaaaccaaagaacgggagtagagttatcgcacttgctgtggacgagggaagatgtaggagtgcacgataggcgagggagaacggagacggaggagcagatggtaatacgagaagatacaggattcatagcacgaggggagaggtggatagacacaggtagagtagataacgtgagagagatcagatgaaagaagtgggcagcacggcgaggtcggaggaaggcgtaggcaggggggtggtaggggggt

SEQ ID NO: 6318 - DNA, 659 bp, Homo sapiens
cccggggcggatccgccgcgtcgcatcgggcgccgctttttttttttttttggtacagaaactaccacagcaagaagcggtaatgtaaaaggatatacaaatcaatcaatcattgattggccaatgatatgcaaagtagcaaaaacaatgcctctatttatcctcgccattaatctattcaaacatataaagattttactggtaaaattatacaactgtgttagacgtaatgcagtaggtaccttatacaaatcattgaaaacttacatttaaaaggagtccctcattgggtccacaaaactaatctctttttacctcctgcccagtcagcacttgctactgcacagggataagaatccacccagctatccggataagggagatgtccctctcaaattaagtatgcaaaagcctaaaaatatttcattaagaggtactgaaaaaagcttaacttctaaaattgagacccaattcttcttttattgtgcatagaaaggtgaaccaatgtattatcttgtaagtaaagctaataaaggcagtcttgaacactcaatcgttgttccttgcagttacagccctcttttaaacgcagttatattcatttgataaattataggagaagtatttcgtagaggtcttgattagcgttcggacgcgtg

SEQ ID NO: 6319 - DNA, 653 bp, Homo sapiens
  misc_feature (524)..(524): n is a, c, g, or t
  misc_feature (566)..(566): n is a, c, g, or t
tgattaaaatgaaagaacgttcaccccaaatccttatgatgtggtttaaaaataaagagttatagataagaccctattttcgaaaacaaagtgttaaatccccccacccccacccccgggccccgtgttaccttttgaaaggttgagcgaaagtgagaatgcaaggttttcctgaacgacgttgcttagaggtaacgcggggctgtgatgtctgttaatgggcatccttgcaaaagatgtcgtttgttgctagtgacgtttaaggtttgaacctgctgttcgtatctactgcattttatgtagtaacacatttaaaacaattaaattgtgcttaactgcaatgttcctaaaagccttatttttttgtatttcccaggtccctatgagaagtttaatgaaatattactggctaatgtggttttcccacctccattaaccatcatattcgtgactagttgctcaggctttttaaaaaacaaggaaactcaagagatctttactggtttatttttcaggaatgactntgtgcctctggtttaaatattagaaaacagaaaaataccagntggctttaaatgtttgctattcagttaaagactggatttgtttaaatgtatacattgtatcaaaggttagttttaaactttgtgttt

SEQ ID NO: 6320 - DNA, 4530 bp, Homo sapiens
  misc_feature (124)..(156): n is a, c, g, or t
  misc_feature (1181)..(1218): n is a, c, g, or t
  misc_feature (1756)..(1779): n is a, c, g, or t
gcggcggcggcgcgggaggttcggagcgggagctcgggctcgcggacggtatggaggactacgagcaggagctgtgcggcgtcgaggatgatttccacaaccagttcgcggccgagctggaggnnnnnnnnnnnnnnnnnnnnnnnnnnnnnnnnncgccctccggggtccccctgttcaccgcgggccgacccccgcggacgttcgaggaggcccttgccagaggggacgcggcctccagtcccgccccagccgcatctgtgggcagcagccagggcggcgccaggaagaggcaggtggacgccgacctgcagccggccgggtccctgccccacgcccccaggatcaaacggcctaggctgcaggtggtcaagaggctgaacttcaggtcggaggagatggaggagccgccccctcccgactcctcgccgacggacatcaccccgccgccgagccctgaggacctcgcagagctttggggccacggagtctcagaagctgctgccgacgtgggtctcacacgggcctcaccagctgcccgcaatcccgtcctgaggcggccccccatcttggaggactacgtccacgtgacatccacggagggcgtccgggcttatctggtgctgcgtgctgaccccatggccccgggggtgcagctgacccatctggatggcttcattcctttggcacccctgtccagtctcccacccctcactggccagcttactggggttgtcccacccgggtccctgagcactgatgggggctgacgtgaatcctgtgacctaggaggggcccagaggcaattgtcctcccttccccacagggctctctcctccacgtcccatggcgaggcggtggccagctggacctgctgggtgtgtccttagcctccctgaagaagcaggtcgacggcgagcggcgggagcggctgcttcaggaggcccagaagctttcagacaccctgcacagtctcaggtcgggggaggaggaggcagcccagcccttgggggcccctgaggaggagccgactgacggtcaagacgcctccagtcactgcctctgggtggatgagtttgcaccccgccactacacggagctgctcagtgatgacgtgaggtcttgttctcactcaagtgtggctggcttcctctgttcccaagatggaagaacctgggccnnnnnnnnnnnnnnnnnnnnnnnnnnnnnnnnnnnnnngacggagtgggctctggtttgcccttttgagttgtaggtggtgaactgagcacagggctgtgtgctactggtcccctgtgacctgtgaggcaggctaggggtccagggtgtcacctgatccaagtctctgttccctttcctaccttcacagcagctgacactggagtgcccctggggagggcaggggcctcccagatgggttgtggccagagccgtgggggtggagcccctggtgtgagccttgcggtcactcgctggcaggaagacgggggtggccattcatcctgtggcttggcatcccatggggcatggggctcatggtggcaggtggactgtccgtgcctggaggcggtgccctcaggctgtgcttcccttcccgtccttcccgcagttcaccaaccgctgcctgctcaagtggctgaagttgtgggacctggtggtgtttggccacgagaggccttcccggaagcccaggcccagtgttgagccggcccgggtcagcaaggaggccacagccccaggcaagtggaagagccannnnnnnnnnnnnnnnnnnnnnnnctggaggctgggctggacccgagccagcgaccgaagcagaaggtgagccccgctggctgtgccgccgggaacaagcctgaggctttgcactcggcgccggcacccttgcagcctgttgactttctccaggagccgtgggtgtggtgacgtgtgggtcttggcgtgaagcgccattagcgtgagttagaactggagcgttgcagtaacaactcgggggaagtcgttgtccctgaagggctctgcggctggccaggatgatctgggtggacggtgggtggtttctgggggccagtcacactggtatcagctgtgttttgtctgcacgaactttgctttgtgtaggtttttttttccgttgccatcttggtgtgtgaaagtgctcaattttgttcttatttgatggctggagtggggtggagggagcgcccagcctgtgggacacatgtggcagtccctggctgctaggccgggagcgtcctgtaggtgcggtgcacactacgccttcatctacctgggctgcaggtggcactgctctgtgggcccccggggctggggaagaccaccctggcacacgtgattgcgcgtcacgcggggtactctgtggtggagatgaacgccaggtgagtgatgtgaggtccgtctctggctcgccttctgtcctgacgtgtttgagttctggtggcggacctgaaaccgggtgtggatgttcccgtcttgagggtggtgggggcctgggtgtgtgggccgggaaaacgtgtccttcctcggggttcacgggatcggcagcagccgcgtcatgtgacggtctccacgcaaatgcggcagccccggccttgggaggctgccctgccagggacgcccactgccctgacgacccctgacctccccattgcagtgacgaccgtagcccggaggtcttccgcacacgcatcgaggcggccacccagatggagtcggtgctgggtgctggcgggaagcccaactgcctggtcatcgatgagatcgacggggcccccgtggccgccatcaacgtcctcctgagcatcctgaaccgcaaggggccacaggaggtggggccacagggcccggctgtgccttcgggaggcggccgacggcgccgggcagagggggggctcctcatgaggcccattatctgcatttgcaatgaccagttcgcaccgtccctgcggcagctgaagcagcaggccttcctgctccacttcccgccgactctgccctcgaggctggtgcagcggctccaggaggtctccctgcggcagggcatgagggccgacccaggggtgctggccgccctctgtgagaaaactgacaatgacatccgggcctgcatcaacaccctgcagttcctgtacagccggggccagcgggagctgagcgtgcgggacgtgcaggccacacgcgtgggcctcaaggaccagcgcagagggctcttctcggtgtggcaggaggtcttccagctgcctcgagcccagaggcgccgtgtgggccaggaccccgccctgcctgctgacacactcctgctgggtgacggggacgcgggctccctcacctccgcctcacagcgattctaccgtgtcctgcatgccgctgcctctgcgggcgagcacgagaaggtggtccagggcttgtttgacaacttcctgcgtctgcggctgcgagactccagcctgggtgctgtgtgtgtggccctcgactggctggccttcgatgacctgctggcgggggctgctcatcacagccagagcttccagctgctgcgctacccacccttcctgcccgtggccttccatgtgctgtttgcttccagccacacacccaggatcaccttccccagcagccagcaggaggcccagaaccggatgagccagatgaggaacctgatccagacgctggtgtccggcatcgcgccagccacgcgcagccgggccacgccccaggccctgctcctcgatgccctctgcctgctcctggacattcttgcacccaagctccgccccgtgagcacacagctgtacagcacccgtgaaaagcaacagctggccagcctggtgggcacgatgctcgcttacagcctgacctaccgccaggagcgcacgcccgatggccagtacatctacaggctggagccgaacgtggaggaactctgccgcttccctgagctgcctgcccgcaagcccctcacctaccagacgaagcagctcatcgcccgcgagatcgaggtggagaagatgcggcgggcggaggcttctgcccgggtagagaacagcccccaggtggatgggagccccccagggctcgagggtctgctggggggcattggggagaaaggggtgcaccgacctgccccacgcaaccatgagcagcggctggagcacatcatgaggcgagcggcccgggaggaacagcctgagaaggacttctttggacgtgtggtcgtcaggagcacagcagtcccgagtgcaggggacacggccccggagcaggactcagtggagcggcgcatgggcacagcggtgggcaggagcgaggtctggttccgcttcaacgagggtgtctccaacgccgtgcggcgcagcctgtacatcagggacttgctctagttctctgagccgcggacatgccctcgcattgcttcccgcagagtgcagagacaggaagctggagatgtctttataaagtcacacctttacagactgtaaaaaaaaaaaaaaaaaaaaaaaaaaaaaaaag

SEQ ID NO: 6321 - DNA, 7195 bp, Homo sapiens
  misc_feature (1232)..(1275): n is a, c, g, or t
  misc_feature (2447)..(2461): n is a, c, g, or t
  misc_feature (3914)..(4009): n is a, c, g, or t
  misc_feature (4733)..(4768): n is a, c, g, or t
  misc_feature (5217)..(5236): n is a, c, g, or t
  misc_feature (5727)..(5742): n is a, c, g, or t
  misc_feature (7044)..(7179): n is a, c, g, or t
gagagactgactgtatctggggattctggcaaggtgaagagctggtctgtttggcaggaccttcccatctgggatccatctgtgtttccctggaatgggacaggcagctctagtcagtgagaaatcgcagatgtgagagagctgacacatgtccagctaatgaaaggaggaggaaggctggtctccgattgagctttgaagattaggaggagaaaaagaggagctttggaatatctatttcaaataaatttggtgtatttaagaatctggattgtttataatttgggcatttgggaggtggggttttgccatgttgcccaggtgggtctcaaactcctgggctaaagcgatcttcccatgttggctgcccaaagtgctgggattacaggcaagagccaccataccagttcctgtctagatattatgatgaagattgaggatggtagtttttgtggagcacaatcctgactgtacctgtgatgttgcattcatcttttggaacataagcagatcaccaggtgaatggctaaagaatctggaataagcttgaaagaaatacaggtcctggcaaggcaatggaaagggtctcaccaggtgaatggctaaagaatctggaataagcttgaaagaaatacaggtcctggcaaggcaatggaaagttggtcctgagaaaagggtgccagcgatgcctggatcgcctgtggaagtgaagatacagtccagatcctcacctcccaccatgccacccctcccaccaataaatcctggaggaccgaggccagtgtccttcactcctactgcattaagcaatggcatcaaccattctcctcctaccctgaatggtgccccatcaccgccacagagattcagcaatggtcctgcctcctccacatcatctgcactcacaaatcagcaattgccagccacttgtggtgctcgacaactcagcaagttgaaacgctttcttaccactctgcaacagtttggcaatgacatctcccctgagattggggagaaggtgcggactcttgttcttgcactggtgaactcaacagtgacaattgaggaattccactgtaagctccaagaagccacaaactttccccttcgtccttttgtgattccatttctcaaggccaacctgcccctgctgcagcgggaactgctgcactgcgctcgggcggccaagcagaccccatcccagtacctggctcagcacgaacaccttctgnnnnnnnnnnnnnnnnnnnnnnnnnnnnnnnnnnnnnnnnnnnncatggaggtgcacggaaatgggaagaggcccagtccagagaggagagaagagaatagttttgatagagacacaattgctcctgagcctcctgccaagagagtatgtaccatcagccctgctcctcggcacagtcctgctctcactgtgcccctcatgaatcccgggggccaattccatcctacccctccacctcttcagcattacaccttagaggatattgcaacttctcacctgtatcgggaacccaacaagatgctagagcatcgagaagttcgtgatagacaccacagtcttggtctaaatggaggctatcaagatgagttggtagatcatcgtttgacagaaagggaatgggctgatgaatggaaacatcttgaccatgcgctgaattgcattatggaaatggtagagaaaacaaggcgctctatggcagttctgcggcgctgtcaggaatcagatcgtgaagaactcaactactggaaaagacggtacaatgaaaacacagagctgaggaaaacggggaccgagttggtctccaggcagcacagccctgggagtgcagattctctcagcaatgattctcagagagagttcaacagcaggccaggtacaggatacgtacctgtggagttttggaaaaaaacagaagaagctgtgaataaggtgaaaattcaggccatgtcagaagtacagaaggccgtcgctgaggcagagcagaaagcctttgaagtgattgcaacagagagagcacgaatggagcaaaccatagcggatgtcaagcggcaggccgcagaggatgctttcctcgtcatcaatgagcaagaggagtccacggagaactgctggaactgtggccgcaaagccagcgagacatgcagtggctgcaatatcgcgcgatactgtggctctttctgccagcacaaggactgggagcggcaccaccgcctctgtggtcagaacctgcatggccagagcccccacggccagggccggccgctgcttcctgtaggcaggggctcctctgccaggtccgccgactgcagcgtgcccagcccagccctcgacaagacctcggcaaccacatcgcgttcctcaacacctgcttctgtgacagctatcgacaccaacggactctgagccccggactctgcttaccctgatgggttgctgnnnnnnnnnnnnnnntttggggctgaggggattgattgttgggaacccgtggcatgttagcttgccgggtcagcaagaaatgaattggaggcaggaagagtccaagcctgaataataacaccccacagcctctctgtgcacttgctgtctgcggagccagtgtgccattctctgcacatgggcagccagcctgagctgcctcctccatggctttcctggtttgttcctctctccactgaagctgacttagccggccccttttcagtgtagaccaccagctcccctccccatctccttgagtcagcagactgtccaatgtgctcagccaggctggaggcggcaggcggcaggcagcaggctgtggaggaggcccctcggtcagggagcggcctgcctcacccctgaatagctccttcggccccatctccatcctcagcagatgacactgattggcctcacggggacttgggtaagcaacaggcggcattcaggactcttctcaaccctgctgttcagacttgataagatctcagagtccacaggaaagaagtcactgttgcaataaaagcacccgtagtagcaaaaacataaacaaataaaacttcccccacatcacagatgattttggacaagattttccaaccttgctggctactttagtttgggacctgttttttttctcatttgattttgcttgtgcagaaaatagtttccagcacatggattgatctgagagagaatgaggctcagttgtggatagtctgttttctctgagcatgttggccaactagtatcgtcaaattattgagtggatcatctcttggaaatgcagaacttctgccaccacttggctatttgcacagtcatcttgttctgtgtccttttatctctcagaccacacacatctggaacgctgtgggcatcttctgcccatgggctccatttggcacctgctgagccacagttgtcctgctggatgtgctgtgcaggttggtaggacttgcccccactgtcaaggcctggtctcatctgaaaagccctcctggacctcaaagaattcttcagacctcatagttacaggtcattatatctactatgttgatttatcatcaggcacacaacttctgtttccttctcttgtgttatctgatagcgtccctccttgagctcactccgaaaggttttatgaaatgtgaaccattttgggaaaagctgatcaatttttcttcctagcttcccattttcaaatgggacatcactcatatccctttcagaatgttaggaactgcctcccacattcttccctgtctttttgggttttgttttttgttgttgttgtggttttttaacacaaagcctgggcaacagagcaaaactctgtctcaaaaaaaaaaaaaaaaaggcaaaattaaagaatttcaagtccctaatttactctaaccaagcattttcagtcttacaaagaaannnnnnnnnnnnnnnnnnnnnnnnnnnnnnnnnnnnnnnnnnnnnnnnnnnnnnnnnnnnnnnnnnnnnnnnnnnnnnnnnnnnnnnnnnnnnnnnggaacacataagccccacagttttccagtcagcctaatacatgggtatcccccgaccccatctgcctccttaagccacagtccttggtggggaactctaagggggacggagtcagtaccccggacagggccacatttgcatgagacatggctgtctcacaggtcacagagccattacaacagcttactagtttttcatggatttgttggattaacaccttaagcaggttttttattgttattttgtttgtttgtttgttttgagacgggagtttctctcttgtctcccaggctggagtgcaatcgcgcaatctcggctcacggtaacctctgcctcccaggttcgggcgagtctcctgcctcagccttctgagtagctgggattgcaggcatgcgccaccacgcccaactgattttgtatttttagtggagacggggtttctccttgttggtcaggctggtctcaaaccccggacctcaggtgatccccccaccttggcctcccaaagtgccaggattacaggcatgagccactgtgtccggtcttgagcaggtttttaaaatctccagtggccataaaactagccagggtagctcatgcttttactggttggaataaggagccaaaaccaacaaaataatatttattagggttggatgcccatttctgtggttaaggcttaggtttggtgtgcagagcctggcctgctcttgtgggctgtggnnnnnnnnnnnnnnnnnnnnnnnnnnnnnnnnnnnntgctcttccaccctgctcgtgctgcccagaggctgatctgcaaacctgggcagtattccacactgaagctcagtttgcaaaccttctgctgtgttaattctggtcagtttcacacagaagtcacgagggcctctgcccaggaccttctattcacatttcaagaatccctttctgaaattctccaactctctggtcaggaggaggagcaccattggggcggggtaggcagctagaggcgcaggagcgaatccaggttccttgcgtggttcccagcctctgctgacagcacctcagctaccaggtggggagtggaaattcagcctgcttagaggactgacctctacagttcatatttgcagtgacataaaaggcaaagaggagctggcatggtggtacagaaggtatcagtcaagcgcaggctcttcagaaacctagaaactaaaaagagnnnnnnnnnnnnnnnnnnnnccatcagccagacatgtctagggtgagaccagtgctcagcaccacccgccaaggaacactgatgagttgtgggacattatggtcggccaagtgaggaatgattgcagggaccagagaagaccaaagatgccagatgtccccagagtttcttgagggctgggtttcacgtctttgcttgtcctttttgtccccacttgcctgcaccgtgcctgactcatccagtggggaaggtgactcaagaagttgtttaagcctaggcctaggcagtccacttcgggaggtgggggcactccacactggggggccctgcagctccagggctggtgctctagcagatccgctcaggcacggttgggtgaccgtggggtcaccgattgcgtagattatttctagggcagtgctgggttagaaatgtctgtctggaaacaggacacatcttgccaccacaagtccacacctggccttggctgctgcccgctctctgcagcgtnnnnnnnnnnnnnnnntttgggccagaaggtcaccaggagttcatcactgcttagtgtcaacttgacatcttcagcttccagacagaaaacccatgctttactttgtacagccctgtcccagagttagtaagcctcggcttgtcacctgcttgcaaagggtatagacatcattctgggtagttctagaggatatcgcaacaagtgcgtttgaaggttcagcacagctggaattgtacggtagtgagctcttcaaaatgaaaacagaatgaccggatggccatctgtcctggaaactgtagaattgaataaatcactgaaaatagaacacttcttggaggctttcttcagaactgaactagaaacaaggtttccaggctcccaggtcagtagaccaaaccaacttccttagatttttttttttaagctgtttgcagaaaactgggtggtagcgtgtctgaaccaaacggaagaatagccagcggagcatggactgttccagcacgggccagatggccagctgtcgagagcagccctgcccagattgcggtgggggctgtgccagcggctccgcagggcccttccaactctggagtgtctgtagttcttgtgaaaccaaaacgttgactacctgcctctttcctcgggcatcgacgtgctcatttccaaagatgatggtgcaggtgaccttttccatcgtgagctaagagaaggttaggaggcctgaggggcgggccttgtgtcccctcctccccctccacagcccctgaggtggagcttccctcacagaccccatctggtcgagcctacggctgcccagtgtacactcagtgatgcttataccaaatagggcatgtgcgctggtgtctgttggggacagccccatccctaccttggagtcggcagagaagcagcaataagcattaggcgaatgattgaaagggctgctgcgccaagaggccttcagtccccttaacgtggctttccaacttcctgacgaggctacaaaggctccgctcacaaaagaaagccaataatgtaaataaatagaaaacgaagcctccacgcgtggtttttaaagggggatgatgaatgtgacaccacccacagaatgcattagaatctggtttttctgtgctttgtcattttactctgataggaatttttgttacctaactctgtgcataacttatttaatgtactgtataaatgaaccaaaactgttaaatatgtatttagtttgttctacttaaagtagtcaataaaaaggctatattcctaaaaaaaaaaaaaaaaaaaaaaaaaaaaaaaaaaaaaaannnnnnnnnnnnnnnnnnnnnnnnnnnnnnnnnnnnnnnnnnnnnnnnnnnnnnnnnnnnnnnnnnnnnnnnnnnnnnnnnnnnnnnnnnnnnnnnnnnnnnnnnnnnnnnnnnnnnnnnnnnnnnnnnnnnnnnnattgaagcgttatttc

SEQ ID NO: 6322 - DNA, 2689 bp, Homo sapiens
acttgtcatggcgactgtccagctttgtgccaggtggctcgcaggggttgatgggattggggttttaacctgccatgtgggtcaagactggcgctaaaagttttgagcttctcaaaagtctagagccaccgtccagggagcaggtagctgctgggctccggggacactttgcgttcgggctgggagcgtgctttccacgacggtgacacgcttccctggattggcagccagactgccttccgggtcactgccatggaggagccgcagtcagatcctagcgtcgagccccctctgagtcaggaaacattttcagacctatggaaactacttcctgaaaacaacgttctgtcccccttgccgtcccaagcaatggatgatttgatgctgtccccggacgatattgaacaatggttcactgaagacccaggtccagatgaagctcccagaatgccagaggctgctccccgcgtggcccctgcaccagcagctcctacaccggcggcccctgcaccagccccctcctggcccctgtcatcttctgtcccttcccagaaaacctaccagggcagctacggtttccgtctgggcttcttgcattctgggacagccaagtctgtgacttgcacgtactcccctgccctcaacaagatgttttgccaactggccaagacctgccctgtgcagctgtgggttgattccacacccccgcccggcacccgcgtccgcgccatggccatctacaagcagtcacagcacatgacggaggttgtgaggcgctgcccccaccatgagcgctgctcagatagcgatggtctggcccctcctcagcatcttatccgagtggaaggaaatttgcgtgtggagtatttggatgacagaaacacttttcgacatagtgtggtggtgccctatgagccgcctgaggttggctctgactgtaccaccatccactacaactacatgtgtaacagttcctgcatgggcggcatgaaccggaggcccatcctcaccatcatcacactggaagactccagtggtaatctactgggacggaacagctttgaggtgcgtgtttgtgcctgtcctgggagagaccggcgcacagaggaagagaatctccgcaagaaaggggagcctcaccacgagctgcccccagggagcactaagcgagcactgcccaacaacaccagctcctctccccagccaaagaagaaaccactggatggagaatatttcacccttcagatccgtgggcgtgagcgcttcgagatgttccgagagctgaatgaggccttggaactcaaggatgcccaggctgggaaggagccaggggggagcagggctcactccagccacctgaagtccaaaaagggtcagtctacctcccgccataaaaaactcatgttcaagacagaagggcctgactcagactgacattctccacttcttgttccccactgacagcctcccacccccatctctccctcccctgccattttgggttttgggtctttgaacccttgcttgcaataggtgtgcgtcagaagcacccaggacttccatttgctttgtcccggggcctccactgaacaagttggcctgcactggtgttttgttgtggggaggaggatggggagtaggacataccagcttagattttaaggtttttactgtgagggatgtttgggagatgtaagaaatgttcttgcagttaagggttagtttacaatcagccacattctaggtaggggcccacttcaccgtactaaccagggaagctgtccctcactgttgaattttctctaacttcaaggcccatatctgtgaaatgctggcatttgcacctacctcacagagtgcattgtgagggttaatgaaataatgtacatctggccttgaaaccaccttttattacatggggtctagaacttgacccccttgagggtgcttgttccctctccctgttggtcggtgggttggtagtttctacagttgggcagctggttaggtagagggagttgtcaagtctctgctggcccagccaaaccctgtctgacaacctcttggtgaaccttagtacctaaaaggaaatctcaccccatcccacaccctggaggatttcatctcttgtatatgatgatctggatccaccaagacttgttttatgctcagggtcaatttcttttttctttttttttttttttttctttttctttgagactgggtctcgctttgttgcccaggctggagtggagtggcgtgatcttggcttactgcagcctttgcctccccggctcgagcagtcctgcctcagcctccggagtagctgggaccacaggttcatgccaccatggccagccaacttttgcatgttttgtagagatggggtctcacagtgttgcccaggctggtctcaaactcctgggctcaggcgatccacctgtctcagcctcccagagtgctgggattacaattgtgagccaccacgtccagctggaagggtcaacatcttttacattctgcaagcacatctgcattttcaccccacccttcccctccttctccctttttatatcccatttttatatcgatctcttattttacaataaaactttgctgccaaaaaaaaaaaaaaaaaaaatgggtgggaaagagttgaggcatgtctcgctcccacttttgcaggtgc

SEQ ID NO: 6323 - DNA, 7835 bp, Homo sapiens
  misc_feature (7174)..(7194): n is a, c, g, or t
  misc_feature (7513)..(7575): n is a, c, g, or t
ccccgaagttgttccgcgctgggcgggcgagcggctgtgggagtgcgggcggcgggccggcgggcggaccgggccggtgctggagaagtttgcgctgcggttcgtgagcgcagggtgcgggccccgccggccgctgcgcgcccgctgccatggctttccgcaggaggacgaaaagttacccgctcttcagccaggagttcgtcatccacaaccatgcggacatcggcttctgcctggtgctctgcgtcctcatcgggcttatgttcgaggtcacagccaagactgcctttctatttattttacctcagtataacattagcgtgcctacagcagacagtgagaccgtgcactaccactatggccctaaggacctggtcacaatcttgttctacatcttcatcaccatcatcttgcatgctgtggttcaggagtacattttagataaaatcagcaaacggcttcatctctccaaagtcaaacacagcaagttcaatgaatctggacagctggtcgtctttcatttcacctcggtgatttggtgcttctacgtggtggtgacggaaggatacttaacaaacccaagaagcctctgggaagactacccgcatgtgcacctccccttccaggtgaagtttttctacctatgccagctggcctactggctgcacgcacttcctgagctatacttccagaaggtacggaaggaggaaattccccgccagctccagtatatttgcctgtacctggtgcatatagctggagcatacctcttaaacctgagccgcctgggcctgatcttgctgctgctgcagtactcaactgagttcctcttccacacggctagactcttctactttgcagatgaaaacaacgagaaactgttcagtgcctgggctgctgtttttggggttacccgcctcttcatcctcacccttgccgtgctggccattggctttggactggctcgcatggaaaaccaggcatttgatcccgagaaagggaacttcaacactttgttttgcaggctctgcgtgctgctgctggtgtgtgccgcccaggcctggctcatgtggcgcttcatccactcccagctgcggcactggcgggaatactggaatgagcagagtgcaaagcggagagtcccagccacacccagactaccagccaggctcatcaagagggaatctggttaccatgaaaatggagtggtgaaggcagagaacggaacctccccacggactaagaaactcaagtctccctaaggccaaagtgctaagaacaggaatcctcttggtgggggccgagcagggggcaaggagcccaggccccctccctgcctcctccttcctgcctgtgatgctccgtctcaaacagccgaaacctgtcttgcaatggggggagggggcgtttcgctttccttcttcttggcttcctcttattcttccacaaaccattctcaataaagccaaaaatctttctctttctccccctcaggccacctcctgtcctcactcctgtcctgtgctggcttttctggaacgccaggcgcccatggctggcacctttctgcttgctctgtttcttgccttatggctgctgcttttcctttttacttcctattttcaccttatcttgcaatttttctgtctgatttttacaatgggaggggagctaagattgcagtcctgtccttcggtcccccagggcctgccggtcagaagcctggggctggtaggcccttggtggtcctcatgtggatgggcaagaagagagcggccatctcggatcataatctccttggtgctgattaactgacgagatatatgattccagttctgcatgtaccatcttgaggcacagcagccactgctcgttgtaaatgccaaggcatttggctttgggacgtgacaactcaatccagaaggatggtgtgaactcggttgggtcccgtgactcgagctcctaccagtggctggccgcggattggaagccagcctgctgtcgctctgtggggaggacatgtcttcccactgcttagagcgagagcagagcaaactgcgcagcaggcacctccagaaaggtaatggtggcagaacccacagtggagtcgacctaggcctttctccagcagtcccagtcgccattgctttttcagccattcacaagcattcaaaaccaaaccaaacagcagttcatatacctgcctgagataggctggtcctcacctccagagccagccagccccgtcaggggccaaacttactaccttgacttcatctctagctgcagaaacactaagtctcaagggcttcagccccatgctggtcccttggtgttcagggagggtcacttggaccgctgttcatctggccgcccttgttgagtgttctttggaattgtcgttttttgagcacaactacagcattttagactgcatgaaaccatgactgactgagagtcactctctgggtagatgataggcgcctttctggccccttccctcacagattctttcccctcccctccacctgaagagaaggcctccaagtccttttggtgccttgtgaggacttttagaaggggcgttcagctttaaaaagccggtcctaattacggccggacgcagtagcttacgcctgttatcccagcactttgggaggtcgaggtgggcagatcacctgaggttaggagttcaagaccagcctggccaacatggtgaaaccccatctctactaaaaatacaaaaaattaggtgtagtggcaggcacctgtaatcccagctactcgggaggctgaggcaggagaatcgcttgaacctagaaggtggaggttgcagtgagcggagattgtaccatggcactccagcctggacaacaagagcgaaattctgtctaaaaaaacaaaagtcccaattaagaacctccgaactctgttttgaggcaaaggggagtagttcttggtaggtgcaggaatagtagtgtcatttggaatactggtcatctttctgacatcacagtagaaaccaaaccttggatttagattcaaaaggggggaaatgggtcttttcatcaaggcaactccccttctccaagtcacttacatcatagataaattttagcttcccagtaactgagggatttgtttcctaacgccattggaggccttcatccctctctacgataaggttgcagaaatgggaagagctacccgtggttgcttttgattacccttaggaagtgagacagtgtttttgaaaatatgtatttctcccatttctccctctccttccctgacacttctctgggctgcacagcagaaacgttggtaaaagggcagtttggtttcaacacagcagacctgatatgggatcccttagccactttagtcaaacagccctgacagagtctataattgagttcaggccccccaccttgcctaataactgcaaatcgcatgttcagccagcagcctcctaagcccaccttcctcccccattagagaacacccatcctaggtgctctccaggctgtgtcattggcagggcttcacatgcaggaggcctctctcaggtgagtccaggttaaactgttgagttgtggcttcaacagatatgtatggcatgctgggatgtgccaggtgcctgcgttgtgccagttgctggagaggtagtgtgagcagagcagctgaaatcttgccatcaagcaaccctcattctcatgcctgtaggtttccattgctctgtcccaggacacttgcgtgccagagacgccacaacttcatgtccctgtctcttgcaagctccccgtgctgccagtacttcatgccttggatgtggtcccaccagcccagtggctggggtcagcttaggctctgcttcccagtggacgggtgtgctaagggtttattttatgtaaaaaaaaaaaaaaaacaaaaaaaaaccctgagaccatgagtggggctggcatcttgccagcctgggcttcagggatgtttggggggggtggttagagggtagttgtagggtactttgtcacccccctccccctgccaccctccctggcacgtttatttcacagcagagccaagtctgtggcaggttgacacagactgtgttgccagagctgaaataattccacttcatcctatgagcgtgttgggctagcttgttctaattttggccactttggctgttttcttcagttttatgcattctctcctgccccaaagtgccaagccatttgtgaaggctctgccagacacctccaagcttgagagctcagcaccatgcaccaagagcaggagaaaagacgtaaacctaccccagcaactgtggcctctcgacagccctggctaactaacttacatttgtggggaagccaacagacacagcaggaggagagggaggtggcgctggtggaccaaggatctgtgctacccgctcccctccttggaggtgcagtgatgatgggagttatttttaccatccgggcgctgatagctgcactattaataaattgcatgtgttccttttgaaggtaggggatggttctgggtgagaggggagcaggctgagccggcgggggatctgctgtcctcccttttgagtcagttctaatcccatgtgtgtctgggccaccagaccgaaatggttgctgagaaacttgtctgttcatgtcccaaggcataacttcccaacatttaagaaaccccaatagacacctctgccctggccacgttcacagatccttctcttgaccggaaaccctgggaccctaagaacccctgaagcttggggtgggtgtgtgcttctggggtctcttttgggacctcctttgtcagtaccccttcttttttctaagcagctaataagaggttgggtgaaagagtgcatctcctcccaggattccacaacaaaattcttatcttccatggatgctttaattggaagtgggttgccgacccccttgtgcctagaaaaggcctttgcttgggtttcctttgtatgcttcagccttcctagttggtttttctaggcctggtgtgagaggtagggaagtctgcacataactaattcttttgcttaagggcctatggcacaagtgcacaaacttcaattcttgatgttctaagctctctcctctaacagagggagtgctgaaagcttttgagtcaagacaatggagtgctcttcctccctcactctgccttccgagcttatggttccttttctcaggagaggattttcaggattattggaggattaggtcattgtcagatgactggaaaacctaaataggatctctctccagctcaaggttgtcccagtgaggaagactttaccaacttctcactctaccccactactcacatgagtgttagctccaccttgcaaaggctgaagaccagttctccccagtgaaagctgcctcattcttttatggagttccctggagtggcagagctataaagacgagcattgggatttgcagtctccatgtagcctttcgtgcttggcaacccctgtagactttttgtcccaagcagattgcgtgcgtgcgcctgtgtgtgagaataagtgccttactttgctgtgtggttttcaacttgtactccgtggccagcccccagttgccagggctcgacggcagccaaggacaccatacctcagtatagttatatataaaagggacacggattgtgacagtttcaccccatttgtttctaaccccgctgcccaggattagggtctgtggtgtgttctgttttgtttttggtttctcccttgtgtcagttctcttctggcccagctgggtggctgtggaagtctgtgaggtggcccaaccacaagcatacctattaagagaagcccagagcttccagcccccacttcgaaaactctcctctggccccacatagcaaactccttctccgttattttccccacccccagattttttttaaaaggcccacttgccataacctcttttggtctattttgcttcccattcagcccaaagtttatatgataaaggtgtttacttttacttcccagtctccaagtgctaacacataaacacatacatgtctgactgttgcagaactgttcgagctcctaattcagtgttaccttgttttagtcgcagcaaccctctcccctaccccttgcccgcccacgtttttctcactcttccgggttgtgcaataactctcccagccagtggtcctttccacagcctttctgtcccttaaaacacctgcaactgggggagaaatgggacccatgggagggggagtcgtcatcccttacacaagaaatagccactttccttttgttgtcattcttgtgatcctgggtgggtttctgtggcactcttttagaacatgtagcatcatcttagaggtctatttttaaaaaatgtgttgaagaggaaaaaaccattctcacgatggggcttaagtcattgtccaggaataagattggcgtggtgcccatgacatcaccgtcactctgcctaaaagcactctagagctacttgttcacgtggagaggaaggatattttgcgaagcaacagccgcaggtggagagccctgttcacctgatagggtctagctgtgacagtaaatataataccgctgtttccttgggtacagatttgagtgttcatgtgatgagactgtaaacctcatttttcggttcctctgtttaaaaaaacatctgaaggatgaactaaggctgctggtgccctgagcaactgataatgcaaatgtggacaaagtgtctgttttctactctagcctgttcatatggaccaaatttcaacaaggaactcaaggaaaatttgtacctgccgtatttatgctttcatgtaaaaaagggttggggggaggggtgtctttttgcttttggtgaactttttttcaaaatcatttttccactgtttctgtctggttttaaaacaaattacagttttgtatggattttttaaatgtacattttggaacaaatgatcaaatattttctgaaataacaataaaaggcagaaaattatctaaaaaaaaaaaaaaaaaaaaaaaaaaaaaacacaccaactaagaacgagcaaaaagagaagaggacaaaaaaacaagaagagcatgggagcagagagagagcgggggcagagcgcgtggtgnnnnnnnnnnnnnnnnnnnnngcttcgtggtcgtcgggtggggtgggtgagaggagggcgcaagcgcacgcggtgcagtccgagagagcccgtcggcggcggcgcgtgtgacgagcgagaaggtcgagacggcgcgagacaaggcggacggagcgtcgtgtgggagtgggagggaggacgcggaggagcgcgcgcgtgtgtgggctaggtcccgtcgtcctctactgcacgtctgctggcggtgcagcgagctgggtgcgctccgtctgcctctgcatgctttgggtgatgcagctgtgtaggctgcgtttggttccgctgctgagcgtagaaggaagannnnnnnnnnnnnnnnnnnnnnnnnnnnnnnnnnnnnnnnnnnnnnnnnnnnnnnnnnnnnnngccgaaggacgccgggcgcgggcgaggcgacggacataggcacactcccggcgcaagacgaacagcaccgaggatgcaaggaagacgaatagagatcgataggaacacagagaagatgagcgcgccagacgagcgcacgacgagccgccggcgcgactggcggcgacgaccgacacgacacgcccgagcataacagaacaagacccaccgcgaagagctaagaaggcgacgcgcggagacggacggacggggcacacgca

SEQ ID NO: 6324 - DNA, 971 bp, Homo sapiens
gcagctataaaggccgcgcggggccacgaggagcagagccggcgccgtcaccgcccgcattgccgctcccagtcccgcgctcggcacgacatgaaatcccccgacgaggtgctacgcgagggcgagttggagaagcgcagcgacagcctcttccagctatggaagaagaagcgcggggtgctcacctccgaccgcctgagcctgttccccgccagcccccgcgcgcgccccaaggagctgcgcttccactccatcctcaaggtggactgcgtggagcgcacgggcaagtacgtgtacttcaccatcgtcaccaccgaccacaaggagatcgacttccgctgcgcgggcgagagctgctggaacgcggccatcgcgctggcgctcatcgatttccagaaccgccgcgccctgcaggactttcgcagccgccaggaacgcaccgcacccgccgcacccgccgaggacgccgtggctgccgcggccgccgcaccctccgagccctcggagccctccaggccatccccgcagcccaaaccccgcacgccatgagcccgccgcgggccatacgctggacgagtcggaccgaggctaggacgtggccggcgctctccagccctgcagcagaagaacttcccgtgcgcgcggatcctcgctccgttgcacgggcgccttaagttattggactatctaatatctatgtatttatttcgctggttctttgtagtcacatattttatagtcttaatatcttgtttttgcatcactgtgcccattgcaaataaatcacttggccagtttgcttttctaccatccggctgtggctcagtgagactcctgctgggagggtggaggcccaggaatgggcgggcaggacaccctcatccagtcctgcggggctggtgtgaaaggcgctgggaaccggctttgaatgaataaatgaatcgtgtcatctgcaaaaaaaaaaaaaaaaa

SEQ ID NO: 6325 - DNA, 2639 bp, Homo sapiens
  misc_feature (1607)..(1651): n is a, c, g, or t
actccttggctggaggcagtgctgaggccgccgtcccctctaccatcagtccagtccggcccgccctcctgcagccatgtcccggcccctgtcagaccaagagaaaagaaagcaaatcagtgtgcgtggcctggccggcgtggagaacgtgactgagctgaaaaagaacttcaaccggcacctgcatttcacactcgtaaaggaccgcaatgtggccaccccacgagactactactttgctctggcccataccgtgcgcgaccacctcgtggggcgctggatccgcacgcagcagcactactatgagaaggaccccaagaagatctccgggggctggcagatggaggaggccgatgactggcttcgctacggcaacccctgggagaaggcccggcccgagttcacgctacctgtgcacttctacggccatgtggagcacaccagccagggtgccaagtgggtggacacacaggtggtactggccatgccctacgatacgcccgtgcctggctatcgcaacaatgttgtcaacaccatgcgcctctggtctgccaaggctcccaatgacttcaacctcaaggacttcaatgtcggtggctacatccaggctgtgttggaccgaaacctggcggagaacatctctcgtgtcctgtaccccaatgataatttcttcgaagggaaggagctgcggctgaagcaggagtatttcgtggtggctgccaccctccaggacatcatccgtcgcttcaagtcttccaagttcggctgccgtgatcccgtgcgcacgaacttcgatgccttcccagataaggtggccatccagctcaatgacacccacccctccctggccatccccgagctgatgaggatcctggtggacctggaacggatggactgggacaaggcgtgggatgtgacagtgaggacctgtgcctacaccaaccacacggtgctgcccgaggccctggagcgctggccggtgcacctcttggagacgctgctgccgcggcacctccagatcatctacgagatcaaccagcgcttcctcaaccgggtggcggccgcattcccaggggacgtagaccggctgcggcgcatgtcgctggtggaggagggcgcagtgaagcgcatcaacatggcacacctgtgcatcgcggggtcgcacgccgtcaacggcgtggcgcgcatccactccgagatcctcaagaagaccatcttcaaagacttctatgagctggagcctcataagttccagaataagaccaacggcatcacccctcggcgctggctggttctgtgtaaccccgggctggcagaggtcattgctgagcgcatcggggaggacttcatctctgacctggaccagctgcgcaaactgctctcctttgtggatgatgaagctttcattcgggatgtggccaaagtgaagcaggaaaacaagttgaagtttgctgcctacctagagagggaatacaaagtccacatcaaccccaactcactcttcgacatccaggtgaagcggattcacgaatataaacgacagctcctcaactgcctccatgtcatcaccctgtacaaccgcatcaagagggagcccaataagtttnnnnnnnnnnnnnnnnnnnnnnnnnnnnnnnnnnnnnnnnnnnnnggtaccacatggccaagatgatcatcagactcgtcacagccatcggggatgtggtcaaccatgacccggcagtgggtgaccgcctccgtgtcatcttcctggagaactaccgagtctcactggccgagaaagtgatcccagctgcagacctctctgagcagatctccactgcgggcactgaagcctcaggcaccggcaacatgaagttcatgctcaacggggctctgaccattggcaccatggacggggccaatgtggagatggcagaagaggcgggagaggaaaacttcttcatctttggcatgcgggtggaggatgtggataagcttgaccaaagagggtacaatgcccaggagtactacgatcgcattcctgagcttcggcaggtcattgagcagctgagcagtggcttcttctcccccaaacagcccgacctgttcaaggacattgtcaatatgctcatgcaccatgaccggtttaaagtcttcgcagattatgaagactacattaaatgccaggagaaagtcagcgccttgtacaagaacccaagagagtggacgcggatggtgatccggaacatagccacctctggcaagttctccagtgaccgcaccattgcccagtatgcccgggagatctggggtgtggagccttcccgccagcgcctgccagccccggatgaggccatctgagcctccagaccagaccccaaaccagcccttgagtctgtcacactctcttgggccagccccagcacctcatgcagagggtggggtactggagttagatctctaagcccctcctggaaccctcattttccccactctcaatgtcccagtgtccagcgtgactaaggacacgggcccccttccgtcctcgggctcccggtcccctcctatttatggggtctgaccaactgcacccactccctaataaattcattctccttgggaaaaaaaaaaaaaaaaaaaaaaaaaaaaaaaaaaaa

SEQ ID NO: 6326 - DNA, 3139 bp, Homo sapiens
tggccaacttctgaacaggaagcagttcgctcgcgcctaggttggcgcgggctgggaggtgttccagccctttaagatgttgcgcgtggtgagctggaacatcaatgggattcggagacccctgcaaggggtggcaaatcaggaacccagcaactgtgccgccgtggccgtggggcgcattttggacgagctggatgcggatatcgtctgtctccaggaaaccaaagtgaccagggatgcactgacagagcccctggctatcgttgagggttataactcctatttcagcttcagccgcaaccgtagcggctattctggtgtagccaccttctgtaaggacaatgctaccccagtggctgctgaagaaggcctgagtggcctgtttgccacccagaatggggatgttggttgctatggaaacatggatgagtttacccaagaggaactccgggctctggatagtgagggcagggccctcctcacacagcataagatccgcacatgggaaggtaaggagaagaccttgaccctaatcaacgtgtactgcccccatgcggaccctgggaggcctgagcggctagtctttaagatgcgcttctatcgtttgctgcaaatccgagcagaagccctcctggcggcaggcagccatgtgatcattctgggtgacctgaatacagcccaccgccccattgaccactgggatgcagtcaacctggaatgctttgaagaggacccagggcgcaagtggatggacagcttgctcagtaacttggggtgccagtctgcctctcatgtagggcccttcatcgatagctaccgctgcttccaaccaaagcaggagggggccttcacctgctggtcagcagtcactggcgcccgccatctcaactatggctcccggcttgactatgtgctgggggacaggaccctggtcatagacacctttcaggcctctttcctgctgcctgaggtgatgggctctgaccactgccctgtgggtgcagtcttgagtgtgtcctctgtgcctgcaaaacagtgcccacctctgtgcacccgcttcctccctgagtttgcaggcacccagctcaagatccttcgcttcctagttcctctcgaacaaagtcctgtgttggagcagtcgacgctgcagcacaacaatcaaacccgggtacagacatgccaaaacaaagcccaagtgcgctcaaccaggcctcagcccagtcaggttggctctagcagaggccagaaaaacctgaagagctactttcagccctcccctagctgtccccaagcctctcctgacatagagctgcctagcctaccactgatgagcgccctcatgaccccgaagactccagaagagaaggcagtggccaaagtggtgaaggggcaggccaagacttcagaagccaaagatgagaaggagttacggacctcattctggaagtctgtgctggcggggcccttgcgcacacccctctgtgggggccacagggagccatgtgtgatgcgtactgtgaagaagccaggacccaacttgggccgccgcttctacatgtgtgccaggccccggggtcctcccactgacccctcctcccggtgcaacttcttcctctggagcaggcccagctgaaccaatggaggcctggggacatctggcatggtcacccctgcacatgatctgaggccagctccccttccctgagctgcctcctgcttctccctcaaagtctcctacccttctcttcctcttttaagccctctcttcctcgctttccttcctacctagctccttgttggtgagcttcttgtgccttaatcctgtgacccagccccttacaccactttccaccttcctgtccgaagtacacggacactagctgccccaggaagttgtgtgattttaaatcacttctgtctttgctggaaagtgtatttgtgcataaataaagtctgtgtatttgtttcaaaaaaaaaaaaaaaaaaaaaaactcgaactagtttctctctctctcgcagcgctgcctgcgccaggccgaggagctgcgggagcagctggagcgggagaaggaggcgctgggccagcaggagcgcgaacgtgctcggcagcggcagcgggcggagctggaagagctgaggcagcagctggaggagagcagctctgcactgacccgagccctgagggctgagtttgagaagggcagggaggagcaggagcgccggcaccagatggagctgaataccctgaagcagcagctggagctggagaggcaggcgtgggaggccggccgcaccaggaaggaggaggcgtggctgctgaaccgggaacaggagctgagggaagaaatccggaaaggccgggacaaggagattgagctggtcattcaccggctggaggccgacatggcgctggccaaggaggagagtgagaaggctgccgagagccgcatcaagcgcttacgggacaagtacgaggccgagctctccgagctggagcagtcggagcggaagcttcaggagcggtgctcggagctgaagggccagcttggggaggccgagggcgagaatctgcgtctgcagggccttgtgcggcagaaggagcgggcgctggaggatgcgcaggcggtgaacgagcagctttctagcgagcgcagcaacctggcccaggtgatccgccaggagttcgaggaccggctggcagcctctgaggaggagacgcggcaggccaaggccgagctggccacgctgcaggcccgccagcagctggagctggaggaggtgcaccggagggtgaagacagccctcgcgaggaaggaggaggccgtgagcagcctccggacacaacatgaggctgcggtgaagcgggccgaccacctggaggagctgctggagcagcacaggaggcccacgccaagtaccaagtgaccagggatgccgggaacactgtcgaagaacggaaggcagaggacagaggctggacgtgggcccagaggcccacagggacgcccacctgccccccacagaggctggtggttgagatgcccacggctaagcacctgtggctgcattttaacagtaaaggaggccgttgttttcagaaaaaaaaaaaaaaaaaaaaaaaaaaaaaaaaaaaaaaaaa

SEQ ID NO: 6327 - DNA, 2148 bp, Homo sapiens
gaatttcgaaccatgacatggctgagggtaggggtcgggtggatggatgattcagggttgtaacccatagagcccaaaggggaagtgatctgtgacctggggtgagggtgatctggaagatttttggatggctggaaagaaatggggaagtcgagctgcctgagagagccaagttatttcccaaaagattccttaggagtctttctgttcaagacctccgtgtgtgtgtgtgtgtgtgtttagggttccccagcaatggcccaggcatgtgaaggaaacaagcttcttcagggaatatttgttgaatgagttttcctgactcccaggctagaactgtttttgcaatttccaccctcttttctttcccccagagaactcctattcgtccttcaaaacccatcacggaaacccctcttggagaaaaccctccttccttcccctcaggactttcccagccaccgtctctcctccagtccagcctgatgccatgggactgggggtttctctgtccagctctgtttctcccagactggggtctgaggactctcaggacccccaactttacctagcacaggctgggcacaagtgggtgacagggagtctacgcctagtggaattatgtattggggcagggtcagtgtgagaatacacatccgcatgcatgtctgtccatgtctgtccgtaccaaccttccccttccacacggactctggggacatagggaggggcctgaaccttgacacatgggacagagagtggacatggctgagacacggacagagaaaagacaaggagtccagggggctgaaagccttttgaaatcaggaagttcctgtattggcagaacaaagcccagagaggagcagggctttcctcaacgccacccagcaagtggacacagagcccggccttggatgacacctccagggttctgaaccctggacctcgctttatgcaaggagctggccccacatttccatgaatcggggaaacagcacaagaaggttggcctgtggcagggcaagggttaaaggggtgacattgagggatgcctcagagtcaaagtcccctgaccaagaggaatagagtagaaaacacagagacagagggtgagatcacgccccgatgaggacggagagagacagagatggagagagacatagaggtggaaatatacagagaaagataaatgcagagaccaaggcagggagtgtcgggggaagtaaagagggtgtcctgaagaaagaaggatctgttcactcttaccagtctgtcctcgaatgatttgcataaaatgaggaggtgcctgtccacacccccaattcctctctcaggccccagagcctgagacctcaccatgcccccatcagagatgcaaaaaactaaacacccaactagaaatccttgggacctctctcggctgggatctcagagcctttctgtcccctacccctaccccatgtgctgtcgattttgcagatggggacaacctggggcctcccggaactctgccaccctggggaagttgggggagggccttagtcccggatcacaaccccgtctgctccccagaatcctttcctaagaatcgttgaggaccaaagttgtctttgctgacacgtgttgcttttctctttgccttttattgtttcagagaaaaatcaagttgactgtgtcaagtaacaccccaccccttacccccgtccagccatagtggctctctggagacacaggtcacaggcggagggtcccctgatcatccccaaccacacagccagggggacttgacccctgtccacccctgtctcgtgctccctcagacccccacaaaccggccaagcagtccggggaggcttcccctccacacaactcttagcatgtgattgcagatgtgaaatcaaaacgttgtttgttttttgttttgttttgattctaccccgtcggtccagtgtctgcacagacgccttcatttctctgtaaatatgtgacttggaacaaatgtttaacacaaacgagaagtggtcatgaatgcatggtgttgagatgttttgcactattctgactttttggtctctgtaaaaatattttattaacagcagacattaaaaaaagaaaaaccacaaaaaaaaaaaaaaaaaaaaaaaaaaa

SEQ ID NO: 6328 - DNA, 2681 bp, Homo sapiens; identical to SEQ ID NO: 5910
  misc_feature (707)..(720): n is a, c, g, or t

SEQ ID NO: 6329 - DNA, 1805 bp, Homo sapiens
  misc_feature (41)..(41): n is a, c, g, or t
tttcaaagaaaacacttgtgttgacccacctctgtttgccnaagcactgggtgaaggaatggtcgtatattacccataaattcatccctcactcaattgggaggtggcattccttgtcccctgttgcccccccatctcctacccccttttgttaatggttgaagagaaatgtggacccagtgattcctcagtttggtgccccaggtccccaaaggaagtgatggagagccttgagctaagttcaggcagcagcatgtggcccagcagcagtgtgctgggagcagaggttggaatcagggctcagggccttcacttcaagggccctccccagctactcgggaggctgaggcaggagaatcgcttgaactcaggaggtggaggttgcggtgagccaagtatcgtgccactgcactccagcctgggctacaagattgaaaagatcgaaactctgtctcaaacaaaaaaaaaaaaattcaaggctgtttctaaggcagcctcaaaaagagcctggtgcccagggggtccttcgtttctgtgtggctgcagaggccaggagtgcagtgactgtctcactgcctagtggttgtggctcacatcctgccctgatggagaggggggcctgtcgtccaaccctctctgaaaaactgcagtagactttaccatttcaggccccacctaatgttctttccttccttccccctacattcttcccgcccctttcatagttaagatgcataagctgagcaataaccccacttcctgatttccctgaaatatgagcccagaagcagcaggtgacagggagcttcccttaccctggggtggtggcacacagaccacctcctgtcctgtcccctgcaggtagtattcacagtgtggtgttacctgggaggagggaggaaggagctgagatgaaggagattcaggtaaacagtagccacagtggccaggacccccttcctgaggatccctgtccttcctcgcagcaggtgcttagtcctctcctagggagaagcacggaaagattcctcaaggcctcagtcccatgtccaaggcatacctaggttagaaatgtcctttacttgtttctcagttactatttctcctcttcctccctccccctgccttctcttggctgtcatttagctctctggcccacagaaatactccatccaaggagctggtcctcagtcagcctgatgaggacaggtcagtggccaacccttttgccccagtccttcatctggagacagtcacatagtcacgtcaacagttcacccaaagagaagaggtggggcctggcttctcccacagggcacagcctaactatggagacccagggctccttcctgctgcactaggcctgtgctctccctattgccttcaggtggtgtgatcccggcttcctcacagagcccttttttccttctgcccagctccatcccaccagagtttctacccccgctgaggcatctcctgggcacagaccaccacactctaagccggctggcctgggagttagggtcctgcccacctcacctgggagttggggtcctgcccacctggagtttagcacgctggtcgctcactttgctttggtctgcacacctggtgtgtgcatgtgtatactgcttgtgccatctgtgtacccctctccctggagtacacttgtggtcacactacagtggggacatcaagaatgcaatatttatggattgctgcatgattcttaaaaatgaataaaactgtttacaagggaaggagagataactgcaaagtgaaaaaaaaaaaaaaaaaagggaaaa

SEQ ID NO: 6330 - DNA, 6578 bp, Homo sapiens
  misc_feature (5007)..(5027): n is a, c, g, or t
  misc_feature (5500)..(5530): n is a, c, g, or t
  misc_feature (6415)..(6563): n is a, c, g, or t
gcctgcagagagaggcactttgcaccacagacagatagcaagaagggaaagacagagagtgagaaaaaagaggagtcagtcgctcctggggaagggagagagtgagactgggagaaagagaagcacagaaagtgtgtgtaaaacggagtaaagaaagaaaaaaaaaaaactacccttaaagcacatttaaaaaaaaaaaactctggcaattcaagaaagaaacaggctacgtttaaagagcatagagacaatgaaaggctaaagaaaattttaaaatctctgccacagtctcataggtgcttggaaatgaaagtagaactgcctgtctttaacggactctgacagagagggtgaaggggaaccagagcgcacaagggaactgactcaggaggcagagaagatgggcatcctcagcgtagacttgctgatcacactgcaaattctgccagtttttttctccaactgcctcttcctggctctctatgactcggtcattctgctcaagcacgtggtgctgctgttgagccgctccaagtccactcgcggagagtggcggcgcatgctgacctcagagggactgcgctgcgtctggaagagcttcctcctcgatgcctacaaacaggtgaaattgggtgaggatgcccccaattccagtgtggtgcatgtctccagtacagaaggaggtgacaacagtggcaatggtacccaggagaagatagctgagggagccacatgccaccttcttgactttgccagccctgagcgcccactagtggtcaactttggctcagccacttgacctcctttcacgagccagctgccagccttccgcaaactggtggaagagttctcctcagtggctgacttcctgctggtctacattgatgaggctcatccatcagatggctgggcgataccgggggactcctctttgtcttttgaggtgaagaagcaccagaaccaggaagatcgatgtgcagcagcccagcagcttctggagcgtttctccttgccgccccagtgccgagttgtggctgaccgcatggacaataacgccaacatagcttacggggtagcctttgaacgtgtgtgcattgtgcagagacagaaaattgcttatctgggaggaaagggccccttctcctacaaccttcaagaagtccggcattggctggagaagaatttcagcaagagatgaaagaaaactagattagctggttaaaggtatgattataagagagcttattgttttaaaaagttatataaaggcaaggaaattaagaactgaatccatatttcaacagagccctattggcttactgaaagacaggagtttatctatcggaagaacatgaatctctaacagctccatacttctttcactactcaaatggcattgggctgagtaagtaaccatatcacctctcttcttagtaaaaagccctatgtgaaaagatcccaagatggagaggaagaaacgctaattcagcatgtgttcattctgcattgagaaggaactgatacatctgatgcatgctttgagaccagaagaaaagacttacctgaataattactacattagggaagctactgtctacgttaagataaagggtattgccttggctctatttggcatggatggagcccagttggaaaattcccaaatattacaacaagtccttgaacccaggccatgtggttagacgttggtgttaaggttagaccttatgttagagtcatttctgatgttccagcttctagccatgtagtgctctcagtcttcataccccagaaattattggtatatttgtagataccgagaatgatccctcagtctgagaggttagaatgatcatctgtaatctgagggttaatttctaggcaggtggagagagtggtaaaaaagaaatgaaattgacaagctaggaaagaggaggcagaaagatttggaaaattcacagagtttcacccttaagctgtagagagtgggtcacatttgttagccacggaaacatagaaacatacacaaggccagaaaaagaagaaggagctcaactaaaagtggcatagagaatacacatataaaaacaatatatttgtcatatgctcctagagaggagaaaggggtgattgaaagaaaaaaaaatacttaaatatttgtaattgtgaggggtttcttttggaaataattacttttgaaccatgtatgtggtatgtatattttcagtgggttaattataccccatgatacctattaaaggaaaaccagtgggtctggtggtgctggtcttttcctccccattcctacaatttctatgtggcccaagtcattcctaatcttggtctctatagcagtgttctctctgaatgctgagctgaagaaattatacgtacatacacacatacatacatacatacaaatatatgtatatatattctcagctgctgcgggaggtaggtaccatggccattcagcacagccttgatttcctcccaaagtaggtgagctatagtgaagaataggtgcaaacaaacaagcttacttccattgcaaaatagaagaagaggaagttagagataattctgatcaatcattttggaggctttgttataaggcaacccccggtatatcatggaatttccattgacatttgaatttggacttggatcttcccttggtcccattagctgaggtttagtaatctaaagtccctatagtatatgattataatgctattttaaaaaatatatatataaaatatttttttctttttaaaatagacactatagttttacccataagtaatatttaaagattatagctcccaaaagaatggaccaaccactttcgtatcataatttctttttggtaaatatgagactattatgaaatcatagtatatgattgtatttaaaggtacaatcaaaggatcttttgtccattccattaataactgaataaaaaataaataaaatggatagaaaaaaactaaagttgaaaatacattcttaaactagttgtctgaaatgagaaaagagtgagaactaggtgtgcaagaaccaaacgtattttattttattttttaaatgggagcaacatatcagtcgtgtcaccagctggtatattgtgtaaatattaaagctccattgggactgatttttcatggcaacatcagctttctaatgttctaaattctataaaaaccacccacaaagaaacaaagcaaatttcattatctaatgagttgctggaaaatcatattgagaataattatttcagattcctcagttgttaacttctacattcaagggcttatctctgcccccattgatttttaacctcaaaatggtgtgagatttactgtggaaccctaaagcagtaaaataaaaaacctggttgcagcacattcacactgttgtccttaaaattccccttttttctctatgtacgataaagtaacagtatgtcagataagccggtggggggatgagattaggctgaggcagtgctagtcaactggggaaaaggatgatggaaaaatcacccagttgtgctatatttttaaagaaggaggtcgtttatgtgtgcagacaattctccctgaggttagcccaatggagaaatgaagcagaggaaggaaacatagaaagacatgggctatcagggaggaagatgttcaatagaacatgcaagaatttctggaagaaaggctgtggaagggccaatggagaaaatgaatggacaaagctcaggaatcctacgctatgtagaatgtcttggtgttatcagggttaagcctgtaattatgtaacctatttatcgcaacatgaatttttatgatttcttgtgatgtattcttttatgaaattaacaagaactcattattttgaggtagaggaaaatcaatgctttatctgatatgctgagaaattattagattgccaatactcatgtgcgtttcatgtgttttataaggtttgttcctttgaagaattgtagttcttagtcccacagggaaatgtgtatctatttatatatcatagtataaatctatgatatatttatatcatatataaaagtctgagttctctttcttagtccctaatcatgtttctcccataggctgtgtttacatggagctatcggtttagccttttaagcttcattagcttgtctattattgaaatagtttccaagaaattttagatattatcataacatctgggtctactcaaacacttattgtttgaaagacttatgtcttggacctatcaaaaactgactttatttattgcttagtgaaaatactagtgggatcaacaatgattttcttgaatgggcatgaatggagatgcccgcacagtaatgtagaaatgtttcatacagctattaaaatgtaactgacctccttagaggcagattagtaactgttcctactttgtatagctaagtgacagtcacttaacttacatgactttcttttttcacattgggtctctggtcctgtgtcttcacctcatttatagcacgtctccttgatttttggtagtatcaacttcccagtgatctgttcagttaagttcttctcccgttaaccaggaagtgcttattctctcatcacagtgggaagaatagcctattgtctttcattttgcctgagtgtattttactatttgggctctgaaataaaaattatgaaatatggtgaggtcacatgttggtgctgccttgctgcataaaattctaggagggcaggttaggagacagttatgtatggcctttcgggaaaattcaaagggtggattacaaggtgtcctcagcatgccctatggcctatgtgcgaagcaagaagaattgactgatttacaggacttctctttatgtcaatcttaagaggatggatgaatctggacatttgttccacccgacctctgactgatggtttggaaaataactttaattaggatcatatgaccattgaaaaaggaaaaatgtagactctgacnnnnnnnnnnnnnnnnnnnnnatgaaaacctttactagcatttagagcttttcagaacatccccactgtcatgtgtctcagcagtggagactgcaagtaaggcttttaattttaggaggtttttttttttttttttttttcccctaaatggtatggccaaaagtcagagttaaaatatatatagttagattccaacttcctccttcactctaaaaatagaatccaaacccactcttcatatatgcttccagaatggggcttaagtaccaatctctgctttgcaatgggcacaatcttggtcatgtcctgaggctctctaagaaaagagaggatctaggatgggagagctagaaagttgctaactgggaagaacaaggccctgaggggttggtctaccaatctgggaagatttgaaaacaaacttctcgcaactgaaggaaggctgaaggctgctgcaagtcattgagtgactttaggatgagcaaaacattggnnnnnnnnnnnnnnnnnnnnnnnnnnnnnnncagaagcaaggtctcagacttaacagacccagctctgttccaaggtgagtctgaaccaatagaaagcaaacatgtgcagatatccaaacaagactgctcatgcaagtcggggctggctacccgtcttaggcagcaacagcagagctccagggagcttattcaatatttactgagacttcgaagacccagcagatgtttaatgaagtcactattttggctcaaaccctccacttctccccctcccctcaaaaagccaacaggtaaacacataaatgaaagaaacccacagaaggggatgggaaataaagaaaattctctcaagacttctccaggcccatgtcactggtcagcgtggtttttatgtgtattaggattgggggatgtgaagaaataagtatccagtactttataaccaaagcaattaaatgatattgggtagggaatgttggccagttttgtttagttttgcatcacattgtcaccagactcactagcccaagtaatcgggcgcccgaagagggagacagagatgtgcagagttgaccagtgtgcggatgataactactgacgaaagagtcatcgactcagttagtggttggatgtagtcacattagtttgcctctccccatctttgtctccctggcaaggagaatatgcgggacatgatgctaagagtcctgggtaaatgtggtgagaatgcacgcgtgcatatgctacacatatgtgcttctcagttgcagaaaatgaactgctttgggagattatcagtagaaagagtgttatcatattggtgctgagtgctatgtgtgcttatacaatttgttcttgtattttaataaactttgaataaaagaataaaaaaaaaaaaaaaaaaaaaaaaaaccnnnnnnnnnnnnnnnnnnnnnnnnnnnnnnnnnnnnnnnnnnnnnnnnnnnnnnnnnnnnnnnnnnnnnnnnnnnnnnnnnnnnnnnnnnnnnnnnnnnnnnnnnnnnnnnnnnnnnnnnnnnnnnnnnnnnnnnnnnnnnnnnnnnnncctgggtgcctgagt

SEQ ID NO: 6331 - DNA, 1713 bp, Homo sapiens
  misc_feature (1039)..(1039): n is a, c, g, or t
  misc_feature (1149)..(1149): n is a, c, g, or t
  misc_feature (1281)..(1281): n is a, c, g, or t
  misc_feature (1385)..(1385): n is a, c, g, or t
  misc_feature (1529)..(1529): n is a, c, g, or t
  misc_feature (1538)..(1538): n is a, c, g, or t
gtaacagttttgtctgggcttgtctagcagtggaattatgcctgagttaatcatttttgtgactggtacttgcagcgcacagaaagccaatacaactatagatgtgctttctttagtctgttgcctctgcaaacattgcccgtgtgtttctctatgcccttcaaaaacatcagagcagcacatcctggaagatcctatcttttgtaagtttaagaagcagcctcttgtcacagcttgactcctaggtagtgtgcctagtgaccaagagggctgctaagaaagctttctgaccacttgtggctgtcattggactgatttgcccagatgacatcaattgggaatttgaggcatgacctataaagatcagttgcttgcaagagtctcaggaaaataattgtggagttaagaaacttgaagcgatttttaaaaattacctaacccaaccttctcatttgaaaaattaaaaaataaataggccagatatggcggctcatgcctgtaatcccagcgctgtgggagcctgaggcgggtgggtctcttgaggccaggagttcaagaccagcctggacaatgtggagaaaccctgtctctactaaaaacacaaaaattagctgggtgtggtggcaggcgcctgtaatcccagctactcaggaggctaaggtgggaggattacttgaaccggggaggcataggttgtagtgagccaagatcgtgtcactgcactccagcctgggtgacagagtaagactctgcctaactcccctccaactcccccaccctccccacccacaaaaaccgccctcgaggccatctatgcccggggggcggaaaaaaagaggctattgaaaatgggtcacatgggaccaataactggtttatccctgcaccccagccattttccttaggcaaaaacaccctgcgcaaccaaatcctggccctgtgcactctcgccctataactaaggagtcgagtggtcccgacaatttatcccctcgtccccccccttaaacccacagtatgttgcaactgcgaccgctcnatacgtaaaacttgtttgaaaattcgcctacttattttaaacattacctctcctccccacccaccttttttcccaggcccccccctggtccaaccccccactgacccatnaattactctttccggtccccattccgtgaataggaaaacacaaatattaaacgagtagtccctacccctttttttagttgaccctcccacccaattacattttgccttttcctcttcgcccccttgtttccngccttctttcacaccccagcagcggaatcgaacgcaaaaccccccaccttggctctcccccgcggtatttaagggccgcggctgacccataatttgttggcggnttaaaggcctgtggcatcatgctgcacttgctgcgaacaaacttccttcattttaactactgttctaacacctgcaaattgccaatctataagacggcacttgttttatcgccgtcaaccgcaggcgtcgccaacacaacatcntcatcaccntttcccttcgatgcgaccgctttccccccctaccgaccataggtccccgaacaccggggccgccacgctccccctcaccgacgtgcgttaaattccaccgctccaggatggcgatccagcaggcggccgccgcaaccgccggtaatatgtccaccgtcccccgaatttcgcccct

SEQ ID NO: 6332 - DNA, 5002 bp, Homo sapiens
  misc_feature (2141)..(2154): n is a, c, g, or t
  misc_feature (3732)..(3751): n is a, c, g, or t
cacgggctgagccccgcgccgccaccatgtccgtggccttcgcgtctgcccggccaagaggcaaaggggaggttacgcagcaaaccatccagaagatgctggacgagaaccaccacctgatccagtgcatcctggagtaccagagcaagggcaagacggccgagtgcacgcagtaccagcagatcctgcaccggaacctggtatacctggccacgatcgcagactccaaccagaacatgcagtccctgcttcctgccccgcccacgcagaacatgaacctgggccctggagccctgactcagagcggctccagccagggcctgcactctcagggcagcctgagtgacgccatcagcacgggcctgccaccctcctccctcctgcagggccagattggcaacgggccgagccacgtgtccatgcagcagacggcgcctaacacgctgcccaccacctccatgagcatctctgggcccggctacagccacgcgggacccgcctcgcagggcgtccccatgcaggggcaaggcaccatcggcaactacgtgtctcggaccaacatcaacatgcagtccaacccagtctccatgatgcagcagcaggcggccacgtcgcactacagctcggcgcagggcggcagccagcactaccagggccagtcgtccatcgccatgatggggcagggcagccaggggagcagcatgatggggcagcggcccatggcgccctaccggccctcccagcaaggctcttcccagcagtacctgggccaggaggagtactatggcgagcagtacagccacagccagggcgccgcggagcccatgggccagcagtactaccccgacggccatggcgattacgcctaccagcagtcatcctacacggagcagagctacgaccggtccttcgaggagtccacgcagcactactatgaggggggaaactcccagtacagccagcagcaggccgggtaccagcagggtgccgcgcagcagcagacgtactcccagcagcagtaccccagccagcagagctaccccgggcagcagcagggctacgggtctgcccagggagccccgtcacagtaccccggctaccagcaaggccaaggccagcagtacggaagctaccgagcaccgcagacagcgccgtctgcccagcagcagcggccctacggctatgaacagggccagtatggaaattaccagcagtaagggacacacattctggctggagcccttgtggtagcgtgttcatccaggggccggatgggctggcggcagctctggtgaattgtgacatgttggttacctgttcgcccagtgccacgtctgcatgtgaagcgtgctcatttcatgctgggtatgacgccgagcgcacaccactggcgtgagacagcgcttggtggtgtgatacttttggtgctgtgtatagtattgtatgtcggtacacggagaggtatcctttttttgtcccccgcccccttctcaatgtttctagctagctttgggggtcattttgtcatcagagcattctgtgcccagggacaggacagatctcgaggacaccacagtccacctgttcccgtcaacagacgttaggtctcattttcctcctcatgcagtgttgtagtgtgggttgtcaacttttctttaactggctacgccacagctggacacacatgcagcccctggagggcagcctcttcctgtgcctcgatggggtgggtgggagggcatcttctgtgcgttgggtcagtttctgttacgtaacgaaaaggataaacatctcccacgggagaggccacagatggccacttccagagcttgcccattgcctgtctctcgccaattccgtttatccaaaaaggtacatgtttttgtattaaaaagtaaacagggatcagtgactgtattccaaataaatatgaatccctaagggccgtggacaaattgcctaacccagggccagcggtattgctgaaggaaaggggcagctctctgggaagtgggccctcagagattactctggctttgacccttgtttagctgatggtcatttctgggattggaatatttaataagcccaattctaagttgataggtaattttaaatattcaaaccaaatcttcccaacnnnnnnnnnnnnnnttattttatattatttcttccaggacctacttgctcagatctccaagcaagcatttcttttcttttagggatgtctgaaagtcacatccagttacattactgtgttctttctaatgaaaagtaaaggttttatatagagaaacttgagtaatttttacatttctaagacattaaatcccatttaaattctgtgtgaacattaaagacagcacacttgcaaaagtatggtcaaaggaaaaaaatcccacatttcaattaacaagtagcatggacatttgatcaacctttagttggaataataatattcatatttgctatgaatccttttaaaaaaatctttggataaatgctgacagatttccaagaactaccaagaaaatacaagagatatccaatgcttgatatatgaggcctagtaataacgatatttctctttaattgatgttttgttttaaaagttaaaagtaattcttggcgtggtggttcacgcctgtaatcccagcactttgggaggccgaagcgggcggatcacctgaggtcgggagttcgagaccagcctgaccaacatggagaaaccccgtccctactaaaaatacaaaattagccaggtatggtggtgcatacctgtaatcccagctactcgggaacctgaggcaggagaatggcttgaacccaggagacagaggttgtggtggggcaagatcgcaccattgcacccgagcctaggcaacaagagtgaaattccgtctcaaaaaaataaataaataaataaataaataagttaaaattaattctttatccagagtcgggtgctttagaatttataagtcacttatgtgttttgcttgaattaattctgacagcccctatgaggaaatctggaggcaggtaacagttcccattttagagatgaagaactgaggcacagattaaaggacttgcctgtgttgaataccagtcctgttctaggacattctcccctctcctaggagacggatgtcacgcacaaatggggagagaagtgtttattttgtaggcactaagggtttctaaaacccttaacactggtaagggctcaaaaataaacgtatgtgttcatattcgatcaccgaaatgagagttcttaattgctaattgacaaacgcgttagcaatttcagttagggagtcatctcccttgattgtgttcttttcctgtcaattttcatagacctaatttgcaaactcaatcggggactaaaatttcccactgaaaatgttaaacattttagataactgtgaagatagtttatttttattccttgccaatctgggaatatgccttttttgtgtgtttgtgtgtttttttaagtgctgtattaataatactttctgaaagaaaaggacacttaccccaaaacttcaatctgaaatgtcttacattaagaatatcttgaatgttgtgtatatattttaaaaagcactttgcaaaatagtttgtacatttatttcctaatttatacatgatttttggtgttaatatatttaatgattaataacagaatgtttatttaatgtgctgtccatttttatgtaatannnnnnnnnnnnnnnnnnnnagcagttccttttcattattctatcttctgtcatatgaatgttgagcaaagcttaggccaacatgaattgtttgtgaagtgtggttgatggtgctttgtttttttctgactacttctatggaaggccagtgaagaagcaaaggaagacatgaaaattgacgctcattcttcttcctattgttccctgacatccagcaaattgtgaatttgaaaaatgatggccagttttcagaagtgctgacaaattcatattggtatgcaaaagctcatcacccattaaggtttgttgttgaatcaacagtactcagcatattaaaacagtacatcagaactcatgccaacagtctttatgatgggattaaggtggacaagatctcctaagatctgtgaatgggattaaggtggacaagatctcctaagatctgaaaagaaaccttaatacgctcatatggttggagtgttaagtgaacctctgattttgtcagggtttttctacgtgtaggcgtgaatagggggcaccccttcaaaactgtacaaagaagacgactgttttccatttccatttaaacatttttagccacttcatttctatttattgaacaggtcaaatttgtcttgttatttgtgagtacagtacatttaaaaaacatccttatcggttatttttttttcagtcggagtttgacgtataaattgtttatgcttttggtgtaatctcttaataaactggttcttcaaaaatcaaaaaaaaaaaaaaaaaaaaaaaaaaaaaaaaaaaaaaaaaaaaaaaaaaaaaaaaaaaaaaaaaaaaaaaaaaaaaaaaaaaatcaatagtatgattatacatatcacaacactgaaccgaacaatcacaatatatccaaaatatacactaacatctgcctacgcatttccctcacctccccaccaccaacttcctaactcgacacgcaacctctccatactccatagacccaacatacataaaagcacacagcaacacacaccacatctcacaccttctacatacaaagacagctccaactacagacccaaaccacaatgacacacctcttcactatcactctcctctctcacaatctctcgtcatacacaatccatcgctcattacatcatactccccatctgtctcaactccgctacccacacacatttctccctctcgtacactcaccatatgatccaccacacaccaccgtgatcatcctccctcctaactgtaacacacaa

SEQ ID NO: 6333 - DNA, 1577 bp, Homo sapiens
  misc_feature (380)..(401): n is a, c, g, or t
  misc_feature (644)..(684): n is a, c, g, or t
tgtgtttgatcatgtgtgggtgcggggcgcctggttcccgttttcggtgggctctcttccagcctgtgagtatcggctctgtcactgctgcgcggcctcattgtcattgcgggctgcatgaccttcgtcctcgcgggggccccaatttcgcggggggggggcccctttacttccttgtcggtttccaggtgtggagcaagaccttgggggagggggctttccatgtaacggggggttggggcaggagaatcccaaagccacaccagcaggacatttgaggccctgcttggaaaaagtctgttttggtatcactggcaacaagtcctgctggtactgctttgggtccgcctcctcaccttgccctgccgggaggtcaaggnnnnnnnnnnnnnnnnnnnnnntctgtaccattgagcaatggatgggcagcggtgtcattttgaaggtgagactctcaggaagtgtctgacgtggcagaaatggggcaagatgggaggatgcggaggaagctggattgagagatgtatgtcccagcgccctccaaagagaaagtaaaatccggggtctcagagagagaatccagaccaagatacaaggtagccactgtatattctgtattatgagaaacaaattccaaaattatnnnnnnnnnnnnnnnnnnnnnnnnnnnnnnnnnnnnnnnnncaaaaaataaaaggtataagtataagcccctacactggaggtcaaagtacccattggggaggccccagaggtggttaggggggggttgcttgcctgtctctttctggagggctgggaccagttgttcctggggttccagaacctgttcttgcaagggaccagtggggtgcaggccaattctgtctgtgcctggaaatgctgctgtctctcaaggtcttggggcagggaaggtggaattgtctgctgcctggggacctgcaggggggacccaggtctggcccctaagcggctctcccaaccgagtcccctttggcattcctttgggatctgattgtccagcccagggtggggccctggggtcagaacctgggttccagacctgggcatgaaggactccagatcctcctctccccagtcaaatagggctgggtcttcctactcctccatgccccatctccacccgggtcattgtcaggtgcccccacggaatggggacaatttgcatatatttgggaggcctccctattctttcccacagcatgggcagaccccagaatgagactggggtgggggggggggcctggcataggtgtggtgtccatagcaggggtgggtgatgggggcttccagaggggggtggaacaagatttgagaagatgtcagtttcatacatgttaaaaaaacaaaaacaaaaaaccaacactccctcctccacccaggacgctgcttaccccaaccctgcctccatttctgcccttctctgcttgctcagtgcccagtggaaatgccacacaggtgaactgtgcttgtgtggaacaagctgcaaccccctaccacaccctcggctggctgttcccaagacgctgtgcttgtgtggaacaagctgcaacccc

SEQ ID NO: 6334 - DNA, 2615 bp, Homo sapiens
gacggggacgcgatgtcgccgccgccgcctccttgcgggccggggctgcgcctccggggctgagccgccgccagagccgacagccgagcagccgctgggcgctcccgcggcgcaggaggatgggctgcggcgggagccgggcggatgccatcgagccccgctactacgagagctggacccgggagacagaatccacctggctcacctacaccgactcggacgcgccgcccagcgccgccgccccggacagcggccccgaagcgggcggcctgcactcgggctaaaagagatgctaagagaatgcctgcaaaagaagtcaccattaatgtaacagatagcatccaacagatggacagaagtcgaagaatcacaaagaactgtgtcaactagcagagagtccaagcagaagggcagatggacttcttcagtgtccttcacggcactggatcccatcaaagaaccttgaagaagtggctgccccttgctggacctgaattctactgagtccctggcaagactgtcttacctggcagcaaactgctgcctgatttgttgggaccttctgagccttctacttatcatgtaaatgtattggcacagtgcttacatatgttaataaactgcaaatgtgcagttcagtttgtctctttgcaactcctgtaatacggtctggtgtaaaagtagtgagttaaagctacaggtcagtttatgaaacagaaaagtaggaatgcattttctgggtgaaagagtcacaccttagtgctataactctcctgcccatgatagtgtattctgtttcaggcaagcttattctttccttctttcattttaaatattgtcattacaaatcttaccaggttcacttaaatgctggctttcatccaactctaaacccacatattgaaaaaatcaaggtacaggaaaactccttgttatccttgtttccttagcttggtatgagacagatcggatccagtttcccatgcaccaacccactgcccatggcatgtctttgggaggtgtctgtgaagcagtcatacctgctcctcatctgcctggaaagtcctcctattccagtgtccatgttggcctccagtccttaatgtcaccatgcttgtggccaatgcatccaaataaggatacccctcagggctcagctagacattgcaattttgcatagctttccagttccctttgcttgtcttcttgactgtcttccctctctatcggggtcacttgcaattgttaatcaaagattgaacactgcgtaggagagggagatgatccagagacatgtggcagcaggcatggcttccccttggcctctctgtacactgccccaggactgtcattttggcatcctgcaaaggaatcactttagaaagcccagcaccctggttgatgtgtattcatactgacattagattgatgtgcactgcattagaaatgaggtagctgacacagaaaaaggatgttttgataggaataattttctagtatgtcttgaaacatgttcatctggaagtattttcctccaaagtaatgtagcatgatttttcaaggattgttaacatgcctgggattgggaaagataggactaaagttgtgccaaactatatcaataaattccatgtttagcagaaataggcagcctattggtgttatgtttatgtaacatagtccagagaactgacatgcaggtcaaaagtcagatacgcaacctccttatctgctaactctgttattcttcaaacacaagtgggtagtgtcatttttccttccttccttccattggcagattgtatatttattcacaaaacattaaatgtccatcctgtgccaggtactatgcagatgttgagggatttggggtctggttagtcgtgactatctatcctgaatctaacagtgacttcataactaggagactgaattagacccttaaggtatagtgtgtgttgcaaaatcactctgcaatggggacttttattcagggtaggtttgtgtcttaaactaggtgttctaatcaatgtacaagactttaccatacacgcaactatagtttttctaaaccttcatcattttgtgattctttgagaaagggcttttaggaactttatgttctaaaaaatgtttttaacaataataagataaaagaaaaacctgtgattcatatgtccccactggcattactcagcaggagcccccagctgccaaaggttggcagtgatcctgcaagttcaagggctctttctccctggggatgtgctttgtggcttctctttacagctttgtttctgcatcagttcactgctgcatgttgtttggaatttatcaccttaagaaagtgtctctgttttatatagaaacactttctcacttacaggggagaaggaaatgcagggcacatgatctggccctccccagaacaatctggatttcacggagacagcaaccagaagttaaaccatgtgactaaaaatgcatctggctactttttcatgtatgtatgagacagaaactaatccttactatcctattaggataccacttttcattgcaaagtttgtgtcaataaagtcattaattttaaacataaaaaaaaaaaaaaaaaa

SEQ ID NO: 6335 - DNA, 1973 bp, Homo sapiens
  misc_feature (1530)..(1537): n is a, c, g, or t
gaaatgtcacataactttaaaaaatcaacctgtgaaagaaagatgtcagctttttgccacgtgtctttgtggcttatgcgaggagactccctgtgcagccctgtccggtccaggtggacgtagacggcccctggctctgctgctcttgaccaagtgcctgaccgccaggccctcacacccaggctcctgggcactgtggtgtgaggcgaggcctcgggatccatcactgcaggatgttgtgaaaagtactcgcgatggcagccaggtagcaagcccttgccagtggagagcactggatgtcatggtggcaaacaaggcagccatttgctgtcctcctcccacgagtggaaggggtttccaaggaagccacagggcagctgaccacgtgcttgtgtgaggcattttcagtctgttctgcatatgattctcagggcacactctgtggtatgtgaaataggtttccttccacatacagcagaagagaggcaaaggctggtaggaaggaggaagacattggctgggggctagcgtgtggggccgtcagggcaggagggaggaagccccagctggaatgaaactcagagcaagtgaccgagggaggacacggctcctgccactgaggccgggcacctgatgcccagcactgtcctggcgccagacacagggagcaggcagtcaagtgaggtctgacccccatggccacgctcaggagagaaagaccatgctcaggacactgtccaaggtgcacaagatgctgggaggtcccttgtttggtgaagaaagggagcatttagagcagttgatggtggtgtgtcctccgtgttctgaaattccagatgatctgtgttggatttttggcttctaccccatgattctcctcaaagaaattgtgtgtgatgtgtgtgtgtgtgtgtgtgtgtgtgtctgtgtcacaggagatgcagtgcctgtacaggtgtgttcagtgtgtggatgtcattaacccatagggctatgcaacaaaagacacatttaatagaagtaaaacacacaagaccgctgcctggtctcggggttcagcatgattgtgaccaaacctttttatagaatttccttacctgaaggcacaacactctgaaactttaaagataacagagtattttattccaatagaataaaccaggaatctcggactgtgcatgtgatcactgtgctcctgttgcaaagtagaaggatgtgtattttgacactgacgttttgtctcttgttccccagcccccagcccatgttatcttgggtgtcgaatgtgtccattccatgcagaaccacagccatttccccaggcagtgttgggtcgagaatccacttttctaaacccacacagcctagctggcttgtctagactcttctaggcattggaattgatgaaaactacagggagcggggaaaggagacattatgtcttgttttcctgactttgggttttgtttctcactgtgtcttctccggctatcatatatgtcccctgaatctcatagtgagctgccaaannnnnnnngcatcacccagttgtctgcatctggaaccagtcaagcagtggctgtagtttgaacaagttatgtgtgcatgtaacatatatacatatatacatatatacaagtatgtgcatgataatgtatatcttcgtactttttgatacaatgtattcatttgttaatttttaattatatttgatataaatcaaaggtttgttgcaaaactttatatttaagaagtgttaaaaaaaaaaaaaagtcccaaccatgcaacacaactgggacctacttaaaaagaaattctgtgattgactagtttgctgcctgagtcatatttatcagccaaactttggattctgctgttgtttctacaatgacattttgtatgaagcaaagtccttgaattaaaataaaaacttagcaaaaaatcaaaacaaaaccccaaaaaaaaaaaaaaaa

SEQ ID NO: 6336 - DNA, 1973 bp, Homo sapiens; identical to SEQ ID NO: 6335
  misc_feature (1530)..(1537): n is a, c, g, or t

SEQ ID NO: 6337 - DNA, 2327 bp, Homo sapiens
ggcacgaggcgcaggatgagggcggccattgctggggctccgcttcggggaggaggacgctgaggaggcgccgagccgcgcagcgctgcgggggaggcgcccgcgccgacgcggggcccatggccaggaccaccagccagctgtatgacgccgtgcccatccagtccagcgtggtgttatgttcctgcccatccccatcaatggtgaggacccagactgagtccagcacgccccctggcattcctggtggcagcaggcagggccccgccatggacggcactgcagccgagcctcggcccggcgccggctccctgcagcatgcccagcctccgccgcagcctcggaagaagcggcctgaggacttcaagtttgggaaaatccttggggaaggctctttttccacggttgtcctggctcgagaactggcaacctccagagaatatgcgaccagggccaactcattcgtgggaacagcgcagtacgtttctccagagctgctcacggagaagtccgcctgtaagagttcagacctttgggctcttggatgcataatataccagcttgtggcaggactcccaccattccgagctggaaacgagtatcttatatttcagaagatcattaagttggaatatgactttccagaaaaattcttccctaaggcaagagacctcgtggagaaacttttggttttagatgccacaaagcggttaggctgtgaggaaatggaaggatacggacctcttaaagcacacccgttcttcgagtccgtcacgtgggagaacctgcaccagcagacgcctccgaagctcaccgcttacctgccggctatgtcggaagacgacgaggactgctatggcaattatgacaatctcctgagccagtttggctgcatgcaggtgtcttcgtcctcctcctcacactccctgtcagcctccgacacgggcctgccccagaggtcaggcagcaacatagagcagtacattcacgatctggactcgaactcctttgaactggacttacagttttccgaagatgagaagaggttgttgttggagaagcaggctggcggaaacccttggcaccagtttgtagaaaataatttaatactaaagatgggcccagtggataagcggaagggtttatttgcaagacgacgacagctgttgctcacagaaggaccacatttatattatgtggatcctgtcaacaaagttctgaaaggtgaaattccttggtcacaagaacttcgaccagaggccaagaattttaaaactttctttgtccacacgcctaacaggacgtattatctgatggaccccagcgggaacgcacacaagtggtgcaggaagatccaggaggtttggaggcagcgataccagagccacccggacgccgctgtgcagtgacgtggcctgcggccgggctgcccttcgctgccaggacacctgccccagcgcggcttggccgccatccgggacgcttccagaccacctgccagccatcacaaggggaacgcagaggcggaaaccttgcagcatttttatttaaaaaaaaaaaaaaaaaaaaacattgcgcctcgtgccgaattcggcacgaggagccttgcagattctccacgcaatggaaactggctataaccctacctagatctgaaaagtgaagggggatcaacctaaaatatgtagctttgtaaacagttttatatcctgcatcttaggggggaaaatcagttgacgcagattgaaaacaagttgttccataaggtttattatgaaaaacagtagccctcctaccctgcctttaccccactttccttgcctcacagtagtctgtccaactcttggctgatttgtttgtatttacctccatgtctcaatatgaacatgttttcatgactattccttgatggttttttgtttgcttgttttaagacggtctcactcttccccaggcgggagtgcaatggcacaatcatggctcactgcagcctcaaccttctcgggctcgggtgattctcccacctcggcctcctgagtggctagagatactggtgcacaccaccatgcctagctaattttgtatttttgtagagacagggtttgccatgttgcccaagctggtcttgaactccggggctcaagtgatctgcccgcctcggcctgctgggattataggtgtgagccactgcacccggcaccattatcttttgaatcctctcttcctcctgccaccatgaattacttcctctcacccatctccctgatattgtaattctggttagatcatattccgtgtcacacttattcagatgtgattaacttttt

SEQ ID NO: 6338 - DNA, 2224 bp, Homo sapiens
  misc_feature (2181)..(2199): n is a, c, g, or t
agcggagttgcctgcgctgctcgccagcttgctcggacccacgcgtccgggggcaggcatgggagccgcgcgctctctcccggcgcccacacctgtctgagcggcgcagcgagccgcggcccgggcgggctgctcggcgcggaacagtgctcggcatggcagggattccagggctcctcttccttctcttctttctgctctgtgctgttgggcaagtgagcccttacagtgccccctggaaacccacttggcctgcataccgcctccctgtcgtcttgccccagtctaccctcaatttagccaagccagactttggagccgaagccaaattagaagtatcttcttcatgtggaccccagtgtcataagggaactccactgcccacttacgaagaggccaagcaatatctgtcttatgaaacgctctatgccaatggcagccgcacagagacgcaggtgggcatctacatcctcagcagtagtggagatggggcccaacaccgagactcagggtcttcaggaaagtctcgaaggaagcggcagatttatggctatgacagcaggttcagcatttttgggaaggacttcctgctcaactaccctttctcaacatcagtgaagttatccacgggctgcaccggcaccctggtggcagagaagcatgtcctcacagctgcccactgcatacacgatggaaaaacctatgtgaaaggaacccagaagcttcgagtgggcttcctaaagcccaagtttaaagatggtggtcgaggggccaacgactccacttcagccatgcccgagcagatgaaatttcagtggatccgggtgaaacgcacccatgtgcccaagggttggatcaagggcaatgccaatgacatcggcatggattatgattatgccctcctggaactcaaaaagccccacaagagaaaatttatgaagattggggtgagccctcctgctaagcagctgccagggggcagaattcacttctctggttatgacaatgaccgaccaggcaatttggtgtatcgcttctgtgacgtcaaagacgagacctatgacttgctctaccagcaatgcgatgcccagccaggggccagcgggtctggggtctatgtgaggatgtggaagagacagcagcagaagtgggagcgaaaaattattggcattttttcagggcaccagtgggtggacatgaatggttccccacaggatttcaacgtggctgtcagaatcactcctctcaaatatgcccagatttgctattggattaaaggaaactacctggattgtagggaggggtgacacagtgttccctcctggcagcaattaagggtcttcatgttcttattttaggagaggccaaattgttttttgtcattggcgtgcacacgtgtgtgtgtgtgtgtgtgtgtgtgtaaggtgtcttataatcttttacctatttcttacaattgcaagatgactggctttactatttgaaaactggtttgtgtatcatatcatatatcatttaagcagtttgaaggcatacttttgcatagaaataaaaaaaatactgatttggggcaatgaggaatatttgacaattaagttaatcttcacgtttttgcaaactttgatttttatttcatctgaacttgtttcaaagatttatattaaatatttggcatacaagagaaaaaaaaaaaaaaaaaaaaaaaaaaaaaaaaaaaaaaaaaaaaaaaaaaaaaaaaaaaaaaaaaaaaaaaaaaaaaaaagaggggggcgcgcgcccgccaaaaaccccccggggggcgccccccaccccccccccttttgaaggggccccccggggaggctgaatattataataagcagcgacgaaagcgggggggcggcgcgtaataataaaacaacaagcgcgcgagagaggagagcgaaaaaacacgcgctgccacgggggagaacgtactgtggggaaagaggaccacccccctcttccgtgggggcgggaggggacaaccaataggatgtgggggagacaacacccacaccacaccagcaaagagataatattatgagcctccagggcagagacaaataatacaaaccctgaaggggatagaacaacaaggtcggtaaccaccaccaccgtacatataacatcggcgcgcgaaagaaaaaattggtggcacannnnnnnnnnnnnnnnnnnagaaacaaatatactacgcgggacg

SEQ ID NO: 6339 - DNA, 2329 bp, Homo sapiens
  misc_feature (1958)..(1986): n is a, c, g, or t
actgcaacctccatctcccagtttcaagaaattctcccccctcagcctcccgagtagttgggattacaggcgcccgccatgatgcctagctaatttttgtagagacaggggtttgaccatgttggccaggctggtcccaaactcttgacctcaggtgatccgtccgcatcagcctcttaaagtgctgggattataaggcatgagcccctgcgcctagccctgaatggcttcttaaaaagagatgagttggcagatgtgtctcaatttgttggggacgtatgtggcagcacagagcatccaagagaaatgtacagcctttggttatggttcatcattatttttggtttttgggatggagtctaacttttttgcctaggctggggtgcagtggcgcgatcttgggtcactgcaacctccacctcccgggttcaagtgatgctcctgcctcagcctcctgagtagctgggagtacaggcacctgccaccacgccaagctaatttttgtatgtttagtagagacggggtttcaccatgttggtcgggctggtctcgaactcctgatctcaagtgatccacccacctcggcctcccaaagtgctgggattacaggtgtgaaccaccatgcgcggccaattcatcatttttaatgggcagtagaggagaattaggaccagtgggatccccaggcctaccaggtaaactgggtgtagtcggtgaaccgggtccaaagggtgaacagggtgcctctggtgaagaaggtgaagcaggagaaaggggggaacttggagatataggattacctggcccaaagggatctgcaggtaatcctggggaacctggcttgagagggcctgagggaagtcgggggcttcctggagtggaaggaccaagaggaccacctggaccccggggtgtgcagggagaacagggtgccaccggcctgcctggtgtccagggccctccgggtagagcaccgacagatcagcacattaagcaggtttgcatgagagtcatacaagaacattttgctgagatggctgccagtcttaagcgtccagactcaggtgccactgggcttcctggaaggcctggccctcctggtccccccggccctcctggagagaatggtttcccaggccagatgggaattcgtggccttccgggcattaaggggccccctggtgctcttggtttgaggggacctaaaggtgacttgggagaaaagggggagcgtggccctccaggaagaggtcccaacggtttgcctggagctataggtctcccaggtgacccaggccctgccagctatggcagaaatggccgagacggtgagcgaggccccccaggggtggcaggaattcctggagtgcctggacccccgggacctcctgggcttcccggtttctgtgagccagcctcctgcaccatgcaggctggtcagcgagcatttaacaaagggcctgacccttgaaaggcttactgctgcatggctgtctgcatgaaccacgcctggtgaaggagcctgggtgagaaacaccatccaaagctggggcaaagatgattaccttcagcatgattacaatgtattaccttcagtatgattacagaagtcctacttgacaatcacatatagaagaacggtgctattcagtaagttctctttcctttcccttggagggaagacagcagagtcatcagttaaaaaaaaaaaaaagaaaaccaaacacctcccttgaacaaatttatactcctgttcccaggatcttgagctttagtgtgctatacctatgtgtcttatcgtgggccactgtgccaataaacaaaaacaactgtttggtttacctcagttgcagtagttattttcatttagaagttgttctcagattattgtttcagttatatagaggattactagactagttatgaagaaaccccactacattcaatggagtggtgcnnnnnnnnnnnnnnnnnnnnnnnnnnnnngagtgataagaaagggctacatctcccgaaatgatttctttacgtcatgtattggtttccttcttcaccttgaacttttgttgaactgtatgtactttaccccaaacctgttaatattttgagcgcttctatgtgaaagcaaagaaataattttaatactctggcattcataaattttattgatgagattatttattttaaaggtttgaggtaacatctctggttgtaccaaagaagaaataaatatggtttcttaaaaaaaaaaaaaaaaaattataaataatcatgttcaatgaaaagaagttactgagcttatttagatacattaaacattacttaacta

SEQ ID NO: 6340 - DNA, 1836 bp, Homo sapiens
ctgcccgccagaccccgtcgcccggatcccctgagctgcccgccatcccacgtgaccgcgccgccccccagctccaccgctgagcccgctcgccatggccctcttcggggccctcttcctagcgctgctggcaggcgcacatgcagagttcccaggctgcaagatccgcgtcacctccaaggcgctggagctggtgaagcaggaggggctgcgctttctggagcaagagctggagactatcaccattccggacctgcggggcaaagaaggccacttctactacaacatctctgaggtgaaggtcacagagctgcaactgacatcttccgagctcgatttccagccacagcaggagctgatgcttcaaatcaccaatgcctccttggggctgcgcttccggagacagctgctctactggttcttctatgatgggggctacatcaacgcctcagctgagggtgtgtccatccgcactggtctggagctctcccgggatcccgctggacggatgaaagtgtccaatgtctcctgccaggcctctgtctccagaatgcacgcggccttcgggggaacttcaagaaggtgtatgattttctctccacgttcatcacctcagggatgcgcttcctcctcaaccagcagatctgccctgtcctctaccacgcagggacggtcctgctcaactccctcctggacaccgtgcctgtgcgcagttctgtggacgagcttgttggcattgactattccctcatgaaggatcctgtggcttccaccagcaacctggacatggacttccgggggccttcttccccctgactgagaggaactggagcctccccaaccgggcagtggagccccagctgcaggaggaagagcggatggtgtatgtggccttctctgagttcttcttcgactctgccatggagagctacttccgggcgggggccctgcagctgttgctggtgggggacaaggtgccccacgacctggacatgctgctgagggccacctactttgggagcattgtcctgctgagcccagcagtgattgactccccattgaagctggagctgcgggtcctggccccaccgcgctgcaccatcaagccctctggcaccaccatctctgtcactgctagcgtcaccattgccctggtcccaccagaccagcctgaggtccagctgtccagcatgactatggacgcccgtctcagcgccaagatggctctccgggggaaggcccgcgcacgcagctggacctgcgcaggttccgaatctattccaaccattctgcactggagtcgctggctctgatcccattacaggcccctctgaagaccatgctgcagattggggtgatgcccatgctcaatgagcggacctggcgtggggtgcagatcccactacctgagggcatcaactttgtgcatgaggtggtgacgaaccatgcgggattcctcaccatcggggctgatctccactttgccaaagggctgcgagaggtgattgagaagaaccggcctgctgatgtcagggcgtccactgcccccacaccgtccacagcagctgtctgagccctcaatccccaagctggcagctgtcattcaggaccccaacccctctcagcccctcttttcccacattcatagcctgtagtgccccctctaacccccagtgccacagagaagacgggatttgaagctgtacccaatttaattccataatcaatctatcaattacagtccgtccaccaccaaaaaaaaaaaaaaataattaatgcatgcggcgttatattggggttcactttggcaaattccccctaataggagggcgtata

SEQ ID NO: 6341 - DNA, 1545 bp, Homo sapiens
agctgggaactgtcaatggcatgacgatcacgatggtgggtgacctgaagcacggacgcacagtacattccctggcctgcctgctcacccagtatcgtgtcagcctgcgctacgtggcacctcccagcctgcgcatgccacccactgtgcgggccttcgtggcctcccgcggcaccaagcaggaggaattcgagagcattgaggaggcgctgcctgacactgatgtgctctacatgactcgaatccagaaggaacgatttggctctacccaggagtacgaagcttgctttggtcagttcatcctcactccccacatcatgacccgggccaagaagaagatggtggtgatgcacccgatgccccgtgtcaacgagataagcgtggaagtggactcggatccccgcgcagcctacttccgccaggctgagaacggcatgtacatccgcatggctctgttagccaccgtgctgggccgtttctagggcctggcttcctcagcctcttctctttaggcccagctgctgggcaaggaattccagtgcctcctacgggggcagcacacttagatattcctggacatccagatagctcacatgtgctgaccacacttcaggctctggactggagctctctggcatgggggtggggcctcagatgctggggcccagtctgccccatcttcattcctgcaccttaaacctgtacagtcatttttctactgacttaataaacagccgagctgtcccttgaaaaaaaaaaaaaaaaaaaaaaaaaaaaaatagaatacctctcgggggccccgcttacacgcacacacctctcttgtgcacagagggctctatatagagactcataatatgctatgcgctgggcgccgctttacaccgcctcgacagtgagaactgtgatctcgtgatatctgtgagagagcctcacacctgtggggtgagacatttgggcacactctctccacagatatatagctctctagtgaatataaaatatttaagagtgtaaagtgtgaaactatctgtgtatgcgcgcggtgctagagatttgctcactgtgaatgagttatgagaatattttacacacgagctctagagactcaatgtgtgtgtgtattagatactcacacccccgcgctttttacgcgcctcaaccctcagactgtgccgagccatacccccatccatttgtggaggggttatttgcgtttaaaaaaaatctcacacatctccctgagactggacatataagagaggcaagtggtggtgaactcgtgtatagcgcctcttataggggtcacatatagcgctatcgtctcacatatctcacatatagcgtatttttctcgcgtttcttacaaggggggggtgtgcccacactccacagtgtctcatcacgtgtgggacgaccccccgccgatataaaagaaaccgcccccccccccccgggaaaagaggccttttccactatagggcggggcggaaataacgcaaaaggccccccccacaatatcccctttcccaaaagggggcgccc

SEQ ID NO: 6342 - DNA, 3282 bp, Homo sapiens
atgttcgccgggcaggcgaggaaagaggacgccatgattggttggcgctggggcggcggacggtggaagggcctggcgagtctaggttttacgcctgtgctggactttctccttccatgtttccaggccgtggggggctacagagggcgagaagtcggctcagcggaaacctggatttggttctaagccgtggggttgagaaggggtgaccggaagtgatcgtgggactgaccggaagcgaggcctgggcacgagggagagagcgagacctgggagggaggggtcctccagcagaaaggggcgggggaaaaggtgcaaaagcagcgtgggagcgccgggctggcttcctgcggctgctgctggtctgactgggaagcagcaagccaccactacgaactctcaagaggagtgggagtgcgggagtccagagctgcctctgggaagtctgcagtagttgagcaaaggggtcctcacgttcctgagagctgggcaggggggattttggaacctggggcagccaagaacgagcagccaagggtacgggagattagttgtgcacagagcagtgctagtcgggcttgggggtggctggtgggcactgcgtgggaaaccttggtttgtagttttcttggtttgcgttactcctgttgggtagaattaccctccgcgcctttgtacaagacacggtgtctcctggggcaaggaaggagccaggatggcctgggctctgaagctgcctctggccgacgaagtgattgaatccgggttggtgcaggactttgatgctagcctgtccgggatcggccaggaactgggtgctggtgcctatagcatgagtgatgtccttgcattgcccatttttaagcaagaagagtcgagtttgcctcctgataatgagaataaaatcctgccttttcaatatgtgctttgtgctgctacctctccagcagtgaaactccatgatgaaaccctaacgtatctcaatcaaggacagtcttatgaaattcgaatgctagacaataggaaacttggagaacttccagaaattaatggcaaattggtgaagagtatattccgtgtggtgttccatgacagaaggcttcagtacactgagcatcagcagctagagggctggaggtggaaccgacctggagacagaattcttgacatagatatcccgatgtctgtgggtataatcgatcctagggctaatccaactcaactaaatacagtggagttcctgtgggaccctgcaaagaggacatctgtgtttattcaggtgcactgtattagcacagagttcactatgaggaaacatggtggagaaaagggggtgccattccgagtacaaatagataccttcaaggagaatgaaaacggggaatatactgagcacttacactcggccagctgccagatcaaagttttcaagcccaaaggtgcagacagaaagcaaaaaacggatagggaaaaaatggagaaacgaacacctcatgaaaaggagaaatatcagccttcctatgagacaaccatactcacagagtgttctccatggcccgagatcacgtatgtcaataactccccatcacctggcttcaacagttcccatagcagtttttctcttggggaaggaaatggttcaccaaaccaccagccagagccaccccctccagtcacagataacctcttaccaacaaccacacctcaggaagctcagcagtggttgcatcgaaatcgtttttctacattcacaaggcttttcacaaacttctcaggggcagatttattgaaattaactagagatgatgtgatccaaatctgtggccctgcagatggaatcagactttttaatgcattaaaaggccggatggtgcgtccaaggttaaccatttatgtttgtcaggaatcactgcagttgagggagcagcaacaacagcagcagcaacagcagcagaagcatgaggatggagactcaaatggtactttcttcgtttaccatgctatctatctagaagaactaacagctgttgaattgacagaaaaaattgctcagcttttcagcatttccccttgccagatcagccagatttacaagcaggggccaacaggaattcatgtgctcatcagtgatgagatgatacagaactttcaggaagaagcatgttttattctggacacaatgaaagcagaaaccaatgatagctatcatatcatactgaagtaggagtgcggcgtttcgtgcccagtggctgctccttccttcacctctgaaaacggccctcttgaagggggatatgaatggagatttgaaggtctgcaagaacctgactcgtctgactgtgtgtggaggagtccaggccatggaggcagaatcctggccctctgtgttggcccaagctcttgtggtacacacagattactgcccaatatgcagttctgcagctgttttagttaaatttctggaccttgttgttgttaaatatcagtagaaactctacataatttagagtgtatgtagggcataatgatgatgggaattgtgtgatgtttaacaggaagatcttaaattttgtgatatggagccctgtaatttttttcttatataaaaatgggtatctatattcataaaaaaaaaaaaaaaaaaaaaaagtactggtctcaaatgtactggtatctctgctttttgccacagtttgtccctgaaaactttatcagtgaggagaaatacagaattttccttttggttcccctgtaataccacaactaatagtattttcagctaacatttattgaccaggcagtgtgataaattttttgaatgaccatcttgttttaaccccctaatcacactatctgaactaagcgctatagtgaccccccacccgaagatggcgaaatgggaaacacactacgggccaactaactctgcctaggtggccgggaactcgaaagccactgatcgcgaaaacccccaccagccaaaatgggccccccctttatcccccgtctcttaccacccccgtcccctcttcaccgcccgggcggccccgcgctttattaagccggcgcctaccgggcggcgtcaccacaaacacacccacaccccttccagaactcacccccgtaacacaaacaacatccgcctccatcctagttcgctcgcctctgcaaccaccggcagtggccccgtgagcgggtgatttataacggcaactctatgtgcgagctcgtgcgcagcacgcggtgctcgatccccgcgatgcactcctggtccctccgccc

SEQ ID NO: 6343 - DNA, 3172 bp, Homo sapiens
  misc_feature (1180)..(1194): n is a, c, g, or t
aagaattagctgggcgtggtggcgtgtgcctgtaatcccagctatttgggaggctgaggcaggagaatcgcttgagcccgggaagcagaggttgcagtgaactgagatagtgatagtgccactgcaattcagcctgggtgacatagagagactccatctcaaaaaaaaaaaaaaaaaaaaaaaaggcaattgtgcggagccaaccatcactgccattacactcacattcaatggaaattgattaggcctgagagaaggagcaagaggcagaaacactgactctgagaccatgaccttggaagatcctcagagatcaactagccaagtcactcacttaaaatggggaaactgaggttccaactgacagaaactgagggtcctgccctcttctctggctcctcagtctccagtttgaagcaacagagccatcattttcccagtgggaggggcctctgtgtcctggtctatgatggggcgagttggaggggtgggcttctctagccctgccccctcccaggagcccagcccctctggccaggactgaggaggagtggagggaagcagggagggagggagcaagtgtgaagggcacagctgctggcaaatgccccattccctgccccagcacttcccagcctttccaggagctctgccccacccctactcaaggagtcaggtgcccagggtagggaataagtctaggaaagggggtggagacaggaccgtgacagtctcagggaccaatccctgcctctgcccatcagattgccaatttggggagacagcaatatcatctgggagattcagcttaatttgcttcaattcagcaaccatttattgagcatctattatgtgccaggcactgtgccgggcactggggatatacacaaagccataagcactggggactgccaggttggcactgtagggaccaagattaactttttggtgcatctaattccacctctgcaagacactgcttccaaggctacagttggggaagatgaagagattctagaatctgtgccctgggaagggagaaacagcagggaagaggggcaatacaacagggtcaagggtgcagaggccaggcagagtgggtgcagagtgggggatgggcaaccagcctggtaacacctgggtgaggtgagcgagtcaagcccatctggaaatgctaaannnnnnnnnnnnnnncctaactgccaatcaacacactgccaatgcgggtgggctaagccgccaggatgcctgcagcagatggacgctgcccatccttgagccagccagctgggggcagagaggtgggtggcgggcacctcatgccagctgagaccaagagtggttgtatacatttctgcagcttgcagatttcatttttttggtcaccctttaagtgtccttctctcccaggatgagtgaggagctgtgctgatgttgggaacttatctttttccaggatccataacatttaggggaattatttgcgggctttcctagtgtattctaagaagttctaactctccatcaagaagcccaagattcctggagtctttttttcctctgccctgatcaactggggcccaggaaaagcaatgtctcttcacgggcctcagggccccagcagatggggctgggtcaggaaccatctctgtcccaggtgctcagccctcatatgcattttcttctggagcctcttagaatctcctccagaggactcatagagctgcctcccccaggatggtgaagttgggagcaaaatggggcttctgtaagtagaggtggaaaaccagagagatgtttccacagcagccatttccctaccctgtttcctaacttatgctgacaagttcttcctcttcctaccgtggggttcgagccccacttctggttgcatgttcccaccaccacgctctgctggttttagtcggctgacttttctaactgccccagcctctcctgctctctcagaacctccctctgcccccaccccccatctgtctcttcctcctaattaagggccactgcaaagagagacgggctggctaacccatgggatttagcttataagaacaaagcacaattattcaggactgaactgctttgaggtgccttggaactggctttggaaatagctatctgccccctagctatggactcttcacagttatttccagtttataaaaaggaaaagctgatcggatccatgtttctctctgcgagtctccttggggaggttgggctggtaaatatttgcaaggtcaggttaagcagacagacaattgaaaatactgggcaggtccaaaaggatagttccaggccataggaatggcttggtgcagttaacgggtgatgaagcaagaaatcttccttcctacttatgtcttaaagatggacagcctgtgtctcttgctgtgcctcttgctggcgtcttcctttattgaagcttgctgatgcactgtacatagtctctctctctaggtatagatatattatatatacaaatatcaaacatctcaccacacccaccccaaaagttacactgtgtgtgtgtggggaggtgtaataacttctcagtgttttgagttgattcaccaaaggcaaattttggaatgttcttgcgctttgtgcacttggaggggaaaacccaactacatatgcactttcttggttgtgtgtgctatagagaggttggaaggggtggttggaaggggagagaaactgagatggccctctgtgactcgactgctgggatgtatctgcttttgggagcagactgagtttcttttgcaatttgtcttattgtttgggtctactggcaacaataaactatctcccctgaaaatcaaaaaaaaaaaatatccacacaataccctttttaattccaccctacacggcggggccccgccacaaagaatccctccaccgagggcccacctttacccggtgcctcctcatttcttttatcaaatccgcgccccatcttatgtaagctcacagcttcaaacccctgcccccttcgccaaaaggcctataaactttccccgaacttatgtcaatacctcccataacaccgcagaattaccgctgactacacaccgcatagatcttcgggattcggggcgccacgctcctactttcatcgtctcccctccgcaaatactttacctacccg

SEQ ID NO: 6344 - DNA, 2020 bp, Homo sapiens
  misc_feature (969)..(1014): n is a, c, g, or t
  misc_feature (1602)..(1616): n is a, c, g, or t
  misc_feature (1759)..(1776): n is a, c, g, or t
gcggcgcgcgtccaggcacaggccatgcagtgacgcccccccacccctccacctttgcccggagcgcgggcagcagcccagcgcgccagccggccccggggcaggagcggtgctaggcaggggtggggtggccgggcccagggaccgggagccggggagggagccgggcaccgagcagagggcgggggaagcggcgccgaagtttgcctcggactcgccgggcgctgccgtggctccctgggccgaggactgttgctgccgctgccgccgccgcttcattgcacattcaagtggaaaattttcaggagtcagcagaaacattgtgtccaaaaaagactgagtcgcagttaccaccaaacccaggaggagactctccctggaaaacttcccttccctttcggtttattttcttgaaaaggctccaggcttcggcttggaaaatcccaccgccaaaattgagcccagcagctggagcggcagtgagagccctgccgaaaacatggaaaggatgagtgactctgcagataagccaattgacaatgatgcagaaggggtctggagccccgacatcggagcaaagctttcaggaggccctggctatctatccaccatgtgggaggaggaaaatcatcttatcagacgaaggcaaaatgtatggtaggaatgaattgatagccagatacatcaaactcaggacaggcaagacgaggaccagaaaacaggtgtctagtcacattcaggttcttgccagaaggaaatctcgtgattttcattccaagctaaaggatcagactgcaaaggataaggccctgcagcacatggcggccatgtcctcagcccagatcgtctcggccactgccattcataacaagctggggctgcctgggattccacgcccgaccttcccaggggcgccggggttctggccgggaatgattcaaacagggcagccaggatcctcacaagatnnnnnnnnnnnnnnnnnnnnnnnnnnnnnnnnnnnnnnnnnnnnnncagcccccattccagggtttgagcctgcatcggccccagctccctcagtccctgcctggcaaggtcgctccattggcacaaccaagcttcgcctggtggaattttcagcttttctcgagcagcagcgagacccagactcgtacaacaaacacctcttcgtgcacattgggcatgccaaccattcttacagtgacccattgcttgaatcagtggacattcgtcagatttatgacaaatttcctgaaaagaaaggtggcttaaaggaactgtttggaaagggccctcaaaatgccttcttcctcgtaaaattctgggctgatttaaactgcaatattcaagatgatgctggggctttttatggtgtaaccagtcagtacgagagttctgaaaatatgacagtcacctgttccaccaaagttgctcctttgggaagcaagtagtagaaaaagtagagacggagtatgcaaggtttgagaatggccgatttgtataccgaataaaccgctccccaatgtgtgacatatctgatcaactttcatccacaagctcaaacacttaccagagaatctatatgatgaacaggtgttnnnnnnnnnnnnnnnacacattctctatcggtggtcaccaacacagggattacaacaagaaactctactctgcatgggcctgtgtgtcccgaacgtttccacatacgtggaacaaccggtaggcaacaacctttcctatttacaggcttgtacaaggnnnnnnnnnnnnnnnnnntcatatatataagatatctgtatatacacaacaccacatatgtgcacaacacacaactctcctctcccattaatcgaacgactgactgtacacctttaacaaaacaggggtgggtgccctggcccgaggtcaccccgattttcctataacctgtgtctgactgacgtcattcttccatgtggtcactctcatcattgtaactggaaagtctggctcagctgttaacgcagaacttggttgctca

SEQ ID NO: 6345 - DNA, 1608 bp, Homo sapiens
tgcggacgcgtctacggacacacagtgcaggcgcccaagccgccgccgccagatcggtgccgattcctgccctgccccgaccgccagcgcgaccatgtcccatcactgggggtacggcaaacacaacggacctgagcactggcataaggacttccccattgccaagggagagcgccagtcccctgttgacatcgacactcatacagccaagtatgacccttccctgaagcccctgtctgtttcctatgatcaagcaacttccctgaggatcctcaacaatggtcatgctttcaacgtggagtttgatgactctcaggacaaagcagtgctcaagggaggacccctggatggcacttacagattgattcagtttcactttcactggggttcacttgatggacaaggttcagagcatactgtggataaaaagaaatatgctgcagaacttcacttggttcactggaacaccaaatatggggattttgggaaagctgtgcagcaacctgatggactggccgttctaggtatttttttgaaggttggcagcgctaaaccgggccttcagaaagttgttgatgtgctggattccattaaaacaaagggcaagagtgctgacttcactaacttcgatcctcgtggcctccttcctgaatccctggattactggacctacccaggctcactgaccacccctcctcttctggaatgtgtgacctggattgtgctcaaggaacccatcagcgtcagcagcgagcaggtgttgaaattccgtaaacttaacttcaatggggagggtgaacccgaagaactgatggtggacaactggcgcccagctcagccactgaagaacaggcaaatcaaagcttccttcaaataagatggtcccatagtctgtatccaaataatgaatcttcgggtgtttccctttagctaagcacagatctaccttggtgatttggaccctggttgctttgtgtctagttttctagacccttcatctcttacttgatagacttactaataaaatgtgaagactagaccaattgtcatgcttgacacaactgctgtggctggttggtgctttgtttatggtagtagtttttctgtaacacagaatataggataagaaataagaataaagtaccttgactttgttcacagcatgtagggtgatgagcactcacaattgttgactaaaatgctgcttttaaaacataggaaagtagaatggttgagtgcaaatccatagcacaagataaattgagctagttaaggcaaatcaggtaaaatagtcatgattctatgtaatgtaaaccagaaaaaataaatgttcatgatttcaagatgttatattaaagaaaaactttaaaaattattatatatttatagcaaagttatcttaaatatgaattctgttgtaatttaatgacttttgaattacagagatataaatgaagtattatctgtaaaaattgttataattagagttgtgatacagagtatatttccattcagacaatatatcataacttaataaatattgtattttagatatattctctaataaaattcagaattctaaaaaaaaaaaaaaaaaaaaaaaaaaaa

SEQ ID NO: 6346 - DNA, 1262 bp, Homo sapiens
gtgtccgacttcctcatgtgtgtgtttgtctcgcacctcgttatttatgttgttgcgtgctttctgtggttgtttcatgtgtggtctctctctctgctcgtcttgatatgattctgttgtcttcaccggctcacttctctccctatggcgtctcctttacatcctcatgtctctccctccattttttgggatcctatattccgggcccatatactcttcatggctttttggctctacatctcttctggaactgtcgatgtgatctcgcggagcccatggttaagccttttttccccatctttgggaaacgtgattatgttcacgtgtaataactatggggaaataggggaaattaaaggaccagggacatgggaaccaagccatagggatcagagggccttgtccttgaacactactggggtatattcaggctcatccacgcagctgctgggttcttgccctaacggccctcccctgcaacatccgtcttggaggagaggctgcagccacagcaccctactgccctttaaataaaggagggctgtgggcagggccatgtccctttctcctctcccctcaacctcttactgctgttctccctttctccgtccttcatggaagccctgggagataacctggcttcctggagttgatggaataaaggttggggtggccataatggtttgttgggggtgagggaaaaaacccacagggaccagaatgttttgttgttcttttgttttcttttttgtaccaaagtcaactgcacgtgttttatatttttaagagatcgtaggcaattagagatcgaagcctcctatctccacatctctgaagaagttgaggggtgggggagagaatgacttctgccttcatctgcagtaacggggggacctatactgacctcttccccagccatttagaaacaagttctagggtgggttggaaaatctccaagagccctgacctcatcttccacctcagcaaccatgacctgaaacctcagcgtgaatttgggggatttttcagtggaacccttgcccccaaatgtcgaccagcccccaaatgtcgaagaattttcttcttgccaattttgttgtttaaaaaaaaaattcagggaaaattaaaaacctggaactccaaaaaaaaaaaaaaaaaaaaagtcgcaaattctgaggaggatgctagtagagagccgggcagggacctaagttcctctgaaagggggctttttctataaccggcgatggcggtcccaaaac

SEQ ID NO: 6347 - DNA, 3963 bp, Homo sapiens
gtgtgtgagagtccagccttgggccagagtgccgggtctaggcctggaagcgcgaggcgggcatttcggaagagagtggcgcggcgtggggcgccgcgagggcactacgagcccaggaactgccgcgccggcccgattttccgcggctgtataaggactagcggttcggtagttggggagctggcagtgcaaagtgattttagatcggttgttggtgtacagaaataggctgtgcagccgataacagtagaactctgaacgtggattccactgcaatgacactacctatgtctgatccaactgcatgggccacagcaatgaataatcttggaatggcaccgctgggaattgccggacaaccaattttacctgactttgatcctgctcttggaatgatgactggaattccaccaataactccaatgatgcctggtttgggaatagtacctccaccaattcctccagatatgccagtagtaaaagagatcatacactgtaaaagctgcacgctcttccctccaaatccaaatctcccacctcctgcaacccgagaaagaccaccaggatgcaaaacagtatttgtgggtggtctgcctgaaaatgggacagagcaaatcattgtggaagttttcgagcagtgtggagagatcattgccattcgcaagagcaagaagaacttctgccacattcgctttgctgaggagtacatggtggacaaagccctgtatctgtctggttaccgcattcgcctgggctctagtactgacaagaaggacacaggcagactccacgttgatttcgcacaggctcgagatgacctgtatgagtgggagtgtaaacagcgtatgctagccagagaggagcgccatcgtagaagaatggaagaagaaagattgcgtccaccatctccacccccagtggtccactattcagatcatgaatgcagcattgttgctgaaaaattaaaagatgattccaaattctcagaagctgtacagaccttgcttacctggatagagcgaggagaggtcaaccgtcgtagcgccaataacttctactccatgatccagtcggccaacagccatgtccgcctgcctggtgaacgagaaagctgcccatgagaaagatatggaagaagcaaaggagaagttcaagcaggccctttctggaattctcattcaatttgagcagatagtggctgtgtaccattccgcctccaagcagaaggcatgggaccacttcacaaaagcccagcggaagaacatcagcgtgtggtgcaaacaagctgaggaaattcgcaacattcataatgatgaattaatgggaatcaggcgagaagaagaaatggaaatgtctgatgatgaaatagaagaaatgacagaaacaaaagaaactgaggaatcagccttagtatcacaggcagaagctctgaaggaagaaaatgacagcctccgttggcagctcgatgcctaccggaatgaagtagaactgctcaagcaagaacaaggcaaagtccacagagaagatgaccctaacaaagaacagcagctgaaactcctgcaacaagccctgcaaggaatgcaacagcatctactcaaagtccaagaggaatacaaaaagaaagaagctgaacttgaaaaactcaaagatgacaagttacaggtggaaaaaatgttggaaaatcttaaagaaaaggaaagctgtgcttctaggctgtgtgcctcaaaccaggatagcgaataccctcttgagaagaccatgaacagcagtcctatcaaatctgaacgtgaagcactgctagtggggattatctccacattccttcatgttcacccatttggagcaagcattgaatacatctgttcctacttgcaccgtcttgataataagatctgcaccagcgatgtggagtgtctcatgggtagactccagcataccttcaagcaggaaatgactggagttggagccagcctggaaaagagatggaaattctgtggcttcgagggcttgaagctgacctaaatctctttgcctaacaacttgggatcctgaagataaatatgtgttggacaagcatagaaagtgatttatatttttaatggttttcaagtggaagttcctttgaatttgtcagttcattcctggaaaatcttttgagttaaaataaggatcctaggacagcacctcgaactacaggccctaaagagaaattgcctcaaaccacaagtgctgtaacttcctcccctttctgtcaattggttgtctttaaatattgcaaaagtcctgatgctaaacagtatttggagtgttttcagtgtctgtactactgttgtagaccttggtatttttttaaacactgttaactgaaatgttttgatgatttgtatgtgatttgtgtttctaaacttctctttacattaatgttgttactggtgaaaggcatgagagcagcactaagtcctctgtgtaactgccattgtctttccaatccccagtagaccagtaaataaataacacatcagtgtcttctagaaggtgcctgaccaggttcaccttttaaacgacaaagcatggtttgtggctttttgcaaaattactatgaaccaaaagttgacaaatgttccaaagttattttctctaacatatcacattaaagatctgtttcagaattgtaaaaagtacatctagatgtgtttacagaaagcaagtatccagtatgactggcatgtgttcatgctattcagaatcacttgtaaatagtctgcttttaaaggagggcatgttcagttttctgtgaattaaaatatgctcatgtgtgggcacacacgcacaaacacacacacgcacgcacacagtggcagaagggatttatattaatattctttcccctctggccttcttacagtctgttggtccctttgcttctgttgtcagtgtgttgaattgcaaaccgagtactgctgtaaatactatgtttacttcatgctgaatgtttgcaaagacttgatataagtattaatagtaatgaatcaatgaataaataatgagctagggtttgtgaggctttctacaaataggtcagctccacctggagtgcgaattgccagagacaccttggtagtgcccatcggcaaatcgcaatggcagcatgtgagtggaccattcagaaacttctgcttggtggaaagtaaacagagaggatggaggtttggggcgaatgtcctgaggcagagatggtctttattgtgtgtggtggtggttgtggtatttataataatgcaagcataccctcccttgagtctcaattgaagataaaagaatgtactgagcaagcaaagccaatggagagtatttcacaaaaatactttgtaaatgagatgccagtagtgttcaaagttgtatttttaaaagataaatattcctttttatacctcaaaaaaaaaaaaaaaaaaattaatgaataagatataagtaaatccattagtagttatctcagtccctccctttgggttactagaatgttggaaaaagatgccaagtctgtcttgacaactggaaacagggttccacagcagcccattcgtgctgaaaactggcttcccccctgaagcaccctgctgtggcaccagcaggaagctcaggttaattttacactagcttgctcactgatgcatctctcatcaatgctacggaaggctttgattcatcagtctcgggctcttggaatacctaattttaataatatctatgaaatcaagggaaactttccatttacagttatttcttgtttaaataaactaaattaatttttaggggagagcagtaggaaaaagagctaatgcatgcggggtttaatacctaggtgatgggttgaggtgcagcaaaaccaccatggcacacgttcacctatgtaacaaacctgcacatcctgcacatgtaccccggaacttacttaaaaaaaaa

SEQ ID NO: 6348 - DNA, 1242 bp, Homo sapiens
ctcctgggcacaagtgatgcccccacctcagcctcctaagaacccaggattataggtgtgcgccactgcttctggctgggcatctttttttaaaagtcctaatgtacagctgcaattgtgaaacattcattacctgttttcatatttagaatgagggtaatccttctagaggcacacaaagttagctgagtagcaaaaagctgggtctcaaaccaaggtcttctaatttcaaatatcatgttttatctactttaccatgaagctgaattgtgtgagcacaattatgaggtctcctttgcctcccaccctcgctgtattgtccattttccaaggtaaacacacccagttctttcagttctttttactctgtgatttcagtgccttctgctctcctagtaataatatatttaccagccagcatatatttatgatcagtatacatttgtgatgcattctatgggccaggtacagggctaggcattgggactccagagtgcctggaggagaagatcccccacgcttaaatatagtacatttgacatagtccttatccttagtgccctcaagacctttcccagcatatctggctcttcataacatggagagctagtggtccttcctggatctgcgtgtcctcagtctaacccctgcagatctcccttcatgtgggtagggccttctagatggcacctgggctatgccgacttaaccctgcatttcaggctgatcccacacagcctccaaataggcactattgctctaaggtgcctgggagagaaaaggttggccccggttttggaaactttggggttttgcgtgtgtctaaaaagattattttcaagtagtttttgctctcccagtgagaaaaggagaggctgatcatgtgctgccagacactgggcaaagggtgatgtttgtaatgaccatccagtgactccctgtgccgctgtccttcctgccatggatgtttttggagcttccgtctactcattcagcatccagggaggctgtgatgaagtaaggaccatctgttagggaccagatagcaaggacatttgcagcgcattgaaggttggcctggatgaccagcaagggtttttcctgccctgcatgcctggactcccacctccccacccctggttaggcttcctggttgtggggagtcatagccagtggagctctagtctgtaacaaacacaccatcggaacaacaaaccctcaggtctttcacattgattagat

SEQ ID NO: 6349 - DNA, 1479 bp, Homo sapiens
ggttcgcttgaggccaagagttcaaaacaagcctgggcaacactgcaagaccccaactctacaaaaaacgaaaaattagccgggagcggtgatgtgtgcctgtagtcccagctactcaggagactgaggtggaagaatcacttgagcccgggaggttgaggctgcagtgagctgtgtttataccactgcactccagcctgctgggtaacagagcaagactccatctcaaaaagaaaagaaaaaatgctttgctacataatgaggccaggcaaaaaaaaaaagtcctgtggaaatcatatagacaaacatttgcaaagctgctactgccattgtaccagtgttaaaatgtgttctaccttgcatcttttactgatttttatgacagattttatattgtaaccatttgagaactctgtaagtgctatggcttccttaaactacgatttatcatatgctcccagtgtttactttgagactgaatggcaaccagagaatgtaaacaaccaaggtgcatctggttatgttttaaaataaagattaataaaagtaatacaaaaacaaaaaaaaaaacgaaaaaaacctgtgttgggggggcatatggcaccttggaaaaaaggtttttctaagaaccaatatggttgtgggggggagggggcccccaggagggttaaccggccaaccgtgtggacccacatacgacgcgcgtccccccaagggaaaaacaccggggaacaagaaccaacagatggcgcaggagaactctccacacacagcaatgacaaaaaacagcgccacgcggcgaagcaaacaccacgcaaggcgtttctcccagacagcaacaagtcacaacacattaggaccaactacacaaggaaggagtcacaccaacaaccggcagcgaactcccttaaacaacaagacaaaaggagcagtgctccacaaaaggcggagaaacgcagcaagcaagataacgaaaagaaatggacacaacgcagccccacgagcaaaccgggggagcacagacagagagagagagaagagagaacacgacaaaacaaaagacaaacaacagacaaaacacacgagaacagaaaacacagcaaaaccacgagaaaaccaacaagaaacacaaaccaacagtagaacaagaaagagccgcaggtagaaaggaggacagaggggcagaaagaaagcaagcgagagagacgagagacacacgagagaaagaagaaggaagcgcaagccacggaaaagagaacgaaacagagagaaaagacaggaaaggcagagaaagaaacgagaaagagagaagaaagcgagagaggacgaaggaagcgagacacgaagagaacagacaacagaaggagaagagagaggcaagcgaagaacgaagctacgaacgacgcaagaagcacgaggcaagaacgaagaacgacagagaagcaagaagggagagcaaaggagagcgacaatgcaccc

SEQ ID NO: 6350 - DNA, 2604 bp, Homo sapiens
  misc_feature (190)..(220): n is a, c, g, or t
  misc_feature (2499)..(2515): n is a, c, g, or t
cctttcccctcccgccggacctgccaggaggtgggctggcgcggagggagggccctgtcccctgtccctttaaggaggagggccaaacgccggcctagagtgcggcgtagcccccacccgccgtgccctcaccccagagcagctgcagcctcagccggccgcccctccgccagccaagtccgccgctctnnnnnnnnnnnnnnnnnnnnnnnnnnnnnnnagatcgtgacagttaagacccaggcgtaccaggaccagaagccgggcacgagcgggctgcggaagcgggtgaaggtgttccagagcagcgccaactacgcggagaacttcatccagagtatcatctccaccgtggagccggcgcagcggcaggaggccacgctggtggtgggcggggacggccggttctacatgaaggaggccatccagctcatcgctcgcatcgctgccgccaacgggatcggtcgcttggttatcggacagaatggaatcctctccacccctgctgtatcctgcatcattagaaaaatcaaagccattggtgggatcattctgacagccagtcacaacccagggggccccaatggagattttggaatcaaattcaatatttctaatggaggtcctgctccagaagcaataactgataaaattttccaaatcagcaagacaattgaagaatatgcagtttgccctgacctgaaagtagaccttggtgttctgggaaagcagcagtttgacttggaaaataagttcaaacccttcacagtggaaattgtggattcggtagaagcttatgctacaatgctgagaagcatctttgatttcagtgcactgaaagaactactttctgggccaaaccgactgaagatccgtattgatgctatgcatggagttgtgggaccgtatgtaaagaagatcctctgtgaagaactcggtgcccctgcgaactcggcagttaactgcgttcctctggaggactttggaggccaccaccctgaccccaacctcacctatgcagctgacctggtggagaccatgaagtcaggagagcatgattttggggctgcctttgatggagatggggatcgaaacatgattctgggcaagcatgggttctttgtgaacccttcagactctgtggctgtcattgctgccaacatcttcagcattccgtatttccagcagactggggtccgcggctttgcacggagcatgcccacgagtggtgctctggaccgggtggctagtgctacaaagattgctttgtatgagaccccaactggctggaagttttttgggaatttgatggacgcgagcaaactgtccctttgtggggaggagagcttcgggaccggttctgaccacatccgtgagaaagatggactgtgggctgtccttgcctggctctccatcctagccacccgcaagcagagtgtggaggacattctcaaagatcattggcaaaagtatggccggaatttcttcaccaggtatgattacgaggaggtggaagctgagggcgcaaacaaaatgatgaaggacttggaggccctgatgtttgatcgctcctttgtggggaagcagttctcagcaaatgacaaagtttacactgtggagaaggccgataactttgaatacagcgacccagtggatggaagcatttcaagaaatcagggcttgcgcctcattttcacagatggttctcgaatcgtcttccgactgagcggcactgggagtgccggggccaccattcggctgtacatcgatagctatgagaaggacgttgccaagattaaccaggacccccaggtcatgttggccccccttatttccattgctctgaaagtgtcccagctgcaggagaggacgggacgcactgcacccactgtcatcacctaagaagacaggcctgatgtggtacgtccctccacccccggacccatccaagtcatctgattgaagagcatgacagaaacaaaatgtattcaccaagcattttaggatttgactttttcactaaccagttgacgagcagtgcatttacaaggcactgccaaacaagatgcccttgggagctgtgagggaaagaggacctgcgggcttagatcaatctcaattccttttcatgccctcctgcattgctgctgcgtgggtatttgtctccttagccatcaggtacagtttacactacaatgtaagctataggtggagcatcagcagtgagtgaggccattcttcatccttaggatgtggcaatgaaatgatggtgcaagttcctttctcttttgtgaatctttccccccatttcctgtttacatgtaacccaacaaaatgcaatttctagtgccttctgtccaatcagttctttcctctgagtgagacgtacttggctacagatttctgccttgttttgcgacattgtcccattcacacagatattttgggataataaaggaaaataagctacaaaaaaaaaaaaaaaaaaaataaaaaaannnnnnnnnnnnnnnnngggcggccgctcctaaagaattcctccaaggggcccaaggtttacccgtaccccggttttcttggaacaagggggcccccccatagggg

SEQ ID NO: 6351 - DNA, 2857 bp, Homo sapiens
gaagcccagcagccccggggcggatggctccggccgcctggctccgcagcgcggccgcgcgcgccctcctgcccccgatgcttcctcatctgctccagccgccgccgctgctggcccgggctctgccgccggacgtccaccacctccatgccgagaggagggggccacagccctggcatgcagccctgcccagtagcccggcacctgcccctgccacgcaggaagccccccggcctgccagcagcctcaggcctccccgctgtggcgtgcccgacccatctgatgggctgagtgcccgcaaccgacagaagaggttcgtgctttctggcgggcgctgggagaagacggacctcacctacaggatccttcggttcccatggcagtgggtgcaggagcaggtgcggcagacgatggcagaggccctaaaggtatggaagcgatgtgacgccactcacctttactgaggtgcacgagggccgtgctgacattcatgatcgacttcggcaggtactggcatggggacgacctgccgtttgatgggcctgggggcatcctggcccatgccttcttccccaagactcaccgagaaggggatgtccacttcgactatgatgagacctggactatcggggatgaccagggcacagacctgctgcaggtggcacccatgaatttggccacgtgctggggctgcagcacacaacagcagccaaggccctgatgtccgccttctacacctttcgctacccactgagtctcagcccagatgactgcaggggcgttcaacacctatatggccagccctggcccactgtcacctccagggaccccagccctgggcccccaggctggggatagacaccaatgagatttgcaccgctgggagccagacgccccgccagatgcctgtgaggccttcctttgacgcggtcttccaccatccgaggcgagctctttttcttcaaagcgggctttgttgtggcgcctccgtgggggccagctgcagcccggctacccagcattggcctctcgccactggcagggactgcccagccctgtggacgctgccttcgaggatgcccagggccacatttggttcttccaagagctgggatttccatcctcaactggcagagatgagagcctggagcattgcagatgccagggacttcacaaatgaaggcacagcatgggaaacctgcgtgggttccagggcagtccagcctgcaggggcccagggagtggtcagtaggcatttgtcacagccaaatgccagtggaaggagcagccgcccaggcagccctctactgatgagagtaacctcacccgtgcactagtttacagagcattcactgccccagcttatcccaggcctcccgcttccctctgcgggtggggtgctgagcaggcattattggcctgcatgttttactgatgaggaaactgaggctgggagagtctgtggtaggggtcaagcaggtccacagtggcggggcatggcagtggtggctgggcaggtccttgcagccttccctctccggcaggtgctcagtactgggtgtacgacggtgaaaagccagtcctgggccccgcacccctcaccgagctgggcctggtgaggttcccggtccatgctgccttggtctggggtcccgagaagaacaagatctacttcttccgaggcagggactactggcgtttccaccccagcacccggcgtgtagacagtcccgtgccccgcagggccactgactggagaggggtgccctctgagatcgacgcttgccttccaggatgctgatgggctatgcctacttcctgcggccgcctctactggaagtttgaccctgtgaaggtgaaggctctggaaggcttcccccgtctcgtgggtcctgacttctttggctgtgccgagcctgccaacactttcctctgaccatggcttggatgccctcaggggtgctgacccctgccaggccacgaatatcaggctagagacccatggccatctttgtggctgtgggcaccaggcatgggactgagcccatgtctcctcagggggatggggtggggtacaaccaccatgacaactgccgggagggccacgcaggtcgtggtcacctgccagcgactgtctcagactgggcagggaggctttggcatgacttaagaggaagggcagtcttgggcccgctatgcaggtcctggcaaacctggctgccctgtctccatccctgtccctcagggtagcaccatggcaggactgggggaactggagtgtccttgctgtatccctgttgtgaggttccttccaggggctggcactgaagcaagggtgctggggccccatggccttcagccctggctgagcaactgggctgtagggcagggccacttcctgaggtcaggtcttggtaggtgcctgcatctgtctgccttctggctgacaatcctggaaatctgttctccagaatccaggccaaaaagttcacagtcaaatggggaggggtattcttcatgcaggagacccccaggccctggaggctgcaacatacctcaatcctgtcccaggccggatcctcctgaagcccttttcgcagcactgctatcctccaaagccattgtaaatgtgtgtacagtgtgtataaaccttcttcttcttttattttttaaaactgaggattgtcatctaacacagttgttttaaaaacaaaaaaaagaaaaaaagaaaggaagagaaaagaaggagaagagagaagacgaaaaaacagggggggataaacaggaggaagaaaaagttgaagggcaaagagtaaaaaagagggggaacaaggaggaaagaggggcgaaaccgagg

SEQ ID NO: 6352 - DNA, 3406 bp, Homo sapiens
gggaagcgcttcctggttctagccgagaggggcgaatccggcttcgctccgcgccgccgggaggagctgtctgcagccccctcctcccgccctcgcctctccctcctccttctcccgccctcctcgccgatccgggcggtgctggcagccggagcggcggcgggcgggccgagcagccggggcagccgcgcgtgggcatccacgggcgccgagcctccgtccgtgtctctatccctcccgggcctttgtcagcgcgcccgctgggagcggggccgagagcgccggttccagtcagacagccccgcaggtcagcggccgggccgagggcgccagagggggccatgtcgtaccagggcaagaagagcatcccgcacatcacgagtgaccgactcctcatcaaaggtggacggatcatcaacgatgaccaatccctttatgctgacgtctacctggaggatggacttatcaaacaaataggagagaacttaatcgttcctggtggagtgaagaccattgaagccaacgggcggatggttattcccggaggtattgatgtcaacacgtacctgcagaagccctcccaggggatgactgcggctgatgacttcttccaagggaccagggcggcactggtgggcgggaccacgatgatcattgaccatgttgttcctgaacctgggtccagcctactgacctctttcgagaagtggcacgaagcagctgacaccaaatcctgctgtgattactccctccacgtggacatcacaagctggtacgatggcgttcgggaggagctggaggtgctggtgcaggacaaaggcgtcaattccttccaagtctacatggcctataaggatgtctaccaaatgtccgacagccagctctatgaagcctttaccttccttaagggcctgggagctgtgatcttggtccatgcagaaaatggagatttgatagctcaggaacaaaaaagggagttccctgggagaggggggatcacgggtcccgagggccatgccctgagcagacctgaagagctggaggccgaggcggtgttccgggccatcaccattgcgggccggatcaactgccctgtgtacatcaccaaggtcatgagcaagagtgcagccgacatcatcgctctggccaggaagaaagggcccctagtttttggagagcccattgccgccagcctggggaccgatggcacccattactggagcaagaactgggccaaggctgcggcgttcgtgacttcccctcccctgagcccggaccctaccacgcccgactacttgacctccctactggcctgtggggacttgcaggtcacaggcagcggccactgtccctacagcactgcccagaaggcggtgggcaaggacaactttaccctgatccccgagggtgtcaacgggatagaggagcggatgacggtcgtctgggacaaggcggtggctactggcaaaatggatgagaaccagtttgtcgctgtcaccagcaccaatgcagccaagatctttaacctgtacccaaggaaagggcggattgccgtgggctcggatgccgacgtggtcatctgggaccccgacaagttgaagaccataacagccaaaagtcacaagtcggcggtggagtacaacatcttcgagggtatggagtgccacggctccccactagtggtcatcagccagggcaagatcgtctttgaagacggaaacatcaacgtcaacaagggcatgggccgcttcattccgcggaaggcgttcccggagcacctgtaccagcgcgtcaaaatcaggaataaggtttttggattgcaaggggtttccaggggcatgtatgacggtcctgtgtacgaggtaccagctacacccaaatatgcaactcccgctccttcagccaaatcttcgccttctaaacaccagcccccacccatcagaaacctccaccagtccaacttcagcttatcaggtgcccagatagatgacaacaatcccaggcgcaccggccaccgcatcgtggcgccccctggtggccgctccaacatcaccagcctcggttgaacgtggatgcgcggaggagctagcctgaaggattctgggaatcatgtccatcccttttcctgtcagtgtttttgaaacccacagttttagttggtgctgatggagggagggggaagtcgaaggatgctctttcccttttctgtttaggaagaagtggtactagtgtggtgtgtttgcttggaaattccttgccccacagttgtgttcatgctgaatccacctcggagcatggtgttttcattcccccttcctagtgaaccacaggttttagcattgtcttgttctgtcccttccacttctaactccactggctccatgattctctgagtggtggttcctttgcaccctgtagatgttctaggatagttgatgcatgttactaaattacgtatgcaagtctgtgagtgcgtctgaggggacatcgccaaggactgactgagacacgatgccgagacctcaagccctgaggggcagtcccaaaacccttacagtgaagatgtttactcattgcccccacctctggtccacactagaaagaagctcgccccacctccacctgtgagatccgtgaattctcggaatggcaggggaagccttgcactaggttgcagagaagcatcctccacatcctgtgtcagaaaccctggtctccgtggcacttgtaactcaccgtgctgtcttctggtctgtgtgtgttcttcaagccagctctaggcttcaggccgagccaggttcacactcagaaagaggtctccccatccccattcggggctgacgatggggggctgatggctgcccctgcgtggcctgagtcctggtccctctgaggcagttgacggggcagtcagatttttaaagttttgtacaaagttttcctttgtaatcactcccatttttacttaacaaccaacttgttgtggctcttatttctgaattcaaagcttgtgaaaaaataaagaaaatgaactgcccactgaaaaaaaaaaaaaaaaaacaaaaaaaaaaaaaaaaaaaaaaaaaaaaaaaaaaaaaaaaaaaaaaaaaaaaaaagcgggcgcgccgcgcccataaaaaatcctcttcccgcggcggggcgcgccacttaccgtccttcccgcccccccggttgtttggtgaaaaaggggcggccccccttacgatggggtggctattctatttcctcccgcgcctgccgcggcgcgcgggcgcttaatacacatccggtctgcggtgcgggactgcacttcctcctcttctcttcctcgttcttctcgggcggcgagcgcccctctcctcctccgtgcggcgcgcactttgtcgggcgccttctcccccctggg

SEQ ID NO: 6353 - DNA, 3439 bp, Homo sapiens
tggactcaagaacataggacagcttgtgaaataggttcttacttgtaaggtttgtatttatttttcttgcttttgaaatcttggatttaaatataataaaagtagatagcactgtcaatatttagactgtactgataactgtttaggtaaaggtctgttgactcttgtatcctagtaagactttgaaagtaaactttgtaaaataatgatttagtttgtcccttccctcttataaaattgaaagtgtaactcagaaagtaggctgtaagatcttcaggctgatgtaggatggtatactgcctaaccagtgaggatgacttttgggaaaataatgtggaagaaactaactgtggagcagcatcttacttatatttaattatagtatagtgaatatctggatcagcagatgatacttattttatagtagggcatttgcttttctctaattatctacttagaaaaagctgcttgcttttaaatgagagatttctggtcataaataagggggaggaattatagtttaaaagcaacacctcatgggagcaataaatgaactcacatagcagtagcttctttttcgggagctttatctgtaggtctgtacttttaacatacattattttggataataaggaggaacatatgcagcagaaaaaagaggaggaagaagttcttaaagaagtaactgcacatttccaaattactttaactgaaactcaagcccagctggaacagcatgaaatacacaatgccaaactgcagcaggagaacatggaaatgggagaaaagctaaagaagctcactgaccagtatgcactgagggaagaggtaaacggcgtttggtttgtttatagacagctgctcaccagtagcaaaagctacaccctaccgtaaagtaaaaactctttcacaggacagtattttagaacttttgtgtatgcacagtggaaattacatgtttattaggaaaagagtagaaacctgtaaacagaatgactaaattggagcatcacttggcccaagtgtcagtggagtaggataagtaaagggatttctaggagatgtgtaccacttgtctcccatatgatgctacaagattgtcaatatagcatacagatatttttctcttatgcagtctaataatacagatttgttccctaaatactctgtatctcagatttctgtgccaatctgaacaatataaataggagaattgtgctatttgtgagaataaggaacctactaattacccatcaccaagtcacattgtttgtgtaatcaaagaagtaaaaagtttgtggaggactcaatagttgtcgaacctagtcattggagttattttataaattgatgtggaagttgtatgatggctaaataaaaaacaaataggtgataacctgcttatttgtttttattttttctttacttttagaggtctatacatagggtaagatttcaattttcaaaggatgcatccccttcctttattatgctttaagctagtaaaatatatatttaaatccttacttagtagattaaaattggaaatagaaagtgacaacttagaaattaataaaacagtaaatattactttatgcatatcaaaatgttattttgagttacaccttttcatgctacttttgaaaacatttttctttaagattttgagtatcttttaaaccattttcctctatgtttcaagaacatttcaaacttattatggaagctgcaaacttatagtagaatatatcacttggctttagcaattatttacttttgtttctagcaactcttgtttccatctatttttgagcaaatccaagatattatatcattttatttattactattcaaatatgcatcatgaaataagattctttttaagccataatcactgtactatttttactccaaaaggttaaacaattgctatgtaatcacataccttctcactgtactatttaaatatctgttacttcccttttccttcaggttgtttacatcaacatcaaaataaggtttatacattttattgttttaatatgtctcaagtctttttagtatataagcttcccccccctcttttttttccttggaatgtatttattaaagaaattttttaggcctatatagtgaacttttaaaattaaatttgttttatattataaagcatattatgaatatcatcagtttttttaaaagaatcctttaaattccattgttttaaataatggtattaaaaatgattaattttattttattttttattattttactctttaggatttatattattttaactgtattaaactctccaaatttgctatagaagtagcagattgggagaggacatgtgttcaagttgtactacttgtatgtcttgtttagatattacagtctttttcttttatcagaaaataattgaataatgataaaatcagttgcagattaagacagattatctgttgcagtcttctcaaaacttaatttaagtacattattttcagctagcatttcttccttcacatagaacctccatgtgtggagggatttcctaatgagtctattgtatgtacaatagcacttaatgacatagcttttaaataataacaggattttaccaaatgtttaatatgtgccaggcatcaagcaccttacacagtttaattattgcatagatttggacagcaactttgcaagttaggtatggtcatgaacctttgcagataaggaaactgtgtttcacaaggagaagaaattgtcctggatcatacaataagctaggatttgctccagaccatttttttcattttatcaggctacctacaattaaggaatttcagaagattttgtgaacaaaaaatgtccaggaattatgtgtgtaataaatgaatttgatattttgatctccttatccatctttttcttgataaaatatcagcttttttttttccaatgtagggcagaagcaagaagtacagatattttgatggggacagcccacgtctgatagggtgggacatggggcagcagttagagggttgtgctctttctagtgtgggatagtttgcaagatgatatgttgtagccacttctgcagtgacggggacagaaggagtcagtgttcttaactacagtggtagcagcagaaaagaagggtaagcagggttctagaaatttgtgttatgttttctccccactgtatttatttctttggttagtggtgcaagaaattctgttttcctgtagcaaattaataaagcgttcaaacataaggaattacgacaacagcttgtagatgccagacttcaacaaacagcacagctgataaaagaagctgatgaaagacatcagagagagagagagtttgtaagttctacttcttgaaaaaaaaaaaaaaaaaaagtagaagaagcggcaatttagtagttagtagtcg

SEQ ID NO: 6354 - DNA, 4441 bp, Homo sapiens
  misc_feature (4429)..(4429): n is a, c, g, or t
  misc_feature (4434)..(4434): n is a, c, g, or t
  misc_feature (4440)..(4440): n is a, c, g, or t
atgtgtcggtgacattgaatggggagaccgagcgcgagcgaggcgcgcgcgcgcacacgcgcactcacggccccgctcgctccgagatccccggccacgtaagtaactattaataccgcctcgccgggggatgcgggcgtgctgagcgcggggattggcctcgggcaccgtcggccgtcccctttaatttttaaatacacggtcccctcttttctctggggggggcaagcaagaaatcaaagaaggaggagacaagccgtcaattttctccaaaacaaaccccaccgggcaatttggtctcggggtagggggagacggggtgattgcaaattattccaggacgagatccagttctccagcgggaaaggggcaaaggaacgccgcgcgttggaagggccagggtacgcagctccccttgcagcgcccgcaggacccccgcaagctcgtgccggcgaaatcggagaccgccgatctgtcctcgttctctcctgcacgtctggctgcattcggaggaagacctggggcgcgagcgagcggcgacagcatgagcctgtgctgacctccgcgcggcgggccgagcccagggctttgtcgcggtacctgcgcccagcccgcgccgcaactctgtgcccagcttttgcaatcttttgttgcagcgctgaccgcaccaagttaaatgctcccttgcaatttttcttttttttgtttgtttgtttaatttttggagagctcgcgatcttggaaaagcctcagacgccatctacagttaaaacgtaggtaactgccctctcccgcaccccccccttacacgccccccaccctttccaccaaaaaaagggggtgcagcgcggattctggctgccgtgcgtcgccagccggtagacccgtgcttgtttcctttctctttttgtttggcttctaacgcgttgggactgagtcgccgccgtgagctccccgaagactgcacaaactaccgcgggctcctccgccccgtctgcgattcggaagccggcctgggggtcgcgtcgggagccctgcgctgcagctccgcaccttagcagcccgggtactcatccagatccacgccggggacacacacacagagtaactaaaagtgcggcgattctgcacatcgccgactgctttggggtaacaaaaagacccgagttgcctgccgaccgaggacccccgggagccgggctcggagcagacgaggtatccggcggcgcccatttgggggcttctaactctttctccacgcagcccctcttctgtcccctcccctctcgctcccttttaaaatcagtggcaccgaggcgcctgcagccgcactcgccagcgactcatctctccagcgggtttttttttgtttgtcgtgtgcgatcctcacactcatgaacatacacaggtctacccccatcacaatagcgagatatgggagatcgcggaacaaaacccaggatttcgaagagttgtcgtctataaggtccgcggagcccagccagagtttcagcccgaacctcggctccccgagcccgcccgagactccgaacttgtcgcattgcgtttcttgtatcgggaaatacttattgttggaacctctggagggagaccacgtttttcgtgccgtgcatctgcacagcggagaggagctggtgtgcaaggtgtttgatatcagctgctaccaggaatccctggcaccgtgcttttgcctgtctgctcatagtaacatcaaccaaatcactgaaattatcctgggtgagaccaaagcctatgtgttctttgagcgaagctatggggacatgcattccttcgtccgcacctgcaagaagctgagagaggaggaggcagccagactgttctaccagattgcctcggcagtggcccactgccatgacggggggctggtgctgcgggacctcaagctgcggaaattcatctttaaggacgaagagaggactcgggtcaagctggaaagcctggaagacgcctacattctgcggggagatgatgattccctctccgacaagcatggctgcccggcttacgtaagcccagagatcttgaacaccagtggcagctactcgggcaaagcagccgacgtgtggagcctgggggtgatgctgtacaccatgttggtggggcggtaccctttccatgacattgaacccagctccctcttcagcaagatccggcgtggccagttcaacattccagagactctgtcgcccaaggccaagtgcctcatccgaagcattctgcgtcgggagccctcagagcggctgacctcgcaggaaattctggaccatccttggttttctacagattttagcgtctcgaattcagcatatggtgctaaggaagtgtctgaccagctggtgccggacgtcaacatggaagagaacttggaccctttctttaactgagctcatgccccacggagacttagcaggttccaggagtgagcgagggcagcggaaaggagttcttccgggggacacgaattgcctggctgagtagcaagaaagacacactcttatgtttcttggttcagagcaggaaaaccttcaaggagctgactgaccacgtagcatgggggcaagaggcgtgggatggggattggggtgagatggatgggagcccgctggagcttgtcttccctaacatagcctgggagaccaccccttgccacttgggccacttccgcctaccccacttttcattttgttccaaaatagttgcagatcctgacagaatcaaaactctctgcctcaaacacacatcctggcatcgcactgttagcatttaacttcttgttaggattcagggaaggaacagttggccaagaattttttttcttttaaacaagccaaccacctagctggtaattaatgaggttcacttaaaaaaaaaattcggtgcacacagactgacatgaaacctgggtgctacagtaaaagaaaacaaaagtccagtttgtgtctcttaatcgctcacttcaactcatttcttctaaataaactatttaatatcctggtcaggaaataaaaaaaaaatgctttgctccctgaagggggaaaaaatctgtcctttaacaagctattctgttttgtgtcaattgggtccgtggcaaggaagctattaggaagtcaaacggtccaggatgcattacctgctaatccttaggtttaaagggggaaagaaaagggaagaagaaaggaaaagagaaatccaactcctttttcatgttttgcttttgaacaatgagggtttgtgtgacaggcattcctctttgctgagatgatagcaatggcctgagattttagcaagctcctggagtctgatgcttttgcagtactctgatcgcaactaaacatttgtctttgttttattagaaactagtgaaacaaagcaggttgtcccacatgtataaaatacagggcagctatttagttttctttacagagaatgatccttttaaggcttgtaaggccctctggtttggacaaaaaccctcagtagagacaagcgggaaggataattagctgaaagctatgatgatataaataaaaacagctctctatcccaatacgcacctttgtattttcaagaactcttctatttattaaggaaaatgtcacattgtgatgtattaagccagtacttcaattacgggttgacttgggatgacatattacatgctgtagttaacatttataattctttttccttgtttgagtatttctgtctctgaaataaccttttacttggcttttctagatagctttatttgatttcgagtggcaaaatgttttttattacggcttttctattgctgtatgatacagaactcttttggcataaatatttgtgttcccagtacctcacttgttcggatttgactgcctgtatatgttttgtgaaatggtcctgtttttgggtaggtgacacgtggactctagtatgtaaatgttacttgaatctgtgcttcaaatagtgtgtggcatgtatgtgcagactcttggatgctttatgcctgcgcagcaggagccctgtcctcacgttcccaggagggcggcttcacccttcgtaaccaggagacaaggcggccatggatttgcccttgattctattttgctaatggaagatagaaaggagagaaggtttttttttttttttaacattctgaagatggtgctgtgtcaagaaggaccttttttttcccctctcccctattttttaagtaccttggaggaggagaggttggtgacatgcatggtggggatctatggcctctggtgctttgtcctgtatttggtttaatgtttttgtcctaatctcttcaatcaataaaattgtgcgtatttaactaaaaaaaaaaaaaaaaaaaaaaaaaaaaaaaaaaaaaaaaaaaaaaaaaaaaaaaaanggggnggccgnt

SEQ ID NO: 6355 - DNA, 1253 bp, Homo sapiens
  misc_feature (247)..(249): n is a, c, g, or t
  misc_feature (297)..(297): n is a, c, g, or t
tttccgcaagtaaagggctcctaagtcaattaggtttggcccgacccaaactttataggatggtcgaagggctcccctaaacggtatcgccttagttgaggccgtcttaaaggggttgtgtcaagggaaaacataaccaatccgtcattcttattaaaaggatttccattcggctattggtaaaatgactatttacaaaattaccgaaatttacaaatatacggtacatttcaattgcatcagctgnnncaatgttgaaagcgatcgtccggcctatggtatagccacttgcaaagnggatgtctcaagcgattagttggtacgcagggtttccagtccgacgtgtaaacgacgccagtttatttttttaattttttttttagtctgcttttaaattgctttattaactttacagtatgcaataaacatctttccatgaaagttgatgaaagtcctcttctgacagaaaaacttacagactaggtcaaaatgcaatctccaatcagaaaattgcagaagaatgccaaaaggttcacattaaaggtacaccaggaaaaatgcgaatttagaaagcagggattttatgattattaacctcaagattcaaggcataaggcaaaactcatcatgatgatcatggtgaggagggtcccctataagaatgcgcagactgtacctcaactgaagttccctaattttcctccttagctctctcatctcctccatgaaccgttccatatcatctccatctccatctatcatatcaatgttatcgacaagcctattgggcacatcctctccaaaacccggggcaggtggagcccaaacccctttaacatttcctccaggctcctggtattcaccacctcctaaagcgggggcttcattctgcaactggggccttctccacaactttgttttcccttggggacaattttccaatgttgagtttttttcccgttttttttttttttttcttccttcagggatcagaggcagtctttctctcttagccttgaaatcggctgcacaaacgcacttaaagacctgccagggctcaggggtcagcttctaccactttccacctttcctgggcagctggctcgcctgccttcagggcaacagcgagccgtcacacggccagcgacaactaccagactgcaactaggatgagggactaatccacgcattggctctgggtctcctaagggccacgtcactgtgagctcagatttccagttcccatccccgct

SEQ ID NO: 6356 - DNA, 1386 bp, Homo sapiens
  misc_feature (54)..(72): n is a, c, g, or t
tgctgcaattctctgagtttacagtgtaactttgtgacagattcgtctttctgnnnnnnnnnnnnnnnnnnnactgttgtaattaaggtccatcctgaacatgtgaagtagctttttccgggttacttgaaataaatcgagtcaatccgtgtggagaacacctgatgtcaatctagatcagaggagagatccagatggagttatatgaggttgtcttgtggcatcaatggtcatgctgacagccctgctccttgtgaacgggatcaatggctacaatgaagacataatcaagagtctgctcccaaagcctccttaaggctgggcttctctgagtactgcggaatctctaaccttattgtgcttcacctcagaaaggtggaaagaagaagaggacgagtcagcattaaagaggagcgagcttgttaactggtacttgaaggaaatcgaatcagagatagactctgaagaagaacttataaataaaaaaagaatcatagagaaagttattcatcgactcacacactatgatcatgttctaattgagctcacccaggctggattgaaaggctccacagagggaagtgagagctatgaagaagatccctacttggtagttaaccctaactacttgctcgaagattgagatagtgaaagtaactgaccagagctgaggaactgtggcacagcacctcgtggcctggagcctggctggagctctgctagggacagaagtgtttctggaagtgatgcttccaggatttgttttcagaaacaagaattgagttgatggtcctatgtgtcacattcatcacaggtttcataccaacacaggcttcagcacttcctttggtgtgtttcctgtcccagtgaagttggaaccaaataatgtgtagtctctataaccaatacctttgttttcatgtgtaagaaaaggcccattacttttaaggtatgtgctgtcctattgagcaaataactttttttcaattgccagctactgcttttattcatcaaaataaaataacttgttctgaaaaaaaaaaaaaaaaaaaaaaaccaagaaaaacctatgccggggtgccgggagaaaagaaggtaatggaaaatgggcccatgggcccataacctggtttccctggcccccagccttttctttggaccctaaagggggtacgaatctgcccgggttcctccccttataggtggaggcccccaatttaaatctctccgattaaagcccaaggggttaaaaccctggcactacaatgggaattgcggggctgggcagtgatacccgcgggaacatattttatcccgcgcgccctataaatagagcgcggcggctctactttttctttggccgggaactcccacaaggaggaacac

SEQ ID NO: 6357 - DNA, 2745 bp, Homo sapiens
atagggaattcgtataatttttaaagctgggaggttctgccaccaagcacggccttcccactgggaacacaaacttgctggcgggaagagcccggaaagaaacctgtggatctcccttcgagatcatccaaagagaagaaaggtgacctcacattcgtgccccttagcagcactctgcagaaatgcctcctcagctgcaaaacggcctgaacctctcggccaaagttgtccagggaagcctggacagcctgccccaggcagtgagggagtttctcgagaataacgctgagctgtgtcagcctgatcacatccacatctgtgacggctctgaggaggagaatgggcggcttctgggccagatggaggaagagggcatcctcaggcggctgaagaagtatgacaactgctggttggctctcactgaccccagggatgtggccaggatcgaaagcaagacggttatcgtcacccaagagcaaagagacacagtgcccatccccaaaacaggcctcagccagctcggtcgctggatgtcagaggaggattttgagaaagcgttcaatgccaggttcccagggtgcatgaaaggtcgcaccatgtacgtcatcccattcagcatggggccgctgggctcacctctgtcgaagatcggcatcgagctgacggattcgccctacgtggtggccagcatgcggatcatgacgcggatgggcacgcccgtcctggaagcactgggcgatggggagtttgtcaaatgcctccattctgtggggtgccctctgcctttacaaaagcctttggtcaacaactggccctgcaacccggagctgacgctcatcgcccacctgcctgaccgcagagagatcatctcctttggcagtgggtacggcgggaactcgctgctcgggaagaagtgctttgctctcaggatggccagccggctggcagaggaggaagggtggctggcagagcacatgctgattctgggtataaccaaccctgagggtgagaagaagtacctggcggccgcatttcccagcgcctgcgggaagaccaacctggccatgatgaaccccagcctccccgggtggaaggttgagtgcgtcggggatgacattgcctggatgaagtttgacgcacaaggtcatttaagggccatcaacccagaaaatggctttttcggtgtcgctcctgggacttcagtgaagaccaaccccaatgccatcaagaccatccagaagaacacaatctttaccaatgtggccgagaccagcgacgggggcgtttactgggaaggcattgatgagccgctagcttcaggcgtcaccatcacgtcctggaagaataaggagtggagctcagaggatggggaaccttgtgcccaccccaactcgaggttctgcacccctgccagccagtgccccatcattgatgctgcctgggagtctccggaaggtgttcccattgaaggcattatctttggaggccgtagacctgctggtgtccctctagtctatgaagctctcagctggcaacatggagtctttgtgggggcggccatgagatcagaggccacagcggctgcagaacataaaggcaaaatcatcatgcatgacccctttgccatgcggcccttctttggctacaacttcggcaaatacctggcccactggcttagcatggcccagcacccagcagccaaactgcccaagatcttccatgtcaactggttccggaaggacaaggaaggcaaattcctctggccaggctttggagagaactccagggtgctggagtggatgttcaaccggatcgatggaaaagccagcaccaagctcacgcccataggctacatccccaaggaggatgccctgaacctgaaaggcctggggcacatcaacatgatggagcttttcagcatctccaaggaattctgggagaaggaggtggaagacatcgagaagtatctggtggatcaagtcaatgccgacctcccctgtgaaatcgagagagagatccttgccttgaagcaaagaataagccagatgtaatcagggcctgagaataagccagatgtaatcagggcctgagtgctttacctttaaaatcattaaattaaaatccataaggtgcagtaggagcaagagagggcaagtgttcccaaattgacgccaccataataatcatcaccacaccgggagcagatctgaaggcacactttgatttttttaaggataagaaccacagaacactgggtagtagctaatgaaattgagaagggaaatcttagcatgcctccaaaaattcacatccaatgcatactttgttcaaatttaaggttactcaggcattgatcttttcagtgttttttcacttagctatgtggattagctagaatgcacaccaaaaaaatacttgagctgtatatatatatgtgtgtgtgtgtgtgtgtgtgtgtgtgtgtgcatgtatgtgcacatgtgtctgtgtggtatatttgtgtatgtgtatttgtatgtactgttattgaaaatatatttaatacctttggaaaaatcttgggcaagatgacctactagttttccttgaaaaaaagttgctttgttattaatattgtgcttaaattatttttatacaccattgttccttacctttacataattgcaatatttcccccttactacttcttggaaaaaaattagaaaatgaagtttatagaaaagaaaaaaaaaaaaaaaaaaaaaa

SEQ ID NO: 6358 - DNA, 1002 bp, Homo sapiens
gagcgattgactcttccttctagattttttacccaacactttttttatttgaccaacctagcctccctcaggttctcttgagcagctccagggtcctcaaaaagtatggctgtagcagcacaatcttttgtatatgagcccaagacagaagctaaattttcatgccacagtggcaactgagaatgaagtcttccgagtgaaggtttttaatattgacctaaaggagaagttcaccccaaagaagatcattgccatagcaaattatgtttgccgcaatgggttcctggaggtatatcctttcacacttgtggctgatgtgaatgctgaccgaaacatggagatccccaaaaggattgattagaagtgccagcgtaactcctaaaatcaatcagctttgctcacaaactaaaggaagttttgtgaatggggtgtttgaggtacataagaaaaatgtaaggggtgaattcacttattatgaaatacaagataatacagggaagatggaagtggtggtgcatggacgactgaccacaatcaactgtgaggaaggagataaactgaaactcacctgctttgaattggcaccgaaaagtgggaataccggggagttgagatctgtaattcatagtcacatcaaggtcatcaagaccaggaaaaacaagaaagacatactcaatcctgattcaagtatggaaacttcaccagactttttcttctaaaatctggatgtcattgacgataatgtttatggagataaggtctaagtgcctaaaaaaatgtacatatacctggttgaaatacaacactatacatacacaccaccatatatactagctgttaatcctatggaatggggtattgggagtgcttttttaatttttcatagtttttttttaataaaatggcatattttgcatctacaacttctataatttgaaaaaataaataaacattatcttttttgtgaaaaaaaaaaaaaaaaaaaaaaaaaaaaaaaaaaaa

SEQ ID NO: 6359 - DNA, 2269 bp, Homo sapiens
tttttttttttttttttttttttttttttttttttggaatgcttttttttcagaaatggaaatttatttaatgtataagatgacttactgaaaaaaagtagaggggtagggaatgacattttattataacagcatttgtataaaatcattttgatcatctttaagtatgcacaaacagctatcgaaaggcatgtaaacatgaaccaagttttttttctttattttctaaaagcagtaaaaacatttatacaggacattatgaaagtctaatgccatcattaggacccaactgctgcaggttaccagtgtggaattgcatatcaccagatgctgttccacaaatggacaggcaagcaggatgatagcattctcttgattactataatagtcacaataatacttataattaaagaaagcttcctttagctggattaccctgcataaataggcaacacagttaatcaaatgtaaacatatgttttctaacaccagtatagaaaatacaaaactaattacaatcagaacaatttctaccttatcctactatagtaattattacgctttgcttctttgcggtgtgatctctatgttttttttcccattcatcatcttctgtgtcttggtcaaatgactcaggatatgctggtaacttgtctttggggcattcttcatagtaacttctaatatattttcccacagaccatcctttgtattcttcaggcgttttgcattccaggccattaaaatggacattgtagtggtgctttaaccagtagtagaggtagtgaatgttgtagtcacatctccaagggttatctctgagccacaagagtttcaaaaaatacaagtcttctaatacgccatagtcaaagttttgcagactgttgtttgataaatctaattcttctaaatgtgtgagccctaaaaaagcggcacagcaaaaatcattcacgtaagtctacttgcagggtttcatctcaaagacccaggatcgatgaattcaatgccattgctgctgaggtttaatttcttcagctcatgaacatcttcaaattccttgggtcgaagttggttgattttattgtatgacaagtcaagtttaacaatatctggagggatgttgtttggcacttttttcaactctttccttttgcagtccagtgtttgtatgggaaacacataattgtggcaaaaagttgagtccacctcaggcttgatgactgggggtctccctgacacttggggtttcgggtccaattgttccttttcttcttcattacacaactgttcagattttatctgccgcagttttttatttttttgttcttgtggactttcacacttggcgtagttcgccaaattccggttcctgggaatctgcaacattgaaataagcgtttctatctcacaagtacagtgccaggggttgtcataaagacgcaggtagctcaagagaggtgtgtaaatgaacacttcctccgtcaagactttgatctggttgtgctgcagtaagagggtggtgagtttgtttaaaccaaagaacgcctcactctcaattttagagatctcattctgctgcagatccaggcttttcagctttttaaacttggaaaacatgttgttcttcaatgtgcggatcttgtttcttgctagcagcatgtgcagcaaatcctgaggccaaccaggcagcacataaactaattttctttcttgacaatctaagtatttctcatggagatatgtgtacacgtcacacgggaggcctggtgcgtagcgtttgaccgggttggagcctctccggcctccacccgcccggccatgattcactcggcttctcacactgcctgggcttgctttgcgcagctcagccgctttgcaaaagcagagcaagattacaatggtaaccacacgcatcctgacatccagctggccccaattacttcgtgttacagacggaacaatgaaagtattcctttgaaatccaagtctgggtaatcttaactaatgcagttctggaacaatgagacccagctggggtacgtggagtccctaggctgaacttggggaatggatgccacaagctcatctatctggacctctctggctgcacccaggtttgtctttcagtcttctctttgctgcggtgtgtgaggaagttctccagagaatgggctgcattcagccctcacgttatactaatgctgtgcacggaccgcagcacacttttcagaggttttttattacatggccccagctgctgaaattttcc

SEQ ID NO: 6360 - DNA, 1809 bp, Homo sapiens; identical to SEQ ID NO: 5723

SEQ ID NO: 6361 - DNA, 751 bp, Homo sapiens
  misc_feature (744)..(744): n is a, c, g, or t
attttttttgttttagttcaaacagctggtcattaatgcagtcctcatttctagagcgaagtgctgctggacatgaatgccctcctgattaatgctgcccctccgagggtccttcacccagcagtcatgctcgcagcagaataatgtagcatgatgtgattgcactctaacaggatagtatgtcattgtgtcaccaagcaattgaggttattatggggcagggcagacagacgggacagtggggttactagaccgtagcatttttagaaatacaggcctgacctacttagagttattctctctggctggcagctgcatggtacataaagtctcctgataggctgagtctgttgctagggggaattagcatgaatttttccacacacagactcagtggctgaatgataaaagctgactggaattaaagagatttggtttagtattatacagatttatgtgcctccttttctttctcaagtgcagagaaagagtgcaaagacacagattttgttttcatttgttctttgaccttcttgttctctccccctcccctcaagatgcatgaggggaggagggcagggcagttatgaaattttggttaatctctcactgttggggtcactgaaacgatgtcgcaaattgcaaggatatttaaggcttaaaaactgttggggaatgacttaacaggaaggttaggattatttttcctcttctgtgcactaggctgttttgaagttggggccngccatct

SEQ ID NO: 6362 - DNA, 4132 bp, Homo sapiens
  misc_feature (2150)..(2165): n is a, c, g, or t
  misc_feature (3080)..(3083): n is a, c, g, or t
agccagcccttgccgtggccggagccgagcggcgcatccgggccggagaagaggacgacgacgaggtcctcgaagtggacccgtttgcgaagcgccagggagaaggaggagcggacgcatcgtagaaaggggtggtggcgcccgaccccgcgccccggcccgaagctctgagggcttcccggcccccactgcctgcggcatggcccggggctcggcgctcccgcggcggccgctgctgtgcatcccggccgtctgggcggccgccgcgcttctgctctcagtgtcccggacttcaggtgaagtggaggttctggatccgaacgaccctttaggaccccttgatgggcaggacggcccgattccaactctgaaaggttactttctgaattttctggagccagtaaacaatatcaccattgtccaaggccagacggcaattctgcactgcaaggtggcaggaaacccaccccctaacgtgcggtggctaaagaatgatgccccggtggtgcaggagccgcggcggatcatcatccggaagacagaatatggttcacgactgcgaatccaggacctggacacgacagacactggctactaccagtgcgtggccaccaacgggatgaagaccattaccgccactggcgtcctgtttgtgcggctgggtccaacgcacagcccaaatcataactttcaggatgattaccacgaggatgggttctgccagccttaccggggaattgcctgtgcacgcttcattggcaaccggaccatttatgtggactcgcttcagatgcagggggagattgaaaaccgaatcacagcggccttcaccatgatcggcacgtctacgcacctgtcggaccagtgctcacagttcgccatcccatccttctgccacttcgtgtttcctctgtgcgacgcgcgctcccggacacccaagccgcgtgagctgtgccgcgacgagtgcgaggtgctggagagcgacctgtgccgccaggagtacaccatcgcccgctccaacccgctcatcctcatgcggcttcagctgcccaagtgtgaggcgctgcccatgcctgagagccccgacgctgccaactgcatgcgcattggcatcccagccgagaggctgggccgctaccatcagtgctataacggctcaggcatggattacagaggaacggcaagcaccaccaagtcaggccaccagtgccagccgtgggccctgcagcacccccacagccaccacctgtccagcacagacttccctgagcttggaggggggcacgcctactgccggaaccccggaggccagatggagggcccctggtgctttacgcagaataaaaacgtacgcatggaactgtgtgacgtaccctcgtgtagtccccgagacagcagcaagatggggattctgtacatcttggtccccagcatcgcaattccactggtcatcgcttgccttttcttcttggtttgcatgtgccggaataagcagaaggcatctgcgtccacaccgcagcggcgacagctgatggcctcgcccagccaagacatggaaatgcccctcattaaccagcacaaacaggccaaactcaaagagatcagcctgtctgcggtgaggttcatggaggagctgggagaggaccggtttgggaaagtctacaaaggtcacctgttcggccctgccccgggggagcagacccaggctgtggccatcaaaacgctgaaggacaaagcggaggggcccctgcgggaggagttccggcatgaggctatgctgcgagcacggctgcaacaccccaacgtcgtctgcctgctgggcgtggtgaccaaggaccagcccctgagcatgatcttcagctactgttcgcacggcgacctccacgaattcctggtcatgcgctcgccgcactcggacgtgggcagcaccgatgatgaccgcacggtgaagtccgccctggagccccccgacttcgtgcaccttgtggcacagatcgcggcggggatggagtacctatccagccaccacgtggttcacaaggacctggccacccgcaatgtgctagtgtacgacaagctgaacgtgaagatctcagacttgggcctcttccgagaggtgtatgccgccgattactacaagctgctggggnnnnnnnnnnnnnnnntccgctggatggccccagaggccatcatgtacggcaagttctccatcgactcagacatctggtcctacggtgtggtcctgtgggaggtcttcagctacggcctgcagccctactgcgggtactccaaccaggatgtggtggagatgatccggaaccggcaggtgctgccttgccccgatgactgtcccgcctgggtgtatgccctcatgatcgagtgctggaacgagttccccagccggcggccccgcttcaaggacatccacagccggctccgagcctggggcaacctttccaactacaacagctcggcgcagacctcgggggccagcaacaccacgcagaccagctccctgagcaccagcccagtgagcaatgtgagcaacgcccgctacgtggggcccaagcagaaggccccgcccttcccacagccccagttcatccccatgaagggccagatcagacccatggtgcccccgccgcagctctacgtccccgtcaacggctaccagccggtgccggcctatggggcctacctgcccaacttctacccggtgcagatcccaatgcagatggccccgcagcaggtgcctcctcagatggtccccaagcccagctcacaccacagtggcagtggctccaccagcacaggctacgtcaccacggccccctccaacacatccatggcagacagggcagccctgctctcagagggcgctgatgacacacagaacgccccagaagatggggcccagagcaccgtgcaggaagcagaggaggaggaggaaggctctgtcccagagactgagctgctgggggactgtgacactctgcaggtggacgaggcccaagtccagctggaagcttgagtggcaccagggcccggggttcggggatagaagccccgccgagaccccnnnnggacctcagtcacctttgagaagacaccatactcagcaatcacaagagcccgccggccagtgggcttgtttgcagactgggtgaggtggagccctgctcctctctgtcctctgacacagagagctgccctgcctaggagcacccaagccaggcagggggtctggcagcacggcgtcctggggagcaggacacatggtcatccccagggctgtatacattgattctggtggtagactggtagtgagcagcaaatgcctttcgacgataataggtgtcagcttcactgccatgtcatatatggagtgaatatttcaaaacgttgggaataagggcctgcaaaaggcagcgaggaggcacctcgggtcttgaggttcctgacaaccgatctggtctgttggtttgaggatgaaggggctccatttctgctgcctccctgctgagaatattctccctttagcagccaaagattcgctggaacggaggctgccctctgctgcctgttggggtcggaagacaaggggcttctgaaatgggagttcctgagatacaacaaaatgtgtgccttcaaagaaactgacagctttgtatttggtgaaatggttttaattatactccatgtgtattttgcccactttttttgggaattcaagggaaagtgtttcttgggtttggaatgttcagaggaagcagtattgtacagaacacggtattgttatttttgttaagaatcatgtacagagcttaaatgtaatttatatgtttttaatatgccattttcattgaagtattttggtcttaagatgactttagtaatttaactgtttatgttacccacgttgggatccagttggtcttggtttgcttctctctgtaccacgtgcacatgaggtccattcattttacagcccctgttacacacagacccacaggcagccgtctgtgccccgcacacattgttggtcctatttgtaaatcccacacccggtgtatccaataaagtgaaacaaagcccaaaaaaaaaaaaaaaaaaaaaaaaaaaaaaaaaaaaa

SEQ ID NO: 6363 - DNA, 1559 bp, Homo sapiens
gtgtatgggtaaatcaaagataaggttatagtaacatcaaagattaggtgaggtttatagaaagatagatatccaggcttaccaaagtattaagtcaagaatataatatgtgatcagctttcaaagcatttacaagtgctgcaagttagtgaaacagctgtctccgtaaatggaggaaatgtggggaagccttggaatgcccttctggttctggcacattggaaagcacactcagaaggcttcatcaccaagattttgggagagtaaagctaagtatagttgatgtaacattgtagaagcagcataggaacaataagaacaataggtaaagctataattatggcttatatttagaaatgactgcatttgatattttaggatatttttctaggttttttcctttcattttattctcttctagttttgacattttatgatagatttgctctctagaaggaaacgtctttatttaggagggcaaaaattttggtcatagcattcacttttgctattccaatctacaactggaagatacataaaagtgctttgcattgaatttgggataacttcaaaaatcccatggttgttgttagggatagtactaagcatttcagttccaggagaataaaagaaattcctatttgaaatgaattcctcatttggaggaaaaaaagcatgcattctagcacaacaagatgaaattatggaatacaaaagtggctccttcccatgtgcagtccctgtccccccccgccagtcctccacacccaaactgtttctgattggcttttagctttttgttgtttttttttttccttctaacacttgtatttggaggctcttctgtgattttgagaagtatactcttgagtgtttaataaagtttttttccaaaaggtaaaaaaaaaaaaaaaaaaaaaaaaaaaagaaaaaaaaaaaaaaaaaaaaaagaaaagaaagaaaaaaagagaaaaccaaaaaccacacagaaccaaaacaagaagaatagagaagaaaaaggaagtaccatcaaatataagtagaagctagactaaaccaaagacagaccagagacagacagccagtcaacaaaagcaataccaatcgcggacaactcagcttcatcattaacagagatgtccatacagaagacaaagatataaaggaagtgacgaacaacaaagcgacgcgcactcctcgacaggtagagtaaccgtaacacgacggcaggtaacaacaacattaaagaggacaataagtcggtatatatcactcgatcatatcgtagcgcggaccaactaacatcggtacgacgcatgatcaataacgaacaagctactacccaagggaatggtataaaaaaccgagtacaaatagataacagcacagaggcgtctaaagataagcgacaatcaaaacaacacgaacagctcagacagagaacgctaggagcagaaagagcaggaggggcgcggacggaagcgagcaggaggatgaggagaggagcaaagacggcagagaagcgacaagagagacgagcggcagaggaataacaggag

SEQ ID NO: 6364 - DNA, 2058 bp, Homo sapiens
atgaatattgtatgcacttggtattgttccattcattctgcaacattgttttctacctgtacattacatgcatatttcatgtgtttcttgtgcatgctatatgcttcatgtggcatccatgcccatgcaccacatatgttacgtgtaaactgtgtcgcgcctggcacaacctcactgtgctggctacagagctcgacagttctgcacaggcctcgcgcgtgcaagtggccatccagaccctggatgagaatgacaatgctccccagctggctgagccctacgatacttttgtgtgtgactctgcagctcctggccagctgattcaggtcatccgggccctggacagagatgaagttggcaacagtagccatgtctcctttcaaggtcttctgggccctgatgccaactttactgtccaggacaaccgagatggctccgccagcctgctgctgccctcccgccctgctccaccccgccatgccccctacttggttcccatagaactgtgggactgggggcagccggcgctgagcagcactgccacagtgactgttagtgtgtgccgctgccagcctgacggctctgtggcatcctgctggcctgaggctcacctctcagctgctgggctcagcaccggcgccctgcttgccatcatcacctgtgtgggtgccctgcttgccctggtggtgctcttcgtggccctgcggcggcagaagcaagaagcactgatggtactggaggaggaggacgtccgagagaacatcatcacctacgacgacgagggcggcggcgaggaggacaccgaggccttcgacatcacggccttgcagaacccggacggggcggcccccccggcgcccggccctcccgcgcgccgagacgtgttgccccgggcccgggtgtcgcgccagcccagaccccccggccccgccgacgtggcgcagctcctggcgctgcggctccgcgaggcggacgaggaccccggcgtacccccgtacgactcggtgcaggtgtacggctacgagggccgcggctcctcttgcggctccctcagctccctgggctccggcagcgaagccggcggcgcccccggccccgcggagccgctggacgactggggtccgctcttccgcaccctggccgagctgtatggggccaaggagcccccggccccctgagcgcccgggctggcccggcccaccgcggggggggggcagcgggcacaggccctctgagtgagccccacggggtccaggcgggcggcagcagcccaggggccccaggcctcctccctgtccttgtgtccctccttgcttccccggggcaccctcgctctcacctccctcctcctgagtcggtgtgtgtgtctctctccaggaatctttgtctctatctgtgacacgctcctctgtccgggcctgggtttcctgccctggccctggccctgcgatctctcactgtgattcctctccttcctccgtggcgttttgtctctgcagttctgaagctcacacatagtctccctgcgtcttccttgcccatacacatgctctgtgtctgtctcctgcccacatctcccttccttctctctgggtccctgtgactggctttttgtttttttctgttgtccatcccaaaatcaagagaaacttccagccactgctgcccaccctcctgcaggggatgttgtgccccagacctgcctgcatggttccatccattactcatggcctcagcctcatcctggctccactggcctccagctgagagagggaaccagcctgcctcccagggcaagagctccagcctcccgtgtggccgcctccctggagctctgcccagctgtcagcttcccctgggcatcccagccctgggcattgtcttgtgtgcttcctgagggagtagggaaaggaaagggggaggcggctggggaaggggaaagagggaggaaggggaggggcctccatctctaatttcataataaacaaacactttattttgtaaaaaaaaaaaaaaaaaaaaaaaaaaaaaaaaaaaaaaaaaaaaaaaaaaaaaaaa

SEQ ID NO: 6365 - DNA, 2096 bp, Homo sapiens
aaacacgaggagaacagaagaagagaaagctcagcaaattttcttgccatacttcatgacttcactgtggctaagtgtggggaccagacaggactcgtggagacatccaggtgctgaagccttcagctactgtctcagttttttgaagtttagcaatggcgtctttctctgctgagaccaattcaactgacctactctcacagccatggaatgagcccccagtaattctctccatggtcattctcagccttacttttttactgggattgccaggcaatgggctggtgctgtgggtggctggcctgaagatgcagcggacagtgaacacaatttggttcctccacctcaccttggcggacctcctctgctgcctctccttgcccttctcgctggctcacttggctctccagggacagtggccctacggcaggttcctatgcaagctcatcccctccatcattgtcctcaacatgtttgccagtgtcttcctgcttactgccattagcctggatcgctgtcttgtggtattcaagccaatctggtgtcagaatcatcgcaatgtagggatggcctgctctatctgtggatgtatctgggtggtggcttttgtgatgtgcattcctgtgttcgtgtaccgggaaatcttcactacagacaaccataatagatgtggctacaaatttggtctctccagctcattagattatccagacttttatggagatccactagaaaacaggtctcttgaaaacattgttcagccgcctggagaaatgaatgataggttagatccttcctctttccaaacaaatgatcatccttggacagtccccactgtcttccaacctcaaacatttcaaagaccttctgcagattcactccctaggggttctgctaggttaacaagtcaaaatctgtattctaatgtatttaaacctgctgatgtggtctcacctaaaatccccagtgggtttcctattgaagatcacgaaaccagcccactggataactctgatgcttttctctctactcatttaaagctgttccctagcgcttctagcaattccttctacgagtctgagctaccacaaggtttccaggattattacaatttaggccaattcacagatgacgatcaagtgccaacacccctcgtggcaataacgatcactaggctagtggtgggtttcctgctgccctctgttatcatgatagcctgttacagcttcattgtcttccgaatgcaaaggggccgcttcgccaagtctcagagcaaaacctttcgagtggccgtggtggtggtggctgtctttcttgtctgctggactccataccacatttttggagtcctgtcattgcttactgacccagaaactcccttggggaaaactctgatgtcctgggatcatgtatgcattgctctagcatctgccaatagttgctttaatcccttcctttatgccctcttggggaaagattttaggaagaaagcaaggcagtccattcagggaattctggaggcagccttcagtgaggagctcacacgttccacccactgtccctcaaacaatgtcatttcagaaagaaatagtacaactgtgtgaaaatgtggagcagccaacaagcaggggctcttaggcaatcacatagtgaaagtttataagaggatgaagtgatatggtgagcagcggacttcaaaaactgtcaaagaatcaatccagcggttctcaaacggtacacagactattgacatcagcatcacctagaaacttgttagaaatgcaaattctcaagccgcatcccagacttgctgaatcggaatctctgggggttgggacccagcaagggcacttaacaaaccctcgtttctgattaatgctaaatgtaagaatcattgtaaacattagttctatttctatcccaaactaagctatgtgaaataagagaagctactttgtttttaaatgatgttgaatatttgtcgatatttccatcattaaatttttccttagcattgtctaagaaaaaaaaaaaaaaaaaaaaaaaaattcttgttctccaaagtgagtgaaagatgatcatatatcctaaaaaaa

SEQ ID NO: 6366 - DNA, 1087 bp, Homo sapiens
tcagtaactacttgggctaggtacacttctcgctcgacacagccagagctggaggtgggtgcccggcacggaggggcctgcggaccaatggctctgccctgcaccttagggctcgggatgctgctggccctgccaggggccttgggctcgggtggcagcgcggaggacagcgtgggctccagctctgtcaccgttgtcctgctgctgctgctgctcctactgctggccactggcctagcactggcctggcgccgcctcagccgtgactcagggggctactaccacccggcccgcctaggtgccgcgctgtggggccgcacgcggcgcctgctctgggccagccccccaggtcgctggctgcaggcccgagctgagctggggtccacagacaatgaccttgagcgacaggaggatgagcaggacacagactatgaccacgtcgcggatggtggcctgcaggctgaccctggggaaggcgagcagcaatgtggagaggcgtccagcccagagcaggtccccgtgcgggctgaggaagccagagacagtgacacggagggcgacctggtcctcggctccccaggaccagcgagcgcagggggcagtgctgaggccctgctgagtgacctgcacgcctttgctggcagcgcagcctgggatgacagcgccagggcagctgggggccagggcctccatgtcaccgcactgtagaggccggtcttggtgtcccatccctgtcacagccgctcactccccgtgcctctgcttcccaagatgccatggctggactggacccccagcccacatgaccatgcctcagactgtcaccccctaccagttcccaagtccatgtgtaccccgctcaccacgggaacggccccccccaaccacaggcatcaggcaaccatttgaaataaaactccttcagcctgtgaaaaaaaaaaaaaaaaaaaaaaaaaaagaaacacttcttgccttcagggaattcttattggtccgggttggcccggcaaaaaaagcagggctaactgggaaaattggggcccacttgggggttacaaatgaccgtgggttttttccccccggaaca

SEQ ID NO: 6367 - DNA, 5166 bp, Homo sapiens
  misc_feature (2484)..(2484): n is a, c, g, or t
  misc_feature (4795)..(4811): n is a, c, g, or t
attccctgcatgggaaggaaggcgctgccaggataggggatcgcgaaggggagcgggagcaggagcgaactagcgcgagcgtctggggcactttagccgcccctttccagccgccccctcacgcgcgagctcccccgccccccgggcggctgcagcgcttaaaagtgtctgcccagtcacttgaggtttttcttcccccagtccctcagctgctgctgctgctcaggaggtcagatctgccactgatggtaataccagcaccactccgcccacctctgccaagaagagaaagttaaacagcagcagcagtagcagcagtaacagtagtaacgagagagaagactttgattccacctcttcctcctcttccactcctcctttacaacccagggattcggcatccccttcaacctcgtccttctgcctgggggtttcagtggctgcttccagccacgtaccgatacagaagaagctgcgttttgaagacaccctggagtttgtagggtttgatgcgaagatggctgaggaatcctcctcctcctcctcctcatcttcaccaactgctgcaacatctcagcagcagcaacttaaaaataagagtatattaatctcttctgtggcttcggtgcatcatgcaaacggcctagccaaatcttctaccaccgtctctagctttgctaacagcaaacctggctctgctaagaagttagtgatcaagaactttaaagataagcctaaattaccagaaaactacacagatgaaacctggcaaaaactgaaagaagcagtggaagctattcagaatagtacttcaattaagtacaatttagaagaactctaccaggctgtagaaaatctctgttcttacaagatttctgcaaacttgtacaaacagctgagacagatctgcgaagatcacatcaaagcacagattcatcaattcagagaggattcattggatagcgttctttttttaaagaagattgatagatgctggcaaaaccattgcagacaaatgatcatgatcaggagcatttttttgtttctggatagaacttacgttcttcagaattcaatgctaccctccatttgggacatgggactggagttatttagggctcatattataagtgatcagaaagtgcagaataagacaattgatggcattcttctcttgattgagagggaaaggaatggtgaagcaattgatagaagtttacttcgaagccttttaagcatgctgtctgatttgcaaatttatcaagattcttttgaacaacgatttttggaagaaactaaccggctctatgcagctgaaggccaaaaattaatgcaagaaagagaggttcctgaatatctacatcatgttaacaaacgtctagaagaagaagcagacagacttattacttacttagatcagaccacccagaagtcattaattgctactgtagaaaaacaacttctaggtgaacacttaacagcaattcttcagaaaggtttaaataacctccttgatgaaaaccgaattcaagatttgtctcttctgtatcagctcttcagtagagttcgaggtggagttcaggttcttttgcagcagtggatcgaatatatcaaggcatttggcagcactattgtaattaatcctgaaaaagataaaaccatggttcaagaattgctggattttaaagataaggttgaccatataattgatatctgctttctgaagaatgagaaatttatcaatgccatgaaagaagcatttgaaacgttcattaacaaaagaccaaataaaccagctgaacttatagctaagtatgtagattcaaaacttcgtgcaggcaacaaagaagctacagatgaagaacttgagaaaatgttggataaaattatgatcatatttagatttatctatggcaaggatgtttttgaggccttctataagaaagatttagccaagcgcctgttagtcggaaagagtgcatctgtagatgctgaaaaatcaatgctgtccaaacttaaacatgaatgcggagctgctttcaccagcaaacttgaaggaatgtttaaagacatggaactttctaaagacatcatgattcagttcaaacagtatatgcagaatcagaatgttccgggaaatattgagttaactgtgaatatcctgacaatgggctattggccgacatatgtgcctatggaagttcatttaccaccagagatggtaaaacttcaggagattttcaagacattttacctaggcaaacatagtggcaggaaacttcagtggcagtcaaccctaggacactgtgtgttaaaagcagaatttaaagagggtaaaaaggaactccaggtctctctttttcaaacactggtgctgctaatgtttaatgagggagaggagttcagtttagaagagatcaagcaggcaactggaatagaggatggagagttaaggagaacactgcagtcattagcgtgtggcanagctagagttctggcgaaaaatccaaagggcaaagacattgaagatggtgacaagttcatttgtaatgatgatttcaaacataaacttttcaggataaagatcaatcaaatccagatgaaagaaacggttgaagaacaagcaagcactacagaaagagtatttcaagacagacagtatcaaattgatgctgcaattgttcgaattatgaagatgagaaagacacttagccacaatctccttgtttcagaagtgtacaaccagttgaaatttccagtaaagcctgctgatcttaagaagagaatagaatctttaattgaccgggactacatggaaagagataaagaaaatccaaaccagtacaactatattgcatagaatgttggccttgcagcatttggtgtcatatgcagtagccagtggataaactaacctgttgattcaatattatttgactccttttttactaccgatgaccaaatgaagcagtgtaattaatggaaatagttgagtggactttttctcagtggttaacatgcccattttaaagagtaatacttacctttaagaagaatgttgttgaactctttgcatgttatttagtatgatgtgcagaaaacacttaagaacgtacctggtcttcatgaattcctctttggaactgggaaagagatccctgtggctattaaaaaggggggagggttcttacacaccattaattatgaagcaaaaggtttatttgcttaaaatgtcatttaaagatacttaaactgcatgcaaactttatttactgtacagagttctggatgtatttatcaaatagaaaaaccacccttgacttggttgttcacccgttttgtgatttcccttgaaaagagaaatgaattgtcatagctattgatattttactaggtgatgttctgttacactgaaagggatgttttttaaaaaaaaaattatttggaaacaagttttcaagtagggggacagttgcttacataatatcttgtatattcacatcctaaaaattttcatttatgagtatgggatgtgtgtatatggcttagccccaagttaactgtgctgattaacaagtacttataaaaatagctaaagtagaaaattaatgatcagttgtactagaggaacatcatagaagagaaaaatccaactctttatattaaaaatgaatacaataagaaaattgcaaaagagaccaaaatgaacgtgttttgtaaattgttacaggagcaaaaactttgcaactagttttcaacatactttagactttaaatgttgtttggacagttttgtcttcaacttggaccaattgtagattgttacaggcttcctaggatttagcattcctattttctctaccaaagttttttttagaagcatcccaactcttctctttgttgataaataagcctttcctgtcatcttcattttaacttgctaaaaccctagatacaaaggtcctccctcatttttcccacagagcccctgtttgggaatttgagattctgtgtcatgctggttttcctttcagaattgcttgaaatcgagttctcttagccactggacacctagttttcaggagaatgtcccaagattgtttatatatacaaaatggcaaaagtactgtttttcgaattgataattcaagcaaaggcttctctttactgtcactgatttttttttgtttttattttgtttccttgtttctatttccttgaagctttgaagggaggagaagcagaaaattttgtttatgtttgttaaaaatcagaactacttaatgctttttgccacagcatatttccttgcctgttggagccgttaggaagattacctatgtcctaatcttcaacctgagaagatttttgactcttgtgtctactgttgattgtttgcttgagttctcaaagacctgtggccaggtattttaaaaagtcgtctatttctttctagttgcatcaacttgcacactggtgtctaactatatgtggtattcggaacttgtaattcttattgagcagccattgcctatattttctcagctcctcactgatttctttatatgagctcagctgacaagcaaatgcagctattttgtttaccctctcttcataccggaccatcaacaacagtgttctaactcatccctgatggtctgtgagatgtagactattacacaagattcaagttactcgtaagcaacttttagatagagttggtcctgttaggaggagactcttgatgtcaccttcagtatcttgaaagcgggtcccctccccgaggctcttaacnnnnnnnnnnnnnnnnntgctgtttcagctgaaaaattagcaagactgttaaaaaaaaaaagttgaggggagctgtttaagaaactgacaaagtaattgcaacctacattggataaattgtgactttcagttgttgtctgtatcagtttgatttcttgctcttttccctgtgtacgtggtggttctatttttctccaataaaacttttatttaaaaaaaaaaaaacacactatagcacatgaaacccaaaaacacataaacaggacagaacagaacagagacaacacacaaatacaaaacacagcacagcgcgacgtaatagatgacaaacagacaaacgtgaatacacaaaaccgccaagcaaccactcaa

SEQ ID NO: 6368 - DNA, 4223 bp, Homo sapiens
  misc_feature (1262)..(1334): n is a, c, g, or t
agcggctctctggcctgcccctggctttatttctcgcgcgcttggggtctctcccagtctccgtctctccatttctcctgtgggggcggggagggggggtctccaaaaaccgcggcggcggcggctggccgctccaggcgcccgttccggagtcggggggaggcccagccgggaggggggaagggggggagccttagtcatttccccgctccagcctgctcccgcccgagcgcgcactcacggccgccgtgtcgctcgctcgcagagcagccgcggcccatggagcccgccggcccggcccccggccgcctcgggccgctgctctgcctgctgctcgccgcgtcctgcgcctggtcaggagtggcgggtgaggaggagctgcaggtgattcagcctgacaagtccgtatcagttgcagctggagagtcggccattctgcactgcactgtgacctccctgatccctgtggggcccatccagtggttcagaggagctggaccagcccgggaattaatctacaatcaaaaagaaggccacttcccccgggtaacaactgtttcagagttcacaaagagagacaacatggacttttccatcagcatcagtaacatcaccccagcagatgccggcacctactactgtgtgaagttccggaaagggagccccgatgacgtggagtttaagtctggagcaggcactgagctgtctgtgcgtgccaaaccctctgcccccgtggtatcgggccctgcggcgagggccacacctcagcacacagtgagcttcacctgcgagtcccacggcttctcacccagagacatcaccctgaaatggttcaaaaatgggaatgagctctcagacttccagaccaacgtggaccccgtaggagagagcgtgtcctacagcatccacagcacagccaaggtggtgctgacccgcgaggacgttcactctcaagtcatctgcgaggtggcccacgtcaccttgcagggggaccctcttcgtgggactgccaacttgtctgagaccatccgagttccacccaccttggaggttactcaacagcccgtgagggcagagaaccaggtgaatgtcacctgccaggtgaggaagttctacccccagagactacagctgacctggttggagaatggaaacgtgtcccggacagaaacggcctcaaccgttacagagaacaaggatggtacctacaatggataaactgcctgggaatgatcggcccaggggtgatgtagtacacagannnnnnnnnnnnnnnnnnnnnnnnnnnnnnnnnnnnnnnnnnnnnnnnnnnnnnnnnnnnnnnnnnnnnnnnngtctcagcccacccgaaggagcagggctcaaataccgccgctgagaacactggatctaatgaacggaacatctatattgtggtgggtgtggtgtgcaccttgctggtggccctactgatggcggccctctacctcgtccgaatcagacagaagaaagcccagggctccacttcttctacaaggttgcatgagcccgagaagaatgccagagaaataacacaggacacaaatgatatcacatatgcagacctgaacctgcccaaggggaagaagcctgctccccaggctgcggagcccaacaaccacacggagtatgccagcattcagaccagcccgcagcccgcgtcggaggacaccctcacctatgctgacctggacatggtccacctcaaccggacccccaagcagccggcccccaagcctgagccgtccttctcagagtacgccagcgtccaggtcccgaggaagtgaatgggaccgtggtttgctctagcacccatctctacgcgctttcttgtcccacagggagccgccgtgatgagcacagccaacccagttcccggagggctggggcggtgcaggctctgggacccaggggccagggtggctcttctctccccacccctccttggctctccagcacttcctgggcagccacggccccctccccccacattgccacatacctggaggctgacgttgccaaaccagccagggaaccaacctgggaagtggccagaactgcctggggtccaagaactcttgtgcctccgtccatcaccatgtgggttttgaagaccctcgactgcctccccgatgctccgaagcctgatcttccagggtggggaggagaaaatcccacctcccctgacctccaccacctccaccaccaccaccaccaccaccaccaccactaccaccaccacccaactggggctagagtggggaagatttcccctttagatcaaactgccccttccatggaaaagctggaaaaaaactctggaacccatatccaggcttggtgaggttgctgccaacagtcctggcctcccccatccctaggctaaagagccatgagtcctggaggaggagaggacccctcccaaaggactggagacaaaaccctctgcttccttgggtccctccaagactccctggggcccaactgtgttgctccacccggacccatctctcccttctagacctgagcttgcccctccagctagcactaagcaacatctcgctgtggacgcctgtaaattactgagaaatgtgaaacgtgcaatcttgaaactgaggtgttagaaaacttgatctgtggtgttttgttttgttttttttcttaaaacaacagcaacgtgatcttggctgtctgtcatgtgttgaagtccatggttgggtcttgtgaagtctgaggtttaacagtttgttgtcctggagggattttcttacagcgaagacttgagttcctccaagtcccagaaccccaagaatgggcaagaaggatcaggtcagccactccctggagacacagccttctggctgggactgacttggccatgttctcagctgagccacgcggctggtagtgcagccttctgtgaccccgctgtggtaagtccagcctgcccagggctgctgagggctgcctcttgacagtgcagtcttatcgagacccaacgcctcagtctgctcatccgtaaagtggggatagtgaagatgacacccctccccaccacctctcataagcactttaggaacacacagagggtagggatagtggccctggccgtctatcctacccctttagtgaccgcccccatcccggctttctgagctgatccttgaagaagaaatcttccatttctgctctcaaaccctactgggatcaaactggaataaattgaagacagccagggggatggtgcagctgtgaagctcgggctgattccccctctgtcccagaaggttggccagagggtgtgacccagttaccctttaacccccacccttccagtcgggtgtgagggcctgaccgggcccagggcaagcagatgtcgcaagccctatttattcagtcttcactataactcttagagttgagacgctaatgttcatgactcctggccttgggatgcccaagggatttctggctcaggctgtaaaagtagctgagccatcctgcccattcctggaggtcctacaggtgaaactgcaggagctcagcatagacccagctctctgggggatggtcacctggtgatttcaatgatggcatccaggaattagctgagccaacagaccatgtggacagctttggccagagctcccgtgtggcatctgggagccacagtgacccagccacctggctcaggctagttccaaattccaaaagattggcttgtaaaccttcgtctccctctcttttacccagagacagcacatacgtgtgcacacgcatgcacacacacattcagtattttaaaagaatgttttcttggtgccattttcattttattttattttttaattcttggagggggaaataagggaataaggccaaggaagatgtatagctttagctttagcctggcaacctggagaatccacataccttgtgtattgaaccccaggaaaaggaagaggtcgaaccaaccctgcggaaggagcatggtttcaggagtttattttaagactgctgggaaggaaacaggccccattttgtatatagttgcaacttaaactttttggcttgcaaaatatttttgtaataaagatttctgggtaataaaaaaaaaaaaaaaaaaaaaaaaaaaaaaaaaaaaaaaaatagaaagtatcccctccaagggggccccaaagcctttacgccgttaacccagcctt

SEQ ID NO: 6369 - DNA, 1446 bp, Homo sapiens
gggcaaaatctgtacgggcaaagaaacctataaagtacctggaagagtcagatgaagatgatctgttttaaaatgtgaggcgattattttaagtaattatcttaccaagcccaagactggttttaaagttacctgaagctcttaacttcctcccctctgaatttagtttggggaaggtgtttttagtacaagacatcaaagtgaagtaaagcccaagtgttctttagctttttataatactgtctaaatagtgaccatctcatgggcattgttttcttctctgctttgtctgtgtttgagtctgctttcttttgtctttaaaacctgatttttaagttcttctgaactgtagaaatagctatctgatcacttcagcgtaaagcagtgtgtttattaaccatccactaagctaaaactagagcagtttgatttaaaagtgtcactcttcctccttttctactttcagtagatatgagatagagcataattatctgttttatcttagttttatacataatttaccatcagatagaactttatggttctagtacagatactctactacactcagcctcttatgtgccaagtttttctttaagcaatgagaaattgctcatgttcttcatcttctcaaatcatcagaggccgaagaaaaacactttggctgtgtctataacttgacacagtcaatagaatgaagaaaattagagtagttatgtgattatttcagctcttgacctgtcccctctggctgcctctgagtctgaatctcccaaagagagaaaccaatttctaagaggactggattgcagaagactcggggacaacatttgatccaagatcttaaatgttatattgataaccatgctcagcaatgagctattagattcattttgggaaatctccataatttcaatttgtaaactttgttaagacctgtctacattgttatatgtgtgtgacttgagtaatgttatcaacgtttttgtaaatatttactatgtttttctattagctaaattccaacaattttgtactttaataaaatgttctaaacattgcaaaaaaaaaaaaaaaaaaaaaaaaaaaaaaaaaaaaagaaaaaaaaaacaaaaaaaaaaaaaaagaaaaacaaaaaaaaaagaaaaacaaaaaacacaacataaaacagcaagacaataaaacgcaaagaaaaaaaagaaaacgcacaacaaaaacgcaacacaacaggagggggggggaggagtcgagataaacgggacggggaacaagcaaagtccaacaggctagcggacaaagggaggaggagaccaccagccgggaggcgaccacaagcactgaggcagcaagcagagcacgacgaaaacagaagagaacaagcagaggcacacaaacacaccgcacacgcaaacaggacaaggaaacacaaacacaccgacgccaaac

SEQ ID NO: 6370 - DNA, 4887 bp, Homo sapiens
  misc_feature (229)..(307): n is a, c, g, or t
  misc_feature (3483)..(3497): n is a, c, g, or t
atgttccgcttccctatggggctcctgcttggctctgtgctcctggtggcttcggccccagccactctggagcctcccggctgcagcaacaaggagcaacaggtcactgtcagccacacctacaagatcgatgtgcccaagtctgccttggttcaggttgacgctgaccctcagcccctcagtgacgatggggcttcgctcttggccctgggggaggccagggaggaannnnnnnnnnnnnnnnnnnnnnnnnnnnnnnnnnnnnnnnnnnnnnnnnnnnnnnnnnnnnnnnnnnnnnnnnnnnnnntcctggcccgggtgaagaagctggaggaagagatggtggagatgaaggaacagtgtagtgcccagcgctgctgccagggagtcactgatctaagccgccactgcagcggccacgggaccttctccctggagacctgcagctgccactgcgaagagggcagggagggccccgcctgcgagcggctggcctgccccggggcgtgcagcggccacgggcgttgcgtggacgggcgctgcctgtgccatgagccctacgtgggtgccgactgcggctacccggcctgccctgagaactgcagcggacacggcgagtgcgtgcgcggcgtgtgccagtgccacgaagacttcatgtcggaggactgcagcgagaagcgctgtcccggcgactgcagcggccacggcttctgtgacacgggcgagtgctactgcgaggagggcttcacaggcctggactgtgcccaggtggtcaccccacagggcctgcagctgctcaagaacacggaggattctctgctggtgagctgggagccctccagccaggtggatcactacctcctcagctactaccccctggggaaggagctctctgggaagcagatccaagtgcccaaggagcagcacagctatgagattcttggtttgctgcctggaaccaagtacatagtcaccctgcgtaacgtcaagaatgaagtttctagcagcccacagcatctacttgccaccacagaccttgctgtgcttggcactgcctgggtgacagatgagactgagaactcccttgacgtggagtgggaaaacccctcaactgaggtggactactacaagctgcgatatggccccatgacaggacaggaggtagctgaggtcactgtgcccaagagcagtgaccccaagagccgatatgacatcactggtctgcacccggggactgagtataagatcacggtggtgcccatgagaggagagctggagggcaagccgatcctcctgaatggcaggacagaaattgacagtccaaccaatgttgtcactgatcgagtgactgaagacacagcaactgtctcctgggacccagtgcaggctgtcatagacaagtatgtagtgcgctacacttctgctgatggggacaccaaggaaatggcagtgcacaaggatgagagcagcactgtcctgacgggcctgaagccaggagaggcatacaaggtctacgtgtgggctgaaaggggcaaccaggggagcaagaaagctgacaccaatgccctcacagaaattgacagcccagcaaacctggtgactgaccgggtgactgagaataccgccaccatctcctgggacccggtacaggccaccattgacaagtacgtggtgcgctacacctctgctgacgaccaagagaccagagaggttctggtggggaaggagcagagcagcactgtcctgacaggcctgaggccaggtgtggagtacacagtgcatgtctgggcccagaagggggaccgagagagcaagaaggctgacaccaacgccccgacagatattgacagccccaaaaacctggtgactgaccgggtgacagagaatatggccacggtctcctgggacccggtgcaggccgccattgacaagtacgtggtgcgctacacctctgctggtggagagaccagggaggttccggtggggaaggagcagagcagcacagtcctgacaggcctgagaccgggtatggagtacatggtgcacgtgtgggcccagaagggggaccaggagagcaagaaggccgacaccaaggcccagacagacattgacagcccccaaaacctggtgaccgaccgggtgacagagaatatggccactgtctcctgggacccggtgcgggccaccattgacaggtatgtggtgcgctacacctctgccaaggacggagagaccagggaggttccggtggggaaggagcagagtagcactgtcctgacgggcctgaggccgggtgtggagtacacggtgcacgtgtgggcccagaagggggcccaggagagcaagaaggctgacaccaaggcccagacagacattgacagcccccaaaacctggtcactgactgggtgacagagaatacagccactgtctcctgggacccggtgcaggccaccattgacaggtatgtggtgcactacacgtctgccaacggagagaccagggaggttccagtggggaaggagcagagcagcactgtcctgacgggcctgaggccgggcatggagtacacggtgcacgtgtgggcccagaaggggaaccaggagagcaagaaggctgacaccaaggcccagacagaaattgacggccccaaaaacctagtgactgactgggtgacggagaatatggccactgtctcctgggacccggttcaggccaccattgacaagtacatggtgcgctacacctctgctgacggagagaccagggaggttccggtggggaaggagcacagcagcactgtcctgacgggcctgagaccaggcatggagtacatggtgcacgtgtgggcccagaagggggcccaggagagcaagaaggctgacaccaaggcccagacagaactcgaccctcccagaaaccttcgtccatctgctgtaacgcagtctggtggcatattgacctggacgcccccctctgctcagatccacggctacattctgacttaccagttcccagatggcacagttaaggagatgcagctgggacgggaagaccagaggtttgcgttgcaaggccttgagcaaggcgccacctaccctgtctcccttgttgcctttaagggtggtcgccggagcagaaatgtatccaccaccctctccacagttggtgcccgtttcccacacccttcggactgcagtcaggttcagcagaacagcaatgccgccagtggtctgtacaccatctacctgcatggcgatgccagccggcccctgcaggtgtactgtgacatggaaacggacggaggtggctggattgtcttccagaggcggaacactgggcagctggatttcttcaagcgatggaggagctatgtggaaggctttggggaccccatgaaggagttctggcttggacttgacaagctacacaacctcaccaccggcactccagcgcggtatgaggtgagagtggatttacagacnnnnnnnnnnnnnnnctatgctatatatgatttcttccaagtggcctccagcaaggagcggtataagctgacagttgggaaatacagaggcacggcaggggatgctcttacttaccacaatggatggaagtttacaacttttgacagagacaatgatatcgcactcagcaactgtgccctgacacatcatggtggctggtggtataagaactgccacttggccaaccctaatggcagatatggggagaccaagcacagtgagggggtgaactgggagccttggaaaggacatgaattctccattccttacgtggagttgaaaatccgccctcatggctacagcagggagcctgtcctgggcagaaagaagcggacgctgagaggaaggctgcgaacgttctgatggcccgtgtgagcagtcctcgcaggagacaccaccagctgtggcagcttggggcggggtgggtagtggtcactgcggtctgggagtgctcagatagcccgcagaacaaatcatgtcaccaagcttcaagccatggaggttccttccctctcacctgcatttttgcccgtctttatgagggtcttgaaaatcaaaatagtagttgcacagtatgtgtaggaaagacagtactggaacggcaaggtttctcagcttatcttcagcaacatatatactggattagggcaagagaaggaatcacccagcacttcaccagttggaaatctctggaaatttacatctatgtatttaaagttctgctaatgcaaatcttttctctggaaagaagcacagaggaggagttctgatgacccaggggttagggctgagacaaccggacgtttgtcacctcctttcccattgggtttttaggaaaacagtgtgaacctcccccttttaatttctggtgttatgaggaagaataaaggggataaaaggggctaagatggactcatgtttagctaagttctgacttgtatccagcatgctggagaccaaagctgccgccttactgctatttttaagtgccctcttttcagtcatttgcataattgcgtccatagagctgcatatgttgtgaataaattctcactcatttcaactttgaataatttgactgtcttgataattggttcctcccaaagactcttctgcaactcccattcatgcccaccaggcctcagactccctcttttccccgccctgcactattggagccctgggttttgtgggagtgctcagcaccgtgagtcttactgtttgatcggacagttagcaagatcagatcctttttgcttattttctatcactttggagggttttctgtagcaaaatcagtgaccaatgaagtaacttaaattcctattgaagaaaaaaaataataaaccacttgatttaaaaaaa

SEQ ID NO: 6371 - DNA, 463 bp, Homo sapiens
ttttccactcagattccctttatttctgactgatttctttacaaccatccgtgcaggggtaactgtctcatgtgtctctcctacctgattctcattctagcaattcagattcccatttctgattctctgggacacaggtctctaaagctcctattgactccaactcaacttttcccccagtccctcccttcctgcatcccctttcctttccggttcacattgagcaggcatatgaaacgatgggtctgtgctccctttgacatacactcatggcctaggattcagttgccaaatgaccagaagaaagctttaaataaatccaccctgacagcaggcattcaacagacagtgactgggctccaggtcataggaggccctgatgccacagcgagggcaggggacagtgctgaacacaattatcttgggctgccttaagtccctcagtgtcttcatcagctcagcc

SEQ ID NO: 6372 - DNA, 1428 bp, Homo sapiens
ggaacaactggtttcctcttggagtctgggaggaggaattcggctcgagagggagcgaaccaggactggggtgacggcagggcagggggcgcctggccggggagaagcgcgggggctggagcaccaccaactggagggtccggagtagcgagcgccccgaaggaggccatcggggagccgggaggggggactgcgagaggaccccggcgtccgggctcccggtgccagcgctatgaggccactcctcgtcctgctgctcctgggcctggcggccggctcgcccccactggacgacaacaagatccccagcctctgcccggggcaccccggccttccaggcacgccgggccaccatggcagccagggcttgccgggccgcgatggccgcgacggccgcgacggcgcgcccggggctccgggagagaaaggcgagggcgggaggccgggactgccgggacctcgaggggaccccgggccgcgaggagaggcgggacccgcggggcccaccgggcctgccggggagtgctcggtgcctccgcgatccgccttcagcgccaagcgctccgagagccgggtgcctccgccgtctgacgcacccttgcccttcgaccgcgtgctggtgaacgagcagggacattacgacgccgtcaccggcaagttcacctgccaggtgcctggggtctactacttcgccgtccatgccaccgtctaccgggccagcctgcagtttgatctggtgaagaatggcgaatccattgcctctttcttccagtttttcggggggtggcccaagccagcctcgctctcggggggggccatggtgaggctggagcctgaggaccaagtgtgggtgcaggtgggtgtgggtgactacattggcatctatgccagcatcaagacagacagcaccttctccggatttctggtgtactccgactggcacagctccccagtctttgcttagtgcccactgcaaagtgagctcatgctctcactcctagaaggagggtgtgaggctgacaaccaggtcatccaggagggctggcccccctggaatattgtgaatgactagggaggtggggtagagcactctccgtcctgctgctggcaaggaatgggaacagtggctgtctgcgatcaggtctggcagcatggggcagtggctggatttctgcccaagaccagaggagtgtgctgtgctggcaagtgtaagtcccccagttgctctggtccaggagcccacggtggggtgctctcttcctggtcctctgcttctctggatcctccccaccccctcctgctcctggggccggcccttttctcagagatcactcaataaacctaagaaccctcaaaaaaaaaaaaaaaaaaaaaaaaaagaaaaaaaaaagaaaaaagaaaaaaaaggggggggggcaaaaaaaaacc

SEQ ID NO: 6373 - DNA, 1194 bp, Homo sapiens
  misc_feature (66)..(66): n is a, c, g, or t
  misc_feature (413)..(413): n is a, c, g, or t
gttggggcgggggggaagaaacttttttgcccctttggggtggaaaaacatccaagattaatatgncctcagtgtagggcgggaggccagacagagggtacccttttccggacacgtatgtggtctccccggcagttgcccttatgaagagttttggggcacacccacagagggttcagtttggttagccatacttctgcccccctggcttgaagataagggggcaacctagtttaaaaacgagagaaaagttgtaaaacccccagttctcctgtgttactttaatccccagctcaattaaatgtttttaaggatttaggattccctttagtataacaacgttctctgacaactgttagattcaaaccagttaagataagatttcttcatgtggtttctagggtacaattaanaaaagtagaagcatccaagtggctcctcaacaattacaattcttaatgatttttctcacagctgtgcccttctgtcagggtcagtgtcaaaattcgttatcaaaggcaaaacctactgtgccaagctggggcgctatatgtgaacggagtggaaatgcttcagtcacctctgccgcagcttgtgattccagcagttctcacaaaccttctgtcacatgatgaaaagaagcagcttgtataattccaactggtgtttcatttctgttctaatgctaagtggtaacgcttaacaaacagactaaaagctgtgtgcagaagaaagggctgaatgagtaccgcctccctaggttccagcacagcgctcgggtctaagaagtagagccccggggtagggtgggccatccactgtcaggccagtgtctcaagaaagcctgaccagctgagctgctgctttttttttgggggggggggggggaggggcgtcttgaggctttttttttttttacaaagttagtttgtgatcaacgattcactacaattgaagtgttactttgtcagaatatttattcctttgtgtgacatgctagattccctggatgtagctgatcatttttattttgtaaatattacctaactttacataaactatatcataataaactatttttgcatcaccaaaaaaaaaaaaaaaaaaaaaaaaaaaaaaaaaaaaaaaaaaaaaaaaaaaaaaaaaaaaaaaaaaaaaaaaaaaaaaaaaaaaaaaaaaaaaaaaaaaaaaaaa

SEQ ID NO: 6374 - DNA, 3289 bp, Homo sapiens
  misc_feature (235)..(252): n is a, c, g, or t
acggctgcgagaagacgacagaagggcacccatccctgagaatgggctcctcctggaagaaatcgagctcaacatcagcgagattccacccccgccacctgtagaggtggacatgagaagcattggcatcagggtaactgaggaaagcctgggccttgccagggtggatccaggcagcatctccagcctgaaacagcaggtctcggccctggagggagagttgtctggaagaacnnnnnnnnnnnnnnnnnncagaactgctctccagcagcaggaagaggaaatcaaagctagggagcaaagaattcgagagctggagttcactgtagcccaactggaaggacagtttcaccaagagaacgccaaagacactcagggccagacggacgtgatggtgaacactgaccctgtccatggactcttgaccagggagtcgtgtgataagggcattgaagtcaaccttctaggcagcatggagtctgaaagctgggggcaccgaggagaggagaatggcctcctatgggggccagatggtcataaacaagggaatcagagcccagcagaacgtgtgcttctgccccagctgtcactgccacagggacccgagcaggtccttacctcctctgtacatagcttcctctccactgaactcaggattgaagaagcaggcactgaacaggaaggaggccctcagggaggaaccaggggagcaggaggctttctgtggggcagtgacagaaagactcccccagcagggagggaggagaccagttccaatctcccagggaaggagcacccgggaaggccaccaagctcgccaacggatgccactattgggcagtatgtgaagaagatccaggagctcctgcaggagcagtggaactgcctggagcatgggtacccggagctggccagcgccatcaagcagccagcctccaagctcagcagcatccagagccagctgctgagctccctcaacctgctgctgtcggcctactcggcccaggctcacccacccaaggagccgccggcctcctcctcctccccgccagtggagatctccccatcgaccagccttaaatccataatgaaaaagaaagactatggcttccgtgcaggaggtaatgggaccaaaaagaaccttcagtttgttggggttaacggtgggtatgagaccacctcaagtgaggagaccagcggtgaggacagcaccccagaggacttgtctgacagcgaggcagagaagaagtgtgacggcccagatcacaagcatgtcaaagatgcccatctcacctgcgaggctgggcagggcatccctgagggcacctgccatgctgcccaggaaagtgggcctggggaagaagtcccccactccaaggccgagagatataaaccctcagaagaatttcttaatgcatgccgggcactgagccagcatctgccagaaactgggaccaccacagaccagctcttgaggcaaagcttgaacaccatcagtcaagagtggttccgcgtctccagccggaagtcgtctagccctgccgtggtggcctcctacctccacgaggtccagcctcactccccacacttcctgaagctgcttgtcaacttggccgatcgcaacgggaacacggcccttcactacagcgtgtcccactccaacttctccatcgcgaagctgctgctggagacaggcgtctgcaatgtggaccatcagaacaaagctggctacactgccgtaatgatcactcccttggcttccgcagagaccaatgaagacatggctgttgtctggaagctcttaagagaaggaaatgtgaacattcaagctactcagggaggccagactgcgctgatgctgggagtcagccacgacagggaggacatggttcaagcgctgcttagctgccaggcagatgtcaatctgcaggaccacgatggatcctcggccctcatgctggcctgtcaccatggcaacgtggacctggtgcggctgctcctggcacacccagcctgcgacagcagcctgactgacaaggctggccgcacagctttgtccatcgctctgaagtcacccacccatatggaaattgctgggcttctgagagcccacgcggagcagggcaggtccctggggctgtaggggctgcagaagaactggccgtggggaacaaaagccttcttctctggactcctccctcgcccttgaagagggcagaggtcacaggccagagagccacccttctagagaagaaactatgtcaaatatgcacatacattcctgttgtataattctgctcattaggatgctttgtagtttttgccttaggccaagcctgaaaactacacgggcttcagagcagggttcaaggtgcaaggtgaggggtacgtcggtgtcatccaaacatccaaaacatcttcagccttgaattcctcatgactctaccctctgtaacattgtgtagcaagcaggcaggcaggagcacattagcacattagaaaagcaatactttttacatggaattttacagtgcactatctttctgttttttaagcaagtgtatacaaatatgtcccattgatatgcatgtctatagatgggaggggatttaagccaaccccctggcaagcatcctgtaggggaccctagaagaatcaccgtgcagactggtgaaactgagcaagcaccatttgggagctttgtttcgatggggttgacagagaaatcttaaaatctgacagggtagaagaagcactttggcatcaatgccatatgtacagtcttgactatttctgagtcatctagtggctccaatttgctccagggaaattggaattaattaagaaatttattatctagtaagttgctatgtaataaagaaaaaaaagaaattcaatccaatgacacacaccacatgtatttgggcagagtcagattctctcagctattttgagtctgtggaagaaacaaaaaaaagcttcctcctgaggatgggttattgtcatcaagaagccacctgcatagccgtatccattacctcatggtaattcccggtgctttcccctcatatcccctagaagcaaatatctgttctgaggttttttgggacttctggctgcaataggagcaagggacccaggcagggcagagcaataccttccgaagcttccatattccctggggccagcacatgcaaggtttatatggtcagtagctcacgtgaagtcatctgaatctttcttaaatctgctctcttaaaatctcttatgaaaaaaaaaaaaaaaaaaa

SEQ ID NO: 6375 - DNA, 5292 bp, Homo sapiens
  misc_feature (969)..(1009): n is a, c, g, or t
  misc_feature (1639)..(1729): n is a, c, g, or t
  misc_feature (2277)..(2309): n is a, c, g, or t
  misc_feature (3822)..(3846): n is a, c, g, or t
ccggttttccttggtctggggctccccacagttccccaccatcactcctcccattccttccaactttatttttagctgccattgggagggggcaggatgggagggaaagtgaagaaaacagaaaaggagagggacagaggccagaggacttctcatacaggtcagaaaccgatcaggcatggaactccccttcgtcactcacctgttcttgcccctggtgttcctgacaggtctctgctccccctttaacctggatgaacatcacccacgcctattcccagggccaccagaagctgaatttggatacagtgtcttacaacatgttgggggtggacagcgatggatgctggtgggcgccccctgggatgggccttcaggcgaccggaggggggacgtttatcgctgccctgtagggggggcccacaatgccccatgtgccaagggccacttaggtgactaccaactgggaaattcatctcatcctgctgtgaatatgcacctggggatgtctctgttagagacagatggtgatgggggattcatggcctgtgcccctctctggtctcgtgcttgtggcagctctgtcttcagttctgggatatgtgcccgtgtggatgcttcattccagcctcagggaagcctggcacccactgcccaacgctgcccaacatacatggatgttgtcattgtcttggatggctccaacagcatctacccctggtctgaagttcagaccttcctacgaagactggtagggaaactgtttattgacccagaacagatacaggtgggactggtacagtatggggagagccctgtacatgagtggtccctgggagatttccgaacgaaggaagaagtggtgagagcagcaaagaacctcagtcggcgggagggacgagaaacaaagactgcccaagcaataatggtggcctgcacagaagggttcagtcagtcccatgggggccnnnnnnnnnnnnnnnnnnnnnnnnnnnnnnnnnnnnnnnnngagtcccatgatggagaggagcttcctgcagcactaaaggcctgtgaggctggaagagtgacacgctatgggattgcagtccttggtcactacctccggcggcagcgagatcccagctctttcctgagagaaattagaactattgccagtgatccagatgagcgattcttcttcaatgtcacagatgaggctgctctgactgacattgtggatgcactaggagatcggatttttggccttgaagggtcccatgcagaaaacgaaagctcctttgggctggaaatgtctcagattggtttctccactcatcggctaaaggatgggattctttttgggatggtgggggcctatgactggggaggctctgtgctatggcttgaaggaggccaccgccttttccccccacgaatggcactggaagacgagttcccccctgcactgcagaaccatgcagcctacctgggttactctgtttcttccatgcttttgcggggtggacgccgcctgtttctctctggggctcctcgatttagacatcgaggaaaagtcatcgccttccagcttaagaaagatggggctgtgagggttgcccagagcctccagggggagcagattggttcatactttggnnnnnnnnnnnnnnnnnnnnnnnnnnnnnnnnnnnnnnnnnnnnnnnnnnnnnnnnnnnnnnnnnnnnnnnnnnnnnnnnnnnnnnnnnnngaaacaggacgtgtttatgtgtatctggtaggccagcagtccttgctgaccctccaaggaacacttcagccagaacccccccaggatgctcggtttggctttgccatgggagctcttcctgatctgaaccaagatggttttgctgatgtggctgtgggggcgcctctggaagatgggcaccagggagcactgtacctgtaccatggaacccagagtggagtcaggccccatcctgcccagaggattgctgctgcctccatgccacatgccctcagctactttggccgaagtgtggatggtcggctagatctggatggagatgatctggtcgatgtggctgtgggtgcccagggggcagccatcctgctcagctcccggcccattgtccatctgaccccatcactggaggtgaccccacaggccatcagtgtggttcagagggactgtaggcggcgaggccaagaagcagtctgtctgactgcagccctttgcttccaagtgacctcccgtactcctggtcgctgggatcaccaattctacatgaggtnnnnnnnnnnnnnnnnnnnnnnnnnnnnnnnnncacgtgcagcatttgatggctctggccagaggttgtcccctcggaggctccggctcagtgtggggaatgtcacttgtgagcagctacacttccatgtgctggatacatcagattacctccggccagtggccttgactgtgacctttgccttggacaatactacaaagccagggcctgtgctgaatgagggctcacccacctctatacaaaagctggtccccttctcaaaggattgtggccctgacaatgaatgtgtcacagacctggtgcttcaagtgaatatggacatcagaggctccaggaaggccccatttgtggttcgaggtggccggcggaaagtgctggtatctacaactctggagaacagaaaggaaaatgcttacaatacgagcctgagtatcatcttctctagaaacctccacctggccagtctcactcctcagagagagagcccaataaaggtggaatgtgccgccccttctgctcatgcccggctctgcagtgtggggcatcctgtcttccagactggagccaaggtgacctttctgctagagtttgagtttagctgctcctctctcctgagccaggtcttcgtgaagctgactgccagcagtgacagcctggagagaaatgggacccttcaagaaaacacagcccagacctcagcctacatccaatatgagccccacctcctgttctctagtgagtctaccctgcaccgctatgaggttcacccatatgggaccctcccagtgggtcctggcccagaattcaaaaccactctcagggttcagaacctaggctgctatgtggtcagtggcctcatcatctcagccctccttccagctgtggcccatgggggcaattacttcctatcactgtctcaagtcatcactaacaatgcaagctgcatagtgcagaacctgactgaacccccaggcccacctgtgcatccagaggagcttcaacacacaaacagactgaatgggagcaatactcagtgtcaggtggtgaggtgccaccttgggcagctggcaaaggggactgaggtctctgttggactattgaggctggttcacaatgaatttttccgaagagccaagttcaagtccctgacggtggtcagcacctttgagctgggaaccgaagagggcagtgtcctacagctgactgaagcctcccgttggagtgagagcctcttggaggtggttcagacccggcctatcctcatctccctgtggatcctcataggcagtgtcctgggagggttgctcctgcttgctctccttgtcttctgcctgtggaagcttggcttctttgcccataagaaaatccctgaggaagaaaaaagagaagagaagttggagcaatgaatgtagaataagggtctagaaagtcctccctggcagctttcttcaagagacttgcataaaagcagaggtttgggggctcagatgggacaagaagccgcctctggactatctccccagaacgaaagccctgaattgatttnnnnnnnnnnnnnnnnnnnnnnnnngagatgaggctttacctcagacaagaagagctggcaccaaaactagccatgctcccaccctctgcttccctcctcctcgtgatcctggttccatagccaacactggggcttttgtttggggtccttttatccccaggaatcaataatttttttgcctaggtgcctgactcctttcagattccctctttatcttccctcacagtttggaaaggatgagggttatcttcctcgattcttccaccctctcactttcctgcctgttccccactccacaggagggagctgacgttggcttgaaaggagtaaagtcaacatctgctgctttcctgtggactctggtgattcatagagccggatggggagagtcaacaggaaaaaaggagggaggaggaaaagccacaagagacattctgtacaattccaaggaacagagaagcctttagacaggcaactgccatcccccctgaaacctgagacctgtagtgcactcgaccgccctcaggtgttggtgaaacagagctgcccccaggctcgctgggcataggcttcctgattccaagccttttctgggagcaaagccagggcctggtgcctgattttctgaagccaggagccctcaggtggctggagctggaatagcagggaggactgggtgtacctaggcagtattttctctacttctctcaagtcttatactcactcttgagccctccttggggcctgcttagaaagcagacaggagagagagtactgctacttgatgatgggaaatgctttcactttaccagctttgggaagcagcagccccatgggatctaaaagtgtggagtctgcattaagaaacctacatgggtggcatggggctctggggagcaagcccttacttgctcagcactggttatgtagcacaaatagctcctaggaaaatgtttctggggcaaccctagaaccctggtcatattttgcagggtttctctggtggaatcagtttgccagcccttgcttgatgcttactggaaatctccaggttaatttctatctctgatccctccccaacccactccatatttgggtcatggacagtaaaggcagttggattctcatagacaactgggtaacttatatttctttgtaatcaagacttgagatatcgaagtcagttattggtctccagagtgcagctctgggagccttttgaagaatcagcactcattaagagctgagaagagagaagacctgattgggtggttgactagcagtcacagaacctgtcctcccaggctgttcctgaggcctgaccacagtatttattttggcatgtctctggccttctgcagaggcccaccctcatgggcattgtctctgtttcccagtggggtggacagtatatcagatggtcagaacaaataaagttcagtgtcaaatgaaaaaaaaaaaaaaaaaaaa

SEQ ID NO: 6376 - DNA, 6078 bp, Homo sapiens
  misc_feature (4011)..(4025): n is a, c, g, or t
agcggagctaccttataaagaccatctgtacgtcgagagcggaaatggagtttcaaaatcacaagcttctttcccacatgaacataagactaggagcacatatggaagagtaaagttgaagggaatttggatgatgatttggcaagatgctgtgggatagtaacatctttttgagggaagaattggcttcctttcttgaaagtggtgaaggtacagcatatagctgcatggaagaaacagtaatcggatggctaccttctacattttgtattaggaaacaaagtccattgtaagagtccatgttgatcttggaaatagaaggattgaaaaaagctaaatttccacaaagaacaagaacttgaccatctcctttttgatctgaagactaggggacaatggatatcatagagacagcaaaacttgaagaacatttggaaaatcaacccagtgatcctacgaacacttatgcaagacccgctgaacctgttgaagaagaaaacaaaaatggcaatggtaaacccaagagcttatccagtgggctgcgaaaaggcaccaaaaagtacccggactatatccaaattgctatgcccactgaatcaaggaacaaatttccactagagtggtggaaaacgggcattgccttcatatatgcagttttcaacctcgtcttgacaaccgtcatgatcacagttgtacatgagagggtccctcccaaggagcttagccctccactcccagacaagttttttgattacattgatagggtgaaatgggcattttctgtatcagaaataaatgggattatattagttggattatggatcacccagtggctgtttctgagatacaagtcaatagtgggacgcagattctgttttattattggaactttatacctgtatcgctgcattacaatgtatgttactactctacctgtgcctggaatgcatttccagtgtgctccaaagctcaatggagactctcaggcaaaagttcaacggattctacgattgatttctggtggtggattgtccataactggatcacatatcttatgtggagacttcctcttcagcggtcacacggttacgctgacactgacttatttgttcatcaaagaatattcgcctcgtcacttctggtggtatcatttaatctgctggctgctgagtgctgccgggatcatctgcattcttgtagcacacgaacactacactatcgatgtgatcattgcttattatatcacaacacgactgttttggtggtaccattcaatggccaatgaaaagaacttgaaggtctcttcacagactaatttcttatctcgagcatggtggttccccatcttttatttttttgagaaaaatgtacaaggctcaattccttgctgcttctcctggccgctgtcttggcctcctggctgcttcaaatcatcatgcaaaaagtattcacgggttcagaagattggtgaagacaatgagaaatcgacctgaggagcaaaacaaaggcatcagctcttacaccaaaagagttaacgctgtaaccaaaggtatagttttgttttttattttaggagaactgactggtaaatgaagaaatggaccaaattttgtgtaaacgattagaaagatgaacaaagtattgccctttgactggttttcttcttcatcctgagaaagatacattctcttgcagctcttcattcattggtgacaagcccccaccccgggactttactaatgagcttgttaaagaggtgccaaagaacatattcctcctttctttattctttctccaccaaaaccctctacttcagaattttttcaggatatttttcagcccaaggtcagaagaatgtgttaatattttaaataaaatatctggacatctacaaaaaaaaaaaaaaaagaactgcctaatgttgagagtggtttttagcattaggtttagcaagggggagatccgtgggttgtgcgtcagctttgggtgaattttgtttctaccctgtcacggggaaagttcgggttgagtccaggagtgcacactgctgctgccacccaatgcgctacatatcacttttttttgttttgttttgttttgtttttaaaagatcattttatcttaaaaaggaaagctgatccaagtaaacacgaaagtatttgacacaccccacagattttacatgtgtgtaaatgtttcactttaaaatctctatgacagatacacaggaaacatgagatggtttctgctaatgagtggcccttgagtacacacttagatgctgtctgccctgtaaatttggatctggtgccccagggcagtcaactcttctagcacaggctgaaaacacgtgtgtgtcaactgaggttcacaccacttggggaatgagcctgttttctttccaggtcaggccctggtgtgagatcaattttagggctcctaattggagcacagaaatgtatttggtcaaatttcattgaaggtgatttcttcctttttctgttgtactttatggaaaaaccaagatggaacctgaaagttaatgtatccttgcttttagcaagagactcagtttcttataactagtcctaaggacatatgccgcaattgagtaattttacttttaccctatgaaaataacatggtgctgcactataatatactctcggaatcagtgtgttagttacagctatacagtgaagggggataactgtttctaaatttctttaaggtgatgccaaaaaatggattaaaaaatctgatcagatttaatgttaccagatttagtgcattatttaatgctattggatcttttggataattcttggcttaatttcttagctacttgaaggttaatttgcaagacttctaaaaccttagaaaagttttaaggttgcaaagttatcaacactggggcagagggtggagaggccaatgcgggtagaaggaggcagttatgtttatattgaaggtgaaatttttctttcatttagaatggaaaacatccccaaatgtatcattataaactagtcagccttgactacacaaaattgacctttaagttgcttgagaaaaacacaatgcaaatcgttcagaagggtcaacatcctttggtgctaaaatcttgtgtatgttttcagaatggctttttctgtatgttatagaataatcactaaaggaaaggtagttgaatttaaagtcatgaagcaagactctttaattcagttattttaaacaagaattaaaaccccaaacatccttggcaggctttgaagcacacagaattttctagtatttcttattaaatacaccaataataaacatatacttagtttacctgatgagtttagacataattctatatgatgttcgcttatattcatttattaactagcaacacttgtgcaagaacaaggtattctgcttgaaaacactgatttttaagttcctgttgcccgattgtaaagaaaatcatctgacacagaagcctggattttgctctcctaacactggtgttttccttgagcctctaattcaaataaaacaaactgatacaccttacagccttattcatctgtgtctggataactcacttttcatctattgaataagaaaaagtgtttaaacttaataaaataaaaaattgtgcaccaattactacagatccttgaaacagtaagccttggattttagtcaagtaatccagtttttttttaatttaaaaaaaaccatcaccttttaaagaactttaaaaacacctgtgatgccaatgtggacattgccgctgccatgtctttacacgcatgtgtcgtatagctctgtcatcgagttgaggaagtccatggtttgcaaataagggtgggggaatcaaaatttcaagatggaaaaataaaacaaatagtaaaacccatttacatgtaggaaagaaaagttgagcttcaacccaatgtgccactttgatataaaacaagtatgatatatatataaactgaagatataaaacaagtatgnnnnnnnnnnnnnnntcataaatgtttggggtacctgttctttgccagttaagatacatatcttattatctttgtttttttcaagtctatgctcctgtttgaagcttttcctgtaatttaggttgtctgtgaaatacctataacatataattcctatagagtatgccacattttttttctaactcatttcaaatgaaattctctcagattctagtttttgagcttgtccactagatctgaaaataaagcatcctttcctgagtccacttgaactaattgtgaatttgttacttaatttactggcatcttgggaaacaagttttgccgtggcaggaaggctgttttgagagtgagcgttgagtctactctggtttgtggatgacattgcattagggttatttcctgtattaccagtgcccccttgtggcaatatactttatgacttggaatgcaaacaccacttttaaaagcctgttttcaagtttttgaaaggcatttgttttctgttgtttgccaataatctgaaagtatcatgtgaaaggaattattttaaaagcattttaaacctttcccaaaggtaaaatgtgctcagattataggcacttgtaattctaaccttgtatccatttgatcaaagaaaatttgtagaacatttttacctctcatgatcacaatcattagtgtctccctttataacgacctatgttttgtttactttgaaacaccaaatttgttgtcttggttttttttacatgacagaactcatgcagtttcttttttagttgaaagttcacatcttgccccttgaatagtttgaacatttctttcttaattcttttttgtttttgttttgcactgtaaaactgatgaaaactttaagccaatcttaatgcactagcctctgtagtgtaaggaagtgtgagaaggagtttcttaatgagtttacacgtttaaatcaagcatattataagttatatgccatgtgttgaaggcttttctatttatatatataaagatttttagtatttgtttttagtgtccttgtgttgcaataatttaactcctttgactcagttgctgaaaatatttcttctattaagaagtgctcttgacttcaacacccaaacactgaaaatcatgtcaatgttacccaaagataagtttttatacagatacacaccttataagttctgatttattttcttactcattatgctgtgttctaaataaatcatgaatgagaagagtgctttattgtgaaattatttaaaactgtcctttaaaagaaaaagaggaaacgatgaacaaaaactaatctaattgccaagttagaattcattatttaatttacctcctatgcaatgattaatgctgcaaaatgtatggttatgttaccgtatattcacaaaagaaatattattacaaggtttcagaggtagccaattgcattcttttggaaatttactgtactgtttcaatgtgttaagtgccttgttgtaaagtaaaattttaagtctagattcattattttcctgacatatatttttcattatgatatctactgtatgctattgtgatagttttatgaaatgcttacattttaatcaaatatgtaaatttcagaagctcttttttcctacccaccagtaccttaatcattggtttatcacattggattcaaattcaggttccttttttgataaagaggaaatttgttttccatgcttgtgattttgtgtttgtaaacatttcaggaggaatttaggagtgtaactatagtttatacttctataatgttgtcttacatttacatttttaagtgcctaattgttaaaactgatttatgtttctcttctaaagaggatatgtgtacttggtttctaatctctttggttttgctttttaaaaaatgcaagagcctatactttgtatttacctaataaaccacagtgacatcaacagtcttttcaaaattaaaaaaaaaaaaaaaaaaaaattggggggggcgggccggaaagtttttaaccatttgtggggggggccaaggatgaaaggacaattcaaagaa

SEQ ID NO: 6377 - DNA, 948 bp, Homo sapiens
  misc_feature (850)..(850): n is a, c, g, or t
tacaaccatgcccagcatggctccctggagggcggctttggcatctggaacaccgccgtgcaggctgccatccgcgtgggtgagtggaagctgctgacaggagaccccggctatggcgattggatcccaccgcagacactggccaccttcccgggtagctggtggaacctggaacgaatggccagtgtccgccaggccgtgtggctcttcaacatcagtgctgacccttatgaacgggaggacctggctggccagcggcctgatgtggtccgcaccctgctggctcgcctggccgaatataaccgcacagccatcccggtacgctacccagctgagaacccccgggctcatcctgactttaatgggggtgcttgggggccctgggccagtgatgaggaagaggaggaagaggaagggagggctcgaagcttctcccggggtcgtcgcaagaaaaaatgcaagatttgcaagcttcgatcctttttccgtaaactcaacaccaggctaatgtcccaacggatctgatggtggggagggagaaaactgtcctttagaggatcttccccactccggcttggccctgctgtttctcagggagaagcctgtcacatctccatctacagggagttggagggtgtagagtcccttggttgaacagggtagggagcctggataggagtgggtgggaataaaccagactgggatgcctgtgtctcagtcctgcctcctcacggacttgctctgtgacctcaggtgacccacatgagcttttagcctcagtttcctcatctgtaaaatgagctctaatgactttgtgactctttggtgtggccctggagcctggggcacnggtggagttcctggccggccttgccacttgacaactcctttaaggcttcccccttaacacgggatccctgtggtggtgtttggggagttgcctggagg

SEQ ID NO: 6378 - DNA, 7066 bp, Homo sapiens
  misc_feature (4043)..(4077): n is a, c, g, or t
  misc_feature (7011)..(7063): n is a, c, g, or t
aaacaagaagaatgggattgatatttccgcagaagtttggaagttatgtaacagagcaggttgagatcctaccttttaggagcagcctgccccttttgaaggggtaaagggagtgggtgcagtgccctctcttctgttgtagtggcttatccctctaaggcatgacccttggataggggttacctgcctcggaaagtccccacttccttgtgggagtttaaaatagattggcatatgtgagagatggagacaaggtgggaaatcggatcctgtcttaggatttctcatcaggagatgctgatacttggtgtttcagcttgataaattgagaaggtgccatgaaaccaggtcctggaacagaatccctggttgctctgtcttttagctgctctgaccctctgccctgcagagcatgcattttgcatgtgcctggcaggaggccctcctgcttgagccctgctgtatttgtctgtgttgacaacgtgactgccagccattaagcttggtcagtccacagacacactaggaaagcagaggcagctcttggtttctctggaacagagctgcaagaagtctctgggcatctgcatggccaggagcttatgcttaactgttgagtgacctgcagccataagggcattaattctgccttccagaggtgggaatgacttggctttaaacagtgatttgtgtgagaattcttcaaatcccataaggtagaaggcatggtggagtggaggagaaatcttggctcatatctgcctcttccattgaccagctgtgtgaccttgggcctgttacttttaacctacctgaccctccatttcctcatttatcagaagtgtctaactgtacacaagttaaactgtaaggattacatgaggtagtagtcaatcctggtgtttctctgtatcttctcacttctcactggtgttggaaatatgatcttgcgaccctagatggcagccactctggggcagaagagacagtgaccaccttttgaagagctcaaaggagaatattgccccacagggcttagtgggtcccccaggctgaggctggggaggagggccacctttgcctacagcaagtggcatatcattgttctaggggttctcttgacggcagaactttgcctctagctcattttccacagcctagattttccaatcttgccaatccagttgacttctgtcttctcatttccaagccattgttctctctctttcactatctacatggattatccttcattcaaactgctttgtcccggccgggtgcggtggctcatgcctgtagtcctagcactttgggaggccgaggcgggtggatcacgaggtcaggagatcgagaccatcctggctaacatggtgaaaccccgtctctactaaaattaaaaaaattagccgggcgtggtggcaggcgcctgtggtcccggctacttgggaggctgaggcgggagaatggcatgaacccgggaggtggagcttgcagtgggtggagatcgcgccactgcactccagcctgggcgacagagcgagactccgtctgaaaaaaaaaacaaaaaaactgctttgtcctgtaggaatcctgtgcgggttatgtgcacctccctcaatccttaccttgaagctgaggtttcccctcagctctcaagtactcagtttgcactgcaggtagtccctattttaacgaaagttatacggtccagctcagggaatcctgaaaagctgcccttgcttccatggtaatcaaaaggcagttctcatggaataaaagctacctgaagcctgagttgggacctttggctggggaaggtggttgaggacgttctctgattagatgcttggcatgaggtttgctactggaactgctagtgtagaatgtttcagccccctagagttgtccctgtgatgtggctacctcctttctctgggatttctcttaaagtctggggagcccctgcttctcatttcctggaatttatcttcccagtctccctttctggctgaaaatttctagtatcttacagaacagcggtgggatacactggagcacatcatattaccactaagtatgtctaataaatgatgtcctctgatttgacatttcctaaatgtgaagctcctgattttatacaattttgaaattagtaagcttgttagttttgtttgaaattctaggcattggatacacttaacatgagggctacatgtgcatcaacatactctggtttccttccctctgtatcttttttttttttgagatggagtctcactgtctcctaggctggagtgcagtggtgtgatcatggctcactgcagccccaaccttcagggctcaggtgatcctcccgcctcagccacccaagtggctgggaccgcaggtgcatgccaccatgcctggctaacttatttttatatattgtagagacggagtctccctatgttgcctaggctgaccttgagctcttgggctcaggtgatcctcccgccttggcctcccaaagtgttgggattataggcgtgagccactgtgtccagccttttcctctgtatcttgtatccattccccagagcgatactgtgtatccttgaacagacggtttcttgaagtcagagtctatctcctctgtcacttctcccccttcattatctaagactgaggttgtggtttatatgcttagagttgaaagcatggggtccaacgtgttctgtactctgtagttccccagactctccagggaaactacttagctctcaggtggttcttttctgtttttctcagagcaagttatctaataactgaagaggactctgccctttggcctgttcctgactttctaactccttttgctggaggaaggggaggttgaggggggtgccctgtggtgtgaaagccccacttgccctctcctctatactttcttccaatgcagacgggagaaagtatcataaatgtagtgactgtgggtcaggggagctctgagaggccagcacaggaaaccagaaacaaaatgagtcagttcgtaggtggcgatcagaggcaccctgctgagggtgcaaggccacaggtgatgcctcctcagtaggcccaggagcatcaaaacgggaacagtccctttcagccttcaggagcctcccaaatgtcacttagtgatgtcccattcacctgcttaaaggccctgcatcctgccaggtagttggtttgtccatagcatcctgagctctgcttgggtgagccagacaaaaagaatgattcctggccagagtagtgataccagggcccagacagaggcagagagtccggatagaagatcctgtaagctggggtagggagccgaggaggccatggagccaggggaatcattgaagtgagggacaatttctggaggagggaaactgagtaaggaaggcctggccaaggaccaagaaggggacagtatcctgatctatgaaagaagactcaagtggggattgacagagccagattgggtggagtccaagctttgggcaggtgagtgtccaggagatgagggctgagaatgggccttcagagcccagccagaaggggaaagcacaaagctccaccctccttcttcacatccctccatgctgctcaaatcccaggtcttcaggcaccatggaggacaaacgcaacatccagatcatcgagtgggaacacctggacaagaagaagttctacgtgtttggtgtggcaatgacaatgatgatccgtgtcagtgtctacccattcaccctcatccgcacccggttgcaagttcagaaggggaagagcctctaccatgggaccttcgatgccttcatcaagatcctgcgagcagatggtatcactggcctctaccgagggttcctggtcaataccttcaccctcatctctggccagtgttatgtcaccacttatgagctcacccggaagtttgtagctgactacagccagagtaacacagtcaaatcactggtggctggtggctcagcctcccttgtggcccagagcatcacagtgcccattgatgtagtctnnnnnnnnnnnnnnnnnnnnnnnnnnnnnnnnnnntgagaaaatgggccgctttcaggtgcgggggaacccagagggacaaggggtagttgcctttggccaaaccaaggacatcatcaggcagatcctgcaggctgatggacttcgcggcttctatcgaggctatgtggcttcactgcttacctatatcccaaacagtgctgtctggtggcccttctatcacttctatgcagagcagctctcctacctgtgtcctaaggagtgccctcacattgtctttcaagctgtctcggggcccctggctgcagccactgcctccatcctcaccaatcccatggatgtcatacgaacccgtgtgcaggttgagggcaagaactccatcatcctgaccttcagacagctgatggcagaagaagggccttggggcctcatgaagggcctctcggccagaatcatctcagccacaccttccaccattgtcattgtggtgggctatgagagcctcaagaaactcagcctccgacctgagctggtggactcgagacactggtaaccagtggtggggagagaagcctgctgttttccacactaccgtgggtcaggggcagagtggagaggacagcaccctctccaggtgctcccaccacacacccagccctgccctgggccaagtggcctatctgggatagggatagagactttgaactgctcttgctgaagaggctccacgcctggatcccttgcccccactatttaaaattctcttctgagccgggctccctcactcagtccctgtatttgatactggcctaaagaccccaccccccaccctgccagcccttcttctggcttccccttccatctgtgtccctgagaccctgagaaaagctgtacatagagcttgcttactaccactggttcttcctcttgggctttcagcccagactccaagcagctgctatcaaccctctctcccttcatctcttagccttgcttatttttattttgggaccgagctgcccactagatgactctgcttttccctgcatttggggctaaggtgccaggtacttatttgcacagggagcaggagcagcaaaaaatctctggttctccagagcactcgtcctctctttggaggggttattaggttgggagaaatgttgatacttttgttttgtgtgtgtgtgtgtgtgtgtgtgtgtgtgtgtgtgtgtgtgtgttttaacatctgtgaaccaggctattagtcctgctaaagcgccaatcctgctgtcagagctcacccccttcctaagacaggtagaaaaatgtaatgtagctttttccacaagccagttccctgtcccttcagtctcaggagccctaggagagtctaagctggggcatcccctggcccagaggactcccgtggtgggcacagttctaagtggatcaggctgtcttgggtgcactggacttggagcactaccttgagaagtcaggttgagaaagtagttgatctagaaggcaacaagtgggcatgtgttccccagcacattacccaggccagcagagccaaacctaggagagggcagtgggtagattctctgccccaggcagccatgacatacacataaataccccaatcactcagacttacggcaacaagtgttgtctcactatggtgatctctaagatccacatcactggatgcgtagtcatcccagtcatggtaccctgtggaggaatgctggaagaacataaagagcagttcagaaagtcacccaataccaggaccagttgcatttacagcctgatactgccaagattatctgatgctctcctcaggagctaggagaggagtgctccttcctccctaccgctactctccccaagcctgtgttgcaggtagagaggtgcagcaaatagagaaggcatgtcaaaccctgcatttctacctgagacgtgtgaccgggcatgatcctccaaaccctattggtcccaccccctgggaaaggccatggtgccagtttgaaaggtgctagctacctgaagccttgatatttcttcatggctgccgcacattcttccaccttggccagaacaggttctgaaaaccgcttctctaccttcaccaccaccactgcccatcttgatctctttgagggttttcccatttcacttgatcttatttttgtttatcccttcctgcactttgtcaagagagtcctccagtttctatccaggaatgttcacatccaaagggttggacccacggatcattctgaatcttcctgcccctcctcactgcttaaccctgagaaccacaaatataatggaagcagttccccccaccctcaccccatctctttaagctcatcctagcaagacctctagagaccctagagactcgactttagccttccccgccatggcacagtggggaaggtgtcaatggggagtgtcacggacaggaggtaggatcctgccgctcgcgtcttagtgtttctccctcaagactttccttctgttttgttgtcttgtgcagtattttacagcccctcttgtgtttttctttatttctcgtacacacacgcagttttaagggtgatgtgtgtataattaaaaggacccttggcccatactttcctaattctttagggactgggattgggtttgactgaaatatgttttggtggggatgggacggtggacttccattctccctaaactggagttttggtcggtaatcaaaactaaaagaaacctctgggagactggaaacctgattggagcactgaggaacaagggaatgaaaaggcagactctctgaacgtttgatgaaatggactcttgtgaaaattaacagtgaatattcactgttgcactgtacgaagtctctgaaatgtaattaaaagtttttattgagcccccgaaaaaaaaaaaaaaaaaaacgcatattaatggccgaaacgcatctggccgcannnnnnnnnnnnnnnnnnnnnnnnnnnnnnnnnnnnnnnnnnnnnnnnnnnnncgc

SEQ ID NO: 6379 - DNA, 1196 bp, Homo sapiens
acactctgggtccatcttcaagacactgggctgtggatcaacccaaccaccatcctcttccaagaatcattttgacaggttcttttggcagagctcagtgtccttgaagatggacccttttaaaaaaaaaaatggcaccaaagaaagacgtgaagaaacctgtggctgcggctgcggctgccccagccccggcaccggcacctgcacctgcccctgccccagccaaacccaaagaagaaaaaattgacctctctgccattaagatcgagttctctaaggaacagcaggatgaattcaaggaggcatttctcctctttgacagaacaggtgattccaagatcaccttaagccaggtcggtgatgtccttcgagccctgggcacaaatcccaccaatgcagaggtcaggaaagttctgggaaaccccagcaatgaagagctgaatgccaagaaaattgagtttgaacaatttctgcctatgatgcaagccatttccaacaacaaggaccaggccacctatgaagactttgttgagggtctgcgtgtctttgacaaggaaggcaatggcacagtcatgggtgctgaactccgccatgttctagccaccctgggtgaaaagatgaaagaggaagaagtggaagccctgatggcaggtcaagaagactccaatggctgcatcaactacgaagcttttgtcaagcacatcatgtctatctgaatggagctctcaagaacaagcattgtttaggaagactggctggaaacttattttaatcacacccatgacaaactctccagatctgtttaccatcattcaggaaaacaaagcaatctggacggttcaagactgagcaactccctgaatttttatacatcttcagtttttctctgaattgaattcataccacacaaacaaagtgtctgctgctctagatgagaagaataaaatattgacaatctcaaatccaagcaccattctttattatctaccatgaatcaacgaaacattcttaaaacaataaatcaataaacaattttggtcagtctgaaaaaaaaaaaaaaagcacaaaaaactgtggtgggggcgcgtctgggcccctaaaaaaggttttttaaacccctctgtgtgggggcggggccccctagtgtgtgaaccgcgggctacgggttcccaggggacccggcgacacagggcggc

SEQ ID NO: 6380 - DNA, 801 bp, Homo sapiens
aggtaccggcaattcggttttctgcactccagcctgggtgacagagtaagactctgtctcaaaaaaaaaaaaaaaaaaaaaagaaatttagatttctgtggtaaatataaatgagtttcattttaagtaaactcattttgtgggatttgagatttaaaaatgaaattaattttgcacattctagtcatggttgggctctaaggcaatgttgtaaagctgtaattgtttgccttatgggaagaagtgaaaaggaattaaaatttatggtgtgtctactatgaaccaggcatgatgctgagagtttaactgtgtaatttttggcctaaatagccctgtgaagtagatattattccaactttacaggttagaaaatttgaggcacagagaggtgaaatatttgcctaaagtgaaacggcaaatttggcaatttggacttggattcaagtgtttataactaaagcccagctccttgcatcataccctggtacctaaaagacataaaaactcacttcaggtgcaatgtgaatgaaaatgacgttatgacccaggcttgttgtctatgtgctccttgagaaatagttctgttggatagatgcggtcaatactcaaaagcccttgctatctttgccatgcattactctaagcacttgacatgtattaatttaatcctcacgattccgtgaggtatgtgctattatcattcccattttacagacaaaaaaaaaaaaaaaatctctctacctcctctcttctccttctctaccctctccgactcttactcgagctttattgtacaaagtg

SEQ ID NO: 6381 - DNA, 1571 bp, Homo sapiens
tgaataatcagaagtcagtttgggaagatccagttcttataggactattcatcaggttgtttagttcagcattagtgtgtgctttattataagatataatcagaagtcagtttgggagaagtcaaaatggacacaatcttcttgtggagtcttctattgctgttttttggaagtcaagcctcaagatgctcagctcaaaaaaataccgaatttgcagtggatctttatcaagaggtttccttatctcataaggacaacattatattttcaccccttggaataactttggttcttgagatggtacaactgggagccaaaggaaaagcacagcagcagataagacaaactttaaaacaacaggaaacctcagctggggaagaattttttgtactgaagtcatttttctctgccatctcagagaaaaaacaagaatttacatttaatcttgccaatgccctctaccttcaagaaggattcactgtgaaagaacagtatctccatggcaacaaggaattttttcagagtgctataaaactggtggattttcaagatgcaaaggcttgtgcagagatgataagtacctgggtagaaagaaaaacagatggaaaaattaaagacatgttttcaggggaagaatttggccctctgactcggcttgtcctggtgaatgctatttatttcaaaggagattggaaacagaaattcagaaaagaggacacacagctgataaattttactaagaaaaatggttcaactgtcaaaattccaatgatgaaggctcttctgagaacaaaatatggttatttttctgaatcttccctgaactaccaagttttagaattgtcttacaaaggtgatgaatttagcttaattatcatacttcctgcagaaggtatggatatagaagaagtggaaaaactaattactgctcaacaaatcctaaaatggctctctgagatgcaagaagaggaagtagaaataagcctccctagatttaaagtagaacaaaaagtagacttcaaagacgttttgtattctttgaacataaccgagatatttagtggtggctgcgacctttctggaataacagattcatctgaagtgtatgtttcccaagtgacgcaaaaagtttctttgagataaatgaagatggtagtgaagctgcaacatcaactggcatacacatccctgtgatcatgagtctggctcaaagccaatttatagcaaatcatccatttctgtttattatgaagcataatccaacagaatcaattctgtttatgggaagagtgacaaatcctgacacccaggagataaaaggaagagatttagattcactgtgaatgaaaagcacagcctcagaataaaagatgatttctcaaaaatagctgattggcaaaatatcgtcatcttgacaatatttgctctatatcttatgtcttttctgttttaaactgtgcctgtagtaatagatatctgtcttgatgaataagtaaaattaggtatgcaaaaaaaaaaaaaaaaaaaaaaaaaaaaaaaaaaaaaaaaaaaaaaaaaaaaaaaaaaaaaaa

SEQ ID NO: 6382 - DNA, 819 bp, Homo sapiens
cgcgccgcatatatagcagcggcggcggtggcggcggccacaccgggcggcggccacgcgtccgggacccggcccgcgccttctgcccctgctgccggccgcgccatgcggtgagcgccccaggccgccagagcccacccgacccggcccgacgcccggacctgccgcccagacccgccaccgcacccggaccccgacgctccgaacccgggcgcagccgcagctcaagatggcccgaggcagcgccctccttctcgcctccctcctcctcgccgcggccctttctgcctctgcggggctctggtcgccggccaaggaaaaacgaggctggaccctgaacagcgcgggctacctgctgggcccacatgccgttggcaaccacaggtcattcagcgacaagaatggcctcaccagcaagcgggagctgcggcccgaagatgacatgaaaccaggaagctttgacaggtccatacctgaaaacaatatcatgcgcacaatcattgagtttctgtctttcttgcatctcaaagaggccggtgccctcgaccgcctcctggatctccccgccgcagcctcctcagaagacatcgagcggtcctgagagcctcctgggcacgtttgtctgtgtgctgtaacctgaagtcaaaccttaagataatggataatcttcggccaatttatgcagagtcagccattcctgttctctttgccttgatgttgtgttgttatcatttaagattttttttttttggtaattattttgagtggcaaaataaagaatagcaattaaaaaaaaaaaaacaaaaaaaaaaaaaaaag

SEQ ID NO: 6383 - DNA, 1462 bp, Homo sapiens
gagcgggtcgaggctgcggcgcgtggggagcgggcggagcgggggcgggggccgagcgcggggcacccgggggcctcctgtataggcgggcaccatgggctcctgctccggccgctgcgcgctcgtcgtcctctgcgcttttcagctggtcgccgccctggagaggcaggtgtttgacttcctgggctaccagtgggcgcccatcctggccaactttgtccacatcatcatcgtcatcctgggactcttcggcaccatccagtaccggctgcgctatgtcatgtacacgctgtgggcagccgtctgggtcacctggaacgtcttcatcatctgcttctacctggaagtcggtggcctcttaaaggacagcgagctactgaccttcagcctctcccggcatcgctcctggtggcgtgagcgctggccaggctgtctgcatgaggaggtgccagcagtgggcctcggggccccccatggccaggccctggtgtcaggtgctggctgtgccctggagcccagctatgtggaggccctacacagttgcctgcagatcctgatcgcgcttctgggctttgtctgtggctgccaggtggtcagcgtgtttacggaggaagaggacagctttgatttcattggtggatttgatccatttcctctctaccatgtcaatgaaaagccatccagtctcttgtccaagcaggtgtacttgcctgcgtaagtgaggaaacagctgatcctgctcctgtggcctccagcctcagcgaccgaccagtgacaatgacaggagctcccaggccttgggacgcgcccccacccagcaccccccaggcggccggcagcacctgccctgggttctaagtactggacaccagccagggcggcagggcagtgccacggctggctgcagcgtcaagagagtttgtaatttcctttctcttaaaaaaaaaaaagaaaagaaaacatacaaaagaaaaggcaaaaccccacatgcccacctcctctggcaacatgggggtcacagctctgcccccaggctgtcgtctcgtcgaggagcccctccctcaggtgcccacctggggctgctggaccctcgggctgcaagcactgctgctgggatgcagcctccccaggaagtcaatgtgaggcccgagacccctcaagcggtgagggcccctgttgaacatggagggttcctaaccccaaactcgtgccagaagaacccccaccccacccaggagctgaggctgatggagccctagggtgggggctgggcttgaccaggaacagcagagccaggccccaaggcatagggcagggcacatggtggtgacgagcaggcagtactcttgtaaagggggctcttgggcaaacagtcccaaaggctcccccaggtatcatcaagttggtaaataaacaggaacatggccctcaaaaaaaaaaaaaaaaaaaaaaaaaaaaaaaa

SEQ ID NO: 6384 - DNA, 2249 bp, Homo sapiens
  misc_feature (2031)..(2069): n is a, c, g, or t
ttcataatggcgaattcggcacgaggatttccgttaggtgctgaaggctgtggcgcgcggctgtccccattcccacgtgaagcgctacgctagcatcgctcggctggcggctcccagctcgccgcggagcagtcccggcagcagcgggggaccggaagtggctcgcggaggctcagaagctagtcccggagcccggcgtgtggcgcctcggagcacggtgacggcgccatgtccctaatctgctccatctctaacgaagtgccggagcacccatgtgtatcccctgtctctaatcatgtttatgagcggcggctcatcgagaagtacattgcggagaatggtaccgaccccatcaacaaccagcctctctccgaggagcagctcatcgacatcaaagttgctcacccaatccggcccaagcctccctcagccaccagcatcccggccattctgaaagctttgcaggatgagtgggatgcagtcatgctgcacagcttcactctgcgccagcagctgcagacaacccgccaagagctgtcacacgctctgtaccagcacgatgccgcctgccgtgtcattgcccgtctcaccaaggaagtcactgctgcccgagaagctctggctaccctgaaaccacaggctggcctcattgtgccccaggctgtgccaagttcccaaccaagtgttgtgggtgcgggtgagccaatggatttgggtgagctggtgggaatgaccccagagattattcagaagcttcaagacaaagccactgtgctaaccacggagcgcaagaagagagggaagactgtgcctgaggagctggtgaagccagaagagctcagcaaataccggcaggtggcatcccacgtggggttgcacagtgccagcattcctgggatcctggccctggacctctgcccgtccgacaccaacaagatcctcactggtggggcggataaaaatgtcgttgtgtttgacaaaagttctggaacaaatcctggctaccctcaaaggccataccaagaaggtcaccagcgtggtgtttcacccttcccaggacctggtgttttctgcttcccccgatgccactatcaggatttggtcggtccccaatgcctcttgtgtacaggtggttcgggcccatgagagtgctgtgacaggcctcagccttcatgccactggcgactatctcctgagctcctccgatgatcagtactgggctttctctgacatccagacagggcgtgtgctcaccaaggtgacagatgagacctccggctgctctctcacctgtgcacagttccaccctgacggactcatctttggaacaggaaccatggactctcagatcaagatctgggacttgaaggaacgtactaatgtggccaacttccctggccactcgggccccatcactagcatcgccttctctgagaatggttactacctggctacagcggctgatgactcctctgtcaagctctgggatctgcgcaagcttaagaactttaagactttgcagctggataacaactttgaggtaaagtcactgatctttgaccagagtggtacctacctggctcttgggggcacggatgtccagatctacatctgcaaacaatggacggagattcttcactttacagagcatagcggcctgaccacaggggtggccttcgggcatcacgccaagttcatcgcttcaacaggcatggacagaagcctcaagttctacagcctgtaggccctggcccttctgatggaagctgggcctcatctcagtagaggggtagaattagggtttggggggggggtggggggaatctatggggggagggggctctgtggggtgggacattcacatcatttcactctggtctgagtggtggcctgagaaccatggtggcatggaccaccctcatccatgcaactccaggccccatgggaacggatgtggaaggaagaactgtcaccctcttaaggcccagggtcggagcccagggcctctcccttcctgtcgttcaatggacnnnnnnnnnnnnnnnnnnnnnnnnnnnnnnnnnnnnnnnctgtgagacaggagaggctgagccaagggaactgtgaaggggatgggcaggagggcttgtgcagggttttgtaagcagtgatctagtttcattaaaaaaagaaaacaataaaaaaaaaaaaaaaaaaaaaaaaaaaaaaaaaaaaaaaaaaaaaaaaaaaaaaaaaaaaaaaaaaaaaaa

SEQ ID NO: 6385 - DNA, 1547 bp, Homo sapiens
  misc_feature (594)..(608): n is a, c, g, or t
ggcggctagcggcgaggccccttcctgaccttcagggatcggccaccatgtcccaccggaagttttccgcccctcggcacggacacctgggcttcctgccccataagaggagccaccggcaccggggcaaggtgaagacgtggccgcgggatgaccccagccagcccgtgcacctcacggccttcctgggctacaaggcgggcatgacccacaccctgcgggaggtgcaccggccggggctcaaaatttccaaacgggaggaggtggaggcggtgacaattgtagaaacgccgcccctagtggtggtgggcgtggtgggctacgtggccacccctcgaggtctccggagcttcaagaccatctttgcagaacacctcagtgatgagtgccggcgccgattctacaaggactggcacaagagcaagaagaaagccttcaccaaggcctgcaagaggtggcgggacacagacgggaaaaagcagctacagaaggacttcgccgccatgaagaagtactgcaaggtcattcgggtcattgtccacactcagatgaaactgctgcccttccggcagaagaaggcccacatcatggagnnnnnnnnnnnnnnnggcacggtggccgagaaggtggcctgggcccaggcccggctggagaagcaggtgcccgtgcacagcgtgttcagccagagtgaggtcattgatgtcattgctgtcaccaagggtcgaggcgtcaaaggggtcacaagccgctggcataccaagaagctgccgcggaagacccataagggcctgcgcaaggtggcctgcattggcgcctggcaccccgcccgcgtgggctgctccattgctcgggccgggcagaagggctatcaccaccgcacggagctcaacaagaagatcttccgcatcggcaggggcccgcacatggaggacgggaagctggtgaagaacaatgcatccaccagctacgacgtgactgccaagtccatcacaccgctgggtggcttcccccactacggggaagtgaacaacgacttcgtcatgctgaagggttgtattgctggtaccaagaagcgggtcattacgctgagaaagtccctcctggtgcatcacagtcgccaagccgtggagaatattgagctcaagttcattgacaccacctccaagttcggccatggccgcttccagacagcccaagagaagagggccttcatgggcccccaaaagaagcatctggagaaggaaacgccggagacctcgggagacttgtaggctgtgtggggtggatgaaccctgaagcgcaccgcactgtctgccccaatgtctaacaaaggccggaggcgactcttcctgcgaggtctcagagcgctgtgtaaccgcccaaggggttcaccttgcctgctgcctagacaaagccgattcattaagacaggggaattgcaatagagaaagagtaattcacacagagctggctgtgcgggagaccggagttttatgttttattattactcaaatcgatctctttgagcaaaaaaaaaaaaaaaaaaa

SEQ ID NO: 6386 - DNA, 1914 bp, Homo sapiens
ggcacgaggcagagcctggacagcggtggacacggcatcgtgcgcggggaagagggcagcacgcagcaggcgccgagcgccgggcaccgagaagggcagcccgggtgatctccggccgtccatgcacagagcgccttcccccacagccgagcagccgccgggcggaggggacagcgcccgccggaccctgcagcccagactcaagcccagtgcccgagccatggcactgcctcggacgctgggggagctgcagctgtaccgggtcctgcagcgcgccaacctcctttcctactatgagaccttcatccagcagggaggggacgacgtgcagcagctgtgtgaggcgggtgaggaggagtttctggagatcatggcacttgtgggcatggccaccaagcccctccatgtccggcgcctgcagaaggcactgagagagtgggccaccaatccagggctcttcagtcaaccagtgcctgctgttcccgtctccagcatcccgctcttcaagatctctgagactgcgggtacccggaaagggagcatgagcaatgggcatggcagcccaggggaaaaggcaggcagtgcccgcagttttagccccaagagcccccttgaacttggagagaagctatcaccactgcctgggggacctggggcaggggacccccggatctggccaggccggagcactccagagtcggacgttggggcaggaggagaagaggaggctggcagcaggtgggactgggggtggtccagaccgactggagccagagatggtacgccagcctgtctggggagagtctggatggacatttgcaggctgtggggtcatgtccaaggctgacgccgccccctgctgacctgcctctggcattgccagcccatgggctatggagccgacacatcctgcagcagacactgatggacgaggggctgcggctcgcccgcctcgtctcccacgaccgcgtgggccgcctcagcccctgtgtgcctgcgaagccacctctcgcagagttcgaggaagggctgctggacagatgtcctgccccaggaccccatcccgcgctggtggagggtcgcaggagcagcgtgaaagtggaggctgaggccagccggcagtgagggttggactggtgtcttcagacccaggacctcagacttctggctcacacagacccccacgctctccatccccggaatctagtcacaaccctggatccttcctctgcccttctcctgcctccccacctgctccatgggcataagactgtggggcttcaagcaataacaagcagaggcctggagagaggacacaaggagggtgcgtggtgccctcacccctgcccagagcgagggggcaaggactctgcctccagggcatctggggttttcccctccctcacacaacacactcccattctctttaggtttgcaccagtggtgtgagcagttggactcagtttggacaagggggaaagggggacttccctgggaaggtccagctaaaagtggcaacatttgcccccagaattgggggcctgggaacactggacctgctccttctcccctctccttccccgtttttgtgcttctggtttgtttctttaattaatttaacaagtgctgcagtttgccctcccattcccatctatcccccaagtcctttgcaatttcttccctgccctacataggggcggtgggtgtgggatcccttcactggccccctcgggaggcctgggttggactcagggtctcctccagctgggggctggaccgcagcacctatctgagcagttagagcgtctttcttttcagattgtgtacagtagattatttattttgttattttggaataaaatttattttatggcttaggaaaaaaaaaaaaaaaaaaaaaaaaaaaaaaaaaag

SEQ ID NO: 6387 - DNA, 3438 bp, Homo sapiens
gcgcccgcgcctcgggccgtcgggagcggagcctcctcgggaccaggacttcagggccacaggtgctgccaagatgctccagggcacctgctccgtgctcctgctctggggaatcctgggggccatccaggcccagcagcaggaggtcatctcgccggacactaccgagagaaacaacaactgcccagagaagaccgactgccccatccacgtgtacttcgtgctggacacctcggagagcgtcaccatgcagtcccccacggacatcctgctcttccacatgaagcagttcgtgccgcagttcatcagccagctgcagaacgagttctacctggaccaggtggcgctgagctggcgctacggcggcctgcacttctctgaccaggtggaggtgttcagcccaccgggcagcgaccgggcctccttcatcaagaacctgcagggcatcagctccttccgccgcggcaccttcaccgactgcgcgctggccaacatgacggagcagatccggcaggaccgcagcaagggcaccgtccacttcgccgtggtcatcaccgacggccacgtcaccggcagcccctgcgggggcatcaagctgcaggccgagcgggcccgcgaggagggcatccggctcttcgccgtggcccccaaccagaacctgaaggagcagggcctgcgggacatcgccagcacgccgcacgagctctaccgcaacgactacgccaccatgctgcccgactccaccgagatcaaccaggacaccatcaaccgcatcatcaaggtcatgaaacacgaagcctacggagagtgctacaaggtgagctgcctggaaatccctgggccctctgggcccaagggctaccgtggacagaagggtgccaagggcaacatgggtgagccgggagagcctggccagaagggaagacagggagacccgggcatcgaaggccccattggattcccaggacccaagggcgttcctggcttcaaaggagagaagggtgaatttggagccgacggtcgcaagggggcccctggcctggctggcaagaacgggaccgatggacagaagggcaagctggggcgcatcggacctcctggctgcaagggagaccctggaaaccggggccccgacggttacccgggggaagcagggagtccaggggagcgaggagaccaaggcggcaagggggaccctggccgcccaggacgcagagggcccccgggagaaatcggggccaagggaagcaaggggtatcaaggcaacaatggagccccaggaagtcctggtgtgaaaggagccaagggcgggcctgggccccgcggacccaaaggcgagccggggcgcaggggagaccccggcaccaagggcagcccaggcagcgatggccccaagggggagaagggggaccctggccctgagggcccccgcggcctggctggagaggttggcaacaaaggagccaagggagaccgaggcttgcctggacccagaggcccccagggagctcttggggagcccggaaagcagggatctcggggagaccccggtgatgcaggaccccgtggagactcaggacagccaggccccaagggagaccccggcaggcctggattcagctacccaggaccccgaggagcacccggagaaaaaggcgagcccggcccacgcggccccgagggaggccgaggcgactttggcttgaaaggagaacctgggaggaaaggagagaaaggagagcctgcggatcctggtccccctggtgagccaggccctcgggggccaagaggagtcccaggacccgagggtgagcccggcccccctggagaccccggtctcacggagtgtgacgtcatgacctacgtgagggagacctgcgggtgctgcgactgtgagaagcgctgtggcgccctggacgtggtcttcgtcatcgacagctccgagagcattgggtacaccaacttcacactggagaagaacttcgtcatcaacgtggtcaacaggctgggtgccatcgctaaggaccccaagtccgagacagggacgcgtgtgggcgtggtgcagtacagccacgagggcacctttgaggccatccagctggacgacgaacatatcgactccctgtcgagcttcaaggaggctgtcaagaacctcgagtggattgcgggcggcacctggacaccctcagccctcaagtttgcctacgaccgcctcatcaaggagagccggcgccagaagacacgtgtgtttgcggtggtcatcacggacgggcgccacgaccctcgggacgatgacctcaacttgcgggcgctgtgcgaccgcgacgtcacagtgacggccatcggcatcggggacatgttccacgagaagcacgagagtgaaaacctctactccatcgcctgcgacaagccacagcaggtgcgcaacatgacgctgttctccgacctggtcgctgagaagttcatcgatgacatggaggacgtcctctgcccggaccctcagatcgtgtgcccagaccttccctgccaaacaggtttggacggagctgttttgtgctgaaaggttttctcggggtccgtggtgtcccccaaaggtgccaccgtgcgggtctcctagctccctgccagcttcctgtccctgtgctcactgcccccacgcctcctgccaaggccgagccacacacccgctccacctgcatttcctctaccgactcgccagcccaaatgccgctcttcactctggcctcgctgagcggctgcccgaggaggagctctaggccgacgcccaccgcaggccttacagtcgtctctggacgctcccttgcagatgcaccgtggcctggcggcgagcccccggtcaccttcctccgcacggaagaggggccggacgccaccttccccaggaccattcccctgatccaacagttgctaaacgccacggagctcacgcaggacccggccgcctactcccagctggtggccgtgctggtctacaccgccgagcgggccaagttcgccaccggggtagagcggcaggactggatggagctgttcattgacacctttaagctggtgcacagggacatcgtgggggaccccgagaccgcgctggccctctgctaaagcccgggcacccgcccagccgggctgggccctccctgccacactagcttcccagggctgcccccgacaggctggctctcagtggaggccgagagatctggaatcggggtcagcggggctacagtccttccaggggctctggggcagctcccagcctcttcccatgctggtggccaccgtgtcccttgctgcggctgcatcttccagtctctcctccgtcttccagtggccgctctctttataagaaccctggtcattgaatttaaggcccaccccaagtccagaatgacctcgcaagacccttaactcactccc

SEQ ID NO: 6388 - DNA, 3306 bp, Homo sapiens
cagcggcggggcctctaccggcccgatggagcgcgcgggcgctactagccgcgggggccaagcccctggcttcttactgcggcttcatactgagggccgagccgaggcggcgcgggtgcaggagcaggacttacggcagtgggggctgacagggattcacctacgctcttaccagctggagggagtaaactggctcgcccagcgcttccattgtcagaatggctgtatcctgggagatgagatgggcctggggaagacctgccagactattgctctcttcatttatttggcaggaagattaaatgatgaagggccatttctgattctttgtcccttgtctgttttgagcaactggaaagaagaaatgcagagatttgctccaggtctttcctgtgtaacatatgcaggcgacaaggaggaaagagcctgccttcagcaagacctgaaacaggagtcacgttttcatgtgctactgactacctatgagatttgcttgaaagatgcatcatttctaaaatcattcccttggagtgttcttgttgtggatgaagctcacaggttgaaaaaccaaagctccctgctgcataagaccttgtcagagttctcagtagtcttcagtctcctgttgaccggaactcccatccagaacagcctccaagagctctactccctcctcagttttgtggagcctgatctcttttccaaggaagaggtgggagattttattcaacgctaccaggatattgagaaagaatctgagtcagcaagtgaactgcacaaactcttgcagccatttctgctgaggcgagtgaaagctgaggtagctacagagcttcccaagaagacagaagtagtgatataccatggcatgtcagcattgcagaagaaatactacaaggccattttgatgaaagacctagatgcatttgaaaatgagacggcaaagaaagttaaactacagaacattttgtcccagcttcgaaagtgtgtggatcacccatatttgtttgatggtgtggagccggagccttttgaagttggagaccacctgactgaggctagtgggaagcttcacctgctggataagctactagcattcctgtattctgggggccatcgggttttacttttctcccaaatgacccagatgttggatattctccaagactatatggattacagaggctacagctatgagcgtgtggatggttctgtgagaggagaagagagacacttggccattaagaactttggacagcagcccattttcgtttttctcctgagtactagggcaggtggagttggcatgaacttaacagcagcagatactgtgatttttgttgacagtgactttaatcctcagaatgacttgcaagcagctgccagggctcatcgcattggccaaaacaagtctgttaaagttattcggctgattggtcgagacactgtggaagaaatagtctataggaaagcagcctccaaactgcagctcaccaacatgatcatagaaggaggccattttactctgggagcccagaaacccgctgccgatgctgacctccagttgagtgagatactcaaatttggtttggataaactgctggcctctgaggggagcaccatggatgaaatagacctggagtccatcctgggagaaacaaaagatggccagtgggtctctgatgccttgcctgcagcagaaggagggagcagagatcaagaggaaggaaaaaatcatatgtacttatttgaaggtaaagattattctaaagagcccagtaaggaagacagaaaatcatttgaacaactggtaaaccttcagaaaacccttttggagaaagctagtcaagagggccgatcactccgaaataaaggcagtgttctcatcccaggccttgtggagggatctaccaaaaggaagcgggttctgagtccagaagagctggaggacagacagaagaaaagacaagaagcagctgccaagagaaggagactcatagaggagaagaagaggcaaaaggaagaggctgaacataagaaaaagatggcctggtgggaatccaacaattaccagtccttctgcctgccctctgaggagagcgagccagaggaccttgagaatggggaagagagctctgctgagctggattaccaagacccagatgctacttccctcaagtacgttagtggtgatgtcacccaccctcaggctggggccgaggatgctctcattgtgcactgcgtagatgactctggccactggggcagaggtggtttatttacagctctggaaaagcgatccgctgagccaagaaaaatatatgagctggctgggaaaatgaaagacctgagtttgggaggtgtccttttatttcctgttgatgataaagaatcaagaaacaaagggcaagatttgttggccttgattgtggctcagcatcgtgatcgttccaatgtcctgtctggcattaagatggcagccctagaagagggcctgaagaagatatttttagcagcaaaaaagaagaaagcaagtgttcatcttccacgtattggacatgccacgaaaggttttaactggtatggtactgagcgacttattcggaaacatctggctgcaagaggcatcccaacttacatatattattttcctagaagcaagtctgctgtccttcattcacagtcttcatcttcctcctcaagacagctggtgccttaagaattggcccagcctcagatcctgtctttagcaaccagctaatatttacccagaggtactgcaatagagtatttcaaaatggaatcaggatctggtgggcctcagaaattgtctcttttctgagtttcagtttggttctcctggatgttttgctctgttttggtacctgtaatatagggaaacacaactttttttgggaaagccctttgaccccagcttgctagttgcataataataaattttctgttcctaaaaaaaaaaaaaaaaaaaaaaaaaaaaaaaaaaaaaaaaaaaaaaaaaaaaaaaaaagtcttcttagacccccatccggtatgaggagcccgcggggccccaagagagttagatggagacagctggccccaacaaacgagctcccccgagagagaaacccgcgggccaggaaccaggaggcgagggggaatctcgtcccccattaataaaaaacgcgccgggggcacaccgagacggtgtctagaaacacaactcccgagaagagaagaccgagagggacgcgaacgcggaacctataaaacgggagagccacggcagctactaaaaaaatgcga

SEQ ID NO: 6389 - DNA, 2161 bp, Homo sapiens
ttttaatattattatattgaacagctttggctatcccaccctcctacctgcagagtgcaaaacaatttatgcacatcacactcagtttacagcatcagaacactcttggagcattgttcaccatggtcctagcttgatgttcttggggtgtgattattctttcttttctctctttctctctctctctttctttctttttctttctttcaagatggagtcttgctctgtcacctaggctggagtgcagtggcacaatctcggctcactgcatcctttgcctctcgggttcaagcgattctcctggctcagccccccgagtagctgggattacagatgccagccatcatgcccagctaattttgtatttttgtagaaatggggttacaccatgttggccaggctggtctcgaactcccaacctcaggtgatctgcctgcctcggcctcccaaagtgctgggattacaggtgtgaaacaccacacccgcccccccaccccccgccatgcctttttcttttcccagacagggtcttgctctgtcacccagtctggagtgcagtggcatgattacagttcattacagccttgacctcccaggctcaagtgatcatcccacctcagcctcctgagtagctgggactacaggtgcatgccacatgcttggctaatttttagagtttttttttttgtagagatggggtctcactatgttgctcaggttggtcttgaactcctggattcaattgatccacctgccttggcttcccaaagtgctgggattatagactggtgtgactgttagagtggtgagtgaataagctttttcttattttccaaatgcaatttatcagaaaatcctcttggctcaaaatatgtccagcatccaaccacatctcaccacctccaccactgtttccctgctccaagcttccacctctcttggatatttgcaatggcattttaaatggcctccttgattctgctctctccctcctatatttcccacaaagcagctagagtacactttttgaaacataagtcagatcatatcattcccatactcctcctcaacagaaaaccctccaatggcttcagcatcaaggcccacattcacttctctgaccctctctcttacctgttttgctccatttcatcataattttctccttgtacttccttgaatacatcaaggcccttctatctcaggatgttttcacttgctatttccttttctcaaaggctcatccctagatatttgcatgactggcttcctaatttcttgtaagcttttgctcagaagttactttaccaactgtcattgaggtcttccctgaacatcttaggtaagataacaagctcccctcctttcctttcctcacttcttggtattccttatctcgtaactttttttttgggggggggatggagtctcgcgtctcgctctgttgtccaggctggagtgcagtggtgcaatctcggctcactgcaacctccacctcccgggttcaagcgattctcctgcctcagcctcccgagtagctgggactacaggcaagtgccaccacacccagctaattttttgtatttttagtagagatggggtttcactgtgttaggatggtctcgatctcctgaccttgtgatccacccacctcggcctcccaaagtgctgggattataggtgtgagccagtgcgcccggcctctcataattttcttaatttttctccatataccatctgaatactaatgtatttatttatttgtttatttctgaatgagactgatatccataaaaatgatctttccttgtatactctaactccctgctttctgggcgcttggcttctcaattaaaggctaatttaccagcttctcttgcatctgggtttgtccaaagtttggggccaatgagatgtgaatggaagttgcatgtattatttctagtttgtgccctaaaaaagaatatgtatgtgttacccttgccctcttaccctctccactggctggggtgcagatgtgatggcaggaattggggcaactactttggacccagaggcagaagccctgtgatgaggatggcagaactgctctgttagccctggactgttacatgaaagataaataaacttgtatcttattcaagaaaaaaaaaaaaaaaaa

SEQ ID NO: 6390 - DNA, 4944 bp, Homo sapiens
gtgcccctgacaggcttttaaaaggcccggatgccaatgcacattccaacactatccacaaaaaggagactgagcagtgctcttccctgcattgggcaaggagactctccctccctgcctaaccacttgcctgccctgttttgtgggagaattacaagtaaatgctacagaggcagtggagaaaaaagggtgttttaattcctctccagagtttcctttatttgatgtatgttgcatcctttaaacaagttgtgcaaaatggctgcagggtagattggctctcccttttaaagctctccatccggctgggtttatttgtaaatactgcatctatccttcttagtgttttaggactggctggaaagactcttcttcctgtaggttgggtcagtgtgagagatctaaaaaatcattttcccttaaaattactgtattttaataaaaggatgtggcaggggctggaatgagagaaaactggtccttcaaaatgtaaaactgtcatacttaaaccagtttacaaaatatgcgtttaattatgtggtgggatgtgtgtaggtgtatgatgagagaggcaaccaacatggctatttggggtgcaaggatgtgggaacaggcaagtaattttcacattggactttcatcctagggagctgggttctagtcacagctctgagctgtgtgaccttgggtaggtctcatctccccggggttttgtttcaccagttgaacagtatgaggatgagtcacagctaacatttgttccatgatatttacccagcaccatacaagtgttatttctgtcctcccagttaacactgacgtgggtagtattatatgcccattttacagatgaggaaactgaagcctgaagaagttaaatacttatcccagaacacacagctggtaagtggcagacctggaattggaatctagttcagtttgattccccaacccatgctcttgaccactatactgttttttcaagtccagatctgaaatctcattttctgtgtggctgtgtgtttgggacaggggtaaccaattcctgactactctatatgctgcatagaacctggagaggatttttcaaagtaaatgaatctcgaaagctggattgcagagcaaacgagtgcagtcaattcagccaggggcttgcaagaggagaaagagaaaaagactgtggaatggaaagtttcccaacccaagcctttcccaaggggtagccattctctgttctacagtttagggcttgcatgtgctttttctggagtccaaaaatacataagttataaccaatttaacagacagaaaggcgcacagaggaatttaaagtgtgggctggggggcgaggcggtgggcgggaggcgagcgggcgcaggcggaacaccgttttccaagctaagccgccgcaaataaaaaggcgtaaagggagagaagttggtgctcaacgtgagccaggagcagcgtcccggctcctcccctgctcattttaaaagcacttcttcttgtattgtttttaaggtgagaaataggaaagaaaacgccggcttgtgcgctcgctgcctgcctctctggctgtctgcttttgcagggctgctgggagtttttaagctctgtgagaatcctgggagttggtgatgtcagactagttgggtcatttgaaggttagcagcccgggtagggttcaccgaaagttcactcgcatatattaggcaattcaatctttcattctgtgtgacagaagtagtaggaagtgagctgttcagaggcaggagggtctattctttgccaaaggggggaccagaattcccccatgcgagctgtttgaggactgggatgccgagaacgcgagcgatccgagcagggtttgtctgggcaccgtcggggtaggatccggaacgcattcggaaggctttttgcaagcatttacttggaaggagaacttgggatctttctgggaaccccccgccccggctggattggccgagcaagcctggaaaatggtaaatgatcatttggatcaattacaggcttttagctggcttgtctgtcataattcatgattcggggctgggaaaaagaccaacagcctacgtgccaaaaaaggggcagagtttgatggagttgggtggacttttctatgccatttgcctccacacctagaggataagcacttttgcagacattcagtgcaagggagatcatgtttgactgtatggatgttctgtcagtgagtcctgggcaaatcctggatttctacactgcgagtccgtcttcctgcatgctccaggagaaagctctcaaagcatgcttcagtggattgacccaaaccgaatggcagcatcggcacactgctcaatcaattgaaacacagagcaccagctctgaggaactcgtcccaagccccccatctccacttcctccccctcgagtgtacaaaccctgcttcgtctgccaggacaaatcatcagggtaccactatggggtcagcgcctgtgagggatgtaagggctttttccgcagaagtattcagaagaatatgatttacacttgtcaccgagataagaactgtgttattaataaagtcaccaggaatcgatgccaatactgtcgactccagaagtgctttgaagtgggaatgtccaaagaatctgtcaggaatgacaggaacaagaaaaagaaggagacttcgaagcaagaatgcacagagagctatgaaatgacagctgagttggacgatctcacagagaagatccgaaaagctcaccaggaaactttcccttcactctgccagctgggtaaatacaccacgaattccagtgctgaccatcgagtccgactggacctgggcctctgggacaaatccagtgaaacgggccaccaagtgcattattaagatcgtggagtttgctaaacgtctgcctggtttcactggcttgaccatcgcagaccaaattaccctgctgaaggccgcctgcctggacatcctgattcttagaatttgcaccaggtataccccagaacaagacaccatgactttctcagacggccttaccctaaatcgaactcagatgcacaatgctggatttggtcctctgactgaccttgtgttcacctttgccaaccagctcctgcctttggaaatggatgacacagaaacaggccttctcagtgccatctgcttaatctgtggagaccgccaggaccttgaggaaccgacaaaagtagataagctacaagaaccattgctggaagcactaaaaatttatatcagaaaaagacgacccagcaagcctcacatgtttccaaagatcttaatgaaaatcacagatctccgtagcatcagtgctaaaggtgcagagcgtgtaattaccttgaaaatggaaattcctggatcaatgccacctctcattcaagaaatgctggagaattctgaaggacatgaacccttgaccccaagttcaagtgggaacacagcagagcacagtcctagcatctcacccagctcagtggaaaacagtggggtcagtcagtcaccactcgtgcaataagacattttctagctacttcaaacattccccagtaccttcagttccaggatttaaaatgcaagaaaaaacatttttactgctgcttagtttttggactgaaagatattctcaagaaggaccaagaagttttcatatgtatcaatatatatactcctcactgtgtaacttacctagaaatacaaacttttccaattttaaaaaatcagccatttcatgcaaccagaaactagttagaaagcttctattttctctttgaacactcaagatgcatggcaaagacccagtcaaaatgatttacccctggttaagtttctgaagactttgtacatacagaagtatggctctgttctttctatactgtatgtttggtgctttccttttgtcttgcatactcaaaataaccatgacaccaaggttatgaaatagactactgtacacgtctacctaggttcaaaaagataactgtcttgctttcatggaatagtcaagacatcaaggtaaggaaacaggactattgacaggactattgtacagtatgacaagataaggctgaagatattctactttagttagtatggaagcttgtctttgctctttctgatgctctcaaactgcatcttttatttcatgttgcccagtaaaagtatacaaattccctgcactagcagaagagaattctgtatcagtgtaactgccagttcagttaatcaaatgtcatttgttcaattgttaatgtcactttaaattaaaagtggtttattacttgtttaatgacataactacacagttagttaaaaaaaatttttttacagtaatgatagcctccaaggcagaaacacttttcagtgttaagtttttgtttacttgttcacaagccattagggaaatttcatgggataattagcaggctggtctaccactggaccatgtaactctagtgtccttcctgattcatgcctgatattgggatttttttccagcccttcttgatgccaagggctaattatattacatcccaaagaaacaggcatagaatctgcctcctttgaccttgttcaatcactatgaagcagagtgaaagctgtggtagagtggttaacagatacaagtgtcagtttcttagttctcatttaagcactagtggaattttttttttttgatatattagcaagtctgtgatgtactttcactggctctgtttgtacattgagattgtttgtttaacaatgctttctatgttcatatactgtttacctttttccatggactctcctggcaaagaataaaatatatttattttaaaaaaaaaaaaaaaaaaaaaaaaaaaaaaaaaaaaaaaaaaaaaaaaaaaaaaaaaaaaaaaaaaaaaaaaaaaaaaaaaaaaaaaaaaaaa

SEQ ID NO: 6391 - DNA, 2453 bp, Homo sapiens
ctggccaagggcgtccactagacaactctatcccttgcgctgaagctcaatcgtgctgagggagagctttcttaatattactgtgttgctcttagcccttctctgggttaggatctgtcagcatttctatgataaactcctattctcaaaggtttttaatttgaccataaaaatgtgccccaggctgaagtttgctatacagggctgtaccaaagagtcaaggtttacttccttctctttccaacttcttccccattctccaaggaaaagaacaacaaaaaaatctggtatggtccctccttaatagtgatttcagaattttggaaagcaccaagatccaagatggtagttttaatgtagttactcattcgcacacattttttaaatttaatgggtcacctggcatatattgtagataacatatcttttctataatttgtaagtcaataatttttttaactgctacatgatatttttttttgcccaaagattttaaaagacttgaagttggtcagttcaaaactcagatttttctacacattgtctgccatgtccattaggagtttggggaaaatactctcacacagacccttactttgcatgcagtttagagggtaagatacgtgcttcttttggggataaagatttccttacttaattgtcaaatttcatggagccattctagtctgttggggaaaatagtgattaaaaccacttccaaaattaacattttttgacaattcagatatgataagaagcaggggaaaataatacactttactcttttcttgcttaaaggcaaagaaatcaatgaaacttgaggacacactaaacatttgataactgcaaatgtgctttaaaaattggttcaatggtgcttacacatgaaacggtaacaaatggggttcctaggacgtcagaaggaatctttagtttgtatgtaattacacactagaggaggaggtgcttttaagccagtcttttatttttaatcatctcaaatatgcaaccatacatgcagtaacattaagggtcgtaaactggtgggaaacaggaacttcagtggagaggcttaaatgcctctggttagagtgggggtttttgtttgtttgtttattgttgggtttcaacactgagcatcatttctgtgatcaagtttctaactggcatgtgttttgatcatgaggtttaccatatcttgcccatacagacaaatgagagatctagtttcattttgttccctaaagaaagaacactctctaaaattaaatcatacctgtaaatttcttcagcatttgtttctgttcaatgaaattgagacccttaatgttgctttaatgtaaaattgaatattttgtctgtgatatactttaataatttaaagtaagtaatagttctaaagtcttcactgttgctactaagagaaaatagaattttaaaggtgatgataaagatgctataatgtcagttcactccagtccaatcaaatgtagtaagaaaaagtccttgaatagttctctagggacaatttctcacttgccattgacattaatctttggtgtattctcaaaaaaaaaaaaaaaaaattgaaactggtccaaggttatagtcatatcctcgataacttttgaaaaaaaattttattaggaaattaatactagcctttttcattctggctgaaagaaaattattaaaggattagttgagtgtgaaattcaacagtattttgctcatacatactaaaaaggtgcgtagggacttggcgcatttaaacaagtttctgaaaggtttcaatttgactcaagaaaaaaattcaatatttcttttgaaaatactgaatttatcacttgctgcatggatcagatggcataggttaatctttgattttcagaatcctaatgaaataactttcaaacaatttgtgtccttaattaaaggtggaatgagatccaatttttccccctaatccttcagtttaagctgatacatgtaggttaatgtggaatgaaatcatctgtgatatattatgttcatttatcaactgagcttttttgatgttgcctgtttttatgtaaaacatgttcttaaagttaataaaataatagtacttggtgtatgaactactacataataccttagctgaagggtacgctcctcagttcatttgccatattggagtaaaatttcaccttagttcaattcacaattgacacattcagttcacgaaggaatagcccagctgtgttcttagggggaattctctctatgcaaggctttaaaaattagtcatgcggtcagagtgtagctttcccacatgtcctccatagcacagtgtgtatttcatgagcataattcaaaaacagctatttcaaaaatgtcccttttcatatattacgttcctgcctgggccactgacttggataaatacaaataaaacaaataccattcataaa

SEQ ID NO: 6392 - DNA, 2636 bp, Homo sapiens
agcggggaagggccggcggacgctcgctaggtcggctcgctggccggggctccgcggctcccgtggttgccatggcggcggttgtcgcggcgacgaggtggtggcagctgttgctggtgctcagcgccgcggggatgggggcctcgggcgccccgcagccccccaacatcctgctcctgctcatggacgacatgggatggggtgacctcggggtgtatggagagccctccagagagaccccgaatttggaccggatggctgcagaagggctgcttttcccaaacttctattctgccaaccctctgtgctcgccatcgagggcggcactgctcacaggacggctacccatccgcaatggcttctacaccaccaacgcccatgccagaaacgcctacacaccgcaggagattgtgggcggcatcccagactcggagcagctcctgccggagcttctgaagaaggccggctacgtcagcaagattgtcggcaagtggcatctgggtcacaggccccagttccaccccctgaagcacggatttgatgagtggtttggatcccccaactgccactttggaccttatgacaacaaggccaggcccaacatccctgtgtacagggactgggagatggttggcagatattatgaagaatttcctattaatctgaagacgggggaagccaacctcacccagatctacctgcaggaagccctggacttcattaagagacaggcacggcaccacccctttttcctctactgggctgtcgacgccacgcatgcacccgtctatgcctccaaacccttcttgggcaccagtcagcgagggcggtatggagacgccgtccgggagattgatgacagcattgggaagatactggagctcctccaagacctgcacgtcgcggacaacaccttcgtcttcttcacgtcggacaacggcgctgccctcatttccgcccccgaacaaggtggcagcaacggcccctttctgtgtgggaagcagaccacgtttgaaggagggatgagggagcctgccctcgcatggtggccagggcacgtcactgcaggccaggtgagccaccagctgggcagcatcatggacctcttcaccaccagcctggcccttgcgggcctgacgccgcccagcgacagggccattgatggcctcaacctcctccccaccctcctgcagggccggctgatggacaggcctatcttctattaccgtggcgacacgctgatggcgtccaccctcgggcagcacaaggctcacttctggacctggaccaactcctgggagaacttcagacagggcattgatttctgccctgggcagaacgtttcaggggtcacaactcacaatctggaagaccacacgaagctgcccctgatcttccacctgggacgggacccaggggagaggttccccctcagctttgccagcgccgaagtaccaggaggccctcaggcaggatcgcctcggtcgtccagcagcaccaggaggccttggtccccgcgcagccccagctcaacgtgtgcaactgggcggtcatgaactgggcacctccgggctgtgaaaagttagggaagtgtctgacacctccagaatccattcccaagaagtgcctctggtcccactagcacctgcgcagactcaggccaggcctagaatctccggttggccctgcaagtgcctggaggaaggatggctctggcctcggtcctcccccaaccctgcccaagccagacagacagcacctgcagacgcagggggactgcacaattccacctgcccaggacctgaccctggcgtgtgcttggccctcctcctcgcccacggcgcctcagatttcaggaccctcctcctcgcccacggcgcctcagacctcaggaccctgccgtctcacgcctttgtgaaccccaaatatctgagaccagtctcagtttattttgccaaggttaaggatgcacctgtgacagcctcaggaggtcctgacaacaggtgcctgaggtggctggggatacagtttgcctttatacatcttagggagacacaagatcagtatgtgtatggcgtacattggttcagtcagccttccactgaatacacgattgagtctggcccagtgaatccgcatttttatgtaaacagtaagggaacggggcaatcatataagcgtttgtctcaggggagccccagagggatgacttccagttccgtctgtcctttgtccacaaggaatttccctggacgctaattatgagggaggcgtgtagcttcttatcattgtaactatgttatttagaaataaaacgggaggcaggtttgcctaattcccaggttgaaaaaaaaaaaaaaaaaacaaacaaaccacacccaagacacaaagagcacacagcgagagagcaagaaccgacacacgcggcagcgcaagccgcgcagcacaccgggccccactggacccacaccaaggaaaccacacgaagaccaccgccaacacggaacacgaacgcgaccaagcaccccacggcacacaccaacagaccaacagcccacaacacaccgcccacacggaggacacaacgacacacaacagcggcggccacgcaagacgacacaaccgcgccaacacac

SEQ ID NO: 6393 - DNA, 12892 bp, Homo sapiens
  misc_feature (1542)..(1556): n is a, c, g, or t
  misc_feature (4314)..(4345): n is a, c, g, or t
  misc_feature (6115)..(6149): n is a, c, g, or t
  misc_feature (8293)..(8308): n is a, c, g, or t
atgatttacaggaagaccatgtactcagctgcagcttctaaatccagaacgatttgcacgtcttatcaaggaagtaatgaatacattctggcctggcagagaattgattgttcaatggtatccatttgatgaaaacagaaatcacccatctgtttcatggcttaagatggtttggaaaaatctttatatacatttttcagaggatttgactttatttgatgagatgccacttatccccagaactatactagaggaaggtcagacatgtgtggaactcattagactcaggattccatcgttagtcattttagacgatgaatctgaagcacagcttccagaatttttagcagacattgtacaaaaacttggagggtttgtccttaaaaaattagatgcatctatacaacatccgcttattaaaaaatatattcattcaccattaccaagtgctgttttgcagataatggagaagatgccattgcagaaattgtgtaatcaaataacttcgctacttccaacacacaaagatgccctgaggaagttcttggctagtttaaccgatagcagtgagaaagagaaaagaattattcaagaattggcaatattcaagcgcattaaccattcttctgatcagggaatttcctcttatacaaaattgaaaggttgtaaagtcttacaccatactgccaaactcccagcagatctgcgactttctatttcagtaatagacagtagtgatgaagctactattcgtctggcaaacatgttgaaaatagaacagttaaagaccactagctgcttaaagcttgttttaaaagatattgaaaatgcattttattcacatgaagaggtaacacagcttatgttatgggtccttgagaatctatcttctcttaaaaatgagaatccaaatgtgcttgagtggttaacaccattaaaattcatccagatatcacaggaacagatggtatcagctggtgaactctttgaccctgatatagaagtactaaaggatctcttttgtaatgaagaaggaacctatttcccaccctcagtttttacctcaccagatattcttcactccttaagacagattggtttaaaaaacgaagccagtctcaaagaaaaggatgttgtgcaagtggcaaaaaaaattgaagccttacaggtcggtgcttgtcctgatcaagatgttcttctgaagaaagccaaaaccctcttactggttttaaataagaatcacacactgttgcaatcatctgaaggaaagatgacattgaagaaaataaaatgggttccagcctgcaaggaaaggcctccaaattatccaggctctttggtctggaaaggagatctctgtaatctctgtgcaccaccagatatgtgtgatgtaggccatgcaattctcattggctcctcacttcctcttgttgaaagtatccatgtaaacctggaaaaagcattagggatcttcacaaaacctagccttagtgctgtcttaaaacactttaaaattgttgttgattggtattcttcaaaaannnnnnnnnnnnnnnactactatcaattccagcatattttgcttgagatttacggattcatgcatgatcatctaaatgaagggaaagattcttttagagccttaaaatttccatgggtttggactggcaaaaagttttgtccacttgcccaggctgtgattaaaccaatccatgatcttgaccttcagccttatttgcataatgtacctaaaaccatggcaaaattccaccaactatttaaggtctgtggttcaatagaggagttgacatcagatcatatttccatggttattcagaagatatatctcaaaagtgaccaagatctcagtgaacaagaaagcaaacaaaatcttcatcttatgttgaatattatcagatggctgtatagcaatcagattccagcaagccccaacacaccagttcctatacatcatagcaaaaatccttctaaacttatcatgaagccaattcacgaatgctgttattgtgacattaaagttgatgaccttaatgacttacttgaagattctgtggaaccaatcattttggtgcatgaggacatacccatgaaaactgcagaatggctaaaagttccatgccttagtacaagactgataaatcctgaaaacatgggatttgagcagtcaggacaaagagagccacttactgtaagaattaaaaatattctggaagaatacccttcagtgtcagatatttttaaagaactacttcaaaacgctgatgatgcaaatgcaacagaatgcagtttcttgattgatatgagaagaaatatggacataagagagaatctcctagacccagggatggcagcttgtcatggacctgctttgtggtcattcaacaattctcaattctcagattcagattttgtgaacataactaggttaggagaatctttaaaaaggggagaagttgacaaagttggaaaatttggtcttggatttaattctgtgtaccatatcactgacattcccatcattatgagtcgggaattcatgataatgttcgatccaaacataaatcatatcagtaaacacattaaagacaaatccaatcctgggatcaaaattaattggagtaaacaacagaaaagacttagaaaatttcctaatcagttcaaaccatttatagatgtatttggctgtcagttacctttgactgtagaagcaccttacagctataatggaacccttttccgactgtcctttagaactcaacaggaagcaaaagtgagtgaagttagtagtacgtgctacaatacagcagatatttattctcttgtggatgaatttagtctctgtggacacaggcttatcattttcactcagagtgtaaagtcaatgtatttgaagtacttgaaaattgaggaaaccaaccccagtttagcacaagatacagtaataattaaaaaaaaatcctgctcttccaaagcattgaacacacctgtcttaagtgttttaaaagaggctgctaagctcatgaagacttgcagcagcagtaataaaaagcttcccagtgatgaaccaaagtcatcttgcattcttcagatcacagtggaagaatttcaccatgtgttcagaaggattgctgatttacagtcgccactttttagaggtccagatgatgacccagctgctctctttgaaatggctaagtctggccaatcaaaaaagccatcagatgagttgtcacagaaaacagtagagtgtaccacgtggcttctgtgtacttgcatggacacaggagaggctctgaagttttccctgagtgagagtggaagaagactaggactggttccatgtggggcagtaggagttcagctgtcagaaatccaggaccagaagtggacagtgaaaccacacattggagaggtgttttgctatttacctttacgaataaaaacaggcttgccagttcatatcaatgggtgctttgctgttacatcaaataggaaagaaatctggaaaacagatacaaaaggacgatggaataccacgttcatgagacatgttattgtgaaagcttacttacaggtactgagtgtcttacgggacctggccactagtggggagctaatggattatacttactatgcagtatggcccgatcctgatttagttcatgatgatttttctgtaatttgccaaggattttatgaagatatagctcatggaaaagggaaagaactgaccaaagtcttctctgatggatctacttgggtttccatgaagaacgtaagatttctagatgactctatacttaaaagaagagatgttggttcagcagccttcaagatatttttgaaatacctcaagaagactgggtccaaaaacctttgtgctgttgaacttccttcttcggtaaaattaggatttgaagaagctggctgcaaacagatactacttgaaaacacattttcagagaaacagtttttttctgaagtgttttttccaaatattcaagaaattgaagcagaacttagagatcctttaatgatctttgttctaaatgaaaaagttgatgagttctcgggagttcttcgtgttactccatgtattccttgttccttggaggggcatcctttggttttgccatcaagattgatccaccccgaaggacgagttgcaaagttatttgatattaaagatgggagattcccttatggttctactcaggattatctcaatcctattattttgattaaactagttcagttaggtatggcaaaagatgatattttatgggatgatannnnnnnnnnnnnnnnnnnnnnnnnnnnnnnnaataaaagtgatcatgttgctgcatgcctaagaagtagtatcttattgagtcttatcgatgagaaactaaaaataagggatcctagagcaaaggattttgctgcaaaatatcaaacaatccgcttccttccatttctgacaaaaccagcaggtttttctttggactggaaaggcaacagttttaagcctgaaaccatgtttgcagcaactgacctttatacagctgaacatcaagatatagtttgtcttttgcaaccaattctaaatgaaaattcccattcttttagaggttgtggttcagtgtcattggctgttaaagagtttttgggattactcaagaagccaacagttgatctggttataaaccaattgaaagaagtagcaaaatcagttgatgatggaattacactgtaccaggagaatatcaccaatgcttgctacaaataccttcatgaagccttgatgcaaaatgaaatcactaagatgtcaattattgataagttaaaaccctttagcttcattctagttgagaatgcatatgttgactcagaaaaggtttcttttcatttaaattttgaggcggcaccatacctttatcagttgcctaataagtataaaaataatttccgcgaactttttgaaaccgtgggtgtgaggcagtcatgcactgttgaagattttgctcttgttttggaatctattgatcaagaaagaggaacaaagcaaataacagaagagaattttcagctttgccgacgaataatcagtgaaggaatatggagtctcattagagaaaagaaacaagaattttgtgagaaaaattatggcaagatattattgccagatactaatcttatgcttctccctgctaaatcgttatgctacaatgattgcccttggataaaagtaaaggataccactgtaaaatattgtcatgctgacatacccagggaagtagcagtaaaactaggagcagtcccaaagcgacacaaagccttagaaagatatgcatccaatgtctgttttacaacacttggcacagaatttgggcagaaagaaaaattgaccagcagaattaagagcatccttaatgcatatccttctgaaaaggaaatgttgaaagagcttcttcaaaatgctgatgatgcaaaggcgacagaaatctgttttgtgtttgatcctagacagcatccagttgatagaatatttgatgataagtgggccccattgcaagggccagcactttgtgtgtacaacaaccagccatttacagaagatgatgttagaggaattcagaatcttggaaaaggcacgaaagagggaaatccttataaaactggacagtatggaataggattcaattctgtgtatcatatcacagactgcccatcttttatttctggcaatgacatcctgtgtatttttgatcctcatgccagatatgcaccaggggccacatccattagtcccggacgcatgtttagagatttggatgcagattttaggacacagttctcagatgttctggatctttatctgggaacccattttaaactggataattgcacaatgttcagatttcctcttcgtaatgcagaaatggcaaaagtttcggaaatttcgtctgttccagcatcagacagaatggtccagaatcttttggacaaactgcgctcagatggggcagaacttctaatgtttcttaatcacatggaaaaaatttctatttgtgaaatagataagagtactggagctctaaatgtgctgtannnnnnnnnnnnnnnnnnnnnnnnnnnnnnnnnnntgaaaaggaaacaatttcatgcatctgtaattgatagtgttactaaaaagaggcagctcaaagacataccagttcaacaaataacctatactatggatactgaggactctgaaggaaatcttactacgtggctaatttgtaatagatcaggcttttcaagtatggagaaagtatctaaaagtgtcatatcagctcacaagaaccaagatattactcttttcccacgtggtggagtagctgcctgcattactcacaactataaaaaaccccatagggccttctgttttttgcctctttctttggagactgggctgccatttcatgtgaatggccactttgcactggattcagccagaaggaacctgtggcgtgatgataatggagttggtgttcgaagtgactggaataacagtttaatgacagcattaatagctcctgcatatgttgaattgctaatacagttaaaaaaacggtatttccctggttctgatccaacattatcagtgttacagaacacccctattcatgttgtaaaggacactttaaagaagtttttatcgtttttcccagttaaccgtcttgatctacagccagatttatattgtctagtgaaagcactttacaattgcattcacgaagacatgaaacgtctttttacctggttgtgccgggctccaaatattgatggctctgacttgcactctgcagttataattacttggatcaatatgtctacttctaataaaactagaccattttttgacaatttactacaggatgaattacaacaccttaaaaatgcagattataatatcaccacacgcaaaacagtagcagagaatgtctataggctgaaacatctccttttagaaattggtttcaacttggtttataactgtgatgaaactgctaatctttaccactgtcttatagatgcagatattcctgttagttatgtgacccctgctgatatcagatcttttttaatgacattttcctctcctgacactaattgccatattgggaagctgccttgtcgtctgcagcagactaatctaaaactttttcatagtttaaaacttttagttgattattgttttaaagatgcagaagaaaatgagattgaagttgagggattgccccttctcatcacactggacagtgttttgcaaacttttgatgcaaaacgacccaagtttctaacaacatatcatgaattgattccatcccgcaaagacttgtttatgaatacattatatttgaaatatagtaatattttattgaactgtaaagttgcaaaagtgtttgacatttccagctttgctgatttgttatcctctgtgttgcctcgagaatataagaccaaaagttgcacaaagtggaaagacaattttgcaagtgagtcttggcttaagaatgcatggcattttattagtgaatctgtaagtgtgaaagaagatcaggaagaaacaaaaccaacatttgacattgttgttgatactctaaaagactgggcattgcttccaggaacaaagtttactgtttcagccaaccagcttgtggttcctgaaggagatgttctgcttcctctcagccttatgcacattgcagtttttccaaatgcccagagtgataaagtttttcatgctctaatgaaagccggctgtattcagcttgctttgaacaaaatctgttccaaagacagtgcatttgttcctttgttgtcatgtcacacagcaaatatagagagccccacaagcatcttgaaggctctacattatatggtccaaacttcaacatttagagcagaaaaattagtagaaaatgattttgaggcacttttgatgtatttcaactgcaatttgaatcatttgatgtcccaagatgatataaaaattctaaagtcacttccgtgctataaatccatcagtggccgctatgtaagcattggaaaatttggaacatgctacgtacttacaaaaagtatcccttcagctgaagtggagaaatggacacaatcatcatcatctgcatttcttgaagaaaaaatacacttaaaagaactatatgaggtgattggttgtgtacctgtagatgatcttgaggtatatttgaaacacctcttaccaaaaattgaaaatctnnnnnnnnnnnnnnnnttagagcacttgatctaccttaagaatagattatcaagtgctgaggaattatcagagattaaggaacaactttttgaaaaactggaaagtttattgataatccatgatgctaacagtagactaaagcaagcaaagcatttctatgatagaactgtgagagtttttgaagttatgcttcctgaaaaattgtttattcctaatgatttctttaagaaattggaacaacttataaaacccaaaaatcatgttacatttatgacatcctgggtggaattcttaagaaatattggactaaaatacatactttctcagcagcagttgttacagtttgctaaggaaatcagtgtgagggctaatacagaaaactggtccaaagaaacattgcaaaatacagttgatatccttctgcatcatatattccaagaacgaatggatttgttatctggaaattttctgaaagaactatctttaataccattcttatgtcctgagcgggcccccgcggaattcattagatttcatcctcaatatcaagaggtaaatggaacacttcctcttataaagttcaatggagcacaggtaaatccaaaattcaagcaatgtgatgtactccagctgttatggacatcctgccctattcttccagagaaagctacacccttaagcattaaagaacaagaaggtagtgaccttggtccacaagaacagcttgaacaagttttaaatatgcttaatgttaacctggatcctcctcttgataaggtaatcaataactgcagaaacatatgcaacataacgacgttggatgaagaaatggtaaaaactagagcaaaagtcttaaggagcatatatgaattcctcagtgcagaaaaaagggaatttcgttttcagttgcgaggggttgcttttgtgatggtagaagatggttggaaacttctgaagcctgaggaggtagtcataaacctagaatatgaatctgattttaaaccttatttgtacaagctacctttagaacttggcacatttcaccagttgttcaaacacttaggtactgaagatattatttcaactaagcaatatgttgaagtgttgagccgcatatttaaaaattctgagggcaaacaattagatcctaatgaaatgcgtacagttaagagagtagtttctggtctgttcaggagtctacagaatgattcagtcaaggtgaggagtgatctcgagaatgtacgagaccttgcgctttacctcccaagccaggatggtagattggtaaagtcaagcatcttagtgtttgacgatgcgccacattataaaagtagaatccaggggaatattggtgtgcaaatgttagttgatctcagccagtgctacttagggaaagaccatggatttcacactaagttgataatgctctttcctcaaaaacttagacctcgattattgagcagtatacttgaagaacaattagatgaagagactcccaaagtttgtcagtttggagcgttgtgttctcttcaaggaagattgcagttactcttgtcttctgaacagttcattacaggactgattagaattatgaagcatgaaaatgataatgcttttctggccaatgaagaaaaagccataagactttgcaaagccctaagagaaggattgaaagtatcctgctttgaaaagcttcaaacaacattaagagttaaaggttttaatcctattccccacagcagaagtgaaacttttgcttttttgaagcgatttggtaatgcagtcatcttgctctacattcaacattcagacagtaaagacattaatttcctgttagcactggcaatgactcttaaatcagcaactgacaatttgatttctgacacttcatatttaattgctatgctaggatgcaatgatatttacaggattggtgagaaacttgacagtttaggagtgaaatatgactcttcggagccatcaaaactggaacttccaatgcctggcacaccaattcctgctgaaattcattacactctgcttatggacccaatgaatgttttttacccgggagaatatgttgggtaccttgttgatgctgaaggtggtgatatctatggatcataccagccaacatacacatatgcaattattgtacaagaagttgaaagagaagatgctgacaattctagttttctaggaaagatatatcagatagatattggttatagtgaatataaaatagttagctctcttgatctgtataagttttcaagacctgaggaaagctctcaaagcagggacagtgctccttctacaccaaccagccccactgagttcctcacccctggcctgagaagcattcctcctcttttctctggtagagagagccacaagacttcttccaaacatcagtcccccaaaaagcttaaggttaattctttaccagaaatcttaaaagaagtgacatctgtggtggagcaagcatggaagcttccagaatcggaacgaaaaaagattattaggcggttgtatttgaaatggcatcctgacaaaaatccagagaaccatgacattgccaatgaagtttttaaacatttgcagaatgaaatcaacagattagaaaaacaggcttttctagatcaaaatgcagacagggcctccagacgaacattttcaacctcagcatcccgatttcagtcagacaaatactcatttcagagattctatacttcatggaatcaagaagcaacgagccataaatctgaaagacagcaacagaacaaagaaaaatgccccccttcagccggacagacttactctcaaaggttctttgttcctcccactttcaagtcggttggcaatccagtggaagcacgcagatggctaagacaagccagagcaaacttctcagctgccaggaatgaccttcataaaaatgccaatgagtgggtgtgctttaaatgttacctttctaccaagttagctttgattgcagctgactatgctgtgaggggaaagtctgataaagatgtaaaaccaactgcacttgctcagaaaatagaggaatatagtcagcaacttgaaggactgacaaatgatgttcacacattggaagcttatggtgtagacagtttaaaaacaagataccctgatttgcttccctttcctcagatcccaaatgacaggttcacttctgaggttgctatgagggtgatggaatgtactgcctgtatcataataaaacttgaaaattttatgcaacaaaaagtgtgaagatatttaacgaaaaaaaaggtagatcttgaatgtgttgtagcacgaataaattgctgtacttcattaagcttcattgccaattagctaggaattgttaagcacattgcagattgttcttggagaattctggagttgttatgaacatgaataccaacggaaaaccttaactgaatctaaaagaaaactattttgaagatggtggtgagctgcaaaatagctggatggatttgaatgattgggatgatacatcattgaactgcactttatataaccaaagcttagcagtttgttagataagagtctatgtatgtctctggttaggatgaagttaattttatgtttttaacatggtatttttgaaggagctaatgaaacactggacatataattggtttaaacataaggggaattaagtctttgtagtctgtcatttttttaagtggatcctcttggatgcgttattttctcatcagctggctctgatcatgaatttgttgtaattttatgttgtactcagtgcatttaagaaatggtagagtattttaatcctattacttgactaagagtgtgaaggtagtactttttagagtgcactgagtgcactttacatctttatttaaatttttttttaacatcttatgtttacaggcttcctgtttgatgaagatagcaacggaaaactcaaaatggtggcagttcttattaccagttgttagtattgtttctggaaactgcttgccaagacaacatttattaactgttagaacacttgctttatgtttgtgtgtacatattttccacaaatgttataatttatatagtgtggttgaacaggatgcaatcttttgttgtctaaaggtgctgcagttaaaaaaaaaacaaccttttctttcaatatggcatgtagtggagtttttttaactttaaaaacatcaaaaattgttaaaatcattgtgttatctagtagtttataattatcggcttatatttccccatgaatgatcagaactgacatttaattcatgtttgtctcgccatgcttctttactttaacatatttcttttgcagaatgtaaaaggtaatgataattagtttatataagtgtactggctgtaaatgatgctaaatatactttatgcaattaagggcttacagaacatgttgaaactttttttacttttattgggaataaggaatgtttgcacctccacattttattgcttctggatgtgaaatcatgtaattatttctgctgttatataaagtgccatacttttaataaaggaaaatgtacatatgaaataaaaaaaaaaaaaaaa

SEQ ID NO: 6394 - DNA, 3071 bp, Homo sapiens
gaattcctgcgatcgcgccgcggcgcagcagcacgtgggttctgagaagcgcgtggctccggcgacaagaccccaagcaccctcggccggtggcccgggcccgaccaccccagctgcgcgtcgttactggccacaagtttgctctgggccagccaagttggcaacttggaagcttctcccgggctctggaggagggtccctgcttcttcctacagccgttccgggcatggccgggctgggggcgtcgctccacgtctggggttggctaatgctcggcagctgcctcctggccagagcccagctggattctgatggcaccattactatagaggagcagattgtccttgtgctgaaagcgaaagtacaatgtgaactcaacatcacagctcaactccaggagggagaaggtaattgtttccctgaatgggatggactcatttgttggcccagaggaacagtggggaaaatatcggctgttccatgccctccttatatttatgacttcaaccataaaggagttgctttccgacactgtaaccccaatggaacatgggattttatgcacagcttaaataaaacatgggccaattattcagactgccttcgctttctgcagccagatatcagcataggaaagcaagaattctttgaacgcctctatgtaatgtataccgttggctactccatctcttttggttccttggctgtggctattctcatcattggttacttcagacgattgcattgcactaggaactatatccacatgcacttatttgtgtctttcatgctgagagctacaagcatctttgtcaaagacagagtagtccatgctcacataggagtaaaggagctggagtccctaataatgcaggatgacccacaaaattccattgaggcaacttctgtggacaaatcacaatatatcgggtgcaagattgctgttgtgatgtttatttacttcctggctacaaattattattggatcctggtggaaggtctctacctgcataatctcatctttgtggctttcttttcggacaccaaatacctgtggggcttcatcttgataggctgggggtttccagcagcatttgttgcagcatgggctgtggcacgagcaactctggctgatgcgaggtgctgggaacttagtgctggagacatcaagtggatttatcaagcaccgatcttagcagctattgggctgaattttattctgtttctgaatacggttagagttctagctaccaaaatctgggagaccaatgcagttgggcatgacacaaggaagcaatacaggaaactggccaaatcgacactggtcctggtcctagtctttggagtgcattacatcgtgttcgtatgcctgcctcactccttcactgggctcgggtgggagatccgcatgcactgtgagctcttcttcaactcctttcagggtttctttgtgtctatcatctactgctactgcaatggagaggttcaggcagaggtgaagaagatgtggagtcggtggaatctctccgtggactggaaaaggacaccgccatgtggcagccgcagatgcggctcagtgctcaccaccgtgacgcacagcaccagcagccagtcacaggtggcggccagcacacgcatggtgcttatctctggcaaagctgccaagatcgccagcagacagcctgacagccacatcactttacctggctatgtctggagtaactcagagcaggactgcctgccacactctttccacgaggagaccaaggaagatagtgggaggcagggagatgatattctaatggagaagccttccaggcctatggaatctaacccagacactgaaggatgccaaggagaaactgaggatgttctctgaatggacatttgtggctgactttcatgggctggtccaatggctggttgtgtgagagggcttggctgatactcctatgcttgagttcaaaggctgaaaattcagttaaggtgttacttaataatagtttttaggctccatgaattggctcctgtaaatactaacgacatgaaaatgcaagtgtcaatggagtagtttattaccttctattggcatcaagttttcctctaaattaatgtatggtatttgctctgtgattgttcatttttttctgctacttttgggtagaaaaaagattcaattgcttggctgtagctttctctcatatatatcaccctaaatataatgaagatcttttagtgtgtatcattttccttttagaaactagtattctcttatttcttactttaatgtacttctatcactgcatttattttgcctgtgcataggagcaattaggatctaaaaaaatatatgggaagataaaagatctaagaacaagtacttgctggaaaattagttggctggacattgataaaataatgcatttataacaattacatgtgtttttgggaacaaggaaaatttctcaaaaaagaatatttcacacatcccttcttttgaatggcctctttgtgaccagccagacctcaggtcttcactctttcttctttgtaaaccatgtcatgtggaaagatttcctcagttagtgagcttgtgtctgcaaattgattttgtttgtaatgtattttgatagcaaatcatgctgcatctatatctttttcttgtttgagctgttactacattgtacatggcatgtgggatcaattaaaaatttgttttaaaaatcctgatttccaggaaatgttcttagaacttggactactgattaataattgactgtgccttgggcaaaccggggaaaacaactgggggcaacactgggggaaattgttggccttcttgggggggggggcctctccaaaagaaacaccgaaaaaggtggaaatcacccacggccccggttttctttttttcgaccataggggggcccactgggagccacttcccatataactccgagaggcgttgcccccttgcccttaggttaaactttgggtgtaaaaaaaactggaccaggtttgggccccttgggtagtgaaaacacctagatccgggggggagggcgccaggg

SEQ ID NO: 6395 - DNA, 2425 bp, Homo sapiens
atgtggtggagagttctcagcttgctggcatggttccccttgcaagaggcctctctgactaaccacacagaaaccatcaccgtggaggaaggccagacgctcactctaaagtgtgtcacttctctgaggaagaactcctccctccagtggctgaccccctcagggttcaccatttttttaaatgagtatcctgctttaaaaaattccaaataccagcttcttcatcactcggccaatcagctctccatcactgtgcctaacgtaaccctgcaagatgaaggcgtgtacaagtgcttacattacagcgactctgtaagcacaaaggaagtgaaagtgattgtgctggcaactcctttcaagccaatcctggaagcttcagttatcagaaagcaaaatggagaagaacatgttgtactcatgtgctccaccatgagaagcaagccccctccgcagataacctggctacttgggaatagcatggaagtgtccggtggaacgctccatgaatttgaaactgatgggaagaaatgtaatactaccagcactctcataatccacacttatggcaaaaattcaacggtggactgcattatccgacacagaggcctgcaagggagaaaactagtagcacccttccggtttgaagatttggttactgatgaagagacagcttcagatgctctggagagaaactctctatcctctcaagacccacagcagcccaccagtactgtctcagtaacggaagattctagtacatcggagattgacaaggaagagaaagaacaaaccactcaagatcctgacttgaccaccgaagcaaatcctcagtatttaggactggcaagaaagaaaagtggcatcctgctgctcacgctggtgtccttcctcattttcatactcttcatcatagtccagctcttcatcatgaagctgaggaaagcacatgtgatatggaagagagaaaacgaagtttcagaacacacactagaaagttacagatcaaggtcaaataatgaagaaacatcatctgaagagaaaaatggccaatcttcccaccctatgcgttgcatgaactacatcacaaagttgtactcagaagcaaaaacaaagaggaaggaaaatgtacaacattcaaaattagaagaaaagcacatccaagtaccagagagtattgtgtagtgctctctgcaatggaacatgtgatttcagggttgccgcagtgtcacctcagtggaccagcctgggggaaggagcttaactgctgagacattaataatgacctcttagtgcaatgcaagatggtgtcctcggataatgatctgccccggagctagggcagcaacatgaggaccaaaccatgcacataaagcttgtagtttaaaaaagaaaagcaaaaaaataattatgcctgacactacttcagagcaggaggattctacgaagccttggggatcagggtcagtgtgagcagctaacatcctacctcaaatggaacaggattttttgatgctttgctctaatggaactgttttaaaaatttttttttctttttaatattttcttctgggcacaaaataaagaaattttggatgcacagctcctaaagatctctgatcctaagaagttacttctggccaggcgcggtggctcatgcctgtaatcctagcactttgggaggctgaggtaggcagatcacttgaggtcaggagttggagaccagcctggccaacatagtgaaaccccgtctctactaaaaatgcaaaaattagccaggcgtagtggtgcgcacctgtagtctcagatacttgggaggctgagggtggagaatcgcttgaacctgggaggtggagattgcagtgagtcaagatctcaccactgaactccagcctgggcgacagagggagactctgtctcaaaaaaaaagaagttacttccaagacagacttttaacatgtaaccagcacaaagcaatgtcagggaggagtgatacatgacaataaatgagtcagatgagcaagaaggccccagaacccatgccccaaggcacaaagaggagctcagggtaggcccaaagattcgaattccttagattactaaatcacatgagcggaccttgtctgtcagataagatttttacctggaaattccatgaccaatacatgtgcaaaagaaaatgatgggttgaatttactgattattgacctaatggatggctttttaaaatgttttaataaaaagcagaatagatgtttgtttttctagtggttataccaagctatacttcctgttttcacgtgtgaaagtaacatgggacatgcctttcttttccgatcagtttatttaagctatacagcaaactttggcatttatgtggagcatttctcattgttggaatctgaataaaccaattacaaaataaaaa

SEQ ID NO: 6396 - DNA, 1393 bp, Homo sapiens
gttgctactgctgaattcggccaaagaggcctatgcttctctgaagacttgcagcaaggcttgctgaggctcacagaagatagccccagtgttttggagtggttttgaatgtgattctgagatcagactgactgagctggaatcctggctttatatcttaccagctacacaaccttggagtcttagaaattttttcttttcaataagcagtcatccttactttccctcaagatgacaaacagttcgttcttctgcccagtttataaagatctggagccattcacgtattttttttatttagttttccttgttggaattattggaagttgttttgcaacctgggcttttatacagaagaatacgaatcacaggtgtgtgagcatctacttaattaatttgcttacagccgatttcctgcttactctggcattaccagtgaaaattgttgttgacttgggtgtggcaccttggaagctgaagatattccactgccaagtaacagcctgcctcatctatatcaatatgtatttatcaattatcttcttagcatttgtcagcattgaccgctgtcttcagctgacacacagctgcaagatctaccgaatacaagaacccggatttgccaaaatgatatcaaccgttgtgtggctaatggtccttcttataatggtgccaaatatgatgattcccatcaaagacatcaaggaaaagtcaaatgtgggttgtatggagtttaaaaaggaatttggaagaaattggcatttgctgacaaatttcatatgtgtagcaatatttttaaatttctcagccatcattttaatatccaattgccttgtaattcgacagctctacagaaacaaagataatgaaaattacccaaatgtgaaaaaggctctcatcaacatacttttagtgaccacgggctacatcatatgctttgttccttaccacattgtccgaatcccgtataccctcagccagacagaagtcataactggatggctccaacagggatttttttcttcaaagccaaagaggctacactgctcctggctgtgtcgaacctgtgctttgatcctatcctgtactatcacctctcaaaagcattccgctcaaaggtcactgagacttttgcctcacctaaagagaccaaggctcagaaagaaaaattaagatgtgaaaataatgcataaaagacaggattttttgtgctaccaattctggccttactggaccataaagttaattatagctttgaaagataaaaaaaaaaaaaaagcggccgcttcttctcagcccacaatctggcaccattaaatggcccaatataagagggactcggttttataattaggttgggagcctttttcttaaatgtactgcaccacaatct

SEQ ID NO: 6397 - DNA, 2360 bp, Homo sapiens
cttaggatattctcatgtttctgagggattacagcctgggaggattccaccgatcttcacttctagcaggttttttaaacgtgacccttggctgtatttcccatcttcacagttcaagcaccccaaacctgccctttctcccctgcagactggcaggtgggattggctcccaggtcatttcctctctctctctttctcccaagcctttctccctccacaggaaacagatttttcagggccttccatgcctgccactttgtccgtctctttttttttttttaaagtaatattttttagaaatacatgtaaaataccaagaaataatgtctgcgcctctgccacctctctctcatctcttatttcataaagctggctctttatgttgctttacatgccttaatatatgttttatggagattatacatattatagatctatatatgtaatatatttgtttggatgtctgatcttttcctacagttcctgcccaggcctgtttttctctcccttattttccacatcattcctagcatatcaagaccataccccttgcctttttgatccaaagaaggggagaggaaagacttattttaagacatctattttatgcttttgtttaaaaaaagcaaatctattttcaaattgtgcaatgtctgaatggaattggcaaatgaggtgaggagatggggtaactgcctttaggtcccaaccctgtgcctgtccctctgccacagtggcttccttccatcctattccccagtcacgaaagggctggtccccagagctcacccagaaagcatcttgccgggggcagggcattccctcggaagtcctggcctaaggattttattacactgtctgctcctgatgaccctctgcggttgtcaggcgtgaatcctctggaaggaactgtttgcagttgtatgcacaaaggagacccatgcaggcatgcaccccagatgggctgctagactacccctcttcatcagcctgctggaaagagcagacagcgtaacagcagcctatgccaaacagcactaaggatgtcagtgtacgagacggtgcgaagcccagaggaggcggcttgggatcctctgggccatccctggccctgtagcacagacacatacaagttccttggacttgtcacactccttttcacttgatccctctctggcctgggtcacatttatgacatcccccctctgcaacctttctctctgggggctgtaccaaaggcatggtacctcagtctggtatccagactgtgaaatcagcctctgggccaaggagggtcctacagacaaggtggcatctcaacctcacccaagaaacccccgggactttaccccagcaggctgccactggggcaccgaactaagccagctcagccttccaagctgcttagcctttgtcaaccatcaaagtggggaaagggtctctggccttgcaaggatttgggcaggatggaagtctttgtctaggtctgaaatcaagggcttgggaatctagagcagagctcctggccagcgtttgaagcctggcctcccacctggggcatttactgacaccctgtcgccagcctagaacatcctgctctgaatgaacagagcccagatgggggtccagagctaagtgacccacctggggaagctctgattattcatccagggccttctcaatgagcacattacctccatgatcaataaccaagaggctgcagtcaaatactgctactgtcactttgaagattttctaagggcacaagtggcacacttgctctccggcctttgggagaggcatgttcttgggcagggctggctacggcaagagggaaccaattcctttcccctttaggcaccctctacctggcagctcttaaaactaagaaaaaatatgatatacacacacattatatatatatatatatatacacacacacacacacacacacgtatatctatttatgcacatattggggccaatttgatttgctagtattagacaataaactgtacaaggaaatttattatctcagtgtctttatttagcataaaagtggccttagaagaagggtgaaggttagatagatggaatctctgtcaggggacaaacagctgtagcatccccttagcatctttctagccaatgagccccctccccaggaggagggatggcctgactgaaacaggtgagagtttgcttccccctttcagcagcattctttttagatttaggtactgaagaatcccagtgagttctgcatttgtatcttgcaagtttgtataaacccaatacaggaaataaaatgaatggtttgtaaaaaaaaaaaaaaaaaaaaaaaaaaaaaaaaaaaacga

SEQ ID NO: 6398 - DNA, 3007 bp, Homo sapiens
  misc_feature (1851)..(1862): n is a, c, g, or t
agcggagtccggcgggggcgccgcggagagcggagggcgccgggctgcggaacgcgaagcggagggcgcgggaccctgcacgccgcccgcgggcccatgtgagcgccatgcggcgccgcgcagcccggggacccggcccgccgcccccagggcccggactctcgcggttgccgctgctgccgctgccgctgctgctgctgctggcgctggggacccgcgggggctgcgccgcgcccgcacccgcgccgcgcgccgaggacctcagcctgggagtggagtggctaagcaggttcggttacctgcccccggctgaccccacaacagggcagctgcagacgcaagaggagctgtctaaggccatcacagccatgcagcagtttggtggcctggaggccaccggcatcctggacgaggccaccctggccctgatgaaaaccccacgctgctccctgccagacctccctgtcctgacccaggctcgcaggagacgccaggctccagcccccaccaagtggaacaagaggaacctgtcgtggagggtccggacgttcccacgggactcaccactggggcacgacacggtgcgtgcactcatgtactacgccctcaaggtctggagcgacattgcgcccctgaacttccacgaggtggcgggcagcaccgccgacatccagatcgacttctccaaggccgaccataacgacggctaccccttcgacggccccggcggcaccgtggcccacgccttcttccccggccaccaccacaccgccggggacacccactttgacgatgacgaggcctggaccttccgctcctcggatgcccacgggatggacctgtttgcagtggctgtccacgagtttggccacgccattgggttaagccatgtggccgctgcacactccatcatgcggccgtactaccagggcccggtgggtgacccgctgcgctacgggctcccctacgaggacaaggtgcgcgtctggcagctgtacggtgtgcgggagtctgtgtctcccacggcgcagcccgaggagcctcccctgctgccggagcccccagacaaccggtccagcgccccgcccaggaaggacgtgccccacagatgcagcactcactttgacgcggtggcccagatccgcggtgaagctttcttcttcaaaggcaagtacttctggcggctgacgcgggaccggcacctggtgtccctgcagccggcacagatgcaccgcttctggcggggcctgccgctgcacctggacagcgtggacgccgtgtacgagcgcaccagcgaccacaagatcgtcttctttaaaggagacaggtactgggtgttcaaggacaataacgtagaggaaggatacccgcgccccgtctccgacttcagcctcccgcctggcggcatcgacgctgccttctcctgggcccacaatgacaggacttatttctttaaggaccagctgtactggcgctacgatgaccacacgaggcacatggaccccggctaccccgcccagagccccctgtggaggggtgtccccagcacgctggacgacgccatgcgctggtccgacggtgcctcctacttcttccgtggccaggagtactggaaagtgctggatggcgagctggaggtggcacccgggtacccacagtccacggcccgggactggctggtgtgtggagactcacaggccgatggatctgtggctgcgggcgtggacgcggcagaggggccccgcgcccctccaggacaacatgaccagagccgctcggaggacggttacgaggtctgctcatgcacctctggggcatcctctcccccgggggccccaggcccactggtgnnnnnnnnnnnntgctgctgactgacgccaatgtcaccaggcgccctgtggacagcggcccaggccctgacgctatgacacacagcgcgagcccatgagaggacagaggcggtgggacagcctggccacagagggcaaggactgtgccggagtccctgggggaggtgctggcgcgggatgaggacgggccaccctggcaccggaaggccagcagagggcacggcccgccagggctgggcaggctcaggtggcaaggacggagctgtcccctagtgagggactgtgttgactgacgagccgaggggtggccgctccagaagggtgcccagtcaggccgcaccgccgccagcctcctccggccctggagggagcatctcgggctgggggcccacccctctctgtgccggcgccaccaaccccacccacactgctgcctggtgctcccgccggcccacagggcctccgtccccaggtccccagtggggcagccctccccacagacgagccccccacatggtgccgcggcacgtcccccctgtgacgcgttccagaccaacatgacctctccctgctttgtaaaaaaaaaaaaaaaaaaaaaaaaaaaaacaaaaaaaaacaaaagaaacaacaaacagaaacaacaaaagacaaacaagaaaaaaaaaacaaacagcgcgaggcgcgcgcgcgctctaagaaacgggctctccgatgggggcgacacacaagatagacgcacgccccccacgaggtatttattgcacacaaaagcgtgccccaaaaagagagagagcgacgaaaatatataaaaaggcgacgaaggcggagggcagagcggatatataccacaacacgctgacagaacgcgggagaaacacacagcggcaagacaggaggagaacactctgagtgcagcgaaaagcacaccaccaatacgcggcgggcgagcgccacacacaccaggcggagcgccacaccacgccagccacgagcggagcgagcagaaagaaacgcccccacccagaggcagcaacagacagacaacgaccaaggcgcggaagaagcaggagggaccacaagacagcagcgaacaggcgcgccgcaggacaagcgcaaagttgggagcgcacggaacaagactaacgcgcgcacgacct

SEQ ID NO: 6399 - DNA, 1141 bp, Homo sapiens
ggtccgcgtctgcggctgcgttccccgaaagacgaggctgcgcccggattccggtccgcaggagaccgaagggcacagctccccgcgccgcgcacgccgcccgagcccggagtgcggacacccccgggatgcttgcgccccagaggacccgcgccccaagcccccgcgccgcccccaggcccacccggagcatgctgcctgcagccatgaagggcctcggcctggcgctgctggccgtcctgctgtgctcggcgcccgctcatggcctgtggtgccaggactgcaccctgaccaccaactccagccattgcaccccaaagcagtgccagccgtccgacacggtgtgtgccagtgtccgaatcaccgatcccagcagcagcaggaaggatcactcggtgaacaagatgtgtgcctcctcctgtgacttcgttaagcgacactttttctcagactatctgatggggtttattaactctgggatcttaaaggtcgacgtggactgctgcgagaaggatttgtgcaatggggcggcaggggcagggcacagcccctgggccctggccggggggctcctgctcagcctggggcctgccctcctctgggctgggccctgatgtctcctccttcccacggggcttctgagcttgctcccctgagcctgtggctgccctctccccagcctggcgtggctggggctgggggcagccttggcccagctccgtggctgtggcctgtggctctcactcctcccccgacgtgaagcctccctgtctctccgccagctctgagtcccaggcagctggacatctccaggaaaccaggccatctgggcaggaggcctggggatgagggtggggggggacccccaggtcccggaggggaagtgaagcaacagcccagctggaagggcgtcttctgcggagaaataaagtcacttttgagtcctgaaaaaaaaaaaaaaaaaaaaaaaaaaaaaaaaaaaaaaaaaaaaaaaaaaaaaaaaaaaaaaaaaaagatacccccggaggagcgccaccagatgagggaccgacaacagtgttgctaccaggggcgccctatagacgaggagcaatacagaggaagaggaggacacggcagacaagagggacagcagaaaccg

SEQ ID NO: 6400 - DNA, 5656 bp, Homo sapiens
  misc_feature (2834)..(2848): n is a, c, g, or t
agaccgggtgggaccggaccgcggtttgagtccaagcccagcggtgtttgcggcgggtccggggcctggaagcgcgggggcggcgccgagaacgaaactggaaaatggccttcattggaaaagccccagtcctcggggagcagatcccccatctctggcagtgcagtgtgcctgggagctgtctggaacattccgcaacggtcactcctctgccctgcattggccttgaccacatgacccagaggtgcagggagaagcctcccttggatgcttggagtgacttcagctgctgagagtgtctaaggagagccgggaacaccgcacgcttcctgcagatggcggggcagacctgtgtgcaagagtgcctgaaggggatctcccgtggcgctacctggtccagggaggtcacagagagctcctccaccctgagcacagggggtcccaccaaggacaaggacaagattcagcaccgtcgcacacagaacagctacctggagccacaggtcactttccaaaaagggagtttccaggccagaagccatccctgcagcattgtctttgtgctccaagagaagccctggcacacacttctgctcagatggaaccactgttccctcagtgtccttgtcagtaccagctggtgactttcctactcaaacccttccctcactctctgcctcattttctcaaggtgccgtgtttgcctgaaaggacattggcagccagcaggggcggcggctggtcctctagatgggcacgaatgccattggcaggcaatggggcagactccatggaaagatgcttctcttcctcaaggtatgcactcagcggggagacctcattgtcaagttcagagttacgctgcagactgcacagcacctcgcctgcttctagggcctgctccggtcagcccaggacccaccacagcaggaccccccatcctgtgctcacccggggcttgtccatggcactggaaactccttcctgttcctgatccccctctgggcgaggggtgggcagggacatgtggctcgtgccgaggtctaatactgtgttcccagcatggaagcaggtggggacacttcctgtggcatgcaggattccgtgtagaaagctgtgactgtcacccctcctccccactcagttttgttagtggacctttccctggcccttctctccttggccccctcttggcaggagagaggaggagaggatctcactttccccctgtaccagccacaccctcggtctgcggggttcccagcagctggccagggatgctccacacctggaggtcaagtaaccgtcccctcactctgggcatcggtgccctctctggggttggaacaggaaagaaagccaagacctgtatgtgggacttgagttgagactcaattctgtagagtcaggggtgaggaggagccaggcctcctgtgtgctctccataccccagagccgggtgcccagttccatgggtcctgatggacagaagggaagaacgggggggctgctgcaccgtgggtggtaatgcagtgggagccacctccagctgaatgcccagggactcctggggctgctggccccgggtcccagcagtgggtcctgtttcttctttactcttggaatgcaggatctgccacaccaaaacgtcccctccacatttggtgaaataggaagctccatggcatgtctccatctttcaaggtgactgagaggtttattttcataggagcctcagtggccttgtccgtacccacctctgcacgtggttgcagaaagtgaaggattgtcagggagcagggcagacatttggtttatctgtgtcattggtcaaagttttgtttttcctccagaagaaaaaggcttgtgaacatgccaccgtattcttcattccttcttttggaaatgtatgaagaacgggtggcattttggagttattggcctgtgaacagctggcccagaggaagggttagatgtgggtgggtgtggccgcctctgcccctccccagcgcaggtgtgcgtgggcagcccaggcaggcgctcaggaagggtgaggtggagccctgcacgctctgagcacaaagtcctgggatcccttaaacccaagcactgccttgacagcagccagcatggctgatagaagagacacagaagtccagctgatgccagacagagggcgtcactagagagccgtgctaggtgggggtcattcaagttgtcttggcgtatgcagacgttgcttctagagagtcagaagctctatatgcgtagtgttggagcagaatttcgggatagtgatggcaagcctcctcccaagccagctggggagtatggggagggggtggccggaggaacctggcatccccgggttaggaccacagaggtggctctgcctgcagctgggcctctgcctcatcctgactccccctgctttggccatggctcttcttgaccttcctcttctcagtgcaggaggaccctgaatcaaatgcctcatcctggtttgcattttaccctcggatgaagcttgtggcgaacccctggactctgtgtctcctgagtctctgcagacctcgggtcctggacccagagactcttctccctgggacaggaggcactggggtgggtggacaggggtggcctggggcacagtagctgacggggggacttcctagttttctgggcctttccaactctgagtgtgaccttcctattcttgatcacagcccccaacttcggagcctgctagagcctgcagaatgtggcttcatcctcttcctctgtgggaaaaggcggggcctggcagtcccgccaatcttgtatatttgctcccnnnnnnnnnnnnnnntacattcttgggtggtgaataggttctctccttgccttcactctagaaaagtcccctgttttgtgatgtaggatgtggtcaatgactgactcgtccctttggaccatagacgcagctctgatttctggtgttcctgggctctgcacacagcaggagccactctgggctctgagaggtgcatcttctggctcactttcttcttgttggctcttctccctgcgtcttctgccactgccctgttctgggtgggaggctgtcacactgtggtggagggtcccctctcctgcctcccctctttgatccttttctgtgagggtctgctggggtcctgtgtgtcgtgcattgttggtagattcctgtcgtgcttgctgtcctccccattctaagggacctctgattgcctgtgagcagtttacagggtcctctcctggccccttcacccgaggaattcccgcaacgcatgagtttgtgaggggcggatcctgggaggatgtgacgtcaggtgagaagggagggcccgtcctagtccggtgggctcctctaacaaagtgcattagcctggggagttactgacgctcgaaatatgtcgtcaaagttctgaaggctgagaagtccgagatcaagatgcctgaggattcagtgcctggtgaggacccattccttagggcagtgcctctagctgtgtcctcatgtggccgaaggggacaagggaggttgctggagcctgtttgatgagagcactaccttccttcaggaggggattattcagaaagtctgtctggtttcagggcattcccaaaggccccacctgttcattctaccccattggtagaattcccattgggaattaggcttcaacatacaaatttgggagacactgacatttaggccatagcgcgtcaaaggcaaagtgaggctgagtgtggaaaccatcccagaatctggatgtggcccaggcagaaggaaactcaaagtgatggggtgaccgatggtccctggtctgtgcaggactcagcggtgcggatggccctgggcacggtggcagtggctgttggaggatgatagggaacatgttggtggggggagggtggagcccactatgagtggcaactccctgggggcacaggaaacaaagctagaggtggctcccctctcccctccctgcacacagtgtcacctctgtggtggccctgtcgtccgcctcagttcacaggtgttgctgtaacaactcctgaaattaccttcaaaaggaggctcgtgcaggtgcctgcaggagccaggaggccgaagtgcatcctgagtgtccggggacaggccagcctggcggggtccacggccccacagtcccaacgactgcctcagaaatgggcagagagcatgcctggttctagctggcaaggcccacatctcagagctgtggacagtcatgaagggtccgtgagcatggagagggggcaaaaatgacccatgaacctcaggccactgtgctgccatccagccaagtgcggtaccagcccttcgggcctcgagatcctctacccttctctgggccttgctgatttcctcctccagcccctctgtttgtgtacgcacatacacacatgcacgcacgcacacgcacacccagtgcaatttctctctgctccctgtactccccaaaattcaatgggttcctctttcctcctcagagatatagtcctgggccccatctcagcctgcagaggcctgaacgtttcccaggattgtcttctaattctcaggtccggctttaaaacaaaacctaaactaaaactaaaatgctttctgcaaagaataatacaccaacataaagtccgggtatcctaagcatgtggtgtgtatggtgtctgaaattgaatatgctgtgaaactgcctgtgtcgaaatgcagtgtttcccaagacctggaggctctctccagctgctgattgtgatcacctctcccgatcaccgctgagccctgcaggtcaccttctcctgacctattacaccactgattgcttatgctgggcacaattttatacccttgctgttgttcagtctaatcatccctataaccctatcggatcattcccatatgacagaggagaaaacctggggacacaggggctgtgtcctggccaaggccttgcttgcagcaaaaggcagagctggggtctagccaggagccccagcacagtcctgttcttcccccactaaactgagctgtgaaatagatcatggcggtctggaaaacgagctaattccgtgccgatggaggtgttgatggatgtccaccactctccacttgggaggaggccttaacatccccctcaggtctagcttctctctgtgactgagtaccttgggaaagtgggctcagaggaggaaagggacttacttgcccaagggccacagctgccaagtggcaggtaagggaccgttattctcctgtccctttcacagaggacaggaggaaagtgaggacaggtggggtacatgagtttagcctcttttctgcagcaggcccagatcagctttgcacacggttggtgctgacctcaaatgcagccctagaggggcctatctctgccctgagtattgaggtgcaggcttcttcccctttgttctgtccatttccaaaaatgtgaacacacacctcctacatgtttattattattgtgtgcatagatactaccattgtaacattttttgcggattaaaaatgcactattgtattgaaaatttcaaaggaaatgtgtaataaaacatttaaaattaaaaaaaaaaaaaaaaaaaaaaaaaaaaaaaa

SEQ ID NO: 6401 - DNA, 2103 bp, Homo sapiens
gtccggaatttcgggataagcgggccttttttgcagtctcaggacgggcgctttggagccggccccaggcagcgtgtgtcggtcgcctagtctggagaactagtcctcgactcacgtgcaaggatgatgctgaaaggaataacaaggcttatctctaggatccataagttggaccctgggcgttttttacacatggggacccaggctcgccaaagcattgctgctcacctagataaccaggttccagttgagagtccgagagctatttcccgcaccaatgagaatgacccggccaagcatggggatcagcacgagggtcagcactacaacatctccccccaggatttggagactgtatttccccatggccttcctcctcgctttgtgatgcaggtgaagacattcagtgaagcttgcctgatggtaaggaaaccagccctagaacttctgcattacctgaaaaacaccagttttgcttatccagctatacgatatcttctgtatggagagaagggaacaggaaaaaccctaagtctttgccatgttattcatttctgtgcaaaacaggactggctgatactacatattccagatgctcatctttgggtgaaaaattgtcgggatcttctgcagtccagctacaacaaacagcgctttgatcaacctttagaggcttcaacctggctgaagaatttcaaaactacaaatgagcgcttcctgaaccagataaaagttcaagagaagtatgtctggaataagagagaaagcactgagaaagggagtcctctgggagaagtggttgaacagggcataacacgggtgaggaacgccacagatgcagttggaattgtgctgaaagagctaaagaggcaaagttctttgggtatgtttcacctcctagtggccgtggatggaatcaatgctctttggggaagaaccactctgaaaagagaagataaaagcccgattgcccccgaaggaattagcacttgttcacaacttgaggaaaatgatgaaaaatgattggcatggaggcgccattgtgtcggctttgagccagactgggtctctctttaagccccggaaagcctatctgccccaggagttgctgggaaaggaaggatttgatgccctggatccctttattcccatcctggtttccaactataacccaaaggaatttgaaagttgtattcagtattatttggaaaacaattggcttcaacatgagaaagctcctacagaagaagggaaaaaagagctgctgttcctaagtaacgcgaacccctcgctgctggagcggcactgtgcctacctctaagccaagatcacagcatgtgaggaagacagtggacatctgctttatgctggacccagtaagatgaggaagtcgggcagtacacaggaagaggagccaggcccttgtacctatgggattggacaggactgcagttggctctggacctgcattaaaatgggtttcactgtgaatgcgtgacaataagatattcccttgttcctaaaactttatatcagtttattggatgtggtttttcacatttaagataattatggctcttttcctaaaaaataaaatatctttctaaaaaaaaaaaaaaaaaaaaaaaaaaaaaaaaaaaaaaaaaaaaaaaaaaaaaatgcatttctctgatattcctcttgttgcaggtcagaagagatcaattctacagaaatttccagtggttctgttgaggctttatggaattcagcatgtcaaaattcacagctggctgggcacagtggctcatgcctgtaatcccagcactttggaagcccaaggcgggcagactgcttgagttcaggagtttgcaaccagcctgggcaacatggtgaaaacctgtctctactaaaaatacaaaaattagccgggcacggtggcatgcgcctgtaatccaagctacttgggaggctgaggcaggagaattgcttcaacttgggaggcggatgttgcagtgagccaaaattgcaccactgcactccagcctgggcagcagagcaagactccgtctcaaaataaataaataaataaataaataaataaataataaatgaataaataaa

SEQ ID NO: 6402 - DNA, 4289 bp, Homo sapiens
gtcacaaaggggggaacacgtgggcgccggctgccggggcggcgatcttagggaactagggtcacctggagagccgcccaccgtctctgcccgctcgactcctccgcccgggccgctcggccggtccagccgcggccggcgcctggctgtgaggtggattcccggcccagtctgaccatctccctccagtttttccacttcgttcggaccttctcataactatgtccaccctctacgtctcccctcacccagatgccttccccagcctccgagccctcatagccgctcgctatggggaggctggggagggtcccggatggggaggagcccacccccgcatctgtctccagccacccccgactagcaggactagctttcccccaccccgcctgccggccctggagcaggggcccggtgggctctgggtgtggggggccacggctgtggcccagctgctgtggccagcaggcctggggggcccagggggcagccgggcggctgtccttgtccaacagtgggtcagttacgccgacacggagttaataccagctgcctgtggagcaacgctgccggccctgggactccgaagctcggcccaggacccccaggctgtgctgggggccctgggcagggccctgagccccttggaggagtggcttcggctgcacacctacttggccggggaggcccccactctggctgacctggcggctgtcacagccttgctgctgcctttccgatacgtcctagacccacctgcccgccggatctggaataatgtgactcgctggtttgtcacgtgtgtccggcagccagaattccgagccgtgctaggagaagtggttctatactcaggagccaggcctctctctcatcagccaggccccgaggctcctgccctcccaaagacagctgctcagctcaagaaagaggcaaagaaacgggagaagctagagaaattccaacagaagcagaagatccaacagcagcagccacctccaggggagaagaaaccaaaaccagagaagagggagaaacgggatcctggggtcattacctatgacctcccaaccccacccggggaaaagaaagatgtcagtggccccatgcccgactcctacagccctcggtatgtggaggctgcctggtacccttggtgggagcagcagggcttcttcaagccagagtatgggcgtcctaatgtgtcagcagcaaatccccgaggtgtcttcatgatgtgcatcccaccccccaatgtggcatcctctgcacctgggccatgcactcaccaacgccatccaggactccctgactcgatggcaccgcatgcgtggggagaccaccctgtggaaccctggctgtgaccatgcaggtattgccacccaggtggtggtggagaagaagctatggcgtgagcagggactgagccggcaccagctgggccgcgaggcctttctacaggaagtctggaagtggaaggaggagaaaggtgaccggatttaccaccagttgaagaagcttggcagctccttggactgggatcgagcctgtttcaccatggaccctaaactctcagcagctgtgacagaggcctttgtccggcttcacgaggaaggcatcatctatcgcagtacccgccttgttaactggtcctgcaccctcaactccgccatctctgacattgaggtggataagaaggagctgacaggtcgcaccctgctctccgtgcctggctacaaggagaaggtggagttcggggtcctcgtgtcctttgcctataaggtccaaggctcagatagcgacgaggaggtggtggtggcaacaactcggatcgagacaatgctgggagatgtggctgtagctgtgcaccccaaagataccagataccagcacctgaaggggaagaacgtgatccacccattcctgtctcggagccttcccattgtcttcgatgaatttgtggacatggactttggcacaggtgctgtgaagatcacccccgcacatgaccaaaatgactatgaagttgggcagcggcacgggctggaggccatcagcatcatggactcccggggggccctcatcaatgtgcctccgcctttcctgggcctgcccaggttttgagccaggaaagcggtgctggtggcgctgaaggagcggggactgttccgtggcattgaggacaaccccatggtggtgccactttgcaaccggtcgaaggacgtggtagagcctctgctgcggccgcagtggtacgttcgctgcggggagatggcccaggctgccagcgccgctgtgactcggggtgacctccgcatcctgcctgaggcccatcagcgcacatggcatgcctggatggacaacatccgggagtggtgcatttccaggcagctgtggtggggccatcgcatcccagcctactttgtcactgtcagtgacccagcggtgccccctggggaggaccctgatgggcggtactgggtgagtggacgcaatgaggcggaggcccgggagaaggcagccaaggagttcggagtgtcccctgacaagatcagtctccagcaagatgaggatgtattggatacctggttctcctctggcctcttccccttatccattttgggctggcccaaccagtcagaagacctgagtgtgttctaccccgggacactgctggagaccggtcatgacatcctcttcttctgggtggcccggatggtcatgctgggcctgaagctcacgggcaggctgccctttagagaggtctacctccatgccatcgtgcgagatgctcacggccggaagatgagcaagtctctaggcaatgtcatcgatcccctggacgtcatctatggaatctccctgcagggcctccacaaccagctgctgaacagcaacctggatcccagcgaggtggagaaggccaaagaagggcagaaagctgacttcccagcggggattcctgaatgtggcaccgatgctctccggtttggattatgtgcctacatgtcccagggtcgtgacatcaagctggatgtgaaccggatcctgggttaccgccacttctgcaacaagctctggaatgccaccaagtttgcccttcgtggccttgggaagggttttgtgccctcacccacctcccagcccggaggccatgagagcctggtggaccgctggatccgcagccgcctgacagaggctgtgaggctcagcaatcaaggcttccaggcctacgacttcccggccgtcaccactgcccagtacagcttctggctctatgagctctgtgatgtctacttggagtgcctgaaacctgtactgaatggggtggaccaggtggcagctgagtgtgcccgccagaccctgtacacttgcctggacgttggcctgcggctgctctcacccttcatgcccttcgtgacggaggagctgttccagaggctgccccggaggatgccgcaagctccccctagcctctgtgttaccccctacccggagccctcagagtgctcctggaaggaccccgaggcagaagccgcccttgagctggcgctaagcatcacgcgagccgtgcgctccctgcgggccgactacaacctcacccggatccggcctgactgtttcctggaagtggcggatgaggccacgggcgccctggcatcggcggtgtcgggctacgtgcaggccctggccagcgcaggtgtggtggctgttctggccctgggggctcccgccccccagggttgcgctgtggctctggcttctgatcgctgctccatccacctgcagcttcaggggctggtggaccctgcacgggagctgggcaagctgcaagccaagcgagttgaggcccagcggcaggcccagcgtctgcgggaacgccgtgctgcctcgggctatcctgtcaaggtgccgctcgaagtccaggaggcagatgaagccaagctccaacagacagaagcagagctcaggaaggtggatgagccatcgccctattccagaagatgctgtgatccaccacccagcttcacccctcacccccagcggctcaccatggggatggcagcaataaaatattttcccacaaaaaaaaaaaaaaaaaaaaaacaagggccttttattttcggggggcgggaaaaacagaggtattggaatgggcccccttgggccctggcttggtttccctagacccggctttttttggtccaaaagggggtagaactcgcccgggtccccctttaaagggggcgccttattaattttcgacaagcgcccgaggtacccctgga

SEQ ID NO: 6403 - DNA, 5358 bp, Homo sapiens
ggggaaaggctctttgacctggaggagacgctgggcagacaccgccggatcctgcaggctctgcggggtctctccaagcagctggcccaggctgagagacaatggaagaagcagctggggcccccaggccaagccaggcctgacggaggctgggccctggatgcttcctgccagattccatccaccccagggaggggtggccacctctccatgtcactcaataaggactctgccaaggtcggtgccctgctccatggacagtggactctgctccaggccctgcaagagatgagggatgcagctgtccgcatggctgcagaagcccaggtctcctacctgcctgtgggcattgagcatcatttcttagagctggaccacatcctgggcctcctgcaggaggagcttcggggcccggcggtgaggggaaagtagtgggcagcatggggtccccaaccttgacgtctgggctcagccacccttcttccagcacttcagcagccccaagccctcctgcctttgccctcccctcccaggactgctggcaagcacatctgtgcctgcgtcagtgtctgtgtgtgcgtgcatacgtgccaccacacatctcatcttttctctgtcctctctcctctctgaagagtcccacagactcagcagcagcagggccctggacacccctcgatccaatatccaatgaccagaggggaaacagggtgggctgtgtccaagatcactgagtccagtggtagtcagcgcttccccatgccctgtcccatcctcgttccctcgccctcaccctgctcaccctgtctttggctctttacttctctcttctcttctcttgaaccctgggccccttgatgatcccaggccccaggccttcccagctgttcccacagatgcagccatgggagctggggtgggggaggcagctttgtacactgccccctctccaagttccctggatgagagccaggacgccccaagcctggggaaaggaaacggagcatgcacatggcctagattccaggtcccccactccttctgggtaagaagctaagctaggaccttagactttcccctttcagaaggcagcagccaaggccccccgcccacctggccagcccccaagggcctcctcgtgcctgcagcctggcatcttcctgttctacctcctcattcagactgtaggcttcttcggctacgtgcacttcaggtgggccaccccgtgagcaggatttcccacagcactggcatctcttggttctcagctataaccattggatttaggagaggggacacttcagctcagaggggacctgccgagtccccaaatcacaaagagcacagtgcgggatagggcccattctctcaccaagcactactgaccacctgctcggcccccagccccatctgggtcctgctctcacggagctcactcacacaggtctaactgaccctgtgtcgtcaatgccatgatgtcaggaagctgaggggctacgagagtgcaggagaacacacttgaccccccttggttagggaatcaacctggaagggacatttgatatggtcattaaggtgactaggagttttccaccctgacaagataggtaaaggcatagaggcagagggaacagcatgagaaaaggcagggaggcatgagaaaaacataatattttagagaaaaagtggcaagttcagtaatgttggagcaaagggcaggacgagtttgtgaaattgggcaaagagatctgaaaaagtgagaggaggtcactagttttgcttggtgtgtgtttgctgaatgaacgtgcaccgtttagagatgtggggtgtgctaaaggcctcagcaatgagactgacaatctttgttggtggaatttcaagacaagaagagtccgtgtgggctgggatggtcctggaggaggagtaaaatgagctaagctttaaaaagcacaaggtagaaatgctcacaggcttcagcacatgcacaggagtgcagtggtggcaatcagcctggagccactaggacagaccttacatgcccagggggaaagcgtggaccatatgcagcgggccaaaggagccacagaaagtccaagaacagcggaggttgtggtgcagtgagtgtagcaaggcaagcatgagagtcctggtttttcaaaagcccataaaggagagacgcaagtaacctgtaaccttctctctggcagcaggcaggagctgaacaagagccttcaggagtgtctgtccacaggcagccttcctctgggtcctgcaccacacacccccagggcccctggggattctgaggaggcagcctctccctgccagcatgcctgcctgacccacctcagagcctgctttgcatcactgggaagcaggcagtgtcttgggtgggggcttggtcagtatcctctccgtctgggtgcccagctcccacgcacacctgagctttcggcatgctcccacctcgttaaaggtgatttccctctccccatgctgtgatatgctggtcttctttccagcctcaccctaatctctgtgaaggcttccaccccttctgagtacctggctgggagtgcgctccaagcaggcaaggaggccaaggcctggcttaacctccaaaagaccggataccccacgggctttgaaccctcgactatggagggaaagagagccatgactgtatataattctgtcctcaaactcacccataacagagagcagtgtctcccagtgtccctcctggcccagctcagccagcatcactgagcagctctctccctccccactcctagctgctccaggggcagcaggggaggcgcgtgacagagcaaccctgagaggccaactcgtggaaccataactgggattcccgctcgcgccctcaggtctccctcccttttccagcgtcaagctctctgggcagctgctgggttcagtgacttgggtgggtggggagaatggggggcacccaaggctgggtttttaccccttgctgctacctggatctcccagctgaaatcctagttattagtggcccaggagaggagaaagttggaagaggctatggaacagggttccgggagtgtatgagctcaacccctctcccgggagagcgaccccaccaccgcaggccctaatcctctgtcagcagtgcccagcggagctcggcgttgaaggaggcacgtgggggaggcgggagtggggagcgggcacgtggtccagccttctcagccccgtgctgccccccgcccccagtgaggaggggtttggggaggtgggggcgggcccgggcgggggcgggcggcgggcggtgccaagcgtggggcgcgggcccgcggcgggagctgtccgcgaaacctagtgctgaagtaggcgcggacgtgcccggtgcctggcgcgtggtagcaggcgcccggtgccccggccggcgaagaccatggcgttcatggtgaagaccatggtgggcggccagctgaagaacctcactgggggcctgggaggcggcgaggataagggagatggggacaagtcggcagccgaagctcagggcatgagccgggaggagtacgaggagtatcagaagcaactcgtggaagagaagatggagcgggatgcacagttcacacagaggaaggcagagcgggccacactgcggagccacttccgagacaaataccggctacccaagaacgagacagatgagagccagatccagatggcaggtggagacgtggagctgccccgggagctggccaagatgatcgaggaggacacagaggaggaggaggagaaggcctcagtccttgggcagctggccagccttcctggcttgaacctgggctcactcaaggacaaggcccaggccacactgggggatctcaagcaatcagctgagaagtgtcacgtcatgtgaccacttccccggggttacccactgggctgggcccccatgagggctaagagtgtgtcaacttccagggacccatactccatttggggctttgtttcccttgccccatcctagttccaagacctttcccatccatgccccaagcctatcttctggtttcttcctctccgctgggagtaaagtccccatcttcactctacccttcaggaccctccccaccagctcagcctgtggaggcctcccaagattgtaggaataggcccatccctctctggccatggccccaagttcctgcacacaggagcacccacagagagacacacacaggacacaaaacccctggcacgttcagagacagaagccacagacacatcccggcacagacagacacacacgaggccagctcccttgcgtgtccagcccctccagacaccaccactcagaaactctgagagagagcatgggcagacaccctcagcagacaggaggcctgagttccagtctccacctttattgttcttgaaagcccctgctctctctgagccttatttcatcatctgtaaaatgggaatgtcctgaatgacttctaaggctctttctggcttgaactgtcagagccaagcccacatccctccttgggcagggcagcagctgctgccacagcctccagcggctgccactgtgggctctgggagccggagcgatgctgtgtgagaggcagagtgccaaggatgaagctggcactgaacagtaagcggctccaggcctcctctgggcccagggcccagccaatttctgttctgttcctgtagaacgctctctggattccatagctggaatctcctctcttagctcagtgaaaaataaaaatcccaaatggtgtgcctaccttcccacttcttactggcttccaggagtcttggagttcatagccccccgagcctgccttaaaggggtgtcctccaccccccacctacagcttcacaggaggggagaaggcatccagtgctaggagtagaagtgtctccagctctgttctcttggggccctgggtgaaggtggggtctggggcttatgaaataggtctgggctttgaggaggatggagcagcctcattatgtggggaagatggggcctctggggcgtcactgagaccacaggtggggccggggctggaccgcggctgtcttgggtgcctgtgcctacacccctcctcaccctagagacggaagatgtgcaaaaagaaagaaggaagggcaactgcattccagccccacactgtgatgactttgagcctgtcctttccctccttgagcctgtcttgcttgtcccctgtaaaatgaacagtccccctctcccccaaatagtaataatacatgtttcaaagggtgaccatttataaagcatatgacaaaccatatcaataaatgtaactcattcttttt

SEQ ID NO: 6404 - DNA, 1677 bp, Homo sapiens; identical to SEQ ID NO: 2152

SEQ ID NO: 6405 - DNA, 1277 bp, Homo sapiens
cccctcggccctgtctgtgccctggctgggacaggagggaggctagttccctggtggggtagcctggcaacattcccattccaccgcacctggccagctgccatcttggcagagccagggggagatgcaccagggagtttggagtcaggaaggcagagttgtgtgggctgaagtctgcgggaaccccagggtgacacaggcaaggggtagaagtcagagtggggaccaaaccatagactggggccctgggttctgcagaggtgtggatggggcaggtggcaggtgctccagtgggggccccaggtgaggccctgatggccctcctggggcaataaagacatcatgggaagggggctttgtggtttgcctctgctctagtcgggcgatctggctttagccttcaggaggaggtaagcagaggagatcagtgcctgtttctgaccccaggagggccttgttgggctccaacctagagccttccggcttcaggtcccaagagaagtccccccctaactgtgacccccctaactgtgatcaggggtctgccattgcccgcttttctctgcctgatctggggactcaggagaggccatggcagcacagcctaggggtggttcagtccctggcccacagtctggtcagttgagtccttctgggaaccggggctatgaaaactttcgtctttggggaccggtacccatgaaggaaaactttcctgagggggtgaggaccaaagaatcaagatccttttcaggcctgatagccaagatgatgagaacttttagataaggctgtggggagagtccctggccttttgagcatcctgcttgggcacacggggaataacctttctccagcttccagtgtgaactgagaaagagaaagggaaaccctgtctttggagaagctgggatcttcccagcaccagaaacttctgcaggcccctgcctggcccacggctaacctttgggtgggactggagtttcctgaacagggaacaagggagccttccgcagagctctgatgggcaggcctccgagggcctgtgctgtgtgctgttaggatagcttggtgttgtctataccccattagtaagttttgtctgagtgtgtcctcgctgttcattgtctaatttggtaacatttattttggtcctgaccccttctgctgctgctgggtttaagcttcagtgcaggtggaatgacattcaaataaagaaacactttctatcacccaaaaaaaaaaaaaaaaaaaaaaaaaaaaaaaaaaaaaaaaag

SEQ ID NO: 6406 - DNA, 1769 bp, Homo sapiens
  misc_feature (2)..(25): n is a, c, g, or t
  misc_feature (899)..(914): n is a, c, g, or t
  misc_feature (1094)..(1094): n is a, c, g, or t
  misc_feature (1115)..(1115): n is a, c, g, or t
  misc_feature (1250)..(1250): n is a, c, g, or t
  misc_feature (1255)..(1255): n is a, c, g, or t
  misc_feature (1283)..(1283): n is a, c, g, or t
  misc_feature (1306)..(1306): n is a, c, g, or t
  misc_feature (1366)..(1366): n is a, c, g, or t
  misc_feature (1382)..(1382): n is a, c, g, or t
  misc_feature (1437)..(1437): n is a, c, g, or t
cnnnnnnnnnnnnnnnnnnnnnnnncgtgggagccgcgtggagagagcgatgcgtgacctgggccagctcagggatcgcgggggcccaaggactccgggtcttcttcccgggggaaggaataagtcgcgcagcatagaggccctagccccggacacctcgtctttgcgggtggcggcgaacgggagagcacgccatgaaggcctcgggacgctacgagagtacaaggtagtgggtcgctgcctgcccacccccaaatgccacacgccgcccctctaccgcatgcgaatctttgcgcctaatcatgtcgtcgccaagtcccgcttctggtactttgtatctcagttaaagaagatgaagaagtcttcaggggagattgtctactgtgggcaggtgtttgagaagtcccccctgcgggtggaagaacttcgggatctggctgcgctatgactcccggagcgggcacccacaacatgtaccgggaataccggggacctggaccaccgcaggcgctgttcacccagtgcttaccgagacatggggttgcccggcacggcggcccgagcccactccattcagatcatgaagggtggaaggagatcgcggccagcaaagtgccgccggccggctgtcaagcagttccacgactccaagatcaagttcccgctgcccaacgggtcctgcgccgtcagcacaagcccagcttcaccacccaagagggccccaacaaccctttccttctaaggagccaagggcccctccgtccggcgtgtgcccccaaataaacctcaagaaacgccccccgggtgcactaatggtatgctcgcacaagcaccgggtaataagaagtaacttctacaacgagcgccctttctcaacaccaatcttcatactcggcttnnnnnnnnnnnnnnnnctttatcgaccccaataccctaatgggggggtccgggaaaccccccattatatcacagaagaagatgtttccccactctcaccagaacagggggaggggccccctccaacccccttattcacttgacacccgcccccgggagtcaaacccccccctcgaaggcggggggatttggttttnggatacgttagtttgccgggngagtacaaactcccaaaaccaacacacttgaaaaccggaacccttttaaaaacacgcacgccctccaaaaagaaatagacaccccaacccctcagagaccgagggccaagtgtgcctccacttacgttataaccnttacnaaaacaaaaaaaaagggtgcctccatanagggggccggcgcccccgccacnctcgatgggcgtaccaccccgcttaaaccaggacacaagaccactttttcatcagaaacnccaccccagccggccntcaacccccacaaacaataaacctttctggttgggagaaattaaaaaaaacaaancagaggtgagcccaacaaccaacaactttggtctgccgcggaaagacaaaatcttttataaaatgacctgcgcacaagtagggaagaaatccgcctctatcaatacaaccctgttaccccggcaggcagaagtgagggcgaagcaagcaaattttaactagtgggcggcggataaaccatccccctacccccactatattacccgaacatatattccctccactataaatatccgatttcagtgtgggcacagaaaccgaaacccacacacgatatcacccatacagcgctacatatacactaagggggcgtgatttaagacttcattagcg

SEQ ID NO: 6407 - DNA, 3141 bp, Homo sapiens
  misc_feature (1127)..(1148): n is a, c, g, or t
cgctcagcccgggcgggcgatgcgggcggcgcgggcggccccctcccccggcccgcgtctccgggacggctgcgggcggcccccccggcggccggagggctccctggccccgatctgacggcggcggcggcggcggccacagcggcgggagcggcgcggggaaggagcagcggctcgcagccctcggcccgcgcccccacccagcgccagcccgaggggggaggcgcagcgccggagggtggcggtcctcggccctcccaggtctccgcgccgggaagccgctccgagccggggctggagggttgttttgccgttgtgttgagcacgtcacccattaagagccctttaaagacctggattgattggaaggacaaaaattaaaagcaatctgatccagcctcatgcaggatccctgcggattttctccttatcccatttccatccactgtcacaatttgagaatctgcctgatttgatcagattcacctccaggggaggtgtgataccagggttaggaggacgtgaagttatgggcaactttctgatctgtccatcagcagtctgagaaacgctggctctgaattttccgtgtcggccttttggaaacaacaagttcctcgctgtttgcaaagcttcagtgctcgggtccctgggacaccccggccaccctcgcctggtagatgtggcatttccatgctgaggccgcgagtcccgcctgaccccgtcgctgcctctccagggcttctctgggccgcgcctctgcagactgcgcagccatgctgcatctgctggcgctcttcctgcactgcctccctctggcctctggggactatgacatctgcaaatcctgggtgaccacagatgagggccccacctgggagttctacgcctgccagcccaaggtgatgcgcctgaaggactacgtcaaggtgaaggtggagccctcaggcatcacatgtggagacccccctgagaggttctgctcccatgagaatccctacctatgcagcaacgagtgtgacgcctccaacccggacctggcccacccgcccaggctcatgttcgacaaggaggaggagggcctggccacctactggcagagcatcacctggagccgctaccccagnnnnnnnnnnnnnnnnnnnnnnctttcgtggaacaagaccgtggagctgaccgacgacgtggtgatgaccttcgagtacggccggcccacggtcatggtcctggagaagtccctggacaacgggcgcacctggcagccctaccagttctacgccgaggactgcatggaggccttcggtatgtccgcccgccgggcccgcgacatgtcatcctccagcgcgcaccgcgtgctctgcaccgaggagtactcgcgctgggcaggctccaagaaggagaagcacgtgcgcttcgaggtgcgggaccgcttcgccatctttgccggccccgacctgcgcaacatggacaacctctacacgcggctggagagcgccaagggcctcaaggagttcttcaccctcaccgacctgcgcatgcggctgctgcgcccggcgctgggcggcacctatgtgcagcgggagaacctctacaagtacttctacgccatctccaacatcgaggtcatcggcaggtgcaagtgcaacctgcatgccaacctgtgctccatgcgcgagggcagcctgcagtgcgagtgcgagcacaacaccaccggccccgactgcggcaagtgcaagaagaatttccgcacccggtcctggcgggccggctcctacctgccgctgccccatggctctcccaacgcctgtgccgctgcaggttcctttggcaactgcgaatgctacggtcactccaaccgctgcagctacattgacttcctgaatgtggtgacctgcgtcagctgcaagcacaacacgcgaggtcagcactgccagcactgccggctgggctactaccgcaacggctcggcagagctggatgatgagaacgtctgcattgagtgtaactgcaaccagataggctccgtgcacgaccggtgcaacgagaccggcttctgcgagtgccgcgagggcgcggcgggccccaagtgcgacgactgcctccccacgcactactggcgccagggctgctaccccaacgtgtgcgacgacgaccagctgctgtgccagaacggaggcacctgcctgcagaaccagcgctgcgcctgcccgcgcggctacaccggcgtgcgctgcgagcagccccgctgcgaccccgccgacgatgacggcggtctggactgcgaccgcgcgcccggggccgccccgcgccccgccaccctgctcggctgcctgctgctgctggggctggccgcccgcctgggccgctgagccccgcccggaggacgctccccgcacccggaggccgggggtcccggggtcccggggcggggccggcgtccgaggccgggcggtgagaagggtgcggcccgaggtgctcccaggtgctactcagcagggccccccgcccggcccgcgctcccgcccgcactgccctccccccgcagcaggggcgccttgggactccggtccccgcgcctgcgatttggtttcgtttttcttttgtattatccgccgcccagttccttttttgtctttctctctctctctttttttttttttttttctggcggtgagccagagggtcgggagaaacgctgctcgccccacaccccgtcctgcctcccaccacacttacacacacgggactgtggccgacaccccctggcctgtgccaggctcacgggcggcggcggaccccgacctccagttgcctacaattccagtcgctgacttggtcctgttttctattctttatttttcctgcaacccaccagaccccaggcctcaccggaggcccggtgaccacggaactcaccgtctgggggaggaggagagaaggaaggggtggggggcctggaaacttcgttctgtagagaactatttttgtttgtattcactgtcccctgcaagggggacggggcgggagcactggtcaccgcgggggccgatggtggagaatccgaggagtaaagagtttgctcactgctgcaaaaaaaaaaaaaaaaaaaaaaaaaaaaaaatataaaaaaaaaaaccgcgg

SEQ ID NO: 6408 - DNA, 1235 bp, Homo sapiens
  misc_feature (391)..(405): n is a, c, g, or t
caggatttttgggtttaagatgcacttttagcacacatttgtatttcccttggatatcagattgagctaatggtgatgttatttcaatctaacagccaccaatctgaaattgtatttcaaatgttgattctgtagttctttaaataataatgaagctcatcttatacattttgctttcaccaattgattccttcttcttttagcccactattaaaacatttcttactgaatggttcatgtaggcttgctgaacagcacgcattacttgcttcctgaagagttcccccattcatccatttgtcccattagttgctgtggattatcaagttttgaaggaactgtacatcccaacagactgaaacattctaagtgaaatgagtataatccaagnnnnnnnnnnnnnnnggaggtttggagcttgaagagaatggctaagaagatttgaattatagggagggaacagaaatcatacatgaaaaggttttactgagaaggggaaaaccttagatagagggacatgtgaaacaaaatcatttgaaattttgattcagacatccatttccagtggcaaacagcaaagcctgaacccataaacccaaatgataggtgaagttgggtggttttatccaatgtctcaagcaagcaatgtctgggaatatcatagagtaacaagtgctggtcagccaaagaaacattcactgctggtgaaccaataccataagcatgtattatctaagcacttgatcaagaaatatacatgttgtacaagctctcaattttgttcatttattatcaaatttttaaaatacaagtttggtatgtgatttggaaaagatgccttctggatcttaagccagttgtcagtggaggtcctcagggctgcaaatgtcaagacataaccctgttcctcaccatcatgataccagatacaggtgaatacataggaactatctgcctgtgtcctcaatctcccttcaaacaagatgctgatttgtagggtacttggcaggttaaattaaaccagaagaggtgacttaataaaaaagggaatgacatttagggtataaagatctcataagaaatgtaatatgtaaattatatcttgctttatgttgtaaaatatacattgtttgcgctagaatagaaatgatttcttttcaataaaaagaaagaaggactctaaaaaaaaaaaaaaaaaataaaaaaaaaaaagaaagaacttgagtgggtttagt

SEQ ID NO: 6409 - DNA, 4478 bp, Homo sapiens
  misc_feature (165)..(192): n is a, c, g, or t
cgggcgcgctctcaggcgggctccggcggcagcgacgcgagcgcggcgatggggagcggcggcgtggtccactgtaggtgtgccaagtgtttctgttatcctacaaagcgaagaataaggaggaggccccgaaacctgaccatcttgagtctccccgaagatgtnnnnnnnnnnnnnnnnnnnnnnnnnnnntgtagaggacatcctggccgtccgagctgtacactcccagctgaaggacctggtggacaaccacgccagtgtgtgggcatgtgccagcttccaggagctgtggccgtctccagggaacctgaagctctttgaaagggctgctgaaaaggggaatttcgaagctgctgtgaagctgggcatagcctacctctacaatgaaggcctgtctgtgtctgatgaggcccgcgcagaagtgaatggcctgaaggcctctcgcttcttcagtctcgctgagcggctgaatgtgggtgccgcacctttcatctggctcttcatccgccctccgtggtcggtgagcggaagctgctgcaaggccgtggttcacgagagcctcagggcagagtgccagctgcagaggactcacaaagcatccatattgcactgcttgggcagagtgctgagtctgttcgaggatgaggagaagcagcagcaggcccatgacctgtttgaggaggctgctcatcagggatgtctgaccagctcctacctcctctgggaaagcgacaggaggacagatgtgtcagatcctgggcgatgcctccacagcttccgaaaactcagggactacgctgccaaaggctgctgggaagcgcagctgtctttagccaaagcctgtgcaaatgcaaaccagcttggactggaggtgagagcttccagtgagatcgtctgccagctatttcaggcttcccaggctgtcagtaaacaacaagtcttctccgtgcagaagggactcaatgacacaatgaggtacattctgatcgactggctggtggaagttgccaccatgaaggacttcacaagcctgtgcctgcacctgaccgtggagtgtgtggaccggtacctgcggaggaggctggtgccgcggtacaggctccagctgctgggcatcgcctgcatggtcatctgcacccggtttatcagtaaagagatcctgaccatccgggaggccgtatggctcacggacaacacttacaagtacgaggacctggtgagaatgatgggcgagatcgtctccgccttggaagggaagattcgagtccccactgtggtggattacaaggaggtcctgctgacgctagtccctgtggagctgagaacccagcacctgtgcagcttcctctgcgagctctccctgctgcacaccagcctgtccgcctacgccccagcccgcctggctgccgcagccctgctcctggccagactgacgcacgggcagacacagccctggaccactcagctgtgggacctcaccggattctcctatgaagacctcattccctgcgtcttgagcctccataagaagtgcttccatgatgacgcccccaaggactacaggcaagtctctctgaccgccgtgaagcagcggtttgaggacaagcgctatggagaaatcagccaggaagaggtgctgagctacagccagttgtgtgctgcattaggagtgacacaagacagccccgaccccccgactttcctcagcacaggggagatccacgccttcctcagctctccctcggggcggagaaccaaacggaagcgggagaacagcctccaggaagacagaggcagcttcgttaccacccccactgcggagctgtccagccaggaggagacgctgctgggcagcttcctcgactggagcctggactgctgctctggctatgaaggcgaccaggagagtgagggcgagaaggagggcgacgtgacagctcccagcggcatcctcgatgtcaccgtggtctacctgaacccagaacagcattgctgccaggaatccagtgatgaggaggcttgtccagaggacaagggaccccaggacccacaggcactggcgctggacacccagatcctgcaccccctgggacccaaacccctggtccgcaccagccgggagccagggaaggacgtcacgacctcagggtactcctccgtcagcaccgcaagtcccacaagctccgtggacggtggcttgggggccctgccccaacctacctcagtgctgtccctggacagtgactcgcacacacagccctgccaccatcaggccaggaagtcatgtttacagtgtcgtcccccaagtcccccggagagcagtgttccccagcaacaggtgaagcggataaacctatgcatacacagtgaggaggaggacatgaacctgggccttgtgaggctgtaagtgtgtcagcacatttgccgcagtggatgtgtactgagggggctggaggcgaagggtgggagcatagcataggaacgctgcatagaccatggaggcctttgcgcagagagcagagaggatgacttgcggccaccaagtttctgtctccgcgggagtcccgtgcaagccatcagaatgttgaaatgagggtgaagagctcagatccctctctttggaaagtttagcctggaagcagttggccacactgtgtggagggcacctctctgtcccttccgtgtctcactgtctctggaagcttcagcccatgtgtgtcctggtgttcccagccccaccagagccccgtgccgggagctgaccgctttcacgcttaaggcacgtgtgaccatgggtagtcaacaccacttgagcccctgcccacatctgctggtttggggcttcagtggggagctgacagctgtgagcacaccactgtcccctcatccacctcggcctgcatggggcacccacttccttctgggtggggcttccatggtaagggggcctgcgtccctgcacactgcgaggactgccttggccacaggcccactccctacgacacgtgactcgttttagagctctgtcccagaggcgttcgtatgtgacccacagatggcgtcaatgtgaacacctctctttgtgctgaatttctgggccattcttttcctgtcttatttctaaatttccttcttccaagatgaaaacaaaagaaaaacttaaaacagaaggtattaaaaaaacaagagattcccaccattatttaggttcacctgcaaaacaaaaatcttactccagcccctcaatgccatcctgacacactttatgcaaaaagacttgtcccagataggctagccagaaaaaacttcaagtcctctgtaacatctgaggtgaccaagaggcagaagagcagagcagtcgggggccgtgtcctggctgatcccaactgcagctctgctgtgggggcccgtgggagggaggcagacccctgggctttcctgctggccacggactctgctcctgcatggaaagggagcctgggagccagcagcccacgcctggggagcctgcctggggccatgtgaccatggcctctccctgggaacgggctgaccacaacacaccctgctgccatccacttctgtttactctgcaaatgtaagaaagaaccacttggccagaagtgtcccccagatgcttttttttttttttttttggagacagttttgctcttgtctccccggctggagtgcagtggcatgatctcaactctcaactcactgtaacctccgcctcccggatactcctgcctcagcctcctgggtagctgggattacaagcacccaaccacgcccagctaatttttgtattttcggtagagacgggatttcaccatgttggccaggctagtctcgaactcatgacctcaagtgatccgcccacttcggtctcccaaagtgctgggattacaggcatgagccacggcgcctggcccccaaatgctcttgaaccggaaacccagggatgggagatgctcactgagctgctgcttttatgtgtgctggtgctatgtgtgttcatgtccgcggcagctgtctttttgctactataagggaattctggccaccctgggtggggtgtggtcggggtgagaacccaagcgttggaactgtagacccgtcctgtcgactgtgtgcccctgggcatgtgtgagcctcagtttcctcatctgtaaggggggcaatgatacctacctcacagggggttgtgaggattaaatgtgaggaggatagtggcaacaacacgcacacccataccaagaaaaacaagagggcgccgctaaatatccggggcacaattgcgaaccttttgtaacgggcacaaagagatcttaaaaacagcgccgcgcaacatcgcggggacagcacggctgggaaccctcctggtgtcgggcacaccaacgccggaaaagtcttggcccttggcgttctgtgatacgtcgtatcccctgtgcgccccagctagcctccataca

SEQ ID NO: 6410 - DNA, 1445 bp, Homo sapiens
  misc_feature (1281)..(1281): n is a, c, g, or t
  misc_feature (1284)..(1284): n is a, c, g, or t
gcggccgcatcactttttttttcctctgattgcatcagcatatatacaatatacctatataacaaaattcagtgtcaagctttcttatgcaagggatttcccccaccccacctcctcaaaaaagaaagaacctagtcttatgggcctttgagggtggattgtcaggggatgatagaaaggattttaataagtcatcctgaggaaatttcacctagtgagagccacatccatctgcacagccttaggctgcgtgaaccgaggtgaggctgagctcctgtgaaagccaagacctcctggtccaggactttgtagagtaaaaagaaccaccaacacaaaaggggttgagggggctacaatctggagacctggggtctcctactaacttgctatatgatctttggtagagttaattttctgagtatcaattttcttatctgtgaagtgaagagggggatcatctggccaccaagtttaaaattctatacttctcacctgccaaaaccaaaaaacaacttgaggtgaggaaagtgttgggcccagaaaccagggaggaactgaaagtgactcgcgttgaagtggttatgtgtatgacaatgctcttggagaactgccagtcctctatggttacccttgatttgggagaggcagcagagtcatgtccagggcatcagaccagtgacatctttgcctttatgcctctagtcatctgagggcggggactaggcctcaagccccatctcacagccaaccacagagcccttaagggtggttgacaattgaatgccccaggttggtgctttagttatttactccctttgtgagctacaggatgtgtaacttttcccccatcttggtgataaaataggagagcgcagacacagcccacattttgtctcctttcctcagatttcatctgaaccccgctaaaggcagctgtttcacagtctgtctccttcaggggcccaatttccccacagcctgggctgagtactcctactctcttctttaggttctgggctgataaagcctggagagggtacagggtgatgggtgaagccctggtgaaggtgaaaggatagattggggttggggggtggggagcagggaggtgggatggggaatggccttccctgaatagggtgggtgggaggggaacaagacccttttgcacaactctctttaagtttcctttatttcttttttaactcattctgattttctgcattgtgtttgggaaataaaatgaaaaaactaagaccaatagaaaatggttttaaaaanggnaaatacactcccatctgtttcagatgctgctgagcatttcagcagtgacagattcaaataataagctaatttttggagaaaggattaaaagaaaaaaaaactttgtaatatttatcacttgcaagctatgtttaataaagaaaggaatggtttctaaaaaa

SEQ ID NO: 6411 - DNA, 3800 bp, Homo sapiens
  misc_feature (1200)..(1230): n is a, c, g, or t
  misc_feature (2880)..(2889): n is a, c, g, or t
gaggaaaggctgtctccacccacctctcgcactctcccttctcctttataaaggccggaacagctgaaagggtggcaacttctcctcctgcggccgggagcggcctgcctgcctccctgcgcacccgcagcctcccccgctgcctccctagggctcccctccggccgccagcgcccatttttcattccctagatagagatactttgcgcgcacacacatacatacgcgcgcaaaaaggaaaaaaaaaaaaaaaagcccaccctccagcctcgctgcaaagagaaaaccggagcagccgcagctcgcagctcgcagctcgcagcccgcagcccgcagaggacgcccagagcggcgagcaggcgggcagacggaccgacggactcgcgccgcgtccacctgtcggccgggcccagccgagcgcgcagcgggcacgccgcgcgcgcggagcagccgtgcccgccgcccgggcccgccgccagggcgcacacgctcccgcccccctacccggcccgggcgggagtttgcacctctccctgcccgggtgctcgagctgccgttgcaaagccaactttggaaaaagttttttgggggagacttgggccttgaggtgcccagctccgcgctttccgattttgggggcctttccagaaaatgttgcaaaaaagctaagccggcgggcagaggaaaacgcctgtagccggcgagtgaagacgaaccatcgactgccgtgttccttttcctcttggaggttggagtcccctgggcgcccccacacggctagacgcctcggctggttcgcgacgcagccccccggccgtggatgctgcactcgggctcgggatccgcccaggtagccggcctcggacccaggtcctgcgcccaggtcctcccctgccccccagcgacggagccggggccgggggcggcggcgccgggggcatgcgggtgagccgcggctgcagaggcctgagcgcctgatcgccgcggacctgagccgagcccacccccctccccagccccccaccctggccgcgggggcggcgcgctcgatctacgcgtccggggccccgcggggccgggcccggagtcggcatgaatcgctgctgggcgctcttcctgtctctctgctgctacctgcgtctggtcagcgccgagggggaccccattcccgaggagctttatgagatgctgagtgaccannnnnnnnnnnnnnnnnnnnnnnnnnnnnnnctgctgcacggagaccccggagaggaagatggggccgagttggacctgaacatgacccgctcccactctggaggcgagctggagagcttggctcgtggaagaaggagcctgggttccctgaccattgctgagccggccatgatcgccgagtgcaagacgcgcaccgaggtgttcgagatctcccggcgcctcatagaccgcaccaacgccaacttcctggtgtggccgccctgtgtggaggtgcagcgctgctccggctgctgcaacaaccgcaacgtgcagtgccgccccacccaggtgcagctgcgacctgtccaggtgagaaagatcgagattgtgcggaagaagccaatctttaagaaggccacggtgacgctggaagaccacctggcatgcaagtgtgagacagtggcagctgcacggcctgtgacccgaagcccggggggttcccaggagcagcgagccaaaacgccccaaactcgggtgaccattcggacggtgcgagtccgccggccccccaagggcaagcaccggaaattcaagcacacgcatgacaagacggcactgaaggagacccttggagcctaggggcatcggcaggagagtgtgtgggcagggttatttaatatggtatttgctgtattgcccccatggggtccttggagtgataatattgtttccctcgtccgtctgtctcgatgcctgattcggacggccaatggtgcttcccccacccctccacgtgtccgtccacccttccatcagcgggtctcctcccagcggcctccggtcttgcccagcagctcaaagaagaaaaagaaggactgaactccatcgccatcttcttcccttaactccaagaacttgggataagagtgtgagagagactgatggggtcgctctttgggggaaacgggttccttcccctgcacctggcctgggccacacctgagcgctgtggactgtcctgaggagccctgaggacctctcagcatagcctgcctgatccctgaacccctggccagctctgaggggaggcacctccaggcaggccaggctgcctcggactccatggctaagaccacagacgggcacacagactggagaaaacccctcccacggtgcccaaacaccagtcacctcgtctccctggtgcctctgtgcacagtggcttcttttcgttttcgttttgaagacgtggactcctcttggtgggtgtggccagcacaccaagtggctgggtgccctctcaggtgggttagagatggagtttgctgttgaggtggtgtagatggtgacctgggtatcccctgcctcctgccaccccttcctccccatactccactctgattcacctcttcctctggttcctttcatctctctacctccaccctgcattttcctcttgtcctggcccttcagtctgctccaccaaggggctcttgaaccccttattaaggccccagatgaccccagtcactcctctctagggcagaagactagaggccagggcagcaagggacctgctcatcatattccaacccagccacgactgccatgtaaggttgtgcagggtgtgtactgcacaaggacattgtatgcagggagcactgttcacatcatagataaagctgatttgtatatttattnnnnnnnnnnttcggcacgatgtaggtaaagaggaaaaggatccttttcctaattcacacaaagactccttgtggactggctgtgcccctgatgcagcctgtggctggagtggccaaataggagggagactgtggtaggggcagggaggcaacactgctgtccacatgacctccatttcccaaagtcctctgctccagcaactgcccttccaggtgggtgtgggacacctgggagaaggtctccaagggagggtgcagccctcttgcccgcacccctccctgcttgcacacttccccatctttgatccttctgagctccacctctggtggctcctcctaggaaaccagctcgtgggctgggaatgggggagagaagggaaaagatccccaagaccccctggggtgggatctgagctcccacctcccttcccacctactgcactttcccccttcccgccttccaaaacctgcttccttcagtttgtaaagtcggtgattatatttttgggggctttccttttattttttaaatgtaaaatttatttatattccgtatttaaagttgtaaaaaaaaataaccacaaaataaaaccaaatgaatccgccggaggtctgtctgttggcatcgtgcgtgacaattaacctttctgccttggcaggatgtgccgacagcttgcggcgtgttcctctcactctgggagcctcaggcgtgatctcacacactggcgtgcacatacacacacacacacatacatgctcacacatgcgtgcacatacacgcaggcctgcaacttgggggaggcctctgtctggcgggaagaagagacacacaggctactctgttggtcttggtcctggcacagctcctgacacgtgaacttgtgcgtgtctctggcagtgacgagagataaatttctgcag

SEQ ID NO: 6412 - DNA, 3454 bp, Homo sapiens
  misc_feature (3111)..(3351): n is a, c, g, or t
  misc_feature (3372)..(3377): n is a, c, g, or t
  misc_feature (3387)..(3387): n is a, c, g, or t
  misc_feature (3395)..(3397): n is a, c, g, or t
  misc_feature (3402)..(3402): n is a, c, g, or t
  misc_feature (3406)..(3406): n is a, c, g, or t
  misc_feature (3411)..(3418): n is a, c, g, or t
  misc_feature (3426)..(3427): n is a, c, g, or t
ccttctccccggcggttagtgctgagagtgcggagtgtgtgctccgggctcggaacacacatttattattaaaaaatccaaaaaaaatctaaaaaaatcttttaaaaaaccccaaaaaaatttacaaaaaatccgcgtctcccccgccggagacttttattttttttcttcctcttttataaaataacccggtgaagcagccgagaccgacccgcccgcccgcggccccgcagcagctccaagaaggaaccaagagaccgaggccttcccgctgcccggacccgacaccgccaccctcgctccccgccggcagccggcagccagcggcagtggatcgaccccgttctgcggccgttgagtagttttcaattccggttgatttttgtccctctgcgcttgctccccgctcccctccccccggctccggcccccagccccggcactcgctctcctcctctcacggaaaggtcgcggcctgtggcctgcgggcagccgtgccgagaatgaaccccagcacccccagctacccaacggcctcgctctacgtgggggacctccaccccgacgtgactgaggcgatgctctacgagaagttcagcccggcagggcccatcctctccatccggatctgcagggacttgatcaccagcggctcctccaactacgcgtatgtgaacttccagcatacgaaggacgcggagcatgctctggacaccatgaattttgatgttataaagggcaagccagtacgcatcatgtggtctcagcgtgatccatcacttcgaaaaagtggagtgggcaacatattcgttaaaaatctggataagtccattaataataaagcactgtatgatacagtttctgcttttggtaacatcctttcgtgtaacgtggtttgtgatgaaaatggttccaagggttatggatttgtacactttgagacacacgaagcagctgaaagagctattaaaaaaatgaacggaatgctcctaaatggtcgcaaagtatttgttggacaatttaagtctcgtaaagaacgagaagctgaacttggagctagggcaaaagagttccccaatgtttacatcaagaattttggagaagacatggatgatgagcgccttaaggatctctttggcaagttcgggcccgccttaagtgtgaaagtaatgaccgatgaaagtggaaaatccaaaggatttggatttgtaagctttgaaaggcatgaagatgcacagaaagctgtagatgagatgaatggaaaggagctcaatggaaaacaaatttacgttggtcgagctcagaaaaaagtggaacggcagacggaacttaagcgcacatttgaacagatgaagcaagatatcatccgatgattgcagggtgttaatctttatgtgaaaaatcttgatgatggtattgatgatgaacgtctccggaaagagttttctccatttggtacaatcactagtgcaaaggttatgatggaaggtggtcgcagcaaagggtttggttttgtatgtttctcctccccagaagaagccactaaagcagttacagaaatgaacggtagaattgtggccacaaagccattgtatgtagctttagctcagcgcaaagaagagcgccaggcttacctcactaacgagtatatgcagagaatggcaagtgtacgagctgttccctgcaacaaccctaccagccagcacctccttcaggttacttcatggcagctatcccacagactcagaaccgtgctgcatactatcctcctagccaaattgctcaactaagaccaagtcctcgctggactgctcagggtgccagacctcatccattccaaaatatgcccggtgctatccgcccagctgctcctagaccaccatttagtactatgagaccagcttcttcacaggttccacgagtcatgtcaacacagcgtgttgctaacacatcaacacagacagtgggtccacgtcctgcagctgctgctgctgctgcagctacccctgctgtgcgcacggttccacggtataaatatgctgcgggagttcgcaatcctcagcaacatcgtaatgcacagccacaagttacaatgcaacagcttgctgttcatgtacaaggtcaggaaactttgactgcctccaggttggcatctgcccctcctcaaaagcaaaagcaaatgttaggtgaacggctctttcctcttattcaagccatgcaccctactcttgctgggaaaatcactggcatgttgttggagattgataattcagaacttctttatatgctcgagtctccagagtcactccgttctaaggttgatgaagctgtagctgtactacaagcccaccaagctaaagaggctacccagaaagcagttaacagtgctaccggtgttccaactgtttaaaattgatcagagaccacgaaaagaaatttgtgcttcaccgaagaaaaatatctaaacatcgagaaactatgggaaaaaaaattgcaaaatctaaaataaaaaatgcaaaatctaaaataaaaaaatggaaaggaaactttgaaccttatgtaccgagcaaatgcaaggtctagcaaacataatgctagtcctagattacttattgatttaaaaacaaaaaaacactaaaaaatagtaaaatataaaaacaaattaatgttttatagaccctgggaaaaagaattttcagcaaagtacaaaaatttaaagcattcctttctttaattttgtaattctttactgtggaatagctcagaatgtcagttctgttttaagtaacagaattgataactgagcaaggaaacgtaatttggattataaaattcttgctttaataaaaattccttaaacagtgaaaaaaaaaaaaaaaaaaaaaaaaaaaaaaaaaaaaaaaaaaaaaaaaaaaaaaaaaaaaaaaaaaaaaaaaaaaaaaaaaaaaaaaaaaaaaaaaaaaaaaaaaaaaaaaaaaaaaaaaaaaaaaaaaaaaaaaaaaaaaaaaaaaaaggggggggcctttttaaagggcccagttttaaaaccccgggtttggaaaataaaaattttttaaagggggccccaaaaataaattctagggcgggttnnnnnnnnnnnnnnnnnnnnnnnnnnnnnnnnnnnnnnnnnnnnnnnnnnnnnnnnnnnnnnnnnnnnnnnnnnnnnnnnnnnnnnnnnnnnnnnnnnnnnnnnnnnnnnnnnnnnnnnnnnnnnnnnnnnnnnnnnnnnnnnnnnnnnnnnnnnnnnnnnnnnnnnnnnnnnnnnnnnnnnnnnnnnnnnnnnnnnnnnnnnnnnnnnnnnnnnnnnnnnnnnnnnnnnnnnnnnnnnnncgggggcccacggcaaggggnnnnnnaaaccgcttncagggggnnnggccnctangggcnnnnnnnnaccccccnnaaacagggttttgggggggggaagggc

SEQ ID NO: 6413 - DNA, 2305 bp, Homo sapiens
  misc_feature (234)..(249): n is a, c, g, or t
  misc_feature (1136)..(1150): n is a, c, g, or t
ataaaaacattgtatatagtagaccaaatggtcatagttactgtgagcctggcagagcagaaaaggcagttgaaggaggcagagaaggggttggtgatacggtgctataaatctgtggtccagtccacctcccttttaagacgtcctccccctatttctgttcttagttagagatgcagcagcttactcctgtagcgacctactaaaaagcaacaaggagaaagacatcgtctnnnnnnnnnnnnnnnntttcgtctcttttctttgttccttggtttgtttttcttgcccctttttgtttagttgaacggcaataggagggtagtctctccgtctttttaaactcttttttaagtttcccctcccctttcatatttttttgggccatttcttttagctttggactttgggggtcgaaagcgtttctttttatttgcttcttttaagccgagcacagtttaggtttcgtgctgtcttaagagaactatccagcagcttcttgctcatccttattgggagaactgcaccgttactttaaaaacacacatacacaaaaaccttaagggagaaaggtaattgctgccatggaaacacaactgtctaatgggccaacttgcaataacacagccaatggtccaaccaccataaacaacaactgttcgtcaccagttgactctgggaacacagaagacagcaagaccaacttaatagtcaactaccttcctcagaacatgacacaggaggaactaaagagtctctttgggagcattggtgaaatagagtcctgtaagcttgtaagagacaaaataacagggcagagcttgggatatggctttgtgaactacattgaccccaaggatgcagagaaagctatcaacaccctgaatggattgagacttcaaaccaaaacaataaaagtttcctatgctcgcccaagttcagcttctatcagagatgcaaatttatatgtcagcggacttccaaaaacaatgacccagaaggagttggaacagcttttttcacaatatggacgcattattacttctcgtattcttgtcgaccaggtcactggcatatcaaggggtgtagggtttattcgatttgacaagcgaattgaggcagaagaagctatcaannnnnnnnnnnnnnngaaacctcccggtgccacggagccaatcactgtaaagtttgctaataacccaagccaaaaaaccaatcaggccatcctttcccagctgtaccagtctccaaacagaaggtatccaggaccgctagctcaggacaatctgctcaatatggcttatggagtaaagaggttttctccaatgaccattgacggaatgaccagtttggctggaattaatatccctgggcaccctggaacagggtggtgtatatttgtgtacaacctggctcctgacgcagatgagagtatcctgtggcaaatgtttgggccttttggagctgtcaccaatgtgaaggtcatccgtgactttaacaccaataaatgcaaaggttttggatttgtgactatgacaaactatgatgaggctgccatggcgatacgtagcctcaatggataccgtctgggagacagagtactgcaggtctcctttaagacaaacaaaacgcacaaagcctaatgagctcttgtcctcagtccatttatatatgaaaactatacaacaaaggcaagttaagagaaactttatacattagtaaatgtctttgtaagtcagtgttgagatggggataaaatgactacttagcatcctaagaaatatgtgagattttttattgctagtatttgaattaaaacttcttaaatatcttttatgttgaatatggacaagaggtacagggttttacctgtcacattgcattctattgccttctttgaagaaggtggaccttttaaagtgtttcagctaagggaagacatttcttttctttttacataactgccttgaacctgtgagtaaatattgaggctttgtgttgtaattcttcagttggttgtgtcttttttttcccccctttttcctttttctgattagctttgtgtttggtttacatttaaagcattgctgttatgtctgtttaagaaaagtattttgaagtttacatttttatttatgaagtttaaaacagtatttattttgtaattatgatttgggttggggaagggggggctacattataaacgcttagggtaagaatactggagaacttttcgtaaagcagtaccttgccaaagagataagagcctctttgatgtgggtttaaaaaaagcatctatttttat

SEQ ID NO: 6414 - DNA, 4573 bp, Homo sapiens; identical to SEQ ID NO: 6195
  misc_feature (457)..(482): n is a, c, g, or t
  misc_feature (1208)..(1245): n is a, c, g, or t
  misc_feature (4568)..(4570): n is a, c, g, or t
  misc_feature (4572)..(4572): n is a, c, g, or t

SEQ ID NO: 6415 - DNA, 1900 bp, Homo sapiens
gcgaattcggcagacaaaggcacgggcggcgtggagggcggcgcggagggcgcgggcccgggagccagggagcgagcggggcgcccggcagcgcggagtcagcgccgcgggggccgcacccgactcgcgcctggacactcgcggggcgccgacctggcagggggccaaaccagtgctcctgccacctctctggctgccccctagagcctgcccatcccagcctgaccaatgtccacagccagggagcagccaatcttcagcacacgggcgcacgtgttccaaattgacccagccaccaagcgaaactggatcccagcgggcaagcacgcactcactgtctcctatttctacgatgccacccgcaatgtgtaccgcatcatcagcatcggaggcgccaaggccatcatcaacagcactgtcactcccaacatgaccttcaccaaaacttcccagaagttcgggcagtgggccgacagtcgcgccaacacagtctacggcctgggctttgcctctgaacagcatctgacacagtttgccgagaagttccaggaagtgaaggaagcagccaggctggccagggagaaatctcaggatggcggggagctcaccagtccagccctggggctcgcctcccaccaggtgcccccgagccctctcgtcagtgccaacggccccggcgaggaaaaactggttccgcagccagagcgctgatgcccccggccccacagagcgcgagcggctaaagaagatgttgtctgagggctccgtgggcgaggtacagtgggaggccgagtttttcgcactgcaggacagcaacaacaagctggcaggcgccctgcgagaggccaacgccgccgcagcccagtggaggcagcagctggaggctcagcgtgcagaggccgagcggctgcggcagcgggtggctgagctggaggctcaggcagcttcagaggtgacccccaccggtgagaaggaggggctgggccagggccagtcgctggaacagctggaagctctggtgcaaaccaaggaccaggagattcagaccctgaagagtcagactggggggccccgcgaggccctggaggctgccgagcgtgaggagactcagcagaaggtgcaggacctggagacccgcaatgcggagttggagcaccagctgcgggcgatggagcgcagcctggaggaggcacgggcagagcgggagcgggcgcgggctgaggtgggccgggcagcgcagctgctggacgtcaggctgtttgagctgagtgagctgcgtgagggcctggcccgcctggcttaggctgcgccctgagccggggctggttttctatgaacgattccggcctgggatgcgggccaggctgcaggcggcatagttgggcccattcgtcctggaaagggactggggggtcccaacttagccctgggtgggccgggccgggctgggctggggtgggccccagtcggctctggttgttggcagctttggggctgtttttgagcttctcattgtgtagaatttctagatcccccgattacatttctaagcgtgaaaaaaaaaaaaaaaaaaaaaaaaaaaaaaaaaaaaaaaaaaaaggggggggggggaaaaggattttcccggggggggcccacaatttagaggggataacccagtttttttgtacaaggggggcccatatagggggaggatattaaaaggagaagcgaagacggggggggtttaaacagagtgtggagtgggaacaagtgtcatgaggagattggggaaggaaccatcttgggggggtgcacatattgggacacactcatagaaatttaagcttagggaaattaaatttgagggttagggttaacagagatatgtgggtagaaatggcagggatgttggaattgt

SEQ ID NO: 6416 - DNA, 539 bp, Homo sapiens
  misc_feature (107)..(122): n is a, c, g, or t
tttgtttaaatattacaatttattttactaattaaaacatttcataacagaaaagcaacttggaaaacagaaatctcagctcaagggcaaaggcaaactcttgaggnnnnnnnnnnnnnnnnatcaaaggccaacagcaggttaagtgctaggtggtggagtcatggggaggagaggcttctaaactactcaggatgttggttaacggctggaactttgggagacctcgcagctaactacagggcaggcagcccattcacaaagtgggtaaatgttgattccttctgtgggtcttagaggatgcttatagagggtcacggctcaggcggtgttgcggggtgagctgtgctctctatttctgcctgctcttctggagggacagggctcagagcataaaactcaggcatcaaagcatacctaaggctttcagggctaggagtggagatagatctcaggcccaaaaactcaggggaaggggatgaggggcttaggccaggagacctactcggggaggaggagttggaagcataggaggagga

SEQ ID NO: 6417 - DNA, 1211 bp, Homo sapiens
  misc_feature (526)..(540): n is a, c, g, or t
ttttttttttttttttttgagacaaagtctttctctgtcgcccagactggagtgaagtggtgcaatctcggctcactgtaacctccatctcctgggttcatgcagttatcctgcctcagcctcctgagtagctgggattacaggcactccccacagtgcgagtttttttttttttttttttttttgtattttttgtagagatggggttttaccatgttgggtaggctggtctcaaactcgtgagctcaggtgatccacccgcctcagcctccaaaagtgctgggattacaggtgtgagccaccacacctggccaatgggccatttctttggttgaattttaaaatattattttttatcatttaccattttctagggcattttaagacccaatttattctgccacaatcatgtcatcagaatagtcaaatgaaatgactttcatttgaattctcactattaagatttaaaattgtggaaaactaaagtgggattggagtagactgttaggaatagatcctagatggnnnnnnnnnnnnnnntttgcagaaaccctggatacaaagtagttcaattaaccataaaacaaggatcagctgatctctacacgccaccacctgtttcatgtacatgggaagagtaaaaaatgaacccggataaaataaaacaaaagcaaacaaaatgctaaatcattggttattatccacatcaaataagtctggttctgtggaatatctaaaagtcacagttttatgcctttaactactatacataagggatgactttttaacctcccagggcttatacaacaaaacacacctcagaagcttatataacaatatactactttttccattttatcaacaattcagcctgccttaagctacaaagtaaaataattagacaactgtgatatcaaaacaaagattatgtaagttgagccaaagagtcacataaatgaacttgacatccccgctcccacaattgcacctaagtgctcaaacaggtaataaacatacaaacttaaacgtagttcgatttcaggagttaaaaaccatctacttgaagtcaaatattaaaatttccagctcctaaacagcatgtgatgtttttagtgtttttcattttcagatggtcaaacatggaagtctatattgaaaacctggctggcttttacaactcagtctggattaaatatttcaagtatacaggg

SEQ ID NO: 6418 - DNA, 464 bp, Homo sapiens
aactccagagcctgggcctgaacagggaggtggtctctcaggcttgatgctcaggcctatatctctccatttttgccctatctcttaaatatatgtaatgtcataaaatgcttttgaatctttttaaaaagtgtcaagctcatgaaagacagcctaagaaactattacagattggaggaaactaaggaaaaataaaactgaatgcagtgtgtatcctagatcagagaaagaacattagtggagaaagaacattagtgaaatgtgaataatttgagctaataatattgtaccagtagccggatatggtggtgggtgcctataatcccagctacttggaaggctgaggcaggagaagctcttgaaccggggagataaaggttacagtgagccgagacctcaccattgcactccagcctggacaacaagagcaaaactccgtctcaaaaaaaaaaaaaaaaaaaaaa

SEQ ID NO: 6419 - DNA, 2554 bp, Homo sapiens
ggggaagactaagcaggaaggctgtgtctcccttccccacactgtattccaaccagacagctcccttctattttatatgttgggctagtatgaaaaacaattctgctaggaaaaaaaaatttttttagaagtttgaaagctagtgatttgacccaagttcctcattttacagctggggaaactaaggcctagagagaggcaagtgatatttgtttcatggcagggctgggctgagatcctgcttttctgggtctgtctttttgctcttttgggtctgatgcagttctcagcccaaagagtagaaatctgttgcttctggcctcagctgtgccccagcttactcagtgacctcttgcaagtcctgccctctctggtctcagtttcttcatctgaaccaggggtaccctggaacaagctgctctctgcaggatctgccacctgaaaccttgacctaagagaaagactagcctgtgggggtgatcctggtttgctacagaaactaacggacactggcaaggggtcagaggcattcaacccaattctacaacacaggcaggtggtcaaaaccaacctttccaaccagaatcagcctgatatggatagatgctgtcccttatggagggacgcagacttcagaactgtgcccatgactgctgactgccaccaccaaggccctcaggtacacagcctgcctcctgcaggatgatgtgggcagatttcagccctagttaacagaagagtcccccaggaggtagggggcccccatcactggagacatgccagcagagcctctggccacctaaccaggaggtcttctgaaatgactatacgaggtaaagaagtagtaccagatggtcccaaagttcccttttagcctgaaagcttttctttgtccctccttagtgaatctgtgttccgagccctactctaaagttcagtggtcaatacaatagtccaccaagagactgggaatgattagaagtgaaattggtccctccttaccaaggaggggcagatgatctccattgcacagggcgattagattctggagctgaggtggggactgcaggaggccacctagtctggtaggtttcaacccaagctgtgtacattagaattcccttgggagcgtgcaggaaatacagatgcccatgccacattccagaccaactgaagctgaatctccagagtagggcctgtatgttcatataagctccacaggtgatctgcagtacagtgaagatggaagactgcatgtgtacctatttgcaataaagatgaagaggacagcaagctccagacaggagctgggactcaacccagatctcttaagtcctgcctggtggctccttaaaagtccagaagtgttgccccaagccctccctcaacatctctgggaaccgcagctgcagcacgatgggggttcagtgcccctgtttgccccttacccagctgtggtttattctgcttgtatgtctgcacaggccggatgctcgtgttccttgtcttattctccatttactcagtcactggggctcactcccgtctgatgcactagccaagattgccttagtgtgctccagaaaagaaggccaaatcccaggcattgtcagggcagcagagctctacaggataggcttacctttcccacctgtgtggctagcacttcacagtttacaaattcctcccacctccactcagtgacacatgctgttctaacacaggtcaggcaggcattacagtccccatgttcagaatcaaagacctagcctcagagaagtgaagaaacatcatgccaaggtcattgactgccaagcggtagaggtggggttgcatccagagagcttcccggtatgcctctgcacaatgccattccttggccagctccctccaccccaagggacccagactgcacacttaacaaacaggacacaggtgtctttgaacaaacttttttgtattattatttttacatctagaataaattatttaaattatttcacagcaagggagagggataggtaatttttatcagatatttttttaaaccatctgttttttaaattacatttttgtttatgttcttgagctgatgtagtggaacttgcctagcacattcaggtcccagccagttggcagagcatgctctcatctccttattccataccctgggcgtcccctttctgttgactcaggaactttctgagaatgaggacagcactaggagatgagctttggcaggtatccaccttaacgctacaataattgtgcttcctgaaacaaaacttgagattgtatcatagaaggaaacaggaagtcagaaatcaaatctatgcttttaattgaaaccgtgcctgaaacagtttgaatgattgttttaatgttgtttctgaaattccttgtacctttgtgaaaaataatgataataaataaaagtgaaaataaatagatgtggaatatgcaatggaaataatgtaacaaaataataaacatctggccattttactacaaaaaaaaaaaaaaaaaaaaaaaaaaaaaagggcggccgctctag

SEQ ID NO: 6420 - DNA, 993 bp, Homo sapiens
cccacgcgtccaggccgcgctcgcgccgaggggctgcgagagtgaccgcggctgctccagcgctgacgccgagccatggcggacgaggagcttgaggcgctgaggagacagaggctggccgagctgcaggccaaacacggggatcctggtgatgcggcccaacaggaagcaaagcacagggaagcagaaatgagaaacagtatcttagcccaagttctggatcagtcggcccgggccaggttaagtaacttagcacttgtaaagcctgaaaaaactaaagcagtagagaattaccttatacagatggcaagatatggacaactaagtgagaaggtatcagaacaaggtttaatagaaatccttaaaaaagtaagccaacaaacagaaaagacaacaacagtgaaattcaacagaagaaaagtaatggactctgatgaagatgacgattattgaactacaagtgctcacagactagaacttaacggaacaagtctaggacagaagttaagatctgattatttactttgtttattgtctatatgccttttaaaaaaataaacttgttatgcaaaataaaaaaaaaaaaaaaaaaaaaaaaaaaaaaaaaaaaaaaaaaaaaaaaaaaacatcaagcacaagaagaaaaatacagaagacccgcaaaaatactcacagaacaaggagagagacgacgacacacggaacaaggcgccaacaaaaagaagagcacaccacaacgggcacatatggcgcacaaaaaaaaaaaagagagacaagacaaaaacacgcgaggaagacaacgacaagaggacgacgaaaagagagggacagaaacaaaacagaagaaaaaaagcgaggaaacaaacaaaaaacagaaaagacacgacacacgaaaccaccccgccccacgccaaaaaaccaaaggagacagcagccaaaacacacacaggctaagaagaaacagaagaaggaccgagaacacgagcaagacac

SEQ ID NO: 6421 - DNA, 5408 bp, Homo sapiens
  misc_feature (98)..(102): n is a, c, g, or t
  misc_feature (802)..(826): n is a, c, g, or t
  misc_feature (1346)..(1347): n is a, c, g, or t
  misc_feature (1356)..(1356): n is a, c, g, or t
  misc_feature (1395)..(1396): n is a, c, g, or t
  misc_feature (1425)..(1435): n is a, c, g, or t
  misc_feature (1812)..(1829): n is a, c, g, or t
  misc_feature (2638)..(2652): n is a, c, g, or t
tcagtctggtactcttttttgaatgttgtcaaaactagttaattggaagttaacggtactatttatactaaaagagtaccagactgtcttcgccttcnnnnncttcgcgggagaagttgttggcgcgaatggatcctgagcctcgataacagattcctcaaccggcccacccgccagccagccagcgccttcatcctggggctgcgatggacattcggaaattctttggagtaataccaagtggaaagaaacttgtaagtgaaacagtaaagaagaatgagaaaacaaagtctgatgaagaaactttaaaagcaaagaaaggaataaaggaaatcaaggtaaatagctcccgtaaagaggatgacttcaaacaaaagcaaccaagcaagaaaaagaggatcatctatgattcagattcagagtcagaggagacgttgcaggtaaaaaatgccaaaaagccaccagaaaaactgccagtatcttctaaacctggtaaaatttcacggcaggatcctgttacatacatttcagaaacagatgaagaagatgactttatgtgtaagaaggcggcctctaaatcaaaagagaatggaagatctacaaatagtcatcttggaacatcaaacatgaaaaagaatgaagaaaacactaagaccaagaataagcctttatcaccaataaaacttacacccacatcagtacttgattattttggaactggaagtgtccaaagatctaataagaagatggtggcaagcaaaagaaaagagctttcacaaaatacagatgagtctggattaannnnnnnnnnnnnnnnnnnnnnnnnaattacagcttgatgaagatgcggagctggagaggcagttgcatgaagatgaagagtttgccagaacattagccatgttggatgaagaacccaagaccaaaaaggctcgaaaggacacagaagcgggagaaacgttttcatctgtccaagccaatttaagtaaagcagaaaaacataaatatcctcataaagtaaaaacagcacaagtttcagatgaaagaaagagctacagtcctaggaagcaaagtaaatatgaaagttcaaaagaatctcagcaacattccaagtcatcagctgacaaaataggagaagtctcttctcccaaggccagttctaagctggcaattatgaaaagaaaagaagagagctcttataaagaaatagagcctgtggcctcaaaaagaaaagaaaatgccattaaattgaaaggagagacaaaaactcctaagaaaaccaaaagttctccagctaaaaaagagtctgtaagtcctgaagattctgaaaagaaacgcactaattnnatcagcttnatcgcaagcttactttaaatcgagaaaggtccccagggnntctgggggctccaaaggaaaataacacannnnnnnnnnngccttatatttgtaatcacaggcgtgctggagtctattgaacgagatgaggccaagtctctaattgaacgttatgggggaaaagtaacaggaaatgtcagcaagaaaacaaattatcttgtcatgggtcgtgatagtggacagtccaagagtgataaggccgcagccttggggacaaaaattattgatgaagatggcctgttgaatctgattcggactatgccaggcaagaaatccaagtatgaaatagcagttgaaactgagatgaagaaagagtccaaactggagagaacaccccaaaaaaatgtccaaggaaaaagaaaaattagtccatctaaaaaggaatcagaatctaaaaagagcaggccgacttccaannnnnnnnnnnnnnnnnnaaagacaataaaaaaggaaacagatgtgttttggaaaagcctggatttcaaggagcaggtggctgaggagacaagtggtgacagcaaggctaggaatttggctgatgacagcagtgaaaacaaagtggaaaatttgctctgggtggataaatataagccaacctcgctcaagaccataattggacagcaaggtgaccagagctgtgccaacaaactcctacgctggctccgaaactggcaaaagagttcttccgaagataaaaaacacgcaaagtttggtaaattttccggcaaagatgatggctctagttttaaagcagcgttgctgtcaggccctcctggtgttggcaaaaccaccacagcttccctggtgtgtcaggagttgggatacagctacgtggaactgaatgcaagtgacacccggagtaagagcagtttgaaagcgattgttgctgagtcactgaacaataccagcatcaaaggcttttattcaaatggagcagcctcttcagtaagcacgaaacatgctctcatcatggatgaagtagatggcatggcaggcaatgaggataggggaggaattcaggaattaattggcctgataaaacatactaaaattcccattatttgtatgtgcaatgatagaaatcatcccaagattcgctctctggttcattattgttttgatcttcgttttcaaagacctcgggttgaacagattaagggtgctatgatgtctattgcatttaaagaaggtttaaagattccccctccagctatgaatgaaataattttgggagccaatcaannnnnnnnnnnnnnnttacataatctgagtatgtggtgtgcacgaagtaaagcattaacctatgaccaggccaaagctgattctcacagagccaaaaaggatatcaaaatgggcccatttgatgttgcccggaaagtgtttgcagctggagaggagactgctcacatgtcacttgtggacaagtcagatctcttttttcatgattattcaatagcacccctcttcgtccaggaaaattacatacacgtgaagcctgtagcagcagggggtgacatgaaaaagcacctgatgcttttaagcagagcagcagacagcatatgcgatggtgacctagtggacagccagatccggagtaagcaaaactggagtcttctgcctgcgcaggccatttatgccagtgttcttcctggagagttgatgagggggtacatgacccagtttcccaccttcccaagctggctggggaagcactcgtctacaggcaaacatgatcgtattgttcaggacctggccttgcatatgagtctcagacttactccagcaaaaggactgtaaacatggattatctgtcgcttctaagggatgcacttgtacagcccttgacctcacaaggagtagacggagtacaggatgttgttgcacttatggacacatattatttgatgaaagaagactttgagaatatcatggaaatcagcagctggggtggcaaacctagtcccttttcaaagctggatcccaaggtgaaagcagccttcacaagagcttacaataaggaagcccaccttactccatactcacttcaagctataaaggcatctagacacagcacaagcccatccctggattcggaatacaatgaagaattaaatgaagatgactctcaatctgatgagaaagaccaagatgctatagaaactgatgccatgatcaagaaaaagacaaaatcttcaaagccttcaaaaccagaaaaagataaggagcccagaaaaggaaaaggaaaaagttcgaagaaatgaaaccatttttcactagcgacagccactttttactctccctcctgaccagtccagctggtctagagaaagccttgttttttcccagagcaaccatgttttagcataatgggatgacctggtgtcccattataaataaagggtggtatggctagaagggtatgagcagtaggcttatgtacacctcttatagaggttgataggactgcttgggtcctccactgtcctctgtcaatctagttagacgtgcttctgaatgactgtagaattggaactagaaactacacctgggctttggagtcagattttagttaacaataatgagcctgggagcagtagtactaaggcgtcttttgtaggcttaagaatttatcctaatggcctttataggaccaatgctgattttttttaaaggcagttcctattatgtggtgaaattttgtaaataaatgattatacaaaacagtcaccacctagaactgggtattctttgtacattgtcagatatctttcaaagtataaattaggaataaaaatgttccacatgatatgtgtacaaattctttttaagattgtcatcttgtacagcaaaatattatgttggtatattacttccttattaatttgcaaatgattggattaaaaaagctcactgtattccttactaacctgttgtgtgaaacataacattggcagtcgaggagtcagaactcggattcccagcctcactccctctgtgtgtgttgaccacgtctctgctgtgaataggatttcatgcagtggtctgttatggggctttgcagcgtggggggctgcagaagattctcagacattcttatccttctggagtctcaacccatcaggttcagaccagtaggaaccaggctgggtcaggctcttaatttcactacggtgggggacaaaatgaacactggcttttgttcactttgcccctgaaagatctagtcctgtcctgtgatggcttccccaaaccctgttggaagtttgggttattcccataactgtatgtgttgagtggccgtgaggctatggacctagcctggaatttagatgtgtagctattttttaatcttgttggtaaatgctcagaggtctgtgctacctctgtgaggtatatactaaaatgaatgtaaaataaggatcgtattccctgctttaaggaactggtagtcttgtttgggtgatgagacaaagttcttgagacatttaaactgtatttaccagtgtgaaaaatgtcatttatggagattaattcattatggaaataaaacattgcctaagcccttgcctgctgaaaaaaaaaaaaaaatcacacaaaacagaccactagacaagacccatacaacagaagatcgaaacaacaaaagcggggccggggggctaaaaatataaccacgaggggggccccagatcatgtagtcaccaaccccgtttttttgtggccacagcggggcgcccctaaaagggagggcacttaatataaaacaggaagaggcaggggcggccagttaaaacaagcgggcctgccagcggggagaaaaggcacaccgggggagacctcggggaagagagcacccatcctccggggggcggcggcaaacgacgggggcaaccacccccacgaggaataacaaggccctgagggaaaaaatacaccgagacggaaacacgctgcaaccccaccggaattagcggcggctcgaaaatacgcccagcgaaagattcgacaattac

SEQ ID NO: 6422 - DNA, 3238 bp, Homo sapiens
  misc_feature (848)..(863): n is a, c, g, or t
  misc_feature (1054)..(1102): n is a, c, g, or t
atgtcaacgacatggagggggccgacagtatggggatcagcttcgacgtgatccagcaggcctccctggaggacatgatcacgggtggtcaggctgccagtgccccggccagctacgatgagacagccctgtgctctaacaccttcaggtgccaccctctctgggaaggagtgttactaatagaagggtcttatcctttgcccttaatttggaaagctaaggtctaagacagggtccattgggcttcccttagtcttaatggcagagccagagaccactgtgtggcgagttttccatagtctattgtctttaccactgtgggggtccggcctggtccctggcgactgttcagtgtgctgcctctgacctccctgtggccagaggtacctcacacagagtctttctaaccagggccacttttcgatgtgaccaaaggtacatcacagggatctccagccagctctactgagtatgatgtgtgaggcatcagcacttaggtgtcaggagctgtcggtctgctgcagagggcatggttgagggtcaggagccatcagtctgcggagagcatggttgagggcagctactcgcattacccaccagcggtggttcatgctgggcaatgcttgctgtgtaccaggaggtgggccgagcacttcgcattctgcctctgtccccacatcagcccagggacggggagcggttattgtctgtttttcagataaggaaactgaggtcagaggggctgcctttgtggtcataccacaaatgaatggaagggatcctgaagagcatggtcgtgggctgggtgaaggagatcacccagtaccacaacatctatgcagacaacnnnnnnnnnnnnnnnntaccgctggcttcggtcgccatcctctctgcttcatgaccctgccctgcaccgcacactccacaacatgatgaagaagctcttcctgcagctcatcgctgagttcaagcgcctggggtcatcagtcatctacgccaacttcaaccgcatcatcctctgtacaaagaagcgccgtgtggaagatgccatcgnnnnnnnnnnnnnnnnnnnnnnnnnnnnnnnnnnnnnnnnnnnnnnnnnttctctgacaatttctttctctcgatgctgggaatttcttctctggatggatccatctaactatggcggaatcaaaggaaaagtttcatctcgtattcactgtggactgcaagactcccagaaagcagggggagcagaggatgagcaggaaaatgaggacgatgaggaggaaagagatggggaggaggaggaagaggcggaggaatccaacgtggaggatttactggaaaacaactggaacattttgcagtttttgccacaggcagcctcctgccagaactacttcctcatgattgtttcagcgtacatcgtggccgtgtaccactgcatgaaggacgggctgaggcgcagtgctccagggagcacccccgtgaggaggaggggggccagccagctctcccaggaggccgagggggcggtcggagcccttcccggaatgatcaccttctctcaggattatgtcgcaaatgagctcactcagagcttcttcaccatcactcagaagattcagaagaaagtcacaggctctcggaactccactgagctctcagagatgtttcctgtcctccccggttcccacttgctgctcaataaccctgccctggagttcatcaaatacgtgtgcaaggtgctgtccctggacaccaacatcacaaaccaggtgaataagctgaaccgagacctgcttcgcctggtggatgtcggcgagttctccgaggaggcccagttccgagacccctgccgctcctacgtgcttcctgaggtcatctgccgcagctgtaacttctgccgcgacctggacctgtgtaaagactcttccttctcagaggatggggcggtcctgcctcagtggctctgctccaactgtcaggcgccctacgactcctctgccatcgagatgacgctggtggaagttctacagaagaagctgatggccttcaccctgcaggacctggtctgcctgaagtgccgcggggtgaaggagaccagcatgcctgtgtactgcagctgcgcgggagacttcgccctcaccatccacacccaggtcttcatggaacagatcggaatattccggaacattgcccagcactacggcatgtcgtacctcctggagaccctggagtggctgctgcagaagaacccacagctgggccattagccagccccgggccccgggtgcctctgcgtccgtgccaggcctcctgatgccaaggccacatccccgtgcttccagtgaccagaccactgaccaccctgactgtccaaacctgtgaccccaggccagggaacggggaggaaaccaaagaaaaccattttcagggagctcagacgtcacaggagggagcgggagcaggatgtggccctggcctcgccagagcacctgaagaagcaggccgtgagcgaggctgcgagtgccctgggcgccgtttctcacgcagtgaatgcttttccaggcctctgttgcttcctgcaccacacctggtggggtgggagcgtcctctaggtgcccctagttctttgtcctgcctcccagagggaggaaaagcccctgggggcttctggctccctgagattgggctctgagacgagacgggttcccaaggccctggtggggctggagtctcacctgtttgcatggagaaatgggctggccccacagcctcacaggagcagtttgtgggctggtttccccgggaatccagaccctaacccgtgagaatctggattttggcttgtgagccctgcttatttggagccgggtctagagggaaccctctatcagcctcaggaaaacaagacctctgtgcacctcacttttggctcactgcagcccttgtccttcacctccacacaggaccagctggaagcagaaagaagaaaggccaatttcacagggcaccaaacaagtatgaaatgtaaatcagaaatgcagacaccccagacgagagcctcacaggagggagggggccccacaggctccccaggaggctcgtgtctttggcccagagccagccttagtttgtccctgccatctactgtctgaggccatcgctgctacactttgtttttatttgtatttcatactgaagtttcaaaaaaaaaaaaaaaaaaaaaaaaaaaaaaaatagatgtaaa

SEQ ID NO: 6423 - DNA, 3696 bp, Homo sapiens
  misc_feature (3656)..(3656): n is a, c, g, or t
gaactccgcctcatgcaggatgcccagggctcggaagcagtaaggaggatgctacagaaaggaactgcagaaagaaaaaaagccacatggttaacttttcccctggagggcaaaggggtccggctctcaaaaagaaaagccaggcacagatcccaacaccaagtgtaaggcagcacaaagtgggtctgaaaccccaggaccgggtcaaaggccttccgaaggcccgaggttcttgaggaggaggggaagctgatagggccctggtctttctgcaccagcgtggctctttaaaatacaaaacacccacaaagccaaaaaccctgaaacatgttctttagctaaccccttccctgcccagatgcctgcaattctgagaattcacttcagttttgccagatccaacccctaggcttgagggtggagagccaggcctcctcagggtcccttctaggctcccaggcccaccttaggctttaattgcattggctgtttcttatggtgttagtgaattttgcaaagaaagccctgagcattgcataaatgcttgggggcgtgtcatttaaatggaagttctccaatagtggctgaaggcagagtttactgttatccctccctcttgctggctttgctggagggcttttatcagagagattggaggtgggagagcacttttaaagcacaccccaccccctgcacccgagcggcacctaagcttcccagagaccatgaccttgtatgtggctggaggcctcaggcttagggagcagcctgaagcctttgctgtcaaccctcccaggaaagaagccgggcctcaggctgaggaaaaacagagtttcctctccagagggctcaatgagcagccgggtagtggcctcgggcagtcctcaccagggggacacctccctgctttgcattaactcatcagcaagctcatcgagagctaacgtgggcccagcagtcctgtgcttggaaatgatgccgtcacctccacactcctgctgttccagcctctgcaggtgaagctgcaaggtgagcagaggcaggcgtggggacacactcttcaaggactgcactgccccttctccctcctgagagctctgtgcactgggtttggggatgaggcgccagcctggtcaggggaggtgactgtggtccttctgaccagcttggatctttaaaataatcacaaaaaagctcagcctgagcaggtgggtgcaaggctcaggggcctgtgtttttcatcaatcagttttcttcctgcaagattcttagagctggatgttcacgggatcatggggcatggaggtggtcacgctcagacagtcatgcaccaccctcaatcccaggccctgcagagataggaagaatcccaaccagagggattcttccccaaacgttcccttgtggcccaagagtgagttccggcctgagtgctgttatgactgccggcgtctctccgactgcctctcgcctcagtttaaccatctataggttaggaacaaagaagggcttaggcagccatcgtttccccatttctgtcagagccaagggcttggaggcccagccccatccgggcaagggctgtccgctcctgcccaggcctcacctcctcgctgcagctggcaagattctttctagcagaacagaaacactggcccccaattccactctcccctcctgatgctaccgcagagggcagaaaggtgccctgtagcgtccaccatgtgtgtgtcctgagtttccagtgcaagtcatctggatttgcatttagctagggaaactcggccctcaaaccctctccctctctgcctgaatttgccaaaatgccaaccatccgggcaggtgtggatgccacagtccatccccattgcatttcacccccacatggacagaggcacacactcgcacacattcccagcacctttgactgctgggggatgcaggccagggtctgcctggagcctcagggttgggacttatctccaaaggagcccacaccccctcttccaggatgggcactggctggcagcacttttttccctcatcacatccctgacccctgcccagcccacatgcacatgctgtttcctgtctccagggccctagcctgtggatctcttcctcccatgcactcctagggtgaatgggctcagcaccaaacctggctgtgcccattccccacaaccccagcttggcctcctgtgggaaggagaaggcagacctgcccagaggagaggggcagtgttcccacccacctgctccagcacaggaaccagggaggaaagaagggagagggaggttccattcaccgtcttctgggttagcgcttgattggatgtttcaagcaagggacaaggtgatggtggctgtaataggctcctcgtgggcaccgtcaccccagaaggcctgggcacccatgagaacctgtggccagcccttttcattggctgagttccctgctgttgtgcgtggtgccattttttttttaaacaacatatataaaaacaaaacaactggtaaaaaaaaaaaaaaaaaaaaaaaaatatgaatgagtgttgtgttgtgatttgcagtgttttgacaccgtgattggctttgtttgggtctctcttctttctgtgaaattaactgctgtgcgttttcactgttcttagagaagaccctgagctcctggggttttcttgtctcacttctaccctgacctgctgggagcccaccccaccccagtccagccatgagggtatttccagcctattccaatgactgaaacccttcttggaagaaaacgtctaatgtcggggacgtagggacgcttccagacttgccctggccggaaccctgcagcctggggccccagcccgcctgcagctcagctttccccaacaccctcaggacccagccccagccccggcagaccttccctgggagctgcttaggtggtctccacagcgccctctaggggccaagcagggttccagattctccagccttctgccagctttaaaacccttcactcaagcagcattactgtacatgcaatgaaaaatactatatatgacagtcaaaacctgtgtacatatttccatgtacatatttatacatacacacaccttcctattataaatatataaagcatgacatctctttggcattccaagtttgtgtttttttaaatccttggaaatacggctttggaaacctttttcttcctttccctcttttctatgttgtaataaacattcatgtgacctttcaggtagtttctcaaatccctgtgtcctcccgtgttcctaatcggacagatctctgactgggacaacgcgccttcctccccacctctgcagcctttgctattggttggctttccgttatgaaggctgtcctcccccaaggcgggtcttgagttctttcagacctttttcccgaattccccttcttccgaaaggcttgtgcaagttactcttcaaacagcctcatctttgataatctgatccctttgcaaccaggaatttgcgtgctaaatcaagcatcaggccccagattgagtttaccaagaataagtgtacagatgcagctcatttcctgctgttaattgttagactggttgatgagggaaatgtgggcaacatacatatttgacaaagacttctgaatanatgagagtctgggtaaaaaaaaaaaaaaaaaaaaacgcgg

SEQ ID NO: 6424 - DNA, 4294 bp, Homo sapiens
  misc_feature (828)..(842): n is a, c, g, or t
  misc_feature (891)..(918): n is a, c, g, or t
  misc_feature (1632)..(1646): n is a, c, g, or t
  misc_feature (2013)..(2028): n is a, c, g, or t
  misc_feature (3175)..(3193): n is a, c, g, or t
gagtgcgccgtgcggtctccggacgctcgctgctcagcccgatccccgccaactgtgcaggcggctgacccgcagcggtagcggcagcagcgaggactcgagcgctggctgcagcgacaccatggatctctcctttatggccgcgcagctgcccatgatggggggagctttcatggactcgcccaacgaggacttcagcaccgagtactccctgtttaactcctctgccaatgtccacgcggctgccaatggccagggccagccggaagatcctcctcggtcctccaacgacgccgtcttgctatggattgccatcatagctacgctggggaacatcgtggtggtgggcgtggtgtatgccttcaccttctgaggacggcacaccctgcaccaccatggggtgaggcttggcacgtagctctgacttgctgtcggcctttggcttctcctgtgttctagaaccaggagttttgaccaggggcggcggccgtccttctggaatttctccccagcagccctgatttcaaatatcccatgttgtggtcaagctgagtcagaagacatggaagtatgggcctcctgcccctagaggcatgacggggcaaggccttcagagggcagattggggatccttgaaactacattccaggaacatgggaccagatgagacagctagttaagtttaaaacatagacatgatttgatgatcgcttgctggtggtaaataatcactcgtgtgtcttgtttttatgcaaacttatcgaacctagggcgtggggtgctggggcaagagcagccctcagaacttcagtgttcctgacccaattnnnnnnnnnnnnnnngtcccttggccatctagtagggccattggatgttcctagtttgactttnnnnnnnnnnnnnnnnnnnnnnnnnnnnagacacctggtcccttccaagacccaagtgcattgggagacccagggatggggggttactggtaataggtggggtttctgggggtgttgttggtggtttttatctcctggtcggactttctcttctttttaagaagaggagaggatgtctttaagagctagatgtgccaggcagtggactcttcaggccacccacgtgagaatgctgtttcttctctgaggaatcgtggaattttaaagatgaacaagattcacatccactgaattattcaacggatgggtcagaaaggggggtgatttgcctgtggtcaccaggcaggtttgtggaggagtcggaacagaaagatgtgtcctcactctcagctcactgagctctctgccccaactaagcacttccctgaggaggttgctgagaagctgccctcaggagaatgtccaggcatcttgaaggtgggtgcgagattggcaggctgctcagatacccgtcctttacattcagtgtggataccgtgcattctcctgaagctgtgaaagtgcttctgcccaagccacttccttaaattctgaaatatcagcatctggggtcctggcaagcaaggaagcttccaagtaaaaaccagagagaagggcacacttttctttcttcattaggaaatcttattgcacaggaaccacccccacccccaccccccacaccttcccaaggcagcatccnnnnnnnnnnnnnnngggaaaggtcccagaagggggctcactcacctctaggcccagagaggctttctcctcactttatacactgcaaaaacagaagaattgtgtcaataacaccctctgtagtggagaaacttaaaaagctggttaggaagctctcgtgtatatttagagacaattacaagaaagctggacttgccgctgtggtctcaggagaaatgagtgttcttgatgacaggcaaagggacatcttagttgtccagaagcggcactcttccctggaagccgccatgttaataggattactagcctggctccagacagtgcctgctcatggctgccagttcttaccgatcacatctgtcactgccaccgtatatcatcnnnnnnnnnnnnnnnntaaggggaggtcacgagtgcaaaagaacctgacccttgacaatgagggagaagggacatggaccacctgtctggaattcctggaatcactggcagggtggaggctgggctggggagttagccgcggtgtgcgtgaatggctctgtctccagcaagtctctctccatcaaaccccaggtctgccccataagcaagatctttaacagatggatgtctccatgagaaaacccaaggcgagaagcccagagccatggcggggttgcttgacgtcctcatggagtcactctgccccacatgctcaaatcttccctctggccccacatccctaggagggcctgacccctgtaaagatacaggaggcagctccctggcctccaaatggcccatggagatggcagtcgggagacagggttctgtgtttgctgcggtgaagggaggagaaggcaggaggaaaaaggatggcttctagccctgaagaggactccagcatcccaggcaccgggtgcttctggctgcagttttccctatggaggcccctcagcctccagccctaacataaatgtcggttaaattcagttttcaagcctctctcccttttcagtgtcagagcagtagatggtccagggcattggaggcctcgaccactctgcattgcagattacagtgacttcctcggggttgccccatcttggtctcctgtggtttcttcatcagctttttttttaccagcatctctcaaataacaatgaagatagatatgcccattagtgtctgattaaggagcaaaggctggatttctggccacagcgagctgcactctccctcctgcctcagccggggtccgtcttagcagtttggaaaggggaaaaagatgccggtcctcactgcttaagttttgtgtccaggtgccactagacttgcatgcacactaactccttacaatcaccacacagcatcatcgccccagtgcacagatgaggaaccagaggctcagaggagtgaagttgccttcctgaggtcacacagcatgaaagtgatgagctaggatttgaatctgggaagttgggctctagagccagactgtactgccttctgccacactgtactgccttctgtgactgggtggcacctccagggcacatttacannnnnnnnnnnnnnnnnnnaggctgtttctcaagatgcccgtcatggtgtggcctgggccagctctggcttccacaggtccctgactgtcctcagagtggaacatgctcaacctcccgcccactgctctctctctgcccagatttcaggggtgccggtccccaaggcctgcccccttctttaagactgaactcaagtctccttggaaggccccggtgaagctcccagagactggttttcttgggatgcaggcagaaggggaccctccctggccaacacccaggagcccagcagaagcacccacacgtagaaagaggctcactacagccagaagtgcagagtcagagtcctgggaccatcttgttctgcaaggtgaccccaggctccccaggacaggggagagggatcgtcctcattcagactctagctggggcctctgtactggcttctccctgggtggggttgcctgttacatagctgtgcctcagagaaagggtcctgcattttctggaatgttctctgtgcttacccctctgtgtgcccctccattgctcctctacaagcaattaggtgattcaaaagagcaacttaggctgggtgcagtgactcacacccgtaatcccggcactttgggaggccgaggcgggcagggacaggagttcaagaccagcctggccaacatggtgaaaccctgtctctacaaaaaatacaaaaattaaccagacattgtggcatgtgcctgtaatcccagctactcaggaggctgacacaggagaattgcttgaaccaggaggcggaggctgcagtgagctgagattgtgccactgcactccagcctgggcaacagaacgagactctgtctcaaaaaaaaaaaaaaaaaaaaagaaaaaaaaaaaaaaaaacacccacgcggcctggggacggtcgggagtggcccccagtaagggcctgggaaaaggccaaaagcccgcgtgacacaggccgactaagaggagctgggcccgggacccagcagggtaaggggaaatcccacccgagacaagtgtgatcccttcaggaatgaggagaggaaacaacacggcacaaccccaaaaaaggccggcctaacccagcacgggcaa

SEQ ID NO: 6425 - DNA, 1826 bp, Homo sapiens
aggggcccaggccccgccgtcgcgccagccccgcggccccagcgggccgggcactcgcagccgcgctcgggccggcggacgctcgcgccggctcaccatgcactgccacgccgagctgaggctgagctcgcccggccagctcaaagcagccaggcggcgctacaagactttcatgatcgacgagatcctctccaaggagacctgcgattactttgagaaactttccctctactccgtgtgcccgtcgctggtcgtgcgacccaagcccctgcattcctgtacgggctccccttccctgcgggcatatccgctcctctcggtgatcacccgccagcccactgtcatctcccacctggtccctgccaccccgggaatcgcccaggcactgtcctgccaccaggtcaccgaggcggtctctgctgaggccccagggggcgaggccctagccagcagcgagtcagagacggaacagcccacgccccgacagaagaagccccgccggagtcgcaccatcttcaccgagctgcagctcatgggcctggagaagaaattccagaagcagaagtatttgtcaaccccagacaggttggacttggctcagtctctgggactcactcagctgcaggtgaagacctggtatcagaatcgcaggatgaaatggaagaaaatggttcttaaaggtggacaggaagcacccacaaaacccaaaggtcgccccaagaagaactccatccccacatcagaagagattgaagctgaagagaagatgaacagccaggcccagggtcaggagcagctggagccctctcaggggcaggaggagctctgtgaagcacaggaaccgaaagcacgtgatgtccccttagagatggcagagccaccagacccgccccaggagttgccaataccctcttcggaacccccaccattaagctaaagtaaaacccttttgagggaagagggagactggggagaagggaaaagagagaaggcagggagagtagggagagaaaaccttccagcagcccagtaaactgcgggcgaagagatctacccgtctccctccctcccacagttaccattggccttgtcatcgcaagcatttgacaaagacttgcttgtcttgggcctgtcacctcctgaaaggctgctttagctgtggatgcccttgattaagggagagagcgcctaggagctgcctgccccagctggggtgacggctgtagggctgggtctatgttgcaagccctatatcctagcatgcagtggaaagtgcttagctctctccctcctgacctctgggcagccagtcatcaaagcagagagacgtggcggcatgtgggcagcatgcccaggttccttgctgactcagcacttatttctgtagttttaaaaaagaatttaatgtttttggttgtatttttttgggggggtgagggtgggcaaaaacatgggaggagttctgagttgttagaaatgtttctgaatcaagtttgtttgaagacacgtgtgcctttgtacccattataagatggtcataagacccaagaactgataagctttggttttttttttgttttgttttgttttttgcttcatttacccattcatgcctagggttccattattggaaccctaagcttgtgggagttatttctatcctactgctcaaggtcatcaccaagatctgatttttcataaaaaacatttgtgaccttcggcataaatgggttaaggtgccatccctgaaactgcaatgcagatatgttcagataacttttattttttaattaaaaataaatctttcaaaaggaaaaaaaaagacg

SEQ ID NO: 6426 - DNA, 680 bp, Homo sapiens
gtaccccatccaaagctgtctgtccctcatttcccacaacctggtttagatatcacttctgatctctgttccagagatcagaggaagccccggggtcaggtaagtagcctcaggggctcccttggccagagcttctgttcaggcgctctccatgaaagcagccctggaaaactgagcctgaagtcagagacagctcaggcccagcacagggggcagtcccttgccactggctcgggcccttccctggactttttgccttcctccatttttgcttctctgggtctgtcttcgtccatgcctgctctgagatgctcccccacccctccctgtacctgggaccaccgccctctggtgttttctttctcctgtgagtccccccctggatactgctgctttctggaaggctgtcctgggttacgtcctgcgctcctctccctcccacgcaaagacaaccagaaggacaagccttgagcacgccgatgccccagctcgtggctccccagaccatctgtttcccgtgaagacgccccgctccccgtgtctgtgtcctgcgtgtatgtgtcgtgtgttgtgtagattgtgagccccctgggcagggatccctgtctgcatacatgttccatgtggcacgcccaggtgtgctaataaacgttcatcttcagaaaaaaaaaaaaaaaaaa

SEQ ID NO: 6427 - DNA, 4219 bp, Homo sapiens
  misc_feature (141)..(141): n is a, c, g, or t
  misc_feature (1149)..(1149): n is a, c, g, or t
acactccctggggcaggcgctcacgcacgctacaaacacacactcctctttcctccctcgcgcgccctctctcatccttcttcacgaagcgctcactcgcaccctttctctctctctctctctctctctaacacgcacgcncactcccagttgttcacactcgggtcctctccagcccgacgttctcctggcacccacctgctccgcggcgccctgcgcgcccccctcggtcgcgccccttgcgctctcggcccagaccgtcgcagctacagggggcctcgagccccggggtgagcgtccccgtcccgctcctgctccttcccatagggacgcgcctgatgcctgggaccggccgctgagcccaaggggaccgaggaggccatggtaggagcgctcgcctcgctgcggtgcccgctgaggccatgccggggccccggcgccccgctggctcccgcctgcgcctgctcctgctcctgctgctgccgccgctgctgctgctgctccggggcagccacgcgggcaacctgacggtagccgtggtactgccgctggccaatacctcgtacccctggtcgtgggcgcgcgtgggacccgccgtggagctggccctggcccaggtgaaggcgcgccccgacttgctgccgggctggacggtccgcacggtgctgggcagcagcgaaaacgcgctgggcgtctgctccgacaccgcagcgcccctggccgcggtggacctcaagtgggagcacaaccccgctgtgttcctgggccccggctgcgtgtacgccgccgccccagtggggcgcttcaccgcgcactggcgggtcccgctgctgaccgccggcgccccggcgctgggcttcggtgtcaaggacgagtatgcgctgaccacccgcgcggggcccagctacgccaagctgggggacttcgtggcggcgctgcaccgacggctgggctgggagcgccaagcgctcatgctctacgcctaccggccgggtgacgaagagcactgcttcttcctcgtggaggggctgttcatgcgggtccgcgaccgcctcaatattacggtggaccacctggagttcgccgaggacgacctcagccactacaccaggctgctgcggaccatgccgcgcaaaggccgtgttatcnatcatctgcagctcccctgatgccttcagaaccctcatgctcctggccctggaagctggcttgtgtggggaggactacgttttcttccacctggatatctttgggcaaagcctgcaaggtggacagggccctgctccccgcaggccctgggagagaggggatgggcaggatgtcagtgcccgccaggcctttcaggctgccaaaatcattacatataaagacccagataatcccgagtacttggaattcctgaagcagttaaaacacctggcctatgagcagttcaacttcaccatggaggatggcctggtgaacaccatcccagcatccttccacgacgggctcctgctctatatccaggcagtgacggagactctggcacatgggggaactgttactgatggggagaacatcactcagcggatgtggaaccgaagctttcaaggtgtgacaggatacctgaaaattgatagcagtggcgatcgggaaacagacttctccctctgggatatggatcccgagaatggtgccttcagggttgtactgaactacaatgggacttcccaagagctggtggctgtgtcggggcgcaaactgaactggcccctggggtaccctcctcctgacatccccaaatgtggctttgacaacgaagacccagcatgcaaccaagatcacctttccaccctggaggtgctggctttggtgggcagcctctccttgctcggcattctgattgtctccttcttcatatacaggaagatgcagctggagaaggaactggcctcggagctgtggcgggtgcgctgggaggacgttgagcccagtagccttgagaggcacctgcggagtgcaggcagccggctgaccctgagcgggagaggctccaattacggctccctgctaaccacagagggccagttccaagtctttgccaagacagcatattataagggcaacctcgtggctgtgaaacgtgtgaaccgtaaacgcattgagctgacacgaaaagtcctgtttgaactgaagcatatgcgggatgtgcagaatgaacacctgaccaggtttgtgggagcctgcaccgacccccccaatatctgcatcctcacagagtactgtccccgtgggagcctgcaggacattctggagaatgagagcatcaccctggactggatgttccggtactcactcaccaatgacatcgtcaagggcatgctgtttctacacaatggggctatctgttcccatgggaacctcaagtcatccaactgcgtggtagatgggcgctttgtgctcaagatcaccgactatgggctggagagcttcagggacctggacccagagcaaggacacaccgtttatgccaaaaagctgtggacggcccctgagctcctgcgaatggcttcaccccctgtgcggggctcccaggctggtgacgtatacagctttgggatcatccttcaggagattgccctgaggagtggggtcttccacgtggaaggtttggacctgagccccaaagagatcatcgagcgggtgactcggggtgagcagccccccttccggccctccctggccctgcagagtcacctggaggagttggggctgctcatgcagcggtgctgggctgaggacccacaggagaggccaccattccagcagatccgcctgacgttgcgcaaatttaacagggagaacagcagcaacatcctggacaacctgctgtcccgcatggagcagtacgcgaacaatctggaggaactggtggaggagcggacccaggcatacctggaggagaagcgcaaggctgaggccctgctctaccagatcctgcctcactcagtggctgagcagctgaagcgtggggagacggtgcaggccgaagcctttgacagtgttaccatctacttcagtgacattgtgggtttcacagcgctgtcggcggagagcacacccatgcaggtggtgaccctgctcaatgacctgtacacttgctttgatgctgtcatagacaactttgatgtgtacaaggtggagacaattggcgatgcctacatggtggtgtcagggctccctgtgcggaacgggcggctacacgcctgcgaggtagcccgcatggccctggcactgctggatgctgtgcgctccttccgaatccgccaccggccccaggagcagctgcgcttgcgcattggcatccacacaggacctgtgtgtgctggagtggtgggactgaagatgccccgttactgtctctttggggatacagtcaacacagcctcaagaatggagtctaatggggaagccctgaagatccacttgtcttctgagaccaaggctgtcctggaggagtttggtggtttcgagctggagcttcgaggggatgtagaaatgaagggcaaaggcaaggttcggacctactggctccttggggagagggggagtagcacccgaggctgacctgcctcctctcctatccctccacacctcccctaccctgtgccagaagcaacagaggtgccaggcctcagcctcacccacagcagccccatcgccaaaggatggaagtaatttgaatagctcaggtgtgctgaccccagtgaagacaccagataggacctctgagaggggactggcatggggggatctcagagcttacaggctgagccaagcccacggccatgcacagggacactcacacaggcacacgcacctgctctccacctggactcaggccgggctgggctgtggatccttgatcccctcccctccccatgctctcctccctcagccttgctaccctgtgacttactgggaggagaaagagtcacctgaaggggaacatgaaaagagactaggtgaagagagggcaggggagcccacatctggggctggcccacaatacctgctcccccgaccccctccacccagcagtagacacagtgcacaggggagaagaggggtggcgcagaagggttgggggcctgtatgccttgcttctaccatgagcagagacaattaaaatctttattccagtgaaaaaaaaaaaaaaaaaaaagaaacaaaaggg

SEQ ID NO: 6428 - DNA, 5206 bp, Homo sapiens
  misc_feature (298)..(314): n is a, c, g, or t
  misc_feature (1572)..(1589): n is a, c, g, or t
  misc_feature (1795)..(1827): n is a, c, g, or t
  misc_feature (2561)..(2615): n is a, c, g, or t
ctctcacacacacacacccctcccctgccatccctccccggactccggctccggctccgattgcaatttgcaacctccgctgccgtcgccgcagcagccaccaattcgccagcggttcaggtggctcttgcctcgatgtcctagcctaggggcccccgggccggacttggctgggctcccttcaccctctgcggagtcatgagggcgaacgacgctctgcaggtgctgggcttgcttttcagcctggcccggggctccgaggtgggcaactctcaggcagtgtgtcctgggactctgnnnnnnnnnnnnnnnnnaccggcgatgctgagaaccaataccagacactgtacaagctctacgagaggtgtgaggtggtgatggggaaccttgagattgtgctcacgggacacaatgccgacctctccttcctgcagtggattcgagaagtgacaggctatgtcctcgtggccatgaatgaattctctactctaccattgcccaacctccgcgtggtgcgagggacccaggtctacgatgggaagtttgccatcttcgtcatgttgaactataacaccaactccagccacgctctgcgccagctccgcttgactcagctcaccgagattctgtcagggggtgtttatattgagaagaacgataagctttgtcacatggacacaattgactggagggacatcgtgagggaccgagatgctgagatagtggtgaaggacaatggcagaagctgtcccccctgtcatgaggtttgcaaggggcgatgctggggtcctggatcagaagactgccagacattgaccaagaccatctgtgctcctcagtgtaatggtcactgctttgggcccaaccccaaccagtgctgccatgatgagtgtgccgggggctgctcaggccctcaggacacagactgctttgcctgccggcacttcaatgacagtggagcctgtgtacctcgctgtccacagcctcttgtctacaacaagctaactttccagctggaacccaatccccacaccaagtatcagtatggaggagtttgtgtagccagctgtccccataactttgtggtggatcaaacatcctgtgtcagggcctgtcctcctgacaagatggaagtagataaaaatgggctcaagatgtgtgagccttgtgggggactatgtcccaaagcctgtgagggaacaggctctgggagccgcttccagactgtggactcgagcaacattgatggatttgtgaactgcaccaagatcctgggcaacctggactttctgatcaccggcctcaatggagacccctggcacaagatccctgccctggacccagagaagctcaatgtcttccggacagtacgggagatcacaggttacctgaacatccagtcctggccgccccacatgcacaacttcagtgttttttccaatttgacaaccattggaggcagaagcctctacaaccggggcttctcattgttgatcatgaagaacttgaatgtcacatctctgggcttccgatccctgaaggaaattagtgctgggcgtatctatataagtnnnnnnnnnnnnnnnnnntaccaccactctttgaactggaccaaggtgcttcgggggcctacggaagagcgactagacatcaagcataatcggccgcgcagagactgcgtggcagagggcaaagtgtgtgacccactgtgctcctctgggggatgctggggcccaggccctggtcagtgcttgtcctgtcgaaattatagccgaggaggtgtctgtgtgacccnnnnnnnnnnnnnnnnnnnnnnnnnnnnnnnnnttgcccatgaggccgaatgcttctcctgccacccggaatgccaacccatggggggcactgccacatgcaatggctcgggctctgatacttgtgctcaatgtgcccattttcgagatgggccccactgtgtgagcagctgcccccatggagtcctaggtgccaagggcccaatctacaagtacccagatgttcagaatgaatgtcggccctgccatgagaactgcacccaggggtgtaaaggaccagagcttcaagactgtttaggacaaacactggtgctgatcggcaaaacccatctgacaatggctttgacagtgatagcaggattggtagtgattttcatgatgctgggcggcacttttctctactggcgtgggcgccggattcagaataaaagggctatgaggcgatacttggaacggggtgagagcatagagcctctggaccccagtgagaaggctaacaaagtcttggccagaatcttcaaagagacagagctaaggaagcttaaagtgcttggctcgggtgtctttggaactgtgcacaaaggagtgtggatccctgagggtgaatcaatcaagattccagtctgcattaaagtcattgaggacaagagtggacggcagagttttcaagctgtgacagatcatatgctggccattggcagcctggaccatgcccacattgtaaggctgctgggactatgcccagggtcatctctgcagcttgtcacnnnnnnnnnnnnnnnnnnnnnnnnnnnnnnnnnnnnnnnnnnnnnnnnnnnnnnnctggggccacagctgctgctcaactggggagtacaaattgccaagggaatgtactaccttgaggaacatggtatggtgcatagaaacctggctgcccgaaacgtgctactcaagtcacccagtcaggttcaggtggcagattttggtgtggctgacctgctgcctcctgatgataagcagctgctatacagtgaggccaagactccaattaagtggatggcccttgagagtatccactttgggaaatacacacaccagagtgatgtctggagctatggtgtgacagtttgggagttgatgaccttcggggcagagccctatgcagggctacgattggctgaagtaccagacctgctagagaagggggagcggttggcacagccccagatctgcacaattgatgtctacatggtgatggtcaagtgttggatgattgatgagaacattcgcccaacctttaaagaactagccaatgagttcaccaggatggcccgagacccaccacggtatctggtcataaagagagagagtgggcctggaatagcccctgggccagagccccatggtctgacaaacaagaagctagaggaagtagagctggagccagaactagacctagacctagacttggaagcagaggaggacaacctggcaaccaccacactgggctccgccctcagcctaccagttggaacacttaatcggccacgtgggagccagagccttttaagtccatcatctggatacatgcccatgaaccagggtaatcttggggggtcttgccaggagtctgcagtttctgggagcagtgaacggtgcccccgtccagtctctctacacccaatgccacggggatgcctggcatcagagtcatcagaggggcatgtaacaggctctgaggctgagctccaggagaaagtgtcaatgtgtagaagccggagcaggagccggagcccacggccacgcggagatagcgcctaccattcccagcgccacagtctgctgactcctgttaccccactctccccacccgggttagaggaagaggatgtcaacggttatgtcatgccagatacacacctcaaaggtactccctcctcccgggaaggcaccctttcttcagtgggtctcagttctgtcctgggtactgaagaagaagatgaagatgaggagtatgaatacatgaaccggaggagaaggcacagtccacctcatccccctaggccaagttcccttgaggagctgggttatgagtacatggatgtggggtcagacctcagtgcctctctgggcagcacacagagttgcccactccaccctgtacccatcatgcccactgcaggcacaactccagatgaagactatgaatatatgaatcggcaacgagatggaggtggtcctgggggtgattatgcagccatgggggcctgcccagcatctgagcaagggtatgaagagatgagagcttttcaggggcctggacatcaggccccccatgtccattatgcccgcctaaaaactctacgtagcttagaggctacagactctgcctttgataaccctgattactggcatagcaggcttttccccaaggctaatgcccagagaacgtaactcctgctccctgtggcactcagggagcatttaatggcagctagtgcctttagagggtaccgtcttctccctattccctctctctcccaggtcccagccccttttccccagtcccagacaattccattcaatctttggaggcttttaaacattttgacacaaaattcttatggtatgtagccagctgtgcactttcttctctttcccaaccccaggaaaggttttccttattttgtgtgctttcccagtcccattcctcagcttcttcacaggcactcctggagatatgaaggattactctccatatcccttcctctcaggctcttgactacttggaactaggctcttatgtgtgcctttgtttcccatcagactgtcaagaagaggaaagggaggaaacctagcagaggaaagtgtaattttggtttatgactcttaaccccctagaaagacagaagcttaaaatctgtgaagaaagaggttaggagtagatattgattactatcataattcagcacttaactatgagccaggcatcatactaaacttcacctacattatctcacttagtcctttatcatccttaaaacaattctgtgacatacatattatctcattttacacaaagggaagtcgggcatggtggctcatgcctgtaatctcagcactttgggaggctgaggcagaaggattacctgaggcaaggagtttgagaccagcttagccaacatagtaagacccccatctctttaaaaaaaaaaaaaaaaaaaaaaaaaaaaaaactttagaactgggtgcagtggctcatgcctgtaatcccagccagcactttgggaggctgagatgggaagatcacttgagcccagaattagagataagcctatggaaacatagcaagacactgtctctacaggggaaaaaaaaaagaaaaagagccttaaagagatgaaataaattaagcagtagatccaggatgc

SEQ ID NO: 6429 - DNA, 3043 bp, Homo sapiens
gtgacgctcagcctggcgttttcggagtgagggtctctgctgcggacgccgggggccggcgcggcgttggccgccttcggcctcgccgagtgcagcgcgcccgaaggccagtgcctgcgctccgtccgcggcccggcgcccagggtgggcggggaggccgccgcgcagtcgccgcacgctacaccgccggcgccgtcgtttcgcgtcgcccgcttccggccaccgcggccgccattttgttcgcgcggaagcgccgcggtagggtgggaacccaagcgggagagccgcgggatttgcggccgccgccatgccgtcgtccccgctgcgggtggcggtggtgtgctcgagcaaccagaaccggagcatggaggcgcacaacatcctcagcaaacggggattcagcgtccgatcctttggaacagggactcacgtgaagcttccaggaccagctcccgacaagcccaatgtttatgatttcaaaaccacatatgaccagatgtacaatgatcttcttaggaaagacaaagaactgtatcccagcgggttgccctttaaaaaccccccgtgtggtcctccctggaaggtgttacgtgtggctcgggcacaggaggcgtgtcaccctgtgcagtgcacacactggctcctctgtctttgcgagagcttggtttctattcctggtgcacgtcggatcgtccacgggttagttccagtgccacccatggcagtaggcgtggtgaggcgcacagacacggtgtggggttcaccctgacgtggttcagcagagggtcgtgacatagcgtagaccagggatgcttaggtgaggaggtggaacccacaaaatcccattgcttttcacactgcagggctgccccgttatttcctttgcaggttggtgtgcgtgcgtgtgtgcgtgcgtgcctgatacacatggagccgggctgcttcacacatctggtgaggtcgttagaaggtcagataaagaagagggcggagcttgctaaccaagctgttagaagaaataatgggagagaacattccttcatttcaggaggacacagagcaggctaggtctgccgcgaagactcctatagagagaagagtattcttaaactagattctgatggacgcaacaccagttgcataatggttatgacaatcagtgcccgggtttttgaccaggcatttcatggtcacccccacgctaatggaaagtttctggatcttattttgttatagtgagtgatttgtagttttcagaacggaggccaggccaaacgtattccaaatgaaaagagaataggtgtcaaatgctaaaccttttatcttcgtgttggcactgttgccatccccgccctctcccgacatccccgcccttgaccagcatccctggccttgcccagcattgtctatgtattggcactcttgccatccccgccctttcccagcagagtctcactgtgtcaccccggctggagtgcagtggcgagatcttggctcactgcagactcactgcaacatccacctcccgggttccagtgattctcctgcttcagcctcctgggtagctgggattacaggcacgcgccaccacacctggctaatttttgtatttttagtagtcacagggtttcaccatgttggccaggctggtcttaaactcctgacttcaggtgatccaccctcctcgtcctcccaaagtgctgggattacaggcgtgagccaccatgctcagccctactcttgtatttttttttttttttttttttgagatggagtcagagtctcaccctgttgcccaaggtggagtgtagcggcttgatctcagctcactgcaacctccccctcccaagttcaagcgattctctgcctcagcctcccgaatagctgggattacaggcatccgctgtcatgcctggctaatttttgtatttttagtagagacgggggtttcaccatcttgaccaaactggtcttgaactcttgacctcgtgatccagctgcctcggcctctcagagtgttgggattacaggcgtgagccaccatgcctggcctcttggaatatttaataagctaaaaaattcttatacacaggtagattaattaggtagccaggagtggcccctgaaagtatgtctggcaaaacctagaactgcatcctagccatcactgtaccttctgccctccctgctgtctcctctgccagttacagttaaaaggttgtgggtgaggacgctgggcagagtcccaggcgtctgctgtcagctccccagcccggcctgcctgccgagccatctgggcgtcccacggtggagagtgtggtgcttgtgacgcggtggtgctgggagccatcctggtggcagatgtgggctctcactgcaagtcagtgtaagtccccagggactgtcagcagcacgtcctgctgcccctctctctgcagaagccctggtaacctgcgtttggaaaaatctctaaggatttctgaggagctgtcaggccatgtccttgtccaccctgtgtggggcacggcttcgacatggctctgctcccgtcgtgggctgagaaggagcaggtggggctgtgccttggaaaggaggccctcccgacatgcctttgtgcgaggtccctgtcatgcctgttctcccatccggagccttacggcgatgggtggccacagagcctattccaagagtctggtttagggctgggtcttcccatcttcacctctgagtcttaggcgatgcgtgaccacgcagccccttccaggagtctggtttagggctgggtcttcccatcttcacctctgagtcttaggcggtgcatgaccacgcagccccttcccggagtctggtttagggctgcgtgctcaagagtctggtttggggctgggtcttcccatcgccctggaggaggcttttgtctcatctcatgattcacattaaactctgtgccatgaagcttaaaaaaaaaaaaaaaaaaaaaaaaaaaaaaaaaaaaaaaaaaaaaaaggggcccggtccccaattccccctatagggaggcggt

SEQ ID NO: 6430 - DNA, 5452 bp, Homo sapiens
cccggcgcggggtgagacgtgagcgtgcacacgtacacacacagcaggggaagaggcgctccaagcggcgcccaattttctccttccctccacgggccgggtgagaaagtagccgggggctatcccgacccggcggttcttggggagggggccgaacaagaaaagggaggagatggagataacttccccggatttagcttttttgtctttgtttttgttctcaccacttccatcggatgactggagagtaaaagggaacccggagcggggtggcgagcagcgctttgagaaaatgcaggagtgtgtttggagacgcgtaaagttgcctttcaagctctggcctccgggcacgcgatgctccgcggcgggctgactcagggctgccttgggcctccctgccaccctcctggaaatgatgcaagtcctgactgtcacctggatccctgcagcccagcctggaatgcgtctggattaggggaaagacgagaaacgacactccaggtgttgcacggcccaccaaagcgggaagatagggcagttgctcagaccaaatactgtatctagtgcttctgctcctatcttcaatcgtggggttctttttaatgcaaagtgtcacaaggccaggaattcccatgtgtgctcagttggcccacagcatcattgtgcctaggaaactgcttcaatttatcaagtcctctgggctgggaatctcactgaattccaaacggcggaaagaggaaactttcccaacccgatgtgggtgtgacgcgagccaggggccccagggacactgtcccagagcacaccgtccccctttaacagcaactggagcttggattcgctcttatattgtacagtcctttcgaccattgccctggagcacccgcacacgcgcacgcatctccggccgcgctcacacacactcatacacacgcacgcaaacgcgtggccgccgccaggtcggcaactttgtccggcgctcccagcggcgctcggcttcctcctgtagtagttgagcgcaggccccgcctcccggccgtgttgtcaaaagggccggggtctcggattggtccagccgccgggacaacacctgctcgactccttcattcaagtgacaccagagcttccagggatatttgaggcaccatccctgccattgccgggcactcgcggcgctgctaacggcctggtcacacgctctccagagagctacgggagggcgctgggtaacctctatccgagccgcggccgcgaggaggagggaaaaggcgagcaaaaaggaagagtgggaggaggaggggaagcggcgaaggaggaagaggaggaggaggaagaggggagcacaaaggatccaggtctcccgacgggaggttaataccaagaaccatgtgtgccgagcggctgggccagttcatgaccctggctttggtgttggccacctttgacccggcgcgggggaccgacgccaccaacccacccgagggtccccaagacaggagctcccagcagaaaggccgcctgtccctgcagaatacagcggagatccagcactgtttggtcaacgctggcgatgtggggtgtggcgtgtttgaatgtttcgagaacaactcttgtgagattcggggcttacatgggatttgcatgacttttctgcacaacgctggaaaatttgatgcccagggcaagtcattcatcaaagacgccttgaaatgtaaggcccacgctctgcggcacaggttcggctgcataagccggaagtgcccggccatcagggaaatggtgtcccagttgcagcgggaatgctacctcaagcacgacctgtgcgcggctgcccaggagaacacccgggtgatagtggagatgatccatttcaaggacttgctgctgcacgaaccctacgtggacctcgtgaacttgctgctgacctgtggggaggaggtgaaggaggccatcacccacagcgtgcaggttcagtgtgagcagaactggggaagcctgtgctccatcttgagcttctgcacctcggccatccagaagcctcccacggcgccccccgagcgccagccccaggtggacagaaccaagctctccagggcccaccacggggaagcaggacatcacctcccagagcccagcagtagggagactggccgaggtgccaagggtgagcgaggtagcaagagccacccaaacgcccatgcccgaggcagagtcgggggccttggggctcagggaccttccggaagcagcgagtgggaagacgaacagtctgagtattctgatatccggaggtgaaatgaaaggcctggccacgaaatctttcctccacgccgtccattttcttatctatggacattccaaaacatttaccattagagaggggggatgtcacacgcaggattctgtggggactgtggacttcatcgaggtgtgtgttcgcggaacggacaggtgagatggagacccctggggccgtggggtctcaggggtgcctggtgaattctgcacttacacgtactcaagggagcgcgcccgcgttatcctcgtacctttgtcttctttccatctgtggagtcagtgggtgtcggccgctctgttgtgggggaggtgaaccagggaggggcagggcaaggcagggcccccagagctgggccacacagtgggtgctgggcctcgccccgaagcttctggtgcagcagcctctggtgctgtctccgcggaagtcagggcggctggattccaggacaggagtgaatgtaaaaataaatatcgcttagaatgcaggagaagggtggagaggaggcaggggccgagggggtgcttggtgccaaactgaaattcagtttcttgtgtggggccttgcggttcagagctcttggcgagggtggagggaggagtgtcatttctatgtgtaatttctgagccattgtactgtctgggctgggggggacactgtccaagggagtggcccctatgagtttatattttaaccactgcttcaaatctcgatttcactttttttatttatccagttatatctacatatctgtcatctaaataaatggctttcaaacaaagaaactgggtcattaaaaccagctcaaagggggtttaaaaaaaaaaaaaccagcccatcctttgaggctgatttttcttttttttaagttctattttaaaagctatcaaacagcgacatagccatacatctgactgcctgacatggactcctgcccacttgggggaaaccttatacccagaggaaaatacacacctggggagtacatttgacaaatttcccttaggatttcgttatctcaccttgaccctcagccaagattggtaaagctgcgtcctggcgattccaggagacccagctggaaacctggcttctccatgtgaggggatgggaaaggaaagaagagaatgaagactacttagtaattcccatcaggaaatgctgaccttttacataaaatcaaggagactgctgaaaatctctaagggacaggattttccagatcctaattggaaatttagcaataaggagaggagtccaaggggacaaataaaggcagagagagagagagagagagggagaggaagaaaagagagagagaaaagagcctcgtgccaagtctcagcagtgggtttcttgggttatttaaaacatcacctaaataggccttttcttcctaattggccatcaaattaaagcctatcctttctcaagcaggagctggtattgtagggagtggccgggtattctgggctgggctcttctggagtagggggtcagcaaacattgtctgcaaagggccagatactgaatctagtactttcagtttggcgagccgtgaggtctctgtcgaaactactcaactctgccgtcctagcacaaaagcagccatagacaacacacaaacgagagggcttggctcccttccaggaagatttatttaacaggctcccagctgaatttcactcacaggacacagtttactgatctctgttctagtgagtgggtcaaaaagcatatgcatccttatccgtcaactcatcagctcttcctcaaggcaacctgaggccagacaccaagaaaccaagcgtatctgctctaaaatgacttgttcctggggaatgccttcaaccaaaacacagctagtatttctatgccccaaatccaatcccagtctttcatgatccatgccggcggttgggtggggaggggaatcattggttgggggaagggaggaaaccccacctccagcccccgccaccgggctccctgggcacccagcaagatctggggctgcagagaacagaagagccggtgcacttaatccagctctgcccttggggggaggaggacctgtgtgtcaggctctgccatgggaacgagtgtaaaccgtggctgtctcctgcagtgagccaccgcggcaggcacgttgactgttttactgacatcactcaaaagctaaagcaataacattctcctgcgttgctgagtcagctgttcatttgtccgccagctcctggactggatgtgtgaaaggcatcacatttccattttcctccgtgtaaatgttttatgtgttcgcctactgatcccattcgttgcttctattgtaaatatttgtcatttgtatttattatctctgtgttttccccctaaggcataaaatggtttactgtgttcatttgaacccatttactgatctctgttgtatatttttcatgccactgctttgttttctcctcagaagtcgggtagatagcatttctatcccatccctcacgttattggaagcatgcaacagtatttattgctcagggtcttctgcttaaaactgaggaaggtccacattcctgcaagcattgattgagacatttgcacaatctaaaatgtaagcaaagtagtcattaaaaatacaccctctacttgggctttatactgcatacaaatttactcatgagccttcctttgaggaaggatgtggatctccaaataaagatttagtgtttattttgagctctgcatcttaacaagatgatctgaacacctctcctttgtatcaataaatagccctgttattctgaagtgagaggaccaagtatagtaaaatgctgacatctaaaactaaataaatagaaaacaccaggccagaactatagtcatactcacacaaagggagaaatttaaactcgaaccaagcaaaaggcttcacggaaatagcatggaaaaacaatgcttccagtggccacttcctaaggaggaacaaccccgtctgatctcagaattggcaccacgtgagcttgctaagtgataatatctgtttctactacggatttaggcaacaggacctgtacattgtcacattgcattatttttcttcaagcgttaataaaagttttaaataaatggcaaaaaaaaaaaaaaaaaaaaaaaaaaaaa

SEQ ID NO: 6431 - DNA, 2337 bp, Homo sapiens
  misc_feature (1814)..(1832): n is a, c, g, or t
  misc_feature (2258)..(2258): n is a, c, g, or t
gcggccggggaaaaacccggatgagctgggcagcagtgttggcagtcgcggctgcgagatttgggcacttttgggggtgccggtggcccgggccgatggcgcaaggttgggcaggcttctctgaggaggaactgaggagactaaagcagactaaagatccatttgaaccacagcgacgtctccccgcgaagaaaagtcgacaacaacttcagcgagaaaaagcccttgtagagcaaagccaaaaacttgggcttcaagatggatcaacctcattacttccagagcagctgctttcagcaccaaaacagagagttaacgttcaaaaaccacctttttcttcccctactcttccgagtcatttcactctcacctcccccgttggtgatggacaaccacagggcattgaaagtcagccaaaggaactgggacttgagaattcccatgatggtcacaacaatgttgagattctacctccaaagccagattgcaaattggagaaaaagaaagtggaattgcaagaaaaatctcgttgggaagtcctccaacaagaacaacggctaatggaagagaaaaataaacgtaaaaaagctcttttggctaaagctattgcagaaagatccaaaagaactcaggcagagaccatgaaactaaagcggatccagaaggagttgcaggctttagatgacatggtgtcagctgacactggaattctcaggaaccggattgatcaggccagcctagactattcatacgctcggaagcggtttgacagggctgaagcagagtacattgcagcaaagctagatatacagcgcaagactgagataaaagagcaactcactgaacacctttgtacgatcatacagcaaaatgagctccgaaaggccaagaagttggaggagttgatgcaacaactagatgtagaagccgatgaagagactttggagcttgaggtggaggtcgagggattgctacacaaacaagaagtagaatcaaggagaccagtggttcgtttagagaggccatttcagcctgcggaggagagtgtgacattagaatttgctaaagagaacagaaagtgtcaagaacaagctgtttccccaaaggtagatgaccagtgtggaaattccagtagcatcccctttcttagtccaaactgcccaaatcaagaaggtaatgacatttcagctgctttggccacatgaagttctggtattcttttgagctaatatggtattgagtaaagtatactttttgcagtagatcatgccctgacctccaataaaaacctcttcaaaacaatgctgatttttgaattcatgattagttttagtaaattaataggtttggccattctaaaatccaaaattatgataactgtatttctaggggtatgtttcaccttgattttggcccggttctttcagtgttccgtttaccctttttactgaaagtaagtgacttaaaaggatggaagaaaaactacatggttggagtgtttttagatcagataaatatagaaaagtaaaatggaaaatgatactcaatacctagttaaactcatttcacttctcctgggagacgtattaagactggaagtcctattttatttaatcagtatcagtaaaaagacaaaaattacagtgtgaacaagagaaaaacaggaatagaagaaaaaagttgcaggttgaattatctatctggatattactagagttgtaaaacacaacttggaaactggaatttatgtgaagaaccaaacaacttaaaccagcatcacttttgtcttcaatttgccttccagtgattttagnnnnnnnnnnnnnnnnnnnttatttgaaacacacacacttatatataaacacatgtaattttactattttattgtctttcctttaatcgatgaattgattaaatttagacaattaaaacatttctaaagtgagactgaaaataatatagaaaatctcattgctacttgtgattatcaaaaaaagtatgtattttctttctaaagttatctataaatatgtttttgatatgttggacatgaattaccctgtcatgaagcgtttaaattgttaaaatgctgattttcttattagtttgttaattgcctgttactagtacttgaccaatacattgtgctatatgtaaatgtgtaaataaatattgtaattttctcacaaaaaaaaaaaaaaaaaaaaaaaaattaaaaaaacacacccccccccacagtaaaaataaaaaaaaacaanaaaaaaaaacaaaaaccttgggggggccccggaccccaatcccctttaggggggctttatcccgcccccatgtccccgg

SEQ ID NO: 6432 - DNA, 822 bp, Homo sapiens
  misc_feature (787)..(821): n is a, c, g, or t
cccatcccccggactccacccccagcgggaggccacggggccgctgtgcgcacgcgccgccgcacaccgggggctctcgggcacccgcgcggcgccggttggccttcccggcgctcgcccgggggcgcgcttgcgcgccagcggctgcggacaccagcctgcgtccccggcgcggcgggccatggaggccctgaggagggcccacgaggtcgcgctccgcctgctgctgtgtaggccgtgggcctcgcgcgccgccgcccgccccaagcccagcgcctcggaggtgctgacgcggcatctgctgcagcggcgcctgccgcactggacctccttctgcgtgccctacagcgccgtccgcaacgaccagttcggcctctcgcacttcaactggccggtgcagggcgccaactaccacgtcctgcgcaccggctgcttccccttcatcaagtaccactgctccaaggctccctggcaggacctggcccggcagaaccgcttcttcacggcgctcaaggtcgtcaacctcggtattccaactttattatatggacttggctcctggttatttgccagagtcacagagactgtgcataccagttatggacccataacagtttattttctcaataaagaagatgaaggtgccatgtattgaaagtgtgcgtcaaagaacataaatatcagtggattttctctgtgtatatgtgcagtatttatttttgatcctttaaaataaaacttttgcaaatacaattttctttctacagtaaaagaaaaaaaaaaaaannnnnnnnnnnnnnnnnnnnnnnnnnnnnnnnnnna

SEQ ID NO: 6433 - DNA, 2464 bp, Homo sapiens
  misc_feature (2266)..(2266): n is a, c, g, or t
  misc_feature (2269)..(2271): n is a, c, g, or t
gatgaccctaactttctcatatggaaacctcacatttagttacttgtggctactgcccacacatacacttctgtaattgagaactcttaggagaggactagggaatcactggggatagtgggctggagagaaccccaggctttatatgtatactttgacctcagtgttaattttaaatgcttatgaatcacacacattgctttagtaagattaagtgcttatatactagaaatttgatgctcattggaacacatctgcctagcatttctgtaaaagtcttaagtgatattaagatgattccttaccatttcagatggtccgcaatttgaattaccaagtggtaatggttccttactgttttagatggtgcctgtgagataccattcctctggatggtcatgtccagtcagtgggaggtagaaagggtggcatctgtagccctcttcatacacataagtggcatttaggtgaatgtcccagctaatcactagcatgtctgggtattggctgggtagtgggtattttgatgatctgggagcaccaaatatgttcattcttcgtttggggaggctggtctgtaaacacaaaaattgttgtccagatctttcatctgtttatgatcatcaacaaagacttgttagaaaggtctagtcttagcacttggcagttaatctagggaagatgaattaaatgggtagatagtgatgcatacctgtattcactgatgtatgtttaagggatttgggggggatacctcagttcatgtggaagggacagtctcggtgtgtcccatgaataaccttggaactgcaacaaatggtttgtgctcagaaaaagtctttcatggtgacaggaggacagtttccctggagctggccatgaaggccttagaagccatttctggtgtctggtgggtagcaggcatagagatgatgtgccgaggtcccagtgaacaacagtagccaaagaatgtactaactttatcattaataggaaagtcatacctaggaaacaatgactttttgatggcaaaatgattttttaattctattttgatgctgtaattccatttcatgacctagttgtattagaaaaccttgatgaactatatgttcccgaattacaaaaaaattaataaaacctccagagtaaactcagtcaaacaataattgagtagcagcttttataacatttaaaatttgcacatgagtgtgttgtcatatggagtgtctgaatctgttgctgggacataccaatccatgtattcattagagccatagaagttattattcattagttcatagtgtttgagttctttatgtcactctgttagaaacaagaactgagtcgtgaagaaataagaattggatttttataaaaacctctgaaggatatttacctatgaaaaagttgttaagaataaaaattagaagtccatggttaacttttccttcaatttatattattcctgaatcatagggaatctttctagaatgtgtttataatttccttgtacggtttctttggaaatacgttaaagatagtggcaatttcatatatttcatggatacttgagtttgtgcttttaaggtgtttgtttagggatacaatgaccactagatgtcgctgtttatccagtagactaagattgagtgttctttttgttcagcaactcttctaaaatgtttcaagcaaagatagtaatgacctcagtttctgaaataagggcatcttcatcagattattcttctgttttaaaaaaaagcttgaggcaaatgtgagtgatttccagtgctttgaaagggattacagtatcacacaatgtcaagctagagttaaacacagtattagctaaataggcacttatgtgtattttctttttcatgattatcggtgactggtcagtgtactcatcaatttccaaaatttgtataaatatcacaattagaaaaatgcctgaggtactaaagttatgttggctttttgtgtcttaacacacataaatactattgttattgcagcagatgccttttgaatccattttccataattgcggatagtcataaattgcttgctcaatttttagtaattattgctgttgacaccagcgttgtagatttttggtgttgttgaatgcagtagagagaccaagacactattctgtaagatcaataaaagtaattggaaaataaatatgaaccccaaaaaaaaaaaaaaaaaaaaaaaaaaaaaagaaaaaaaaaaaaaaaaaaaaaaaaaaaaaaanaannnaaaaaggggcggccgcctctagaaggttcccctccggggggccccaaggttttagggcgtaccccagctttttcttgtacaaagagtgggtccctaaatagggaggccgtatttataaaccttagggcactgggcccgtccctttttaaccaccctccgtgacgtggggaaaaaacctgctttccttgggggt

SEQ ID NO: 6434 - DNA, 582 bp, Homo sapiens
tcacgtgacaggacatgtagtatatagcaggctgccagcgactcctgctcttgcttctggatctgcagggcagtcccagcaggacccatggagtgtccttcgtgccagcatgtctccaaggaggaaacccccaagttctgcagccagtgcggagagagggtgcctcctgcagcccccatagcagattctgagaacaataactccacaatggcgtcggcctcggagggtgaaatggagtgtgggcaggagctgaaggaggaagggggcccgtgcttgttcccgggctcagacagttggcaagaaaaccccgaggagccctgttccaaagcctcctggaccgtccaagaaggagctacatcagaggttttggtagatgctgctgtagacctcatatccgatgaatgggaagctgctaatgccatacccagcaagagaaggaagcaggatgcagccccgcttgaggccgccagcgtgccttctgcagactgtgagcagagcaaaaaaaaaataaatcctcccccccccactaccctcccctctccctcctcttttgcctcctcccccaccaccttccccccccgc

SEQ ID NO: 6435 - DNA, 1656 bp, Homo sapiens
cagttctttgaatttctcaccctaagatctggcctgtacattttcaaggaattcttgagaggttcttggagagattctgggagccaaacactccattgggatcctagctgttttagagaacaacttgtaatggagccttcatctcttgagctgccggctgacacagtgcagcgcattgcggctgaactcaaatgccacccaacggatgagagggtggctctccacctagatgaggaagataagctgaggcacttcagggagtgcttttatattcccaaaatacaggatctgcctccagttgatttatcattagtgaataaagatgaaaatgccatctatttcttgggaaattctcttggccttcaaccaaaaatggttaaaacatatcttgaagaagaactagataagtgggccgagagtattgtaggccttatgaaggacattgtaggagccaatgagaaagaaatagccctagtgaatgcttttgactgtaaatttacatcttctaatgttatcattttttaagcctacgccaaaacgatataaaattcttctagaagccaaagcctttccttctgatcattatgctaatgagtcacaactacaacttcacggacttaacattgaagaaagtatgcgggtgataaagccaagagagggggaagaaaacccttaaggaataggaggatttccttgaagtttattgaggaaggaaaggagactcaattgcagtgatcctgttcagtggggtgcatttttacactggaacagcactttaatattcctgccatcacaaaaagctggacaagcgaagggttgttatgttggctttgatctagcacatgcagttggaaatgttgaactctacttacatgactggggagttgattttgcctgctggtgttcctacaagtatttaaatgcaggagcaggaggaattgctggtgccttcattcatgaaaagcatgcccatacgattaaacctgcattagtgggatggtttggccatgaactcagcaccagatttaagatggataacaaactgcagttaatccctggggtctgtggattccgaatttcaaatcctcccattttgttggtctgttccttgcatgctagtttagagatctttaagcaagcgacaatgaaggcattgcggaaaaaatctgttttgctaactggctatctggaatacctgatcaagcataactatggcaaagataaagcagcaaccaagaaaccagttgtgaacataattactccgtctcatgtagaggagcgggggtgccagctaacaataacattttctgttccaaacaaagatgttttccaagaactagaaaaaagaggagtggtttgtgacaagcggaatccaaatggcattcgagtggctccagttcctctctataattctttccatgatgtttataaatttaccaatctgctcacttctatacttgactctgcagaaacaaaaaattagcagtgttttctagaacaacttaagcaaattatactgaaagctgctgtggttatttcagtattattcgatttttaattattgaaagtatgtcaccattgaccacatgtaactaacaataaataatataccttacagaaaaaaaaaaaaaaaatactgagcaagcacaaaaaaag

SEQ ID NO: 6436 - DNA, 3672 bp, Homo sapiens
  misc_feature (101)..(153): n is a, c, g, or t
gaattcggcacgagatagttttcaggttaagaaagccagaatctttgttcagccacactgactgaacagacttttagtggggttacctggctaacagcagnnnnnnnnnnnnnnnnnnnnnnnnnnnnnnnnnnnnnnnnnnnnnnnnnnnnnggcacgaggctcaggcatagttcaacactatgggtcctcctctgaagctcttcaaaaaccagaaataccaggaactgaagcaggaatgcatcaaagacagcagacttttctgtgatccaacatttctgcctgagaatgattctcttttctacaaccgactgcttcctggaaaggtggtgtggaaacgtccccaggacatctgtgatgacccccatctgattgtgggcaacattagcaaccaccagctgacccaagggagactggggcacaagccaatggtttctgcattttcctgtttggctgttcaggagtctcattggacaaagacaattcccaaccataaggaacaggaatgggaccctcaaaaaacagaaaaatacgctgggatatttcactttcgtttctggcattttggagaatggactgaagtggtgattgatgacttgttgcccaccattaacggagatctggtcttctctttctccacttccatgaatgagttttggaatgctctgctggaaaaagcttatgcaaagctgctaggctgttatgaggccctggatggtttgaccatcactgatattattgtggacttcacgggcacattggctgaaactgttgacatgcagaaaggaagatacactgagcttgttgaggagaagtacaagctattcggagaactgtacaaaacatttaccaaaggtggtctgatctgctgttccattgagtctcccaatcaggaggagcaagaagttgaaactgattggggtctgctgaagggccatacctataccatgactgatattcgcaaaattcgtcttggagagagacttgtggaagtcttcagtgctgagaaggtgtatatggttcgcctgagaaaccccttgggaagacaggaatggagtggcccctggagtgaaatttctgaagagtggcagcaactgactgcatcagatcgcaagaacctggggcttgttatgtctgatgatggagagttttggatgagcttggaggacttttgccgcaactttcacaaactgaatgtctgccgcaatgtgaacaaccctatttttggccgaaaggagctggaatcggtgttgggatgctggactgtggatgatgatcccctgatgaaccgctcaggaggctgctataacaaccgtgataccttcctgcagaatccccagtacatcttcactgtgcctgaggatgggcacaaggtcattatgtcactgcagcagaaggacctgcgcacttaccgccgaatgggaagacctgacaattacatcattggctttgagctcttcaaggtggagatgaaccgcaaattccgcctccaccacctctacatccaggagcgtgctgggacttccacctatattgacacccgcacagtgtttctgagcaagtacctgaagaagggcaactatgtgcttgtcccaaccatgttccagcatggtcgcaccagcgagtttctcctgagaatcttctctgaagtgcctgtccagctcagggaactgactctggacatgcccaaaatgtcctgctggaacctggctcgtggctacccgaaagtagttactcagatcactgttcacagtgctgaggacctggagaagaagtatgccaatgaaactgtaaacccatatttggtcatcaaatgtggaaaggaggaagtccgttctcctgtccagaagaatacagttcatgccatttttgacacccaggccattttctacagaaggaccactgacattcctattatagtacaggtctggaacagccgaaaattctgtgatcagttcttggggcaggttactctggatgctgaccccagcgactgccgtgatctgaagtctctgtacctgcgtaagaagggtggtccaactgccaaagtcaagcaaggccacatcagcttcaaggttatttccagcgatgatctcactgagctctaaatctgcaatcccagagaatcctgacaaagcgtgccacccttttattttccgtcaggtgccaggtcttagttaagattcacaatctttagaaagaatgagattcacaataattaactcttcctctcttctgataaattccccatacctcccaatccaagtagcatctgtagctacataacctatatacctccagcagctggacatggggaggcgacagtcctatctagacatcatacacatttgccaagaaaggatctctggggcttccgggggtgagattcaagcaggacaataacaagaggctggacaccctacagatgtctttgatgttttcagttgtttgatatatctcccctgtagggcatgttgaggaaggaggagggctgatcaaggccaagctggtctagcctgacatcctagctcctgactgaacactatagacttcccagcagcatttcacccagcagccagagccggctttaagtccccaacccttacagacaccactgccaccaccaccaaccacgaccaccaccaccaccaccactcaccaccatcatcacctccggaaagtgtagtcctgccctaacccaagtcacccccgacagtaaattttaccttcatgttgagaaagcttcctggtgcttaatcaagagctggagttcaatgagtcctagacagtgagaggggcctgagcttcagctcaatggaagcctgctgtgtgccacaagacggaaaagtggaagaagctgcagtgggagacaaagcctcggtcccccacccatccacacacacctacactcacacacgcgcacatgggcgcgcacgaactaccattcaggcagtcagtgggcaagaggaaagataagtaagtaccatacacacctaaaagatgagagaattcatccagacatattacagccagtttggggcccctgactgcaatgtgaaacctctcgctgctgctaggtttacaaacaagcccattgtcctgtgcctcctaatatcatttgtactgaagaccccatctggggacttgagactttggtcccagcccagactcctcagacttttctctcagttgggatgcttcactcgctgggggtgtttgtttgccctctcatttttcagtacttctacagaattttctctagagtcagtcattatgaaatgtacttccctccatcttaacctatcaactttctgcccctccttcaaggcccagtataaatgccacctcctccatgaagccttccctaattccaccccaaacccccaccttcaacaatatttcaacgcttctgcaatgatgaaaaagaaacatagttgtagtacttagcctacctagaccagcaagcattcatttttagctcgctcattttttaccatgttttccagtctgtttaacttctgcagtgccttcactacactgccttacataaaccaaatcacaataaagttcatattcagtacaataaaaaaaaaaaaaaaaaaaaaaaaaaaaaatttttttttttttaaacaaaaaaaaaaaaaaaaaaaaaattaaataaaaaaaaaatcc

SEQ ID NO: 6437 - DNA, 2050 bp, Homo sapiens
  misc_feature (1751)..(2047): n is a, c, g, or t
ggcagctctaaaggaggcacgagggagagcgcagcgcgcagcccggtgcagccctggctttcccctcgctgcgcgcccgcgccccctttcgcgtccgcaaccagaagcccagtgcggcgccaggagccggacccgcgcccgcaccgctcccgggaccgcgaccccggccgcccagagatgaccgcgaccgaagccctcctgcgcgtcctcttgctcctgctggctttcggccacagcacctatggggctgaatgcttcccggcctgcaacccccaaaatggattctgcgaggatgacaatgtttgcaggtgccagcctggctggcagggtcccctttgtgaccagtgcgtgacctctcccggctgccttcacggactctgtggagaacccgggcagtgcatttgcaccgacggctgggacggggagctctgtgatagagatgttcgggcctgctcctcggccccctgtgccaacaacgggacctgcgtgagcctggacgatggcctctatgaatgctcctgtgcccccgggtactcgggaaaggactgccagaaaaaggacgggccctgtgtgatcaacggctccccctgccagcacggaggcacctgcgtggatgatgagggccgggcctcccatgcctcctgcctgtgcccccctggcttctcaggcaatttctgcgagatcgtggccaacagctgcacccccaacccatgcgagaacgacggcgtctgcactgacatcgggggcgacttccgctgccggtgcccagccggcttcatcgacaagacctgcagccgcccggtgaccaactgcgccagcagcccgtgccagaacgggggcacctgcctgcagcacacccaggtgagctacgagtgtctgtgcaagcccgagttcacaggtctcacctgtgtcaagaagcgcgcgctgagcccccagcaggtcacccgtctgcccagcggctatgggctggcctaccgcctgacccctggggtgcacgagctgccggtgcagcagccggagcaccgcatcctgaaggtgtccatgaaagagctcaacaagaaaacccctctcctcaccgagggccaggccatctgcttcaccatcctgggcgtgctcaccagcctggtggtgctgggcactgtgggtatcgtcttcctcaacaagtgcgagacctgggtgtccaacctgcgctacaaccacatgctgcggaagaagaagaacctgctgcttcagtacaacagcggggaggacctggccgtcaacatcatcttccccgagaagatcgacatgaccaccttcagcaaggaggccggcgacgaggagatctaagcagcgttcccacagccccctctagattcttggagttccgcagagcttactatacgcggtctgtcctaatctttgtggtgttcgctatctcttgtgtcaaatctggtgaacgctacgcttacatatattgtctttgtgctgctgtgtgacaaacgcaatgcaaaaacaatcctctttctctctcttaatgcatgatacagaataataataagaatttcatctttaaaaaaaaaaaaaaaaaaaaaaaaaaaaaaaaaaaaaaaaaaaaaaaaaaaaaaaaaaaaaaaaaaaaaaaaaaaaaacaaaaaaaaaaaaaaaaaaaaaaaaaaaaaaaaaaaaaaaaaaaaaaaaaaaaaaacaaaaaaaaaaaaaaaacacaaaaaaaacaaaaacaaaaacaaggggggggggaggcaaccccnnnnnnnnnnnnnnnnnnnnnnnnnnnnnnnnnnnnnnnnnnnnnnnnnnnnnnnnnnnnnnnnnnnnnnnnnnnnnnnnnnnnnnnnnnnnnnnnnnnnnnnnnnnnnnnnnnnnnnnnnnnnnnnnnnnnnnnnnnnnnnnnnnnnnnnnnnnnnnnnnnnnnnnnnnnnnnnnnnnnnnnnnnnnnnnnnnnnnnnnnnnnnnnnnnnnnnnnnnnnnnnnnnnnnnnnnnnnnnnnnnnnnnnnnnnnnnnnnnnnnnnnnnnnnnnnnnnnnnnnnnnnnnnnnnnnnnnnnggg

SEQ ID NO: 6438 - DNA, 3304 bp, Homo sapiens
  misc_feature (2855)..(2870): n is a, c, g, or t
acaaaaatacctggaaaaaatatgggttattactgaggaaatgtacgagtattccaaggtccgctcatggggcaaacagcttctccataaccaccaagccactaatatgatagcattactcacaggggccttggtgactggagtagataaaggatctaaagcaaatatatggaaacaggctgtagtggatgtcatggaaaagacaatgtttctattgagtcatattgttgatggttctttggatgaaggtgtggcctatggaagctacacagctaaatccgtcacacagtatgtttttctggcccagcgccattttaatatcaacaacttggataataactggttaaagatgcacttttggttctattatgccacccttttacctggcttccaaagaactgtgggtatagcagattccaattataattggttttatggtccagaaagccagctagttttcttggataagttcatcttaaagaatggagctggaaattggttagctcagcaaattagaaagcaccgacctaaagatggaccgatggttccttcaactgcccaaaggtggagtactcttcacactgaatacatctggtatgatccccagctcacaccacagccacctgctgattatggtactgcaaaaatacacacattccctaactggggtgtggttacttatggggctgggttgccaaacacacagaccaacacctttgtgtcttttaaatctgggaagctggggggacgagctgtgtatgacatagttcattttcagccatattcctggattgacgggtggagaagttttaacccaggacatgagcatccagatcagaactcatttacttttgcccccaatggacaagtatttgtttctgaagctctctatggacccaagttgagccaccttaacaatgtattggtgtttgctccatcaccctcaggccagtgtaataagccctgggaaggtcaactgggagaatgtgcgcagtggcttaagtggactggcgaggaggttggtgatgcagctggggaaataatcactgcctctcaacatggggaaatggtatttgtgagtggggaagccgtgtctgcttattcttcagcaatgagactgaaaagtgtatatcgtgctttgcttctcttaaattcccaaactctgctagttgttgatcatattgagaggcaagaagattccccaataaattctgtcagtgccttctttcataatttggatattgattttaaatatatcccatataagtttatgaataggtataatggtgccatgatggatgtgtgggatgcacattacaaaatgttttggtttgatcatcatggcaatagtcccatggccagtatacaggaagcagagcaagctgctgaatttaaaaaacgatggactcaatttgttaatgttacttttcagatggaatccacaatcacaagaattgcatatgtcttttatgggccatatatcaatgtctccagctgcagatttattgatagttccaatcctggacttcagatttctctcaatgtcaataatactgaacatgttgtttctattgtaactgattaccataacctgaagacaagattcaattatctgggattcggtggctttgccagtgtggctgatcaaggccaaataacccgatttggtttgggcactcaagcaatagtaaagcctgtaagacatgataggattattttcccctttggatttaaatttaatatagcagttggattaattttgtgcattagcttggtgattttaactttccaatggcgtttttacctttcttttagaaaactaatgcgatggatattaatacttgttattgccttgtggtttattgagcttttggatgtgtggagcacttgtagtcagcccatttgtgcaaaatggacaaggacagaggctgagggaagcaagaagtctttgtcttctgaagggcaccacatggatcttcctgatgttgtcattacctcacttcctggttcaggagctgaaattctcaaacaaccttttttcaacagtagtgattttctctacatcagggttcctacagcctacattgatattcctgaaactgagttggaaatcgactcatttgtagatgcttgtgaatggaaggtgtcagatatccgcagtgggcattttcgtttactccgaggctggttgcagtctttagtccaggacacaaaattacatttgcaaaacatccatctgcatgaacccaataggggtaaactggcccaatattttgcaatgaataaggacaaaaaaaagaaaatttaaaaggagagagtctttgccagaacaaagaagtcaaatgaaaggcgcctttgatagagatgctgaatatattagggctttgaggagacacctggtttactatccaagtgcacgtcctgtgctcagtttaagcagtggaagctggagttaaagcttcatttttttcaggaagttttaggagcttcgatgagggcattgtacatagtaagagaccctcgggcatggatttattcaatgttgtacaatagtaaaccaagtctttattctttgaagaatgtaccagagcatttagcaaaattgtttaaaatagagggaggtaaaggcaaatgtaacttaaattcgggttatgctttcgagtatgaaccattgaggaaagaattatcaaaatccaaatcaaatgcagtgtccctcttgtctcacttgtggctagcaaatacagcagcagccttgagaataaatacagatttgctgcctactagctaccagctggtcaagtttgaagatattgtgcattttcctcagaaaactactgaaaggatttttgcctttnnnnnnnnnnnnnnnnctcctgctagtttaaaccaaatattgtttgccacctctacaaaccttttttaccttccctatgaaggggaaatatcaccaactaatactaatgtttggaaacagaacttgcatagagtacaatagacacttcaaacaatagattctaacattctctgaaacacttgagatgtttgagctaccatttatatgggttatttatatttagtctaagtaacacatacatgtttaattgattctgttttcatggatagattcaactaagtcttccaagcaattaattttttgttcgtcgtcgtttttccttcatacgttatctagttatgcagcactggaaacagactgaagatcataaaccagttttatcagacctatgtgtaataagactcctgttaatacaaaaataaaaagctaaaagcaaaaaaaaaaaaaaaa

SEQ ID NO: 6439 - DNA, 2884 bp, Homo sapiens
  misc_feature (325)..(347): n is a, c, g, or t
  misc_feature (1980)..(2000): n is a, c, g, or t
ttttcactttaaagagttctgtgagtcagaagtcattttgactgccctcaataaaattagtaatgcaattggtcattttctctttacagattgttcagttcaagggaatgaagaattcagaataattttggtaaatggattccaatatcgggaataagaataagctgaacagttgacctgctttgaagaaacatactgtccatttgtctaaaataatctataacaaccaaaccaatcaaaatgaattcaacattattttcccaggttgaaaatcattcagtccactctaatttctcagagaagaatgcccagcttctggcttttnnnnnnnnnnnnnnnnnnnnnnncttggccatgatatttaccttagctcttgcttatggagctgtgatcattcttggtgtctctggaaacctggccttgatcataatcatcttgaaacaaaaggagatgagaaatgttaccaacatcctgattgtgaacctttccttctcagacttgcttgttgccatcatgtgtctcccctttacatttgtctacacattaatggaccactgggtctttggtgaggcgatgtgtaagttgaatccttttgtgcaatgtgtttcaatcactgtgtccattttctctctggttctcattgctgtggaacgacatcagctgataatcaaccctcgagggtggagaccaaataatagacatgcttatgtaggtattgctgtgatttgggtccttgctgtggcttcttctttgcctttcctgatctaccaagtaatgactgatgagccgttccaaaatgtaacacttgatgcgtacaaagacaaatacgtgtgctttgatcaatttccatcggactctcataggttgtcttataccactctcctcttggtgctgcagtattttggtccactttgttttatatttatttgctacttcaaggtaagaaaactttttttctatcatttccatttttaccttctttacacagaattcctcatcaaatgagtgtttctatttaaacttttttcttccatagatatatatacgcctaaaaaggagaaacaacatgatggacaagatgagagacaataagtacaggtccagtgaaaccaaaagaatcaatatcatgctgctctccattgtggtagcatttgcagtctgctggctccctcttaccatctttaacactgtgtttgattggaatcatcagatcattgctacctgcaaccacaatctgttattcctgctctgccacctcacagcaatgatatccacttgtgtcaaccccatattttatgggttcctgaacaaaaacttccagagagacttgcagttcttcttcaacttttgtgatttccggtctcgggatgatgattatgaaacaatagccatgtccacgatgcacacagatgtttccaaaacttctttgaagcaagcaagcccagtcgcatttaaaaaaatcaacaacaatgatgataatgaaaaaatctgaaactacttatagcctatggtcccggatgacatctgtttaaaaacaagcacaacctgcaacatactttgattacctgttctcccaaggaatggggttgaaatcatttgaaaatgactaagattttcttgtcttgctttttactgcttttgttgtagttgtcataattacatttggaacaaaaggtgtgggctttggggtcttctggaaatagttttgaccagacatctttgaagtgctttttgtgaatttatgcatataatataaagacttttatactgtacttattggaatgaaatttctttaaagtattacgatgcgctgacttcagaagtacctgccatccaatacggtcattagattgggtcatcttgattagattagattagattagattgtcaacagattgggccatccttactttatgataggcatcattttagtgtgttacaatagtaacagtatgcaaaagcagcattcaggagccgaannnnnnnnnnnnnnnnnnnnntcagaagtggtttgaggtttctgttttttggtggtttttgtttgttttttttttttttcaccttaagggaggctttcatttcctcccgactgattgtcacttaaatcaaaatttaaaaatgaataaaaagacatacttctcagctgcaaatattatggagaattgggcacccacaggaatgaagagagaaagcagctccccaacttcaaaaccattttggtacctgacaacaagagcattttagagtaattaatttaataaagtaaattagtattgctgcaaatagctaaattatatttatttgaattgatggtcaagagattttccattttttttacagactgttcagtgtttgtcaagcttctggtctaatatgtactcgaaagactttccgcttacaatttgtagaaacacaaatatcgttttccatacagcagtgcctatatagtgactgattttaactttcaatgtccatctttcaaaggaagtaacaccaaggtacaatgttaaaggaatattcactttacctagcagggaaaaatacacaaaaactgcagatacttcatatagcccattttaacttgtataaactgtgtgacttgtggcgtcttataaataatgcactgtaaagattactgaatagttgtgtcatgttaatgtgcctaatttcatgtatcttgtaatcatgattgagcctcagaatcatttggagaaactatattttaaagaacaagacatacttcaatgtattatacagataaagtattacatgtgtttgattttaaaagggcggacattttattaaaatcaatattgtttttgctttttctgaggagtctctttcagtttcattttttctcatcccatgacttccctccgatggt

SEQ ID NO: 6440 - DNA, 2122 bp, Homo sapiens
  misc_feature (2093)..(2117): n is a, c, g, or t
ttactgaattaccgggatagaaaacatcaagctgatgcgtgccctactctcccacccctttgtggaaaccgcttcagcatttgcttggaatcagtaagctgaagaacaaaatcagcctggtcaccagcttttcggaacagcagagacacagagggcagtcatgagtgaggtcaccaagaattccctggagaaaatccttccacagctgaaatgccatttcacctggaacttattcaaggaagacagtgtctcaagggatctagaagatagagtgtgtaaccagattgaatttttaaacactgagttcaaagctacaatgtacaacttgttggcctacataaaacacctagatggtaacaacgaggcagccctggaatgcttacggcaagctgaagagttaatccagcaagaacatgctgaccaagcagaaatcagaagtctagtcacttggggaaactacgcctgggtctactatcacttgggcagactctcagatgctcagatttatgtagataaggtgaaacaaacctgcaagaaattttcaaatccatacagtattgagtattctgaacttgactgtgaggaagggtggacacaactgaagtgtggaagaaatgaaagggcgaaggtgtgttttgagaaggctctggaagaaaagcccaacaacccagaattctcctctggactggcaattgcgatgtaccatctggataatcacccagagaaacagttctctactgatgttttgaagcaggccattgagctgagtcctgataaccaatacgtcaaggttctcttgggcctgaaactgcagaagatgaataaagaagctgaaggagagcagtttgttgaagaagccttggaaaagtctccttgccaaacagatgtcctccgcagtgcagccaaattttacagaagaaaaggtgacctagacaaagctattgaactgtttcaacgggtgttggaatccacaccaaacaatggctacctctatcaccagattgggtgctgctacaaggcaaaagtaagacaaatgcagaatacaggagaatctgaagctagtggaaataaagagatgattgaagcactaaagcaatatgctatggactattcgaataaagctcttgagaagggactgaatcctctgaatgcatactccgatctcgctgagttcctggagacggaatgttatcagacaccattcaataaggaagtccctgatgctgaaaagcaacaatcccatcagcgctactgcaaccttcagaaatataatgggaagtctgaagacactgctgtgcaacatggtttagagggtttgtccataagcaaaaaatcaactgacaaggaagagatcaaagaccaaccacagaatgtatctgaaaatctgcttccacaaaatgcaccaaattattggtatcttcaaggattaattcataagcagaatggagatctgctgcaagcagccaaatgttatgagaaggaactgggccgcctgctaagggatgccccttcaggcataggcagtattttcctgtcagcatctgagcttgaggatggtagtgaggaaatgggccagggcgcagtcagctccagtcccagagagctcctctctaactcagagcaactgaactgagacagaggaggaaaacagagcatcagaagcctgcagtggtggttgtgacgggtaggaggataggaagacagggggccccaacctgggattgctgagcagggaagctttgcatgttgctctaaggtacatttttaaagagttgttttttggccgggcgcagtggctcatgcctgtaatcccagcactttgggaggccgaggtgggcggatcacgaggtctggagtttgagaccatcctggctaacacagtgaaatcccgtctctactaaaaatacaaaaaattagccaggcgtggtggctggcacctgtagtcccagctacttgggaggctgaggcaggagaatggcgtgaacctggaaggaagaggttgcagtgagccaagattgcgcccctgcactccagcctgggcaacagagcaagactccatctcaaaaaaaaaaaaaaaaaaaaaaaaagggcgnnnnnnnnnnnnnnnnnnnnnnnnnagatg

SEQ ID NO: 6441 - DNA, 7589 bp, Homo sapiens
  misc_feature (1736)..(1890): n is a, c, g, or t
  misc_feature (1971)..(1987): n is a, c, g, or t
  misc_feature (2233)..(2247): n is a, c, g, or t
  misc_feature (2267)..(2291): n is a, c, g, or t
  misc_feature (2392)..(2406): n is a, c, g, or t
  misc_feature (2526)..(2555): n is a, c, g, or t
  misc_feature (2566)..(2605): n is a, c, g, or t
  misc_feature (3047)..(3090): n is a, c, g, or t
  misc_feature (3406)..(3420): n is a, c, g, or t
gcgcggaggcagggaaccggagccttggagcgacccaacccctcgtctcgctgccctcccgcgcctgcaacggtgcgcggagactccggcgaactcagacacccaacggcggagaacagaagcggcaggcggcggacgtggcccggaagctgcgcgccgaacgcagcgcacccgctgccgagcagaggagccgcgcctttccccgaccctcggctccagcccccggcgcctgccgcctcgcagcccctctgcgtcctcggctcgggggccggcaccggcgatgccgagcggacgctccagtcctccgacccgctgaagaagcagcagccgctcgcccggagcctacggggattgtgcgagcggatcgtgctcggtggaggctcgggctgcggggcgcggggactccggggggcggggggagggaccgctctgtcggtgcccggcgccagccgcggctttgaagggtctccctcccctgcccttagcagctctgccacggactccgggaggctgcgggcggcgtcctgagggctccccagcagacccaatcggacttgagaaggtgatcgctctgctctcccaacccccttccctccccattccccccacttaactttttgtctccgttcatccgcggcttcgtcccctccccggcagacccacccgcggctgtgacaaccgcccggggcatgggccccccaacacggctcctagaggccccgcggcctcgcaagatgtgagaggccctccccgggcagaatcggagcttcaggagaggagctaataccccgccccccgtccctcacatcaggcggggtggaggtgcgcgctgagcccccgcggtgctgagcgtcccggagcgcccaatcctgggctggaacgagtagctggccggaggcgcgccgcggagagccggctgtcatgccctattgatccccctctgccccccgccaagtatgtttgggctggaccaattcgagccccaggtcaacagcaggaacgctggccagggcgagaggaactttaacgagaccggactgagcatgaacacccactttaaggccccggctttccacactggggggccccctggccctgtggatcctgctatgagcgcgctggggcaacccccgatcttgggcatgaacatggagccctacggcttccacgcgcgcggccactcggagttgcacgcaggggggctgcaagcgcagcctgtgcacggcttctttggcggccagcagcctcaccacggccacccgggaagtcatcatccccaccagcatcacccccactttgggggcaacttcggtggcccggaccccggggcctcgtgcctgcacgggggtcgcctgctcggctacggcggcgcagccggaggcctgggcagccagccgcccttcgccgagggctatgagcacatggcggagagccaggggcctgagagcttcggcccgcagcgaccggggaacctcccggacttccacagttcaggtgcctccagccaccgcgtgccggccccatgcctgccgctggaccagagccctaaccgagccgcctccttccacggcctgccgtcctccagcggctccgattcccacagtctggagccacggagggtgacgaaccaaggagccgtcgactcgctggaatacaattaccgggcgaggcgccctcgggacattttgacatgttttcgccctctgactccgaagggcagctgcctcattatgcannnnnnnnnnnnnnnnnnnnnnnnnnnnnnnnnnnnnnnnnnnnnnnnnnnnnnnnnnnnnnnnnnnnnnnnnnnnnnnnnnnnnnnnnnnnnnnnnnnnnnnnnnnnnnnnnnnnnnnnnnnnnnnnnnnnnnnnnnnnnnnnnnnnnnnnnnntgttctttgagaggttcagtggggccagaaagatgcctgtgggtctggagccctcagtgggctccaggcacccgttaatgnnnnnnnnnnnnnnnnncccgccaccccctcagcagcagcccccgcagcagccgccacagcagcagccgccgccgccacccgggcttctagtccgacaaaattcgttgcccgcctgcgctccctcggccccagcagggcgaggcgggcacgcccagcggcggcctgcaggacggaggccccatgctgcccagccagcacgcgcaattcgagtatcccatccaccggctggagaaccggagcatgcacccttattccgagcctnnnnnnnnnnnnnnncatcctcctccgcagcaggnnnnnnnnnnnnnnnnnnnnnnnnncgacgcgcccccctacatgaacgtggccaagaggcgcgcttcgactttccgggcagcgcgggagtggaccgctgcgcttcgtggaacggcagcatgcacannnnnnnnnnnnnnnatcacctctccccttccgcctacccaggcctacccggcgagttcacaccgcctgtgcccgacagcttcccttcggggccgcccctgcagcatccggccccggaccaccagtccctgcaannnnnnnnnnnnnnnnnnnnnnnnnnnnnncagcagcagcnnnnnnnnnnnnnnnnnnnnnnnnnnnnnnnnnnnnnnnngcgccaaaacgcggccctcatgattaagcagatggcgtcgcggaatcagcagcagcggctgcgccagcccaacctggctcagctaggccaccccggggacgtgggccagggcggcctggtgcatggcggcccggtgggcggcttggcccagccgaactttgagcgcgaaggcggcagcacgggcgccgggcgtctgggcaccttcgagcagcaggcgccgcacttggcgcaagagagcgcgtggttctcaggtccgcatccgccgcccggagacctgctgccccgtaggatgggcggctcgggtctgcccgctgactgtggcccgcacgaccccagcctggcgccccctcctccgcctggtggctcgggggtgctgttccggggccctctgcaggagccgatgaggatgcccggagaggccacgtgccgcgctgccttcacnnnnnnnnnnnnnnnnnnnnnnnnnnnnnnnnnnnnnnnnnnnnagtcgcccggggcgggcgtggggctccccagcgctgcttcggagcgccggcccccgccgccggactttgctacgtctgcgctcgggggccagccgggctttccgtttggtgcagccggccggcagtccacgccgcacagcggtccaggcgtgaactcgccccccagcgcgggagggggcggtggcagctctggtggcggcggtggcgggggtgcctacccgccgcagcctgatttccagcccagccagcgcacctcggccagtaaattgggcgcgctctcgctgggctccttcaacaagcccagctccaaggacannnnnnnnnnnnnnngctgcctggctgcgctctccaccgcttgccagaacatgatcgccagcctcggggcccccaacctcaacgtgaccttcaacaagaagaacccgccagagggcaagaggaaactgagccagaacgagaccgacggcgcggcagtggccggcaacccgggctcggattacttcccaggagggactgctcctgggggccccaggacccggaggccgtccgggaccagtagcagcggctccaaagcctcggggccgcccaaccctccagcccagggggacggcaccagcctctcccccaactacaccctggaatccacgtcggggaatgacggcaagccggtctccgggggcggcggccggggacggggtcgcagaaaaagggacagtggtcacgtgagccctggcaccttctttgacaagtactcggcggctccggacagcgggggcgcacctggggtgagcccagggcagcagcaagcgtcaggcgcagccgtcgggggaagctccgcaggcgagacgcgcggggcaccgacgccccacgaaaaggcgctcacgtcgccatcctgggggaagggggctgagttgctcctgggggatcagccggacctcattgggtccctggacggcggggccaagtcggacagtagttcgccaaacgtgggtgagttcgcctcggacgaggtgagcacgagctacgccaatgaggacgaggtgtcgtccagctctgacaacccccaggcactagttaaagcgagcaggagtcccctggtgaccggctcgcccaaactccctccccgtggggtaggcgccggggaacacggaccgaaggcgcccccgcccgccctcggcctgggcatcatgtctaactctacctcgacccctgacagctacggcggcggtgggggcccgggccatccgggcactccgggcctggagcaggtccgcaccccgacgagcagcagcggcgccccgccacccgacgagatccaccccctggagatccttcaggcgcagatccagctacagaggcagcagttcagcatctccgaggaccagcctctggggctgaagggtggcaagaagggtgagtgcgccgtcggggcctcaggggcgcagaatggcgacagcgagctgggcagctgctgctccgaggcggtcaagagcgccatgagcaccattgacctggactcgctgatggcagagcacagcgctgcctggtacatgcccgctgacaaggccctggtggacagcgcggacgacgacaagacgttggcgccctgggagaaggccaaaccccagaaccccaacagcaaagaagcccacgacctccctgcaaacaaggcctcagcatcccagcctggcagccacttgcagtgcctgtctgtccactgcacagacgacgtgggtgacgccaaggctcgagcctccgtgcccacctggcggtccctgcattctgacatctccaacagatttgggacattcgtggctgccctaacttgaatgacaagaaagatcccctcctctaccaggcccttcctctccccctgtctgtttccttccccctcaaccttaccccacccctctgttaatttgaaagggccactattgctgagtggatgagttttttttttttcctctaggttggtacctgcttagtggcatatggaccggaaagggttaatttaaagggggggaacctcaaaagtttttttaaaaaagaaacttgtctgccacagtatgttaccagtgttaacccttctgcagttagcaaacttttgcttaagcctttttcctctagatactccccatgtttcggtaatcttggcatacattttttagatgacctctttccttgttttgttttcatgctgctgtatgtccaagtattgttatttcataataagacaagagttgctttcttttttattctttttccttttcttaccccctccccttttattttctttttgctttgttcactgcttattaaaatggaaatcctggagaatagtagttctggaatattgccgggtgaaagtccaattgtcatcacaatgttatatattgacaccccagtgtcatcagtcaggcaggagccaaacaatgaatgcccctcttaggtattccgcctgggattttgttttgtctgttccctaagaaaatatattttcattcctgcaaacacagtgctcagccttcagttcccttccacttgagttctctcttctcctgctggaagccgcccctctctgcgatggacgtgaggacgtgtccagctctgctctgtgggaaggagttggaatgttcgacagcagtgttttctctccttttctgggcctcctcgcaaatgcccaggccctgcattttcacgctgtgctaagcagcctttggtctgcatgggggatggtgtgctcccagcctgcagtctttggagcaaggctgctgcccgtgccttgggtgctggagttggaggaggctgttctcagccctttcccttttctgaaagctgttcctggccgggcatcccagggaagaaggaggggactgcgtgtatctcctccacctctcccattccatccccagtccagcctgggcaaccccacccctgggagggatgaggcaccctcttgctcagcctgctcagccttctctgagcctttgcagggatctgcagactcctgagggctagaggacagagaaagagaatagaatgaaatgactttgattcctgcgccttttagttttgaactctggaattcctctgccccctccccaacatttttttggaatctcaccctgttgcaaaactagagccatgtcccaagcatctcacaaaggaataactgctctgagcagagatgagtggtggttggcaggggcaggcaactttgggtgctgctgatgcctgcaaaagccatttatggcttgtggtggggggcacatagattccccggtgggttagacaggaagtaactgatatcacttcacccaaatatataaccgtgatggttatctatttaatttcagtttttgttaacgagcgtgtcttactaaaacgctccactttgagctcccccaccccctccaggtcctcagagtttgcagatctgggctttctaaagcaagtgacctgaaggctctgggctcaccatacaacacccacgttgtttatttcaaagaacttttcagcgaagggagaggagctttcagaaaaacctcactctttcccctcccttctcccctctttccttctgccggtccttttggctggggtctgagtctgcggttctcgcctgggcagtcttgacgaggagcaaaccccgccttcagagggcagacaaagcaggtggcatgaattgatcagcgagaaaggtgtgagccgaggcagttcctgcgttctgctacaaaaggaatggaaagggaagggaatttccccccaccatgggctgtgggagagttgaccgtattctgggcaagactccatgacccctctgattctgcagtgtacagctgtttgagagcctcatcattttacttttgaaacaggaatgatttctccttaattgcttaaggccggggagcaaagtgtcttaacttctgtctttgactttcccagcgttgagtcatcaacactttgccaattagctcatggtcctggcaacctcagaaacccctgaagttttaaaaactttctcgctccccacgaccccagaatgaaacagctttaaaaatagccttaagcaaaaggatgttatttcattaaatttggtttaatggaaagaataaaagtaaatgaaaaacacaccctacacactagactccgaacactggtaatcagtactgcatagcaaactctttgggaaagaaaacgaaaatgttattgcacatgtaaaatatgaaaacttaactctgctgtgtgttaggcaatcctgtaatcttttttgactcttaaaagaaattcatttctgaaatgcttggttggaagactgtgacaatagctcatgaaattgagtgttatttttttctttcttttttaaaaaaatatgtaaagtgcagtcttctgtattcctgcatattgtatatacctgtatatgttttcctgagcagttaaataacaataaatatgacgttaatggtgaaaaaaaaaaaaaaaaaaaaaaaaattcgcggccc

SEQ ID NO: 6442 - DNA, 2729 bp, Homo sapiens
  misc_feature (2008)..(2018): n is a, c, g, or t
  misc_feature (2379)..(2389): n is a, c, g, or t
  misc_feature (2527)..(2541): n is a, c, g, or t
acgcacgcacacacgtgtgcgcttctctgctccggagctgctgctgctcctgctctcagcgccgcagtggaaggcaggaccgaaccgctccttctttaaatatataaatttcagcccaggtcagcctcggcggcccccctcaccgcgctcccggcgcccctcccgtcagttcgccagctgccagccccgggaccttttcatctcttcccttttggccggaggagccgagttcagatccgccactccgcacccgagactgacacactgaactccacttcctcctcttaaatttatttctacttaatagccactcgtctctttttttccccatctcattgctccaagaatttttttcttcttactcgccaaagtcagggttccctctgcccgtcccgtattaatatttccacttttggaactactggccttttctttttaaaggaattcaagcaggatacgtttttctgttgggcattgactagattgtttgcaaaagtttcgcatcaaaaacaacaacaacaaaaaaccaaacaactctccttgatctatactttgagaattgttgatttcttttttttattctgacttttaaaaacaacttttttttccacttttttaaaaaatgcactactgtgtgctgagcgcttttctgatcctgcatctggtcacggtcgcgctcagcctgtctacctgcagcacactatggaccacgttaatgggcccaagaaggatcgaaggcgatccgcgggcagatcctgagcaagctgaagctcaccagtcccccagaagactatcctgagcccgaggaagtccccccggaggtgatttccatcctaaaacagcaccagggacttgctccaggagaaggcgagccggagggcggccgcctgcgagcgcgagaggagcgacgaagagtactacgccaaggaggtttacaaaatagacatgccgcccttcttcccctccgaaactgtctgcccagttgttacaacaccctctggctcagtgggcagcttgtgctccagacagtcccaggtgctctgtgggtaccttgatgccatcccgcccactttctacagaccctacttcagaattgttcgatttgacgtctcagcaatggagaagaatgcttccaatttggtgaaagcagagttcagagtctttcgtttgcagaacccaaaagccagagtgcctgaacaacggattgagctatatcagattctcaagtccaaagatttaacatctccaacccagcgctacatcgacagcaaagttgtgaaaacaagagcagaaggcgaatggctctccttcgatgtaactgatgctgttcatgaatggcttcaccataaagacaggaacctgggatttaaaataagcttacactgtccctgctgcacttttgtaccatctaataattacatcatcccaaataaaagtgaagaactagaagcaagatttgcaggtattgatggcacctccacatataccagtggtgatcagaaaactataaagtccactaggaaaaaaaacagtgggaagaccccacatctcctgctaatgttattgccctcctacagacttgagtcacaacagaccaaccggcggaagaagcgtgctttggatgcggcctattgctttagaaatgtgcaggataattgctgcctacgtccactttacattgatttcaagagggatctagggtggaaatggatacacgaacccaaagggtacaatgccaacttctgtgctggagcatgcccgtatttatggagttcagacactcagcacagcagggtcctgagcttatataataccataaatccagaagcatctgcttctccttgctgcgtgtcccaagatttagaacctctaaccattctctactacattggcaaaacacccaagattgaacagctttctaatatgattgtaaagtcttgcaaatgcagctaaaattcttggaaaagtggcaagaccaaaatgacaatgatgatgataatgagagtgnnnnnnnnnnncgatgatgcttgtaacaagaaaacataagagagccttggttcatcagtgttaaaaaatttttgaaaaggcggtactagttcagacactttggaagtttgtgttctgtttgttaaaactggcatctgacacaaaaaaagttgaaggccttattctacatttcacctactttgtaagtgagagagacaagaagcaaattttttttaaagaaaaaaataaacactggaagaatttattagtgttaattatgtgaacaacgacaacaacaacaacaacaacaaacaggaaaatcccattaagtggagttgctgtacgtaccgttcctatcccgcgcctcacttgatttttctgtattgctatgcnnnnnnnnnnncttcccattcttactcttagagttaacagtgagttatttattgtgtgttactatataatgaacgtttcattgcccttggaaaataaaacaggtgtataaagtggagaccaaatactttgccagaaactcatggatggnnnnnnnnnnnnnnnctcaaacgagccagaaaaaaagaggtcatattaatgggatgaaaacccaagtgagttattatatgaccgagaaagtctgcattaagataaagaccctgaaaacacatgttatgtatcagctgcctaaggaagcttcttgtaaggtccaaaaactaaaaagactgttaataaaagaaactttcagtcag

SEQ ID NO: 6443 - DNA, 1606 bp, Homo sapiens
gaaaagaggctgagtttacctgaatgaggagctctcattaccttctgcccatcacttaataaatagccagccaattcatcaacattctggtacactgttggagagatgagacagtcacaccagctgcccctagtggggctcttactgttttcttttattccaagccaactatgcgagatttgtgaggtaagtgaagaaaactacatccgcctaaaacctctgttgaatacaatgatccagtcaaactataacaggggaaccagcgctgtcaatgttgtgttgtccctcaaacttgttggaatccagatccaaaccctgatgcaaaagatgatccaacaaatcaaatacaatgtgaaaagcagattgtcagatgtaagctcgggagagcttgccttgattatactggctttgggagtatgtcgtaacgctgaggaaaacttaatatatgattaccacctgatcgacaagctagaaaataaattccaagcagaaattgaaaatatggaagcacacaatggcactcccctgactaactactaccagctcagcctggacgttttggccttgtgtctgttcaatgggaactactcaaccgccgaagttgtcaaccacttcactcctgaaaataaaaactattattttggtagccagttctcagtagatactggtgcaatggctgtcctggctctgacctgtgtgaagaagagtctaataaatgggcagatcaaagcagatgaaggcagtttaaagaacatcagtatttatacaaagtcactggtagaaaagattctgtctgagaaaaaagaaaatggtctcattggaaacacatttagcacaggagaagccatgcaggccctctttgtatcatcagactattataatgaaaatgactggaattgccaacaaactctgaatacagtgctcacggaaatttctcaaggagcattcagcaatccaaacgctgcagcccaggtcttacctgccctgatgggaaagaccttcttggatattaacaaagactcttcttgcgtctctgcttcaggtaacttcaacatctccgctgatgagcctataactgtgacacctcctgactcacaatcatatatctccgtcaattactctgtgagaatcaatgaaacatatttcaccaatgtcactgtgctaaatggttctgtcttcctcagtgtgatggagaaagcccagaaaatgaatgatactatatttggtttcacaatggaggagcgctcatgggggccctatatcacctgtattcagggcctatgtgccaacaataatgacagaacctactgggaacttctgagtggaggcgaaccactgagccaaggagctggtagttacgttgtccgcaatggagaaaacttggaggttcgctggagcaaatactaataagcccaaactttcctcagctgcataaaatccatttgcagtggagttccatgtttattgtccttatgccttcttcttcatttatcccagtacgagcaggagagttaataacctccccttctctctctacatgttcaataaaagttgttgaaagattaacaactgtaaaaaaaaaaaaaaaaaaaaaaaaaaaaaacac

SEQ ID NO: 6444 - DNA, 2351 bp, Homo sapiens
  misc_feature (14)..(14): n is a, c, g, or t
  misc_feature (28)..(28): n is a, c, g, or t
  misc_feature (2223)..(2223): n is a, c, g, or t
  misc_feature (2236)..(2236): n is a, c, g, or t
  misc_feature (2292)..(2292): n is a, c, g, or t
  misc_feature (2339)..(2339): n is a, c, g, or t
ggtccggaattccncgggatgtcaaacncacagcggagagaataatcgaatgaaaactgaagctttctgctttattccttttctccttctcctttcagtcagggtctcactctgtcacccaggctgacacgatcatggctcactacaatctctgccttcctgcctcaagggttcttccttgagcagcgcaggtctgaggagctgagaagggaggcttacgtgaagggaatttagataatgggctgtgtgcaatgtaaggataaagaagcaacaaaactgacggaggagagggacggcagcctgaaccagagctctgggtaccgctatggcacagaccccacccctcagcactaccccagcttcggtgtgacctccatccccaactacaacaacttccacgcagccgggggccaaggactcaccgtctttggaggtgtgaactcttcgtctcatacggggaccttgcgtacgagaggaggaacaggagtgacactctttgtggccctttatgactatgaagcacggacagaagatgacctgagttttcacaaaggagaaaaatttcaaatattgaacagctcggaaggagattggtgggaagcccgctccttgacaactggagagacaggttacattcccagcaattatgtggctccagttgactctatccaggcagaagagtggtactttggaaaacttggccgaaaagatgctgagcgacagctattgtcctttggaaacccaagaggtacctttcttatccgcgagagtgaaaccaccaaaggtgcctattcactttctatccgtgattgggatgatatgaaaggagaccatgtcaaacattataaaattcgcaaacttgacaatggtggatactacattaccacccgggcccagtttgaaacacttcagcagcttgtacaacattactcaggtacctggaatggaaacacaaaagtagccataaagactcttaaaccaggcacaatgtcccccgaatcattccttgaggaagcgcagatcatgaagaagctgaagcacgacaagctggtccagctctatgcagtggtgtctgaggagcccatctacatcgtcaccgagtatatgaacaaaggaagtttactggatttcttaaaagatggagaaggaagagctctgaaattaccaaatcttgtggacatggcagcacaggtggctgcaggaatggcttacatcgagcgcatgaattatatccatagagatctgcgatcagcaaacattctagtggggaatggactcatatgcaagattgctgacttcggattggcccgattgatagaagacaatgagtacacagcaagacaaggtgcaaagttccccatcaagtggacggcccccgaggcagccctgtacgggaggttcacaatcaagtctgacgtgtggtcttttggaatcttactcacagagctggtcaccaaaggaagagtgccatacccaggcatgaacaaccgggaggtgctggagcaggtggagcgaggctacaggatgccctgcccgcaggactgccccatctctctgcatgagctcatgatccactgctggaaaaaggaccctgaagaacgccccacttttgagtacttgcagagcttcctggaagactactttaccgcgacagagccccagtaccaacctggtgaaaacctgtaaggcccgggtctgcggagagaggccttgtcccagaggctgccccacccctccccattagctttcaattccgtagccagctgctccccagcagcggaaccgcccaggatcagattgcatgtgactctgaagctgacgaacttccatggccctcattaatgacacttgtccccaaatccgaacctcctctgtgaagcattcgagacagaaccttgttatttctcagactttggaaaatgcattgtatcgatgttatgtaaaaggccaaacctctgttcagtgtaaatagttactccagtgccaacaatcctagtgctttccttttttaaaaatgcaaatcctatgtgattttaactctgtcttcacctgattcaactaaaaaaaaaaaagtattattttccaaaagtggcctctttgtctaaaacaataaaattttttttcatgttttaacaaaaaccaaaaaaaaaaaaaaaaaaaaaaaaaaaaaaaaaaaaaaaaaatggaatatatataatatatatgtccctggtacatatacangtgggggtgctangtgggagactgtgggccgggcctggggccacccaggctgcgggggcccagaggggnggggtttttactggcaaggtcaggccttcaaggcacccggtggtttnttcttggaaaac

SEQ ID NO: 6445 - DNA, 518 bp, Homo sapiens
acccaagcgtacgtccaggcgcaggggccacccgaacagtctctcctcctcacagaagcctggagctgggcatccaagaagaagcagcctcatttgttttctggtgtcatcgtaggtggccacctatggcttttgggaccaaaaagaagaatgtacttcatctggttgggctggattccctctgataagccttcccagttgactgaaagatgaggctaggctctagcaagttgaagtcaaaccagctccttcaagaagctttgagcagaatgaagtggggaggacccagcttccagcccaggaagcccactgtacctggagccatctgggataagactttgacccatgactcccatatccacagcctgtccatcctagcccatcccagtttatcctgtatcatttgagctgggattcccacatcctctgagttggaagtcccatctcaagtcttcaataaagactcttgaatattgaatcacaaaaaaaaaaaaaaaaatataaagagataaaaaagg

SEQ ID NO: 6446 - DNA, 2620 bp, Homo sapiens
ccagcaaaacctgtttagacacatggacaacaatcccagcgctacaaggcacacagtccgcttcttcgtcctcagggttgccagcgcttcctggaagtcctgaagctctcgcagtgcagtgagttcatgcaccttcttgccaagcctcagtctttgggatctggggaggccgcctggttttcctccctccttctgcacgtctgctggggtctcttcctctccaggccttgccgtccccctggcctctcttcccagctcacacatgaagatgcacttgcaaagggctctggtggtcctggccctgctgaactttgccacggtcagcctctctctgtccacttgcaccaccttggacttcggccacatcaagaagaagagggtggaagccattaggggacagatcttgagcaagctcaggctcaccagcccccctgagccaacggtgatgacccacgtcccctatcaggtcctggccctttacaacagcacccgggagctgctggaggagatgcatggggagagggaggaaggctgcacccaggaaaacaccgagtcggaatactatgccaaagaaatccataaattcgacatgatccaggggctggcggagcacaacgaactggctgtctgccctaaaggaattacctccaaggttttccgcttcaatgtgtcctcagtggagaaaaatagaaccaacctattccgagcagaattccgggtcttgcgggtgcccaaccccagctctaagcggaatgagcagaggatcgagctcttccagatccttcggccagatgagcacattgccaaacagcgctatatcggtggcaagaatctgcccacacggggcactgccgagtggctgtcctttgatgtcactgacactgtgcgtgagtggctgttgagaagagagtccaacttaggtctagaaatcagcattcactgtccatgtcacacctttcagcccaatggagatatcctggaaaacattcacgaggtgatggaaatcaaattcaaaggcgtggacaatgaggatgaccatggccgtggagatctggggcgcctcaagaagcagaaggatcaccacaaccctcatctaatcctcatgatgattcccccacaccggctcgacaacccgggccaggggggtcagaggaagaagcgggctttggacaccaattactgcttccgcaacttggaggagaactgctgtgtgcgccccctctacattgacttccgacaggatctgggctggaagtgggtccatgaacctaagggctactatgccaacttctgctcaggcccttgcccatacctccgcagtgcagacacaacccacagcacggtgctgggactgtacaacactctgaaccctgaagcatctgcctcgccttgctgcgtgccccaggacctggagcccctgaccatcctgtactatgttgggaggacccccaaagtggagcagctctccaacatggtggtgaagtcttgtaaatgtagctgagaccccacgtgcgacagagagaggggagagagaaccaccactgcctgactgcccgctcctcgggaaacacacaagcaacaaacctcactgagaggcctggagcccacaaccttcggctccgggcaaatggctgagatggaggtttccttttggaacatttctttcttgctggctctgagaatcacggtggtaaagaaagtgtgggtttggttagaggaaggctgaactcttcagaacacacagactttctgtgacgcagacagaggggatggggatagaggaaagggatggtaagttgagatgttgtgtggcaatgggatttgggctaccctaaagggagaaggaagggcagagaatggctgggtcagggccagactggaagacacttcagatctgaggttggatttgctcattgctgtaccacatctgctctagggaatctggattatgttatacaaggcaagcattttttttttttaaagacaggttacgaagacaaagtcccagaattgtatctcatactgtctgggattaagggcaaatctattacttttgcaaactgtcctctacatcaattaacatcgtgggtcactacagggagaaaatccaggtcatgcagttcctggcccatcaactgtattgggccttttggatatgctgaacgcagaagaaagggtggaaatcaaccctctcctgtctgccctctgggtccctcctctcacctctccctcgatcatatttccccttggacacttggttagacgccttccaggtcaggatgcacatttctggattgtggttccatgcagccttggggcattatgggttcttcccccacttcccctccaagaccctgtgttcatttggtgttcctggaagcaggtgctacaacatgtgaggcattcggggaagctgcacatgtgccacacagtgacttggccccagacgcatagactgaggtataaagacaagtatgaatattactctcaaaatctttgtataaataaatatttttggggcatcctggatgatttcatcttctggaatattgtttctagaacagtaaaagccttattctaaggtgaaaaaaaaaaaaaaaaaaaaaaaaaaaaaaaaaaa

SEQ ID NO: 6447 - DNA, 6258 bp, Homo sapiens
aaaaagatcagagcgcagccgaggacccggcgagagcaaggacgcgcgctcggcgacgcagcgcgaaggaacacaatacacaccgagcatgtaaggccgccgcgcgcgccccacacgcgtacccagcacatacggtgcagagaggacgacgtggccgtccacaccccgtggcaccagccaacgccccgcacctcggcctctctctgatttccttatgtgttgttgttactttgtttgttattgtttgttctgtgattgtttgttatttttatttattattttgttttgttgttgtttgtgtttttgtgtttttgtttttttttgtttttttgttttttttttttttttgtttttttattcttataaatgtgtttaattacaactgctttttttttttcccagcttttcaaaagtttattttaagtttggagactagacaaggtcatactggttttacatcctacgtgatataagtatatatacaaagaaaaaaacaacattggaatattacacagcttgaaggtttgcaaaggttatttgtgtcttagttatttctgcacttaatgacacatcagacgcattgagtatatttcataagttgttgactagcaaagatacaatcattagtaacccaagtcttcaaaattcacaccaaactttatgaagtcattcagaaagagaaagtcaatcctaaaattaaaattggcaactatgataaataccttcaaaaggatgtagatataatggagatgtttaaaagtttagtttcattaattgtaaaattagcatgttatatttactcaatatagtgaagactaggtgattcttacatgtattctacttatggtactgtactgggtttagtgtggaatttacatagaataaatttacttcactttcatgtcatcgacatgaatgacacaaaagctacttcataatactactttacaatagttttcaacatttccatatggtgcgacccctttgctctcatcaattttgggtgtcatgagaacaataggtatcccgttggacatgatgtattgcgaagagcatataaagcagagggaaaatgaaaaagcaagagaaactcatttcaatgctttttctaaaaggtaacaaatataattttaatcaacttccttggaaaatatttttaaaacaggtatcaatagaaaaaattacaaaacatcatatgaagctataaataattttgaaaaactatatcatcataaagcgtaagtaataatcttaaaaatacactcttaagaaggtatgtaatttgcaaaggaaaatggctagatatctgatgggacagtaaaccttgaaagaaactggctaaagagtaagtgtgtgtatatttctgaacctaagtaattatttgtcacgactttaaaatttagccagttacaaatattttaaaatcctaactttaaagttatctaaaaaaggcaatatggaggaaatagtaattttgtttttgaaagatgttgaaaactgatcaccatttcagaggcttcaaattcataatttcataataagaacaagaagtagaaagcatatgggcaaggaacaaatatgtggccagccagtccccttagacgaactaattttgttcttattaaaaatgccaatacaattgactttctctttaaattcttcactatgattgaagaccactccatatatacatcattaagaaatgctgttaacacatggacagacaagacagtaacagtctagtggcttttgttatgcagcacaaatattaaaggaaaaaaatagcagtgttgcgtaggatcttaacatttcatacacataccatcctttcttttccaatacacttaatttaaaactccaataattctgtctaagccttataaaataaatacttgtaaagcttataaattagatgttgaagacttttatggaggcagtgtgagctttaatttgagagacatgtcaatgaaacctccagtatcaataacaaattgttatgataattgcttattttttcaggacctttgaagcaaaataaatagaaatcagttttcatcttgaaaatggtttactactttgtcattagtaaacactttgcttctcacaaataactccacctgtgccttcctgggaaactaccaccagtttcaaatctcaataagatgttagtttcacaggaaatgtggagctgaacaaagaaatgatgagtatgcttggccgaactatgcagcactatattaatatttctttgctaaatttttataaaataaacaaataagccgattttttaaagtaaatataaggatatgtaattaccatctaaatgaagatttaaatttaaagagacatatatattttttgttcttttgtgcaaactgagagtatgggattctttatgaagcaattatttggaaattaaatagttatggcttccttcaaaaataaaactgcagatttaattaacgaatattaaatacagatcaatctactgataggcagtcatgttctacatatatgagtaaacatgacacttcttttagtcaactaataggaaattcaattagaaaaaaattgaattattcaggtaatatacaatattaagaatgtagaatagaactaaaagaaaaagaagtcacataatctcttattagaaataatgaaagtaaaatgagaattataatatcagtactgcatgttacatattcttctttaaaattttgtaataaacattgacagtgtttggtaggcacagggaaacaggataacgtagagtcattacagaagaaaaaaacttattgctaacattgcagtattccttttatcagaattaggtgagtattgattgtaaaagctctatcaactcttgctcttatttgatgactttgagacttttttactcttgctataaaaagaaggctactttctttccctaatatatttctaccaatgcgaataattcaggaaacaatgagagaaaagtaattcacacttaatgtgttgttacttaagagatttgacggataaaataaaatcaaattaaatcattgaaaaggcaggcttagacccccttaaaaacaccgttagttgcctaccataatttgagcactttttcatgaaaaaaaaaaaaaaaccattcagtttcctacagattttgcacagttcattccatggagatacttttagggaaatagggaagagggttgtgaaatgtagcctcccctcattcctcctctgtgcagcccagcagctctgaccgcaatgtgatcctcccgtaccaggaccaaggaaggattcttatgtgtcgtgcatagatgggagggtcgatgacattttttctgtgagtgtcattgtcaaaatttccctggaaaacctaataaagaagagcagaaaaatgtcagtcacctcgtgccgaattcggcacgagcggacgtgctagatcttcacgaggctgggggcgaagatttcgccatggatgaggatggggacgagagcattcacaaactgaaagaaaaagcgaagaaacggaagggtcgcggctttggctccgaagaggggtcccgagcgcggatgcgtgaggattatgacagcgtggagcaggatggcgatgaacccggaccacaacgctctgttgaaggctggattctctttgtaactggagtccatgaggaagccaccgaagaagacatacacgacaaattcgcagaatatggggaaattaaaaacattcatctcaacctcgacaggcgaacaggatatctgaaggggtatactctagttgaatatgaaacatacaaggaagcccaggctgctatggagggactcaatggccaggatttgatgggacagcccatcagcgttgactggtgttttgttcggggtccaccaaaaggcaagaggagaggtggccgaagacgcagcagaagtccagaccggagacgtcgctgacaggtcctctgttgtccaggtgttctcttcaagattccatttgaccatgcagccttggacaaataggactggggtggaacttgctgtgtttatatttaatctcttaccgtatatgcgtagtatttgagttgcgaataaatgttccatttttgttttctacatttaatgttactttcctgtcctaaaattgaaagttctaaagcatagcaaggctgtatggatcattgtgaagatacttctagggactgaactctatgtatttcttttttttcttttttttgagatagagtcttgctgtgttacccagggtggattgcagctgatcatagctcactgcagcttcaaactcttgggctcaagccatccttctgcctcactgtccctagtagttgggattacaggcacatgccaccatgcccagctaaatttttaatatttttgtagagatggggtcttgctgtgttacctgggctagttatgtgagtttctatattagacatagtctcaagtttcaagtaggggtttaaagtagagacactggtcagtatttcttttttggggggaactaggagagcaggagtagaagtgagatgttaagatcttatggcactaaagacttactattctgttcctacatactctgttaggatcagatagatgttatagaaatgccttttgtttctcctgcccttcttgatgtcacagttttttgtacttccagctgtctaaaggcatgaatctcctcttggagcattctcccagacccttctttagaagagtctatactaagttcttggtgccctcttcggcagccaagggtgaaggccccatagaggagaggatccaaaggagcattgaggaggcccaagaggaaaaggatgtggctcaggctgggagggacttcagttagcatggtgggggagaaccagtaccacatacccagtaggtaataaggtgtccagcagaggatgaaggtcagcaagataagcagggccagtctcagggcccggagacgaacacggggacaattgtcaaaggagcgggggagggcaaattcaccagcaggggctaggaatttagaaaatatactgtaattcagacactcagcttctgatctgagtatagggtgaattgatggaggggcatagctagtgagacagagctcgcctcctacaaggaggagaatgttgcaaaccgttttccccttcccaacctgggactatatgatttcttacccccagggattatgatagaaatatgaagccaccaagtctagacttgatggtgttcaagaataaataatactgattgcctccctagtccttgtccagctaactcagctgtttataattgaagggattcaacaaaattatctctagcatcaggtgctagacatggttagaatctcaccatggtttagtgactggtagatagctattaggtaggtagataaataaatgatgctagaggcaacaggtctagggttaaggattaaggcctgggaattggagtctcaccatggctccccttccttgtctggggcctggacacactgaggacaatgcggctatagcagatggccatggcagtcagtggcagcagaaagaggcagcagaaggtgaagaggttataggtggtctcttgccattgagccttgaagctgcctttggtgacacactgagtgaaagggactgggccagctcagtggaccgtgtggaacaggaacagctggagtggagttgaggactattagaactggttcccctcaccacccaacctacccacctatgtcatactgtctcctcccaattcatccttaattccaagtgaagcagcacagtgctgagaaacagtttcatccatggtgccatgttaaagaagttggaaatatatcttgaaaatcctatcttccttttaggcttgaatatgatgctgaacagtaagtttgttaaatcttggaacttaaaacaatcctgctttctcaagtactattctaacattgcgctttataagggatgatatttctaccacctcactcatatttttagctgaaatgattttcctggtatgtctgttattttgtggaaaaagaaatattgtgtaaaatgggtgctgccaaaattccaggccattttgcagggactctgaagtgacctttagtagtaatagtcttatgtgcagtaactataatggtaaagaatgttaaataataaaatttaacattttccaaatgctaaaaaaaaaaaaggggcggcaagatcccaggcgatccggccccttgaaaaggcccaaagaggaaaaaagcggggacag

SEQ ID NO: 6448 - DNA, 3385 bp, Homo sapiens
ctgcgagcggctgcgagcgagagagcgtaagagcaagagagctagagagcgagcaacgggcactcgccccacgcctcccctcagccccaccgcgcgctccgcttgcctctccaccccgcccgactctacccggcccggtccctgcgcggtgcacatgcccatgagctctgggtgcggtgcaggcagcctcgggactctccggcgcgccgccgcgtcccagacaaaggcttggccggcggacccggcccgctgcgccctcgctccccgcatccccagctcttctccgctcattcccccccgtcgcttggctcggcgcgctccggccggccgcaaagtttcccgggcggcagcggcggctgcgcctcgcttcagcgatggccgcggagctgagcatggggccagagctgcccaccagcccgctggccatggagtatgtcaacgacttcgacctgctcaagttcgacgtgaagaaggagccactggggcgcgcggagcgtccgggcaggccctgcacacgcctgcagccagtcggctcggtgtcctccacaccgctcagcactccgtgtagctccgtgccctcgtcgcccagcttcagcccgaccgaacagaagacacacctcgaggatctgtactggatggcgagcaactaccagcagatgaaccccgaggcgctcaacctgacgcccgaggacgcggtggaagcgctcatcggctcgcacccagtgccacagccgctgcaaagcttcgacagctttcgcggcgctcaccaccaccaccatcaccaccaccctcacccgcaccacgcgtacccgggcgccggcgtggcccacgacgagctgggcccgcacgctcacccgcaccatcaccatcatcaccaagcgtcgccgccgccgtccagcgccgctagcccggcgcaacagctgcccactagccaccccgggcccgggccgcacgcgacggcctcggcgacggcggcgggcggcaacggcagcgtggaggaccgcttctccgacgaccagctcgtgtccatgtccgtgcgcgagctgaaccgccacctgcggggcttcaccaaggacgaggtgatccgcctgaagcacaagcggcggaccctgaagaaccggggctacgcccagtcttgcaggtataaacgcgtccagcagaagcaccacctggagaatgagaagacgcagctcattcagcaggtggagcagcttaagcaggaggtgtcccggctggcccgcgagagagacgcctacaaggtcaagtgcgagaaactcgccaactccggcttcagggaggcgggctccaccagcgacagcccctcctctcccgagttctttctgtgagtcgtggccggtcctggcccccgcccttgccccggcccggactccctgtcccacgtccctagtcccagactaccccggaccctgtccctgccgcggccccagccttgacctgtttgacttgagcgagagggaggaagggcgcgcgggccgcgggcgacgggcgggtgcgcgggcgggcaggggaccttggctaaggcgagagtagcgcacgccagcgccgcctcctagactcgagcagagccggagagagagacgagagggtgggaggtcccggagtaacttctctccaggctgaagggcggcgaggcatactcccgataagtcaccaaggccatctggagactcctggctttctgaactttgcgcgttaagccgggacagctgctttgctgcccggagagtagtccgcgccaggaagagagcaacgaggaaaggagagggactctggcgtcccggcaggcgagaggcgaggctgagcgaaagaaggaaggaccagacggaccctgtctgtcagagttcggagaaacactggctcctcagccctgagacacaggccctcagttagggacgctcggggcacgaggctcatcagttttattgcctgctcgattatatagaaaaatacaaaaaatctgcattaaaaatattaatcctgcatgctggacatgtatggtaataatttctattttgtaccattttcttgtttaactttagcatgttgttgatcatggatcatactccccttgtttctttgggtgagaagggatcgcagtttggaaactccggcggctgcgtgcggggtttcagtcccagctgtaggcttgtaaatacccgccccgccaaaccgcatagagaacgtggcagcaagctgagggtctttgtttgggtttattattacggtatttttgtttgtaagttaaaaagaaaaaaaaaaagaaaaagttccgggcattttgcatcagaaaacaactttgtcttggggcacacttggaagttgcatgttttctttccttcccttatccccattcggtcctctttttcctctctcgctttagttttcaaccttgttggtgctgagagagagaaccgagaggtcccagtacaagggcagggcagggcagggaagctgccaagctccgcaccccagaggagtgttctggactacagccttgtcttatggtcaaattgatacccttaataagaaaggaaaggaaaggaaaacagatcctcccctctgctttttattgtaaccagaatcaccctgaggtcccttctgaaccctctgggcctgcgctaattgtaggagccacagcgctcctagggtgagaggcttagccatccctgaccctggcagtgcactggtaagcagacactgcactgaaccaactgctatgctcagaatgtaccagaaacccaaacattggcaagtaattttgcaactttcaagtgcgttctttagaccaatgcattgcgtttctttccctgcttttgagatagtaggaagagttcttggtggtgtccccccccttcaattcttcagttgtatagtagttatagggaagatatgggtgtttttctttattattacttttttttttctgcaggtcagtaaaaggatttaagttgcactgacaaaaataccaaaataaaagtgtatttttaagttcccatttgaaattgctggcgctgctggccggatgcatttttgagtttgtattagttgataaattaacagtaataacaagattgtatgaaccgcatggtgcttgcagttttaaatattgtggatatttgtcctgcatcagaaacgagctttggtttttacagattcaactgtgttgaaatcaaacctgccgcaacagaaattgtttttatttcatgtaaaataagggatcaatttcaaaccctgcttatgatatgaaaatattaaaacctagtctattgtagttttattcagactggtttctgttttttggttattaaaatggtttcctattttgcttattaaaaaaaaaaaaaaaaaaaaaaaaaagaggaaa

SEQ ID NO: 6449 - DNA, 2273 bp, Homo sapiens
ggcacgagggcccgccggaagaaccgagcttggctgtgtttatctcgttggggactaaggcgtcggttggcgcgcaacgggttctaggctgcaggcagctcgaggacccgcggccccgccccggctcggcctggcagatagcagaggcagcaggccgtgccgggggggcatgttgctgtaaccagtggcccaggggatgttacggtggacagtgcacctggagggcgggccccgcagggtgaaccatgctgcagtggctgtcgggcatcgggtatactccttcgggggttactgctctggtgaagactatgagacactgcgtcagatagatgtgcacattttcaatgcagtgtccttgcgttggacaaagctgcccccggtgaagtctgccatccgtgggcaagctcctgtggtaccctacatgcgctatggacactcaaccgtcctcatcgacgacacagtcctcctttggggcgggcggaatgacaccgaaggggcctgcaatgtgctctatgcctttgacgtcaatacgcacaagtggttcacaccccgagtgtcagggacagttcctggggcccgggatggacattcagcctgtgtcctaggcaagatcatgtacatttttgggggctacgagcagcaggcggactgtttttccaatgacattcacaagctagataccagcaccatgacatggactcttatctgtacaaagggcagccctgcacgctggagggacttccactcagccacaatgctgggaagtcacatgtatgtctttgggggccgtgccgaccgctttgggccattccattccaacaatgagatttactgcaaccgcattcgagtctttgacaccagaactgaggcttggctggactgtcccccgactccagtgctgcctgaggggcgccggagccactcggcctttggctacaatggggagctgtacatctttggtggttataatgcaaggctgaaccggcacttccatgacctctggaagtttaatcctgtgtcctttacctggaaaaagattgaaccgaaggggaaggggccatgtccccgccggcgccagtgctgctgtattgttggtgacaagattgtcctctttgggggtaccagtccatctcctgaggaaggcctgggagatgaatttgaccttatagatcattctgacttacacattttggactttagccctagtctgaagactctgtgcaaactggccgtgattcagtataacctagaccagtcctgtttgcctcatgatatcaggtgggagctgaatgccatgaccaccaacagcaatatcagtcgccccatcgtctcctcccatgggtaggaggaagtttctgccacctcccctcctgagcctgctgtcatcttcactgcccctgcccatctgtcacccacctgctcctttgacccctggacttggtatacctccatgtggagttgttgggcgagaggtgttctctgtgctgtgaattcagtggggagctgtagcggggtgggggctaggttcctccccccttgggccgagggccccttccccttggtgctctgtccccatccacctcctttcagctgctcctgggcctcagctctgcccagggccagccaggttctgctgggaagggaagggaatggggagaagggagaagcaagcagtgtctgagcctcaggagcttccccctccccctttgcctatcccctcccctctgcttgagccttgagccttgactgggagctgaaaggagttgcagctgttggcatgagacctccttctccccgtcttggggaggtggggaccagcagataaatcccacccttccttgagctgtcgctgtactctgaagttcagccagctcagattttataaaaattaattaaaatctcaaaaaaaaaaaaaaaaaaaaaaagacccgcacgcccctaaaggacaccccgatgccccagaccccaccagggggggggcccgctcctaaaaaaatcccctcgaaggggggcccaagctttccccggaacccacaactttttttggtaaaaaaaggggggcccctaaaagggagggccccattaaaaaccttaaggcccttgggccctcccatttttaacaccagtcgcgtggcctggggaaaaaaatggcgcaaacttttgggggaatctttcctggaaaaggaaaccccttaccctttgggggggggggcggagacaaacaacttgggacgcaaaatatcgtttaccttttgccagaaaaatatctcccc

SEQ ID NO: 6450 - DNA, 770 bp, Homo sapiens
  misc_feature (3)..(3): n is a, c, g, or t
  misc_feature (70)..(70): n is a, c, g, or t
  misc_feature (170)..(170): n is a, c, g, or t
  misc_feature (204)..(204): n is a, c, g, or t
ggntatgtttatttaaggatccactgtccattaatcaggcccttggcattttatgtacattatttggcantctcgcctatacccactttaaggctcagtgaacaggaaggaagtaggagtaaactggcacaacgtccttaattgggtttttgtggagaaaagaatgttgncccaagaagataaaaaatattgttaagtgtgcangttattaaaaaaaaaaaattgggccaggcacggtggctcacgcctgtaatcccagcactttgggaggccagggccagctgatctcgaactcttgagctcaagccatctgtctgcctcagcctctcgaaagtgcttgggattacaggcctgagccaccaccacctggcccagtaatttcttaatcctacctccctgcttctattgcctagcccgtacatttgaggcttccatggagctttctgtggtactgaaacacttggagtgaactgcaaacttggagtgaactacatccaacctttctaaggtggctggggaaaattcttgtacagcaagttgggacaaaatagccatatagaaacagccatataagatcccaatatagaaaaattgggatattagaggaaatacatgatttccatttatggagtgctacatgtttgcaaaatgtatttctgcttttcatcttcttgacatctgaatattaaaagcagttgttgataatttcatataataaattgagacatatcattaaaaaaaaaaaaaaaaaaaaaaaaaaaaaaaaaaaa

SEQ ID NO: 6451 - DNA, 1888 bp, Homo sapiens
  misc_feature (745)..(760): n is a, c, g, or t
cacttgaccagtgagcgcaagaggctgagcctcagctgtgctttttgtccctttcaggtgcccggctcccctgggcacccagagccccccagataggccggtggaggaggtggaggagctgtccccccaaaactactggcctgtggtctggactccagggccccatttctgatgtcgccaggtgtgcctgagcccatcggggccaggcctgaggaagtgtttcttgggaggatgggatgaccccctgttcccaagagatggcagcacagtggaggccatggtggaaaaggccctgccatggggtccttgagggccaggacagcctgagggagggatggtggccactgcccacaaggggcctggtgggaacgggtcccaggacagactcatagctagaccccgttggcggcctctgtgttgaaccagaactcattaaacacctcctcttgcttcatcctggtgtgcctctttcatggcagggccctcagccaccctgctagatggttaggaccaaggctctgttctcctggaagccaaggtcggcacattggtcttgggcttctcttctctctgggtttcttgttcactaaggagtaacacagaggtcaggcagagaatgggggtctcgcaggctagggacctcagggagaggcctctgttgcccttttcagcaaggctggaaatgggatatgggcaggggacgtcttctctgacttcaccctagaccttctggctccaaatgggnnnnnnnnnnnnnnnnacctgggaccagctctttccaccacagggcattgggcactgggcactttcttatcgagatagtcactcccacgtctggttcgtgatgggcttggccctccagctcagcacaactgcaagaatggattttgtattctctagacggacactgtccaagatggtagccattggccacatgcgacacatttttaatgaattaaaattaatcaagactggaaatgtcggccaggcctggtggctcatgcctgtaatcccagcactttgggaggccatagagggcggatgacttgaggtcaggagtttaagaccagcctggccaacatggtgaaacccatttctactaaaaacacaaaaattagctgggcatggtggtgtgttcctgtaatcccagctgcttgggaggctgaggcaggagaatcgcttgaacccaggaggcagagattggagtgagctgagatcatgccactgccctccagtggccaccacatccggcaaggcagatgggaccatttccttcatccagaacgttctgtggacatcactgctctaggttcctcccttatggagtctcacaagactgtctagccagcaagatctcttttccaaccaggccaggagcacctctccacccactgctgctggtctgaccgccttcctggaagtccctcttgaggcaggccctggagttagaagctgggcagaggcacccacagccttatcctttgccaatctctgactcaatgccacggccactgtagtgagctgaaccacctccagcagtcccctggcagaagcacctggaaaacatgcaatgggaaccttcaccctgaggccaggcccttcccatgctacccaacagtagacaggacaccctgtgttgttggctgcaccggggtgctgggatctgtggatccctggggcctggaagccactctcagcacatacagccactgtgttccgaggtccagtcagctggccgggaaggaattcaacacagccaaggacagaggtccatatgatgacgggtggatgctcgtgtgactttgctgaccttttatgttttctatgggcaataaaggccaagagagctcaaaaaaaaaaaaaaaaaaaaaaaaaaaaaaaaaaaaaa

SEQ ID NO: 6452 - DNA, 2023 bp, Homo sapiens
  misc_feature (2013)..(2014): n is a, c, g, or t
atcccggccgccggcgaggcgggggaggcggcggcgcagggtcgccccggccgggcgggcggggtcgcgcctggtggcggtccccgcgccgaggcgccgctagggcgggcctaggtcgggacgccgggctaggggcgcgtcatgtggccgctcacggtcccgccgccgctgctgctgctgctgtgctcaggcctggccggacagactctcttccagaacccagaagagggctggcagctgtacacctcagcccaggcccctgacgggaaatgcatctgcacggccgtgatcccagcgcagagtacctgctctcgagatggcaggagtcgggagctgcggcaactgatggagaaggtccagaacgtctcccagtccatggaggtccttgagttgcggacgtatcgcgacctccagtatgtacgcggcatggagaccctcatgcggagcctggatgcgcggctccgggcagctgatgggtccctctcggccaagagcttccaggagctgaaggacaggatgacggaactgttgcccctgagctcggtcctggagcagtacaaggcagacacgcggaccattgtacgcttgcgggaggaggtgaggaatctctccggcagtctggcggccattcaggaggagatgggtgcctacgggtatgaggacctgcagcaacgggtgatggccctggaggcccggctccacgcctgcgcccagaagctgggctgtgggaagctgaccggggtcagtaaccccatcaccgttcgggccatggggtcccgcttcggctcctggatgactgacacgatggcccccagtgcggatagccgggtctggtacatggatggctattacaaaggccgccgggtcctggagttccgtaccctgggagacttcatcaaaggccagaactttatccagcacctgctgccccagccgtgggcgggcacgggccacgtggtgtacaacggctccctgttctataacaagtaccagagcaacgtggtggtcaaataccacttccgctcgcgctctgtgctggtgcagaggagcctcccgggcgccggttacaacaacaccttcccctactcctggggcggcttctccgacatggacttcatggtggacgagagcgggctctgggctgtgtacaccaccaaccagaacgcgggcaacatcgtggtcagccggctggacccgcacaccctcgaggtcatgcggtcctgggacaccggctaccccaagcgcagcgctggcgaggccttcatgatctgcggtgtgctctacgtgaccaactcccacctggctggggccaaggtctacttcgcctattttaccaacacgtccagttacgagtacacggacgtgcccttccacaaccagtattcccacatctcgatgctggattacaacccccgggagcgcgccctctatacctggaacaacggccaccaggtgctctacaatgtcaccctgtttcacgtcatcagcacctctggggacccctgagccaatgctgtggctcgggctgctgcctggggggcctccgggggctgggggcccttttcattctgcctgtgtccctcaagggtgatctctctgtctctgtcacgccctttctccccgcctttttgctgggcttttgttctctgcctatgtatttctgtctattttttcaatttcccctcttctcctttattgatctctgcttttaatacaccacttctttctttctgcctttttatggatgtctttttctttttatggctctggttctccagttctttccgtctctgcctctctctgtctctctctctctgtccttccacccctccctccttgcttcccacccattcctcatccctcactcccacccccacccccacccccaggagttgagtgcatggatctgtttctttttttatttacactttttctttccggtttgccggaataaacaggacctttgacatttgaaaaaaaaaaaaaaaaaaaaaaaaaaaaaaaaaaaaaaannaaaaggggg

SEQ ID NO: 6453 - DNA, 887 bp, Homo sapiens
ggactattgctaactaacccatgggactcccactaccttcatgaggctcagatgaggtgaagggtccctaaaatcgtgccaactagtcaggaactcagttgtcaataatttctttatttgtgatacaagcaggcgtggggaaagagaaatgaacagacttggaagcttctccgaggccctagagaagacctctgggttccgaacaccagacaccaggagtaaggagggtagttgatgatttcccactctttctccagcccctgctcctctgtttctccccttcacccactgcagcttcctcaggtcctgggtcccgcgccatcatctcttcgaatgacctcccttctattcctgttaataaaggagcatcagctaagtgaatatggtgatttgcatacacttacattgattcagaaattgtgtttaattccacacaagaaaaagaatgtggatctttttcactgggaaaaaaagtcgccatgtatcatcttaatcatgttttcctgggatataatctatacgtgacgcccatttaagccttcattgcatctatgcacgtggtttgctttcctcttgtgtgaaatagtgttggaccacacgggtttgggccacagcccaggaagacacaatcctgaacgtcataatcccaaatgttgaagtcccataagatctaaatctgtacagtctaaaatcctgaaaattacaatcctaaaaaaacaaaattctcaaaatacaattctggaaaaaaattattaacacattctttaagaagcatttattgggcagcacatggtggctcatgcctttaatcccagcacctttggaggccgaggcgggtggatcacaaagtcaggagatggagaccatcctggctaacacggtgaaca

SEQ ID NO: 6454 - DNA, 6462 bp, Homo sapiens
  misc_feature (1917)..(1931): n is a, c, g, or t
  misc_feature (3484)..(3500): n is a, c, g, or t
  misc_feature (3513)..(3529): n is a, c, g, or t
aggggggaaggaagagtagctccttcttcttcttcttttttttttcttccactcttaaaaagcttctttctcttcacccaagcctcactgtccctctccggctctagctctctccatataaaccctcaagattatgtcaattggttagagccagccgggaatttcgtgcgggtgctgaaggagctgcgggagccggagaagaatgaaactgcgtggagtcagcctggctgccggcttgttcttactggccctgagtctttgggggcagcctgcagaggctgcggcttgctatgggtgttctccaggatcaaagtgtgactgcagtggcataaaaggggaaaagggagagagagggtttccaggtttggaaggacacccaggattgcctggatttccaggtccagaagggcctccggggcctcggggacaaaagggtgatgatggaattccagggccaccaggaccaaaaggaatcagaggtcctcctggacttcctggatttccagggacaccaggtcttcctggaatgccaggccacgatggggccccaggacctcaaggtattcccggatgcaatggaaccaagggagaacgtggatttccaggcagtcccggttttcctggtttacagggtcctccaggaccccctgggatcccaggtatgaagggtgaaccaggtagtataattatgtcatcactgccaggaccaaagggtaatccaggatatccaggtcctcctggaatacaaggcctacctggtcccactggtataccagggccaattggtcccccaggaccaccaggtttgatgggccctcctggtccaccaggacttccaggacctaaggggaatatgggcttaaatttccagggacccaaaggtgaaaaaggtgagcaaggtcttcagggcccacctgggccacctgggcagatcagtgaacagaaaagaccaattgatgtagagtttcagaaaggagatcagggacttcctggtgaccgagggcctcctggacctccagggatacgtggtcctccaggtcccccaggtggtgagaaaggtgagaagggtgagcaaggagagccaggcaaaagaggtaaaccaggcaaagatggagaaaatggccaaccaggaattcctggtttgcctggtgatcctggttaccctggtgaacccggaagggatggtgaaaagggccaaaaaggtgacactggcccacctggacctcctggacttgtaattcctagacctgggactggtataactataggagaaaaaggaaacattgggttgcctgggttgcctggagaaaaaggagagcgaggatttcctggaatacagggtccacctggccttcctggacctccaggggctgcagttatgggtcctcctggccctcctggatttcctggagaaaggggtcagaaaggtgatgaaggaccacctggaatttccattcctggacctcctggacttgacggacagcctggggctcctgggcttccagggcctcctggccctgctggccctcacattcctcctagtgatgagatatgtgaaccaggccctccaggccccccaggatctccaggtgataaaggactccaaggagaacaaggagtgaaaggtgacaaaggtgacacttgcttcaactgcattggaactggtatttcagggcctccaggtcaacctggtttgccaggtctcccaggtcctccaggatctcttggtttccctggacagaaaggggaaaaaggacaagctggtgcaactggtcccaaaggattaccaggcattccaggagctccaggtgctccaggctttcctggatctaaaggtgaacctggtgatatcctcacttttccaggaatgaagggtgacaaaggagagttgggttcccctggagctccagggcttcnnnnnnnnnnnnnnnctcctggacaggatggattgccagggcttcctggcccgaaaggagagcctggtggaattacttttaagggtgaaagaggtccccctgggaacccaggtttaccaggcctcccagggaatatagggcctatgggtccccctggtttcggccctccaggcccagtaggtgaaaaaggcatacaaggtgtggcaggaaatccaggccagccaggaataccaggtcctaaaggggatccaggtcagactataacccagccggggaagcctggcttgcctggtaacccaggcagagatggtgatgtaggtcttccaggtgaccctggacttccagggcaaccaggcttgccagggatacctggtagcaaaggagaaccaggtatccctggaattgggcttcctggaccacctggtcccaaaggctttcctggaattccaggacctccaggagcacctgggacacctggaagaattggtctagaaggccctcctgggccacccggctttccaggaccaaagggtgaaccaggatttgcattacctgggccacctgggccaccaggacttccaggtttcaaaggagcacttggtccaaaaggtgatcgtggtttcccaggacctccgggtcctccaggacgcactggcttagatgggctccctggaccaaaaggtgatgttggaccaaatggacaacctggaccaatgggacctcctgggctgccaggaataggtgttcagggaccaccaggaccaccagggattcctgggccaataggtcaacctggtttacatggaataccaggagagaagggggatccaggacctcctggacttgatgttccaggacccccaggtgaaagaggcagtccagggatccccggagcacctggtcctataggacctccaggatcaccagggcttccaggaaaagcaggtgcctctggatttccaggtaccaaaggtgaaatgggtatgatgggacctccaggcccaccaggacctttgggaattcctggcaggagtggtgtacctggtcttaaaggtgatgatggcttgcagggtcagccaggacttcctggccctacaggagaaaaaggtagtaaaggagagcctggccttccaggccctcctggaccaatggatccaaatcttctgggctcaaaaggagagaagggggaacctggcttaccaggtatacctggagtttcagggccaaaaggttatcagggtttgcctggagacccagggcaacctggactgagtggacaacctggattaccaggaccaccaggtcccaaaggtaaccctggtctccctggacagccaggtcttataggacctcctggacttaaaggaaccatcggtgatatgggttttccagggcctcagggtgtggaagggcctcctggaccttctggagttcctggacaacctggctccccaggattacctggacagaaaggcgacaaaggtgatcctggtatttcaagcattggtcttccaggtcttcctggtccaaagggtgagcctggtctgcctggatacccagggaacccnnnnnnnnnnnnnnnnntgggagatcctgnnnnnnnnnnnnnnnnnggaacccctggagcaaaaggacaaccaggccttcctggattcccaggaaccccaggccctcctggaccaaaaggtattagtggccctcctgggaaccccggccttccaggagaacctggtcctgtaggtggtggaggtcatcctgggcaaccagggcctccaggcgaaaaaggcaaacccggtcaagatggtattcctggaccagctggacagaagggtgaaccaggtcaaccaggctttggaaacccaggaccccctggacttccaggactttctggccaaaagggtgatggaggattacctgggattccaggaaatcctggccttccaggtccaaagggcgaaccaggctttcacggtttccctggtgtgcagggtcccccaggccctcctggttctccgggtccagctctggaaggacctaaaggcaaccctgggccccaaggtcctcctgggagaccaggtctaccaggtccagaaggtcctccaggtctccctggaaatggaggtattaaaggagagaagggaaatccaggccaacctgggctacctggcttgcctggtttgaaaggagatcaaggaccaccaggactccagggtaatcctggccggccgggtctcaatggaatgaaaggagatcctggtctccctggtgttccaggattcccaggcatgaaaggacccagtggagtacctggatcagctggccctgagggggaaccgggacttattggtcctccaggtcctcctggattacctggtccttcaggacagagtatcataattaaaggagatgctggtcctccaggaatccctggccagcctgggctaaagggtctaccaggaccccaaggacctcaaggcttaccaggtccaactggccctccaggagatcctggacgcaatggactccctggctttgatggtgcaggagggcgcaaaggagacccaggtctgccaggacagccaggtacccgtggtttggatggtccccctggtccagatggattgcaaggtcccccaggtccccctggaacctcctctgttgcacatggatttcttattacacgccacagccagacaacggatgcaccacaatgcccacagggaacacttcaggtctatgaaggcttttctctcctgtatgtacaaggaaataaaagagcccacggtcaagacttggggacggctggcagctgccttcgtcgctttagtaccatgcctttcatgttctgcaacatcaataatgtttgcaactttgcttcaagaaatgactattcttactggctctctaccccagagcccatgccaatgagcatgcaacccctaaagggccagagcatccagccattcattagtcgatgtgcagtatgtgaagctccagctgtggtgatcgcagttcacagtcagacgatccagattccccattgtcctcagggatgggattctctgtggattggttattccttcatgatgcatacaagtgcaggggcagaaggctcaggtcaagccctagcctcccctggttcctgcttggaagagtttcgttcagctcccttcatcgaatgtcatgggaggggtacctgtaactactatgccaactcctacagcttttggctggcaactgtagatgtgtcagacatgttcagtaaacctcagtcagaaacgctgaaagcaggagacttgaggacacgaattagccgatgtcaagtgtgcatgaagaggacataacattttgaagaattccttttgtgttttaaaatgtgatatatatatatataaaattcctaggatgcagtgtctcattgtccccaactttactactgctgccgtcaatggtgctactatatatgatcaagataacatgctgactagtaaccatgaagattcagatgtacctcagcaatgcgccagagcaaagtctctattatttttctactaaagaaataaggaagtgaatttactttttgggtccagaatgactttctccaagaattataagatgaaaattatatattttgcccagttactaaaatggtacattaaaaattcaattaagagaagagtcacattgagtaaaataaaagactgcagtttgtgggaagaattatttttcacggtgctactaatcctgctgtatcccgggtttttaatataaaggtgttaagcttattttgctttgtaagtaaagaatgtgtatattgtgaacagccttttagctcaaaatgttgagtcatttacatatgacatagcatgaatcactctttacagaaaatgtaggaaaccctagaatacagacagcaatattttatattcatgtttatcaaagtgagaggacttatattcctacatcaagttactactgagagtaaatttattttgagttttatcccgtaagttctgttttgattttttttaaaaaacaaacccttttagtcactttaatcagaattttaaatgttcatgttacataccaaattataatatctaatggagcaatttgtcttttgctatattctccaagattatctcttaagaccatatgccccctgttttaatgtttcttacatcttgtttttactcatttctgactggacaaagttcttccaaacaattctgagaaacaaaaacacacacgcagaattaacaattcttttccctgtgcttcttatgtaagaatcctcctgtggcctctgcttgtacagaactgggaaacaacacttggttagtctcttttaagttacaaaaagccaattgatgtttcttattctttttaaattttaaatattttgttataaatactcacaggataccttatttccctagctatcatctcctgacttaatgttttttaaacccaccaatataaatttaattaaagatatatgttgtaaggatgccaaacgaaaagctctataactttgaattcgcag

SEQ ID NO: 6455 - DNA, 3421 bp, Homo sapiens
  misc_feature (2428)..(2448): n is a, c, g, or t
  misc_feature (2456)..(2466): n is a, c, g, or t
  misc_feature (2810)..(2810): n is a, c, g, or t
  misc_feature (2819)..(2819): n is a, c, g, or t
  misc_feature (2832)..(2833): n is a, c, g, or t
  misc_feature (2854)..(2854): n is a, c, g, or t
  misc_feature (2889)..(2889): n is a, c, g, or t
  misc_feature (2909)..(2909): n is a, c, g, or t
  misc_feature (2917)..(2918): n is a, c, g, or t
  misc_feature (2954)..(2954): n is a, c, g, or t
  misc_feature (2964)..(2965): n is a, c, g, or t
  misc_feature (2991)..(3017): n is a, c, g, or t
  misc_feature (3023)..(3023): n is a, c, g, or t
  misc_feature (3080)..(3080): n is a, c, g, or t
  misc_feature (3089)..(3089): n is a, c, g, or t
  misc_feature (3130)..(3130): n is a, c, g, or t
  misc_feature (3134)..(3134): n is a, c, g, or t
  misc_feature (3136)..(3136): n is a, c, g, or t
  misc_feature (3177)..(3177): n is a, c, g, or t
  misc_feature (3185)..(3185): n is a, c, g, or t
  misc_feature (3188)..(3188): n is a, c, g, or t
  misc_feature (3276)..(3276): n is a, c, g, or t
  misc_feature (3288)..(3288): n is a, c, g, or t
  misc_feature (3291)..(3291): n is a, c, g, or t
  misc_feature (3293)..(3293): n is a, c, g, or t
  misc_feature (3318)..(3318): n is a, c, g, or t
  misc_feature (3329)..(3329): n is a, c, g, or t
  misc_feature (3364)..(3364): n is a, c, g, or t
  misc_feature (3373)..(3373): n is a, c, g, or t
  misc_feature (3381)..(3381): n is a, c, g, or t
  misc_feature (3398)..(3398): n is a, c, g, or t
  misc_feature (3405)..(3405): n is a, c, g, or t
  misc_feature (3409)..(3409): n is a, c, g, or t
ggctgaggcttagccgccaccgcgcgcttcggaaggccagagggagggggaggcctgtcagtctcgcgcgttgcctgggcgaagggggcggagctttggcgtggggcggccaatagtgggggtggctgcgtgggtcgcaatggggacggggctgttcccgggggggaggctgtgatgggttgacaggtgcgtgacagtgggagctgctctcggcacaagcatgtacggcaaaggcaagagtaacagcagcgccgtcccgtccgacagccaggcccgggagaagttagcactctacgtatatgaatatctgctccatgtaggagctcagaaatcagctcaaacatttttatcagagataagatgggaaaaaaacatcacattgggggaaccaccaggattcttacattcttggtggtgtgtattttgggatctctactgtgcagctccagagagacgtgaaacatgtgaacactcaagtgaagcaaaagccttccatgattacagtgctgcagcagctcccagtccagtgctaggaaacattcccccaggagatggcatgccagtaggtcctgtaccaccagggttctttcagccttttatgtcacctcggtaccctggaggtccaaggcccccattgaggatacctaatcaggcacttggaggtgtcccaggaagtcagccattactccccagtggaatggatccaactcgacaacaaggacatccaaatatgggtgggccaatgcagagaatgactcctccaagaggaatggtgcccttaggaccacagaactatggaggtgcaatgagacccccactgaatgctttaggtggccctggaatgcctggaatgaacatgggtccaggtggtggtagaccttggccaaacccaacaaatgccaattcaataccatactcctcagcatctcctgggaattatgtaggtcctccaggaggtggagggccaccaggaacacccatcatgcctagtccagcagattcaaccaactctggtgataacatgtatactttaatgaatgcagtacctcctggacctaacagacctaattttccaatgggtcctgggtcagatggtcccatgggtggattaggaggaatggagtcacatcacatgaatggctctttaggctcaggagatatggacagtatttccaagaattctcccaataatatgagcctgagtaatcaaccgggcactccaagggatgatggcgaaatggggggaaatttcttaaatccttttcagagtgagagttactcccctagcatgacaatgagcgtgtgatccattaccaagtctcctcatgaaaaccacagtgagtcagcccttcacagaactactacggaagaaaattattcatcacagtgtacagttaaacaaaggaatctcagtcacaccaaaccaacctttttatttcctgctctctcccctcttttgtgaagaaagcgggtccaaatgtgattcaaacaactgtacggagtggcatattagaattgccctaaactgaactgcaaataattatgtgtgtatgtatatgtgtgggaaagagaatgtactgtatatgtgtatgttatacagacatatacacatacatacattgacccacaggacattgtaaaatattatcacatgacatcttaagtagaaataagtagggacttttattccatcctttttttcacgtttacattttaattattacaagttgctcctgccccctccctgaactattttgtgctgtgtatatcactgctttatataagttattttttaaggtgaactcagatgttatggttttgtaaatgtctgcaatcatggataggaataaaatcgcttatttgagagctttcaaaaaaaaaaaaaaaaaaacaacaaagtgtactgtctcaaaaaatagaagaaaatgtgtcttcgtctttatgttgaatcaaacaatttctcagttaccttcagtgaaaagtatttttttaatttttatttgagaaaaacacttcaaatcagtaaaagcttaactggggcctcacacagtatatttctgcaataactgctttaaacggagttcttgatttgtttgtcttagatgatacagaaatcattaaatagcccaaatcatttagaccatagcaataaagtgaccggggttgtcatatatttagcaacatcttttctctttaacatgatgaagcccaaaagtgataacaaaagcatttgcttgaatttgtcacttctcaccaggagtactagaggtaaatttttaataacatactaatgtgaaatggtatctggtttttattcagactttttgtgagcatattcttatagacactagaaataaatacatagaaggagactttgagcacaagggagaagagagttattagcactcctgaggcctctggaatgctnnnnnnnnnnnnnnnnnnnnnttgtaacnnnnnnnnnnntgactggtattggttctcactggccagggagcctctgctctgttcctggaatataaggcttttattcaggagcaaatcattgatagtaactttgctttatctagccattgacttcagcaggctaaaactacattgtgtaactgactgttcaaaagaataagtaaattttttttaatctaattcacttatggaaagcaccttgctctatggcactttccagatcttttgggattttgtggcttaattatacatacatacaccaaaattcacaatagtaagatatgaagcatttaatttagactctgaagataactgggtgatcatctgtgctaaaattgtgatcnaactacgantgtataataccanntatgaatcgaactgtagagcnttgacagctatgattactgcaggtagaggacgatncattcgttagcatatagccntaagtgannattggatgataatgcatgagctcatatgcattcganctacacagcnntgcaatcagagtggcatatagtatannnnnnnnnnnnnnnnnnnnnnnnnnntagacncaaatccgatgtatcagtgcattggtatcagcagtacatgctgacatgctgagccangagcatagntatatataaggtagtgtgagatctatacacttagctgtgangcancnatgatgcatgcatgcatatgctgcatgcatccagatgtacntacatatnacnatgctgatgctagtctatgctcatcccaatcaatgatgcattgtactagatgcatgctacgggacatgagcatgtgaaaacgtgatantagtctggtacntcnanactaaaatatactggcgagtccccntgtggtaatcntgcagcgcgttacgtgtctgaccgtgtcacatacntggatcatncgcctgancgatgctcctcgctcangtgcggncgangtgcgttggtgt

SEQ ID NO: 6456 - DNA, 2029 bp, Homo sapiens
  misc_feature (1890)..(1897): n is a, c, g, or t
gtcacaccgacctgcaccatctctcgcctgcctgtggggtttctgtcaactagtcgtggagggaaggagactctttaaagaataacatcttattgtggccatgccagaacccactaagaaagaggaaaatgaagtgccagccccagccccacccccggaagaaccaagtaaagagaaggaggccggaactacaccagcaaaagatgaagaggaagtctccccgcctagcgccttgcctccagactggacccttgtcgaaactcctcctggggaggaacaagccaagcagaatgccaactcccagctgtccatcttgttcattgaaaaacctcaaggaggaacagtgaaagttggtgaagatatcaccttcatagccaaagtcaaggctgaagatcttctgagaaaacccactatcaaatggttcaaaggaaaatggatggacctggccagcaaagccgggaagcaccttcagctgaaggaaacctttgagaggcacagtcgggtgtacacatttgagatgcagatcatcaaggccaaagataactttgcaggaaattacagatgcgaggtcacctataaggataagtttgacagctgttcatttgatcttgaagtgcacgaatctactgggactactccaaacattgacatcagatctgctttcaagagaagtggagaaggtcaagaggatgcaggagaacttgactttagtggtctcctgaaacgtagggaggtgaagcagcaggaggaagaaccccaggtggacgtatgggagttgctgaagaacgcgaaacccagtgagtacgagaagatcgccttccagtatggaatcaccgacctgcgcggcatgctcaagcgactcaagcgcatgcgcagagaggagaagaagagcgcagcttttgcaaaaattcttgatcctgcatatcaggttgacaaaggaggcagagtgaggtttgttgtggagctggcagatccaaagttggaggtgaaatggtataaaaatggtcaagaaattcgacccagtaccaaatacatctttgaacacaaaggatgccagagaatcctgtttatcaataactgtcagatgacagatgattcagagtattatgtgacagccggtgatgagaaatgttccactgagctcttcgtaagagagcctccaattatggtgaccaaacagctggaagatacaactgcttattgtggggagagagtggaattagaatgtgaggtgtctgaagatgatgccaatgtaaaatggtttaagaatggtgaagagattatccctggtccagaatcaagataccgaattagagttgagggtaaaaaacacatcctgatcatagagggagcaacaaaggctgatgctgcagaatattcagtaatgacaacaggaggacaatcatctgctaaacttagtgttgacttgaaacctctgaagattttgacacctctgactgatcagactgtaaatcttggaaaagaaatcctaagcctaaaataacctggatgaaaaacaaagttgctattgtggatgatccaagatacaggatgttcagcaaccagggagtctgtaccctggaaattcgcaagcccagcccctatgatggaggcacttactgctgcaaagcagtcaatgaccttgggacagtggagattgaatgcaaactggaggtgaaagtcattgcacaataaggatttttgaatgtataatatcatctaaggtgggctctccttctgcagactcctcttgcaaggcgtacctccaaacataattgattcgtatctgcgagacttacactcaagcaatcctgaggaatactgagggagggcctggctactgtctctctgcactctgctgctttgaaatctggttgaaatgagaaaaannnnnnnntgttttcccaccaggcccccaagtgtggtctttttctttcctcctaatgttgaagagaaaaaaaaaaaaaaaagtttgcccagattgcttaattaaaaattgcaaacaaaatctcaaaaaaaaaaaaaaaag

SEQ ID NO: 6457 - DNA, 3224 bp, Homo sapiens
gtagtgagccggctgagaggcatggagacgcaggaacttcggggggccctggctcttctcctcctttgctttttcacatctgccagtcaggatctgcaggtaattgacctgctgactgtgggcgagtctcggcagatggtagctgtggcagagaagatccggacagccttgctcactgctggggacatctacctcttatccaccttccgcctgccccccaagcagggtggtgtcctctttggcctctattctcgccaagacaacactcgatggctggaggcctctgttgtaggcaagatcaacaaagtactggtgcgataccagcgggaggatggcaaagtccacgccgtgaacctacagcaagcgggcctggctgatgggcgcacacacacagttctcctgcgactccgaggtccctccagacccagccctgccctacatctctacgtggactgcaaactgggtgaccaacatgcaggccttccagcactggcccccattcctccagcggaggtcgatgggctggagattaggactggacagaaggcgtatttgaggatgcagggctttgtggaatctatgaaaattattctgggtgggtccatggcccgggtaggagccctgagtgagtgtccattccaaggggacgagtccatccacagtgcagtgaccaatgcactgcactccattctaggggagcagaccaaggcgctggtcacccaactcaccctcttcaaccagatcctggtggagctgcgggatgatatacgagaccaggtaaaggaaatgtccctgatccgaaacaccattatggagtgtcaggtgtgcggcttccatgagcagcgttcccactgcagccccaatccctgcttccgaggtgtggactgcatggaagtgtacgagtacccaggctaccgctgtgggccctgcccccctggcctgcagggcaacggcacccactgcagtgacatcaatgagtgtgctcacgctgacccctgtttcccgggctccagctgcatcaacaccatgcccggcttccactgtgaggcctgtcctcgagggtacaagggcacacaggtgtctggtgtgggcattgactatgcccgggccagcaaacaggtctgcaatgacatcgatgaatgcaacgatggcaacaatggtggctgtgacccaaactccatctgcaccaacactgtgggctctttcaagtgtggtccctgccgcctgggtttcctgggcaaccagagccagggctgcctcccagcccggacctgccacagcccagcccacagcccctgccacatccatgctcactgtctctttgaacgcaatggtgcagtgtcctgccagtgtaacgtgggctgggctgggaatgggaacgtgtgtgggactgacacagacatcgatggctacccagaccaagcactgccctgcatggacaacaacaaacactgcaaacaggacaactgccttttgacacccaactctgggcaggaagatgctgataatgatggtgtgggggaccagtgtgatgatgatgctgatggggatgggatcaagaatgttgaggacaactgccggctgttccccaacaaagaccagcagaactcagatacagattcatttggtgatgcctgtgacaattgccccaacgttcccaacaatgaccagaaggacacagatggcaatggggaaggagatgcctgtgacaacgacgtggatggggatggcatccccaatggattggacaattgccctaaagtccccaacccactacagacagacagggatgaggacggggtgggagatgcttgcgacagctgccctgaaatgagcaatcctacccagacagatgcagacagcgacctggtgggggatgtctgtgatactaatgaagacagcgatggggatgggcatcaggacaccaaggacaactgcccacagctgccaaatagctcccagctggactctgataacgatggacttggagatgagtgtgatggggatgatgacaatgatggcatcccagattatgtgcctcctggtcccgataactgccgcctggtacccaatcccaatcagaaggactcagatggcaatggcgttggtgatgtgtgtgaggatgactttgacaatgatgctgtggtcgaccccctggatgtgtgtcctgaaagtgcagaggtaacgcttacggattttcgggcctatcagaccgtcgtcctggatcctgagggtgatgctcagattgacccaaactgggttgtgctcaaccagggcatggaaatcgttcagaccatgaacagtgaccctggcttggcagttggatacacggccttcaatggtgtggactttgaaggcaccttccatgtgaacacagtgactgatgatgactacgcaggctttctcttcagttatcaagacagtggccgcttctacgtagtcatgtggaagcagaccgagcagacctactggcaggctacacccttccgggcggttgcccagcccgggctgcagctcaaggcagtgacatcagtgtctggcccaggtgagcacctccgaaatgccctgtggcatactggccacacccctgatcaggtacgactgctgtggacagacccacgaaatgtgggctggcgggacaagacctcctatcgctggcagcttctgcaccggcctcaagttggctacattcgggtgaagctctatgagggaccccagcttgtggcggattctggggtgatcattgacacatccatgcgaggggggcgtcttggtgtattctgcttctcccaagaaaacataatttggtccaatctccagtatcgatgcaatgacacagtgcctgaggactttgagccattccggaggcagctgctccagggaagggtgtgaggaggaggccaccagattcagaattcagaattttagaccctttggccttggggtccatcctggagaccctgaggtctaagctacagcccctcagccaaccacagacccttctctggctcccaaaaggagttcagtcccagaggggtggtcaccccacccttcaggggatgagaagttttcaaggggtattactcaggcactaaccccaggaaagatgacagcacattgccataaagttttggttgttttctaaaaaaaaaaaaaaaaaaaaaaaaaaaaaaaaaaaaaaaaaaaaaaaaaaaaaaaaaaaaaaaaaaaaaaaaaaaaaaaaa

SEQ ID NO: 6458 - DNA, 3494 bp, Homo sapiens
tacggtccgcgcgctctctggcaagaggcaagaggtagcaacagcgagcgtgccggtcgctagtcgcgggtccccgagtgagcacgccagggagcaggagaccaaacgacgggggtcggagtcagagtcgcagtgggagtccccggaccggagcacgagcctgagcgggagagcgccgctcgcacgcccgtcgccacccgcgtacccggcgcagccagagccaccagcgcagcgctgccatggagcccagcagcaagaagctgacgggtcgcctcatgctggccgtgggaggagcagtgcttggctccctgcagtttggttacaacactggagtcatcaatgccccccagaaggtgatcgaggagttctacaaccagacatgggtccaccgctatggggagagcatcctgcccaccacgctcaccacgctctggtccctctcagtggccatcttttctgttgggggcatgattggctccttctctgtgggccttttcgttaaccgctttggccggcggaattcaatgctgatgatgaacctgctggccttcgtgtccgccgtgctcatgggcttctcgaaactgggcaagtcctttgagatgctgatcctgggccgcttcatcatcggtgtgtactgcggcctgaccacaggcttcgtgcccatgtatgtgggtgaagtgtcacccacagcccttcgtggggccctgggcaccctgcaccagctgggcatcgtcgtcggcatcctcatcgcccaggtgttcggcctggactccatcatgggcaacaaggacctgtggcccctgctgctgagcatcatcttcatcccggccctgctgcagtgcatcgtgctgcccttctgccccgagagtccccgcttcctgctcatcaaccgcaacgaggagaaccgggccaagagtgtgctaaagaagctgtcgcgggacagctgacgtgacccatgacctgcaggagatgaaggaagagagtcggcagatgatgcgggagaagaaggtcaccatcctggagctgttccgctcccccgcctaccgccagcccatcctcatcgctgtggtgctgcagctgtcccagcagctgtctggcatcaacgctgtcttctattactccacgagcatcttcgagaaggcgggggtgcagcagcctgtgtatgccaccattggctccggtatcgtcaacacggccttcactgtcgtgtcgctgtttgtggtggagcgagcaggccggcggaccctgcacctcataggcctcgctggcatggcgggttgtgccatactcatgaccatcgcgctagcactgctggagcagctaccctggatgtcctatctgagcatcgtggccatctttggctttgtggccttctttgaagtgggtcctggccccatcccatggttcatcgtggctgaactcttcagccagggtccacgtccagctgccattgccgttgcaggcttctccaactggacctcaaatttcattgtgggcatgtgcttccagtatgtggagcaactgtgtggtccctacgtcttcatcatcttcactgtgctcctggttctgttcttcatcttcacctacttcaaagttcctgagactaaaggccggaccttcgatgagatcgcttccggcttccggcaggggggagccagccaaagtgacaagacacccgaggagctgttccatcccctgggggctgattcccaagtgtgagtcgccccagatcaccagcccggcctgctcccagcagccctaaggatctctcaggagcacaggcagctggatgagacttccaaacctgacagatgtcagccgagccgggcctggggctcctttctccagccagcaatgatgtccagaagaatattcaggacttaacggctccaggattttaacaaaagcaagactgttgctcaaatctattcagacaagcaacaggttttataatttttttattactgattttgttatttttatatcagcctgagtctcctgtgcccacatcccaggcttcaccctgaatggttccatgcctgagggtggagactaagccctgtcgagacacttgccttcttcacccagctaatctgtagggctggacctatgtcctaaggacacactaatcgaactatgaactacaaagcttctatcccaggaggtggctatggccacccgttctgctggcctggatctccccactctaggggtcaggctccattaggatttgccccttcccatctcttcctacccaaccactcaaattaatctttctttacctgagaccagttgggagcactggagtgcagggaggagaggggaagggccagtctgggctgccgggttctagtctcctttgcactgagggccacactattaccatgagaagagggcctgtgggagcctgcaaactcactgctcaagaagacatggagactcctgccctgttgtgtatagatgcaagatatttatatatatttttggttgtcaatattaaatacagacactaagttatagtatatctggacaagccaacttgtaaatacaccacctcactcctgttacttacctaaacagatataaatggctggtttttagaaacatggttttgaaatgcttgtggattgagggtaggaggtttggatgggagtgagacagaagtaagtggggttgcaaccactgcaacggcttagacttcgactcaggatccagtcccttacacgtacctctcatcagtgtcctcttgctcaaaaatctgtttgatccctgttacccagagaatatatacattctttatcttgacattcaaggcatttctatcacatatttgatagttggtgttcaaaaaaacactagttttgtgccagccgtgatgctcaggcttgaaatcgcattattttgaatgtgaagggaatactgtacctttatttgacaggctcaaagaggttatgtgcctgaagtcgcacagtgaataagctaaaacacctgcttttaacaatggtaccatacaaccactactccattaactccacccacctcctgcacccctccccacacacacaaaatgaaccacgttctttgtatgggcccaatgagctgtcaagctgccctgtgtttcatttcatttgggattgccccctctggttcctctgtatactactgcttcatctctaaagacagctcatcctcctccttcacccctgaatttccagagcacttcatctgctccttcatcacaagtccagttttctgccactagtctgaatttcatgagaagatgccgatttggttcctgtgggtcctcagcactattcagtacagtgcttgatgcacagcaggcactcagaaaatactggaggaaataaaacaccaaagatatttgtctctagaggctcagctgacaaaatctgggagaagtttgcttttgtaactacaggcaggcttttttctccctgacatgaagagggagcagataaggtcctgtagagtca

SEQ ID NO: 6459 - DNA, 1554 bp, Homo sapiens
tagttccagaggacgttcggaggaaacattggcataatctggctctcccaatataggcccagtaagacccaattgctcggtgcagtgaccttcaggcgctgaacgtgaccgctctggaaccccggacctcaggcaatcaagggggacccccccgaaagggatccttagaagcagaggacctgagtcgttctttggacccacccctatgagatctccagaactagacgccagtggctgcattgaatgatatacggtatcagagactggtggtggagctgcttatcaataaacgaagacattttattttaaatttttaatttgaggggaaaagaaatgttttacagatgaaggaatgttttatagtaatttaatttgctcctgtagctgcattatttcttgattagaggtttgggcatataaccagattaaagtgaaggaactttctgttgtttttgtagcaccgctcagctgtcttgtaaaacagtgaacacacgctttctggttctagtaatcctgggtgtttatcacgttcagagaaactcaagctattgcatgattagccccctatctggcaaggaaaccccatacagaagaaacaacaaacctgcgcctgcaccgcctctgcgtcctgggtagtctgtgcttgtaatccagcatgtttcacagagtaagcctgttgtgactttgcttttggggtctatgtcattggtttctgatgcttgtacaaacacgcacacacaaatggataaaacagcacctctggctgttacattaccataaaccatatcacatgcctacattttacaaatgatttctggtttctcttagttcttctctaacatagtactttctttccagcaaaagcaaaatgtgttttcagatttgttactttaataaaggttatccataccaataaaaagtgtacaacacagcattttctgttaaattattattggttttcagttgtaatttggtattttttctggcatgcgtttattaatttattaaattggcttttagaaataaaacaaaaaaaaaaaaaaaaaaaaaaaaaaaaaaaaaaaaaaaaaaaaaaaaaaaaaaaaaggggggggggcgccaacaaatgaatccccgaggggggacccacacatattgagcgggcgacacacaagtatttgttgagcaccaagggggggcaccacaataggaggggacgctatataaacacacgagagcagcagagcgcaggtgtattacaaaaagcgctgcacgacggcgcaacaaaacgcgtcaccaccgggcacacccccgtggagaagacggcccacccaacacctgggggggggggagcggaacacaatagtggggggaacagaactactactcacacaacaggaatatataagaagccctcagtggaggagaacatttcaaagacaattcagagcggctgctaaaagtgatgctgaaaaaaagcaagaaacataattatgacgtgcgagtagtaaaaaaaattagctaacacgaagcgagaattattagttgtggaagaaactatatttaccccgaggg

SEQ ID NO: 6460 - DNA, 1604 bp, Homo sapiens
gattcacatccattggtcaggggcaaataccactagctctgcatcctcagtcactttgtgccatttcatcaggtcagagccaaaggaaagcttgaaaaatgaagacattagcaggacttgttctgggacttgtcatcttggatgctgctgtgactgccccaactctagagtccatcaactatgactcagaaacctatgatgccaccttagaagacctggataatttgtacaactatgaaaacatacctgttgataaagttgagattgaaatagccacagtgatgccttcagggaacagagagctcctcactccacccccacagcctgagaaggcccaggaagaggaagaggaggaggaatctactcccaggctgattgatggctcttctccccaggagcctgaattcacaggggttctggggccacacacaaatgaagactttccaacctgtctttggtgtacttgtataagtacaccgtgtactggtgatgaccatgaacttgatgctattcctccgctgccaaagaacaccgcttatttctattcccgctttaacagaattaaaaagatcaacaaaaatgactttgcaagcctaagtgatttaaaaaggattgatctgacatcaaatttaatatctgagattgatgaagatgcattccgaaaactgcctcaacttcgagagcttgtcctgcgtgacaacaaaataaggcagctcccagaattgccaaccactttgacatttattgatattagcaacaatagacttggaaggaaagggataaagcaagaagcatttaaagacatgtatgatctccatcatctgtacctcactgataacaacttggaccacatccctctgccactcccagaaaatctacgagcccttcacctccagaataacaacattctggaaatgcacgaagatacgttctgcaatggtaaaaatttgacttatattcgtaaggcactagaggacattcgattggatggaaaccctattaatctcagcaaaactcctcaagcatacatgtgtctacctcgtctgcctgttgggagccttgtctaatttcagataatggttagcattacgatggctactataaataaaccattcttactgctctcttccaaaacaaaactcagcatgatactttgagattgtgttctgagagatgatatgactacataaaatacaattaaaaatgttataatataatgaaaatgtagtaatttaagaaaacaccagatgagttaggaataaacctataacatttacaaaaagagcaaaactaagtgatagaaaatatttcacacatgttcttatagatcatgtatcacttgcaagttttaggagttcatatcctatatcatttcaaattaagtacataataaagtaaaattttgaaatgaacactttaggtatttttgccaagatttagatgtttttaattaaacttttctcttcctttttttttcactaaagcatgtttattcccctaatccattaaagagcatgaaaaaaagaataaatgtatttgaaaaaaaaaaaaaaaaaaaaaaaaaaaaaaaaaaaacaaaaaaaaaaaaaaaaaaaaaaaaaaaa

SEQ ID NO: 6461 - DNA, 940 bp, Homo sapiens
tttcttttatcgtttgctttttgttttattttcttgagagacctcaaaattattaaatccaacagacgctgccggtcggtcagattattattaatattattgttgttgttaattattattattatttcatatgctgatgctttgtgagttcttttccactcctttaaagttgggaaaacttgattcgtggggcaggagattgtttcttcattcttctgacagcccccatctgacgcgtaactgcccattttaaggaaactcttggtgctacaaaaccctgaccagacacttggcaaatttacctctttcttcaaaagaaaaactttaagaaaatgagccaatgggcttcattctcagtcatgcccggagatcacccaggagaaataatacaaacaccaccactgtccagagagagtaaagaagcagaaagagaaagaatttgcaaccatgaggaatgttcccacctcccgacgggacgtgcatttggaaaacacagaatcagccctcagggtgcactccagccacctcagtgctctaagctcacagaagtgaaataatgtctgtgggttggcaatggctttgtgggatcatatgtcttggccaaagatgggaaaacctatgttgaagaggcagcccttgagtgttaatttgtcttctaaactgtgtaaggccccttcaagttcctcttgttggtttcaattatattaattataaaacaagtggatgtggtgaccatccacttgtgtttccctaatgatgggcagttggccagggcactgaccagagctgggaaatttgtatctccaaggcggctctgtctctgaaataaatggcatcaagtgcatgtgtgtatgcgacatgccctgcctgaacaggtgctcaataaatccaagtttccttctcttgaaaaaaaaaaaaaaaaaaggaaaaaaaaaaaaaa

SEQ ID NO: 6462 - DNA, 4213 bp, Homo sapiens
actcgggcaccgcaggtagggcaggaggctggagagcctgctgcccgcccgcccgtaaaatggtcccctcggctggacagctcgccctgttcgctctgggtattgtgttggctgcgtgccaggccttggagaacagcacgtccccgctgagtgcagacccgcccgtggctgcagcagtggtgtcccattttaatgactgcccagattcccacactcagttctgcttccatggaacctgcaggtttttggtgcaggaggacaagccagcatgtgtctgccattctgggtacgttggtgcacgctgtgagcatgcggacctcctggccgtggtggctgccagccagaagaagcaggccatcaccgccttggtggtggtctccatcgtggccctggctgtccttatcatcacatgtgtgctgaagatattacgccaggtccgaaaacactgtgagtggtgccgggccctcatctgccggcacgagaagcccagcgccctcctgaagggaagaaccgcttgctgccactcagaaacagtggtctgaagagcccagaggaggagtttggccaggtggactgtggcagatcaataaagaaaggcttcttcaggacagcactgccagagatgcctgggtgtgccacagaccttcctacttggcctgtaatcacctgtgcagccttttgtgggccttcaaaactctgtcaagaactccgtctgcttggggttattcagtgtgacctagagaagaaatcagcggaccacgatttcaagacttgttaaaaaagaactgcaaagagacggactcctgttcacctaggtgaggtgtgtgcagcagttggtgtctgagtccacatgtgtgcagttgtcttctgccagccatggattccaggctatatatttctttttaatgggccacctccccacaacagaattctgcccaacacaggagatttctatagttattgttttctgtcatttgcctactggggaagaaagtgaaggaggggaaactgtttaatatcacatgaagaccctagctttaagagaagctgtatcctctaaccacgagactctcaaccagcccaacatcttccatggacacatgacattgaagaccatcccaagctatcgccacccttggagatgatgtcttatttattagatggataatggttttatttttaatctcttaagtcaatgtaaaaagtataaaaccccttcagacttctacattaatgatgtatgtgttgctgactgaaaagctatactgattagaaatgtctggcctcttcaagacagctaaggcttgggaaaagtcttccagggtgcggagatggaaccagaggctgggttactggtaggaataaaggtaggggttcagaaatggtgccattgaagccacaaagccggtaaatgcctcaatacgttctgggagaaaacttagcaaatccatcagcagggatctgtcccctctgttggggagagaggaagagtgtgtgtgtctacacaggataaacccaatacatattgtactgctcagtgattaaatgggttcacttcctcgtgagccctcggtaagtatgtttagaaatagaacattagccacgagccataggcatttcaggccaaatccatgaaagggggaccagtcatttattttccattttgttgcttggttggtttgttgctttatttttaaaaggagaagtttaactttgctatttattttcgagcactaggaaaactattccagtaatttttttttcctcatttccattcaggatgccggctttattaacaaaaactctaacaagtcacctccactatgtgggtcttcctttcccctcaagagaaggagcaattgttcccctgacatctgggtccatctgacccatggggcctgcctgtgagaaacagtgggtcccttcaaatacatagtggatagctcatccctaggaattttcattaaaatttggaaacagagtaatgaagaaataatatataaactccttatgtgaggaaatgctactaatatctgaaaagtgaaagatttctatgtattaactcttaagtgcacctagcttattacatcgtgaaaggtacatttaaaatatgttaaattggcttgaaattttcagagaattttgtcttcccctaattcttcttccttggtctggaagaacaatttctatgaattttctctttattttttttttataattcagacaattctatgacccgtgtcttcatttttggcactcttatttaacaatgccacacctgaagcacttggatctgttcagagctgaccccctagcaacgtagttgacacagctccaggtttttaaattactaaaataagttcaagtttacatcccttgggccagatatgtgggttgaggcttgactgtagcatcctgcttagagaccaatcaatggacactggtttttagacctctatcaatcagtagttagcatccaagagactttgcagaggcgtaggaatgaggctggacagatggcggaacgagaggttccctgcgaagacttgagatttagtgtctgtgaatgttctagttcctaggtccagcaagtcacacctgccagtgccctcatccttatgcctgtaacacacatgcagtgagaggcctcacatatacgcctccctagaagtgccttccaagtcagtcctttggaaaccagcaggtctgaaaaagaggctgcatcaatgcaagcctggttggaccattgtccatgcctcaggatagaacagcctggcttatttggggatttttcttctagaaatcaaatgactgataagcattggctccctctgccatttaatggcaatggtagtctttggttagctgcaaaaatactccatttcaagttaaaaatgcatcttctaatccatctctgcaagctccctgtgtttccttgccctttagaaaatgaattgttcactacaattagagaatcatttaacatcctgacctggtaagctgccacacacctggcagtggggagcatcgctgtttccaatggctcaggagacaatgaaaagcccccatttaaaaaaataacaaacattttttaaaaggcctccaatactcttatggagcctggatttttcccactgctctacaggctgtgactttttttaagcatcctgacaggaaatgttttcttctacatggaaagatagacagcagccaaccctgatctggaagacagggccccggctggacacacgtggaaccaagccagggatgggctggccattgtgtccccgcaggagagatgggcagaatggccctagagttcttttccctgagaaaggagaaaaagatgggattgccactcacccacccacactggtaagggaggagaatttgtgcttctggagcttctcaagggattgtgttttgcaggtacagaaaactgcctgttatcttcaagccaggttttcgagggcacatgggtcaccagttgctttttcagtcaatttggccgggatggactaatgaggctctaacactgctcaggagacccctgccctctagttggttctgggctttgatctcttccaacctgcccagtcacagaaggaggaatgactcaaatgcccaaaaccaagaacacattgcagaagtaagacaaacatgtatatttttaaatgttctaacataagacctgttctctctagccattgatttaccaggctttctgaaagatctagtggttcacacagagagagagagagtactgaaaaagcaactcctcttcttagtcttaataatttactaaaatggtcaacttttcattatctttattataataaacctgatgcttttttttagaactccttactctgatgtctgtatatgttgcactgaaaaggttaatatttaatgttttaatttattttgtgtggtaagttaattttgatttctgtaatgtgttaatgtgattagcagttattttccttaatatctgaattatacttaaagagtagtgagcaatataagacgcaattgtgtttttcagtaatgtgcattgttattgagttgtactgtaccttatttggaaggatgaaggaatgaacctttttttcctaaaaaaaaaaaaaaaaaaaaaaaaaaaaaaaaaggggctgggcccggaaaagattttctggaccctttctggggggggggggggcccatgatgtatatg

SEQ ID NO: 6463 - DNA, 3889 bp, Homo sapiens
  misc_feature (1332)..(1359): n is a, c, g, or t
  misc_feature (1364)..(1397): n is a, c, g, or t
  misc_feature (3843)..(3843): n is a, c, g, or t
ggcacgagggaggcaccgcggcgagcttggctgcttctggggcctgtgtggccctgtgtgtcggaaagatggagcaagaagccgagcccgaggggcggccgcgacccctctgaccgagatcctgctgctttcgcagccaggagcaccgtccctccccggattagtgcgtacgagcgcccagtgccctggcccggagagtggaatggtccccgaggcccagggcgtcgtgcttccgcgcgccccgtgaaggaaactggggagtcttgagggacccccgactccaagcgcgaaaaccccggatggtgaggagcaggcaaatgtgcaataccaacatgtctgtacctactgatggtgctgtaaccacctcacagattccagcttcggaacaagagaccctggttagaccaaagccattgcttttgaagttattaaagtctgttggtgcacaaaaagacacttatactatgaaagaggttcttttttatcttggccagtatattatgactaaacgattatatgatgagaagcaacaacatattgtatattgttcaaatgatcttctaggagatttgtttggcgtgccaagcttctctgtgaaagagcacaggaaaatatataccatgatctacaggaacttggtagtagtcaatcagcaggaatcatcggactcaggtacatctgtgagtgagaacaggtgtcaccttgaaggtgggagtgatcaaaaggaccttgtacaagagcttcaggaagagaaaccttcatcttcacatttggtttctagaccatctacctcatctagaaggagagcaattagtgagacagaagaaaattcagatgaattatctggtgaacgacaaagaaaacgccacaaatctgatagtatttccctttcctttgatgaaagcctggctctgtgtgtaataagggagatatgttgtgaaagaagcagtagcagtgaatctacagggacgccatcgaatccggatcttgatgctggtgtaagtgaacattcaggtgattggttggatcaggattcagtttcagatcagtttagtgtagaatttgaagttgaatctctcgactcagaagattatagccttagtgaagaaggacaagaactctcagatgaagatgatgaggtatatcaagttactgtgtatcaggcaggggagagtgatacagattcatttgaagaagatcctgaaatttccttagctgactattggaaatgcacttcatgcaatgaaatgaatcccccccttccatcacattgcaacagatgttgggcccttcgtgagaattggcttcctgaagataaagggaaagataaannnnnnnnnnnnnnnnnnnnnnnnnnnnaaaannnnnnnnnnnnnnnnnnnnnnnnnnnnnnnnnngattgtaaaaaaactatagtgaatgattccagagagtcatgtgttgaggaaaatgatgataaaattacacaagcttcacaatcacaagaaagtgaagactattctcagccatcaacttctagtagcattatttatagcagccaagaagatgtgaaagagtttgaaagggaagaaacccaagacaaagaagagagtgtggaatctagtttgccccttaatgccattgaaccttgtgtgatttgtcaaggtcgacctaaaaatggttgcattgtccatggcaaaacaggacatcttatggcctgctttacatgtgcaaagaagctaaagaaaaggaataagccctgcccagtatgtagacaaccaattcaaatgattgtgctaacttatttcccctagttgacctgtctataagagaattatatatttctaactatataaccctaggaatttagacaacctgaaatttattcacatatatcaaagtgagaaaatgcctcaattcacatagatttcttctctttagtataattgacctactttggtagtggaatagtgaatacttactataatttgacttgaatatgtagctcatcctttacaccaactcctaattttaaataatttctactctgtcttaaatgagaagtacttggttttttttttttcttaaatatgtatatgacatttaaatgtaacttattattttttttgagaccgagtccagcctggatgacagagtgagacccaatctcaaaaaagaaatcgtttcaccatgttggccaggctggtcttgaactcctgacctcaggtgatccacccacctcggcctcccaaagtactgggattataggcgtgagccacggcatccagcctcatctttcttttaaccaataaacatgatgctgtatcttaaaaagagcactgagcagggacttaagggatcgagtcctcaaccaaactgatttaattactcaggatttttaaaaagcatcagaggctatttacaatcttaatcataggggttcagtaaaataaaaataagaagtaaaaaagcaagagaaattattctgtaaatctaactggtgtaattcccataatcatgcaattaagttttactcttgagtttcctgacagccattggtaaaaagagaaacacatcaggatttataatttttatcatccaattatgggaagcaagcatgttggccccaggagacgaactcttctactaatttatagcatgtatcctttcatcaagggccactgagccagttggtgagtcaacgggtgaacctaagatgcaaggatgttttccaggtgactatttaaaaaaataaataatccaccaacgtgattgaccttggcgagatcatgtttctagtctatacctcagtttccccatctgtaaagtgaggataatgtcccaccccatgtaactgtggtgaggaccaactgcaacactgtgcctgcgagtctccttggaaaagtgtaaggttctacacaaatggaaagtgatctgatcacactcagtgtccccagcccagcctttcagtgccctggccctggggtgggggacaatactctcctcacccccttcactagtcttcatgaatagcaaggaggccataacataatttggtctaaaccccttcctttttaaaagaatgatggcaaaatgtgcataacattaaatttaccattttaaagatttctaaaaaaaaaaaaaaaaaaaagcaatgtgtaactgccacctccagaactttttcatcatcctaaactgaaactctgtacccactaaacagtaactccccactccccctgtccccagtccctggtaacctctattctacttttttttttctctgtggattggcctattctaggtatctcttttaagtagaatcatatagtatttgtccttttgtgtccagccccctcattttttgagatgaggaatcaggcccagagaaggcagtggctcacccaaggtcacatcgcaaaccagaggcagagccaagaccagaacccaggtttcctgactcctaacaggtcttgcatccccagtagtgaatgagacactgctttgactttctgtgatcttggtttagccccttcctttctctgggctcagtctgcttcccaccactcacccattctttctttatcatctccctccaaagcctcttgtcctcctgcctcctcttctccttggctggttcctgccagcaaatggagtggccctggtccatgccaggttttcctcttctgggtccggagctcactatagtattcagccctcagtcctcccaggatgttcttcccagcactgctgcctcgtgcggattttcccgtaacctcagtaactggcttcttgtccccctgcttcctaccaggaagccttcctgtcccgcgtctgtggtttccccactctgatattgctctcaanagtgggggggggcccctggttctggggttaatttaattttggggtt

SEQ ID NO: 6464 - DNA, 292 bp, Homo sapiens; identical to SEQ ID NO: 2237

SEQ ID NO: 6465 - DNA, 1693 bp, Homo sapiens
ggcgtcctcccacccccaccagcagttacagggggtgggtgcggagaccaactctggccagacacagaggagcagcaagaacccggggcaacggtcctaaaccgaatcctcccgcttcggcgtcccaggagcccgcccctcgcccgccgcctcccctgcgtccccgccccgcgcagccgccgcgctcctgcgctccgaggtccgaggttcccgagatgaaggtctggctgctgcttggtcttctgctggtgcacgaagcgctggaggatgttactggccaacaccttcccaagaacaagcgtccaaaagaaccaggagagaatagaatcaaacctaccaacaagaaggtgaagcccaaaattcctaaaatgaaggacagggactcagccaattcagcaccaaagacgcagtctatcatgatgcaagtgctggataaaggtcgcttccagaaacccgccgctaccctgagtctgctggcggggcaaactgtagagcttcgatgtaaagggagtagaattgggtggagctaccctgcgtatctggacacctttaaggattctcgcctcagcgtcaagcagaatgagcgctacggccagttgactctggtcaactccacctcggcagacacaggtgaattcagctgctgggtgcagctctgcagcggctacatctgcaggaaggacgaggccaaaacgggctccacctacatcttttttacagagaaaggagaactctttgtaccttctcccagctacttcgatgttgtctacttgaacccggacagacaggctgtggttccttgtcgggtgaccgtgctgtcggccaaagtcacgctccacagggaattcccagccaaggagatcccagccaatggaacggacattgtttatgacatgaagcggggctttgtgtatctgcaacctcattccgagcaccagggtgtggtttactgcagggcggaggccgggggcagatctcagatctccgtcaagtaccagctgctctacgtggcggttcccagtggccctccctcaacaaccatcttggcttcttcaaacaaagtgaaaagtggggacgacatcagtgtgctctgcactgtcctgggggagcccgatgtggaggtggagttcacctggatcttcccagggcagaaggatgaaaggcctgtgacgatccaagacacttggaggttgatccacagaggactgggacacaccacgagaatctcccagagtgtcattacagtggaagacttcgagacgattgatgcaggatattacatttgcactgctcagaatcttcaaggacagaccacagtagctaccactgttgagttttcctgacttggaaaaggaaatgtaatgaacttatggaaagcccatttgtgtacacagtcagctttggggttccttttattagtgctttgccagaggctgatgtcaagcaccacaccccaaccccagcgtctcgtgagtccgacccagacatccaaactaaaaggaagtcatccagtctattcacagaagtgttaacttttctaacagaaagcatgattttgattgcttacctacatacgtgttcctagtttttatacatgtgtaaacaattttatataatcaatcatttctattaaatgagcacgtttttgtaaaaaataaaaaaaaaaaaaaaaaaaaaaaaaaaaaaaaaaaaa

SEQ ID NO: 6466 - DNA, 860 bp, Homo sapiens
atgtggatgctgggagaagtatgtgagatggaaaagttgtttcatggcatccaagaagtgaatgatcctcaaggtgtagcagaggaatttgtaggagagagggatgattgacatcttcgtatagccctccatccatcccagttagcatggagggattttagggctaccattggctgggtagtggagtgttgaccaatcacagctcaggggcgtgattgtctcgtcctgggatcgcgagaggggtatacacagggaggccaggcagcctggagttagtcgaccgttgcgagacgttgagctgcggaagatgagtccaaagccgagagcctcgggacctccggccaaggccacggaggcaggaaagaggaagtcctcctctcagccgagccccagtggcccgaagaagaagactaccaaggtggccgagaagggagaagcagttcgtggagggagacgcgggaagaaaggggctgcgacaaagatggcggccgtgacggcacctgaggcggagagcgggccagcggcacccggccccagcgaccagcccagccaggagctccctcagcacgagctgccgccggaggagccagtgagcgaggggacccagcacgaccccctgagtcaggagagcgagctggaggaaccactgagtaaggggcgcccatctactcccctatctccctgagcagcaactaagtttaggcccagctgccagacctcagagatctcaccagcagggtgcttcccattctgaagataataaaatgaatgtgttgcaaaaagaaaaaaaaaaaaaaaaaaaaaaaaaaaaaaaaaaaaaaaaaaaaaaaaaaaaaaaaaaaaaaaaaaaaaaaaaaaaa

SEQ ID NO: 6467 - DNA, 1326 bp, Homo sapiens
ataccgtctgtaccagccacctggttcaacccccccgcttttgtggaacccacatgtcccagtcttgaacatagaactttcatccctctggcccccccaaatgttaaattttctggccacccccacaaattttttttttttttttttttgtaagaatgaaactgcaaatttattagaaagtataaaaattaaaaaacaaaaccaagcctaaccaaaacacaaaaagcaacgacacacaacctttccagtttacattaactttgagcgtcacacactattaaccacttagttgcattttttaaaaatgtcaatttcaaggtagagggagctgagtcagttaataggccagtcatcacagtgtaactaatttaatgctaaaataaaacacggatctcatttgagaaaaaaagagatgagactattttctggttggcgtagatttaggcaatgtataaaaaagcttcctggttggaatgagttaaaaaatattgctggccactaatgtgccatcttgagttggaaaacaaaccccctcccccccaaaaaaaccctgccgctttggtgtcctatttatatatttttaaaaacattcattaaaaaaatcaaatctataataaaaatgtccctgtttgttttaaaaaagcattagtaggcatcccttatctactaaaaccatttgtttttcctaagatgcctggaagcagaaaagcgagtgagattaactcactgcgcaattaattaaaattagaattctttcctctaaacaacttccagagcaccagaaagaagaaggggccccatcaaagggagaaataaagcccttctgactcacaggagatgaaatgttcagccagagttctaacacattctggctgtcatcaaaagttctttattggattactcagaaaataactcaagtgctattttaaaaatgaaagatacaggcagctaggttcctttccgtttttctttctttcgtttctttcttcttgtttttttaaacaaaacaaaataccagtggctagcttttctgtaacatcctttggatttggttaaaaaaagaaagaaaagtctacagaacaggatcactgaatgccactttagccccacttcctgcaggctctgttttaattagcgtcaaacaggttactgaacatttcttcagctgcggaaagaagttctgaatgggtgacagctgcccggagtggctctacctggttccattttacccctcatcagtcagtgtggtttcttgccaaacaacacctaacgttttaccccttattcctgcagggaggcgggccctgtggctgactggacacagag

SEQ ID NO: 6468 - DNA, 1929 bp, Homo sapiens
catttattaaggactctctgctccagcttgtacggtctgggaattcgcgctcaaactcagctcacttgagagtctcctcccgccagctgtggaaagaactttgcgtctctccagcaatgcatctccttgcgattctgttttgtgctctctggtctgcagtgttggccgagaactcggatgattatgatctcatgtatgtgaatttggacaacgaaatagacaatggactccatcccactgaggaccccacgccgtgcgactgcggtcaggagcactcggaatgggacaagctcttcatcatgctggagaactcgcagatgagagagcgcatgctgctgcaagccacggacgacgtcctgcggggcgagctgcagaggctgcgggaggagctgggccggctcgcggaaagcctggcgaggccgtgcgcgccgggggctcccgcagaggccaggctgaccagtgctctggacgagctgctgcaggcgacccgcgacgcgggccgcaggctggcgcgtatggagggcgcggaggcgcagcgcccagaggaggcggggcgcgccctggccgcggtgctagaggagctgcggcagacgcgagccgacctgcacgcggtgcagggctgggctgcccggagctggctgccggcaggttgtgaaacagctattttattcccaatgcgttccaagaagatttttggaagcgtgcatccagtgagaccaatgaggcttgagtcttttagtgcctgcatttgggtcaaagccacagatgtattaaacaaaaccatcctgttttcctatggcacaaagaggaatccatatgaaatccagctgtatctcagctaccaatccatagtgtttgtggtgggtggagaggagaacaaactggttgctgaagccatggtttccctgggaaggtggacccacctgtgcggcacctggaattcagaggaagggctcacatccttgtgggtaaatggtgaactggcggctaccactgttgagatggccacaggtcacattgttcctgagggaggaatcctgcagattggccaagaaaagaatggctgctgtgtgggtggtggctttgatgaaacattagccttctctgggagactcacaggcttcaatatctgggatagtgttcttagcaatgaagagataagagagaccggaggagcagagtcttgtcacatccgggggaatattgttgggtggggagtcacagagatccagccacatggaggagctcagtatgtttcataaatgttgtgaaactccacttgaagccaaagaaagaaactcacacttaaaacacatgccagttgggaaggtctgaaaactcagtgcataataggaacacttgagactaatgaaagagagagttgagaccaatctttatttgtactggccaaatactgaataaacagttgaaggaaagacattggaaaaagcttttgaggataatgttactagactttatgccatggtgctttcagtttaatgctgtgtctctgtcagataaactctcaaataattaaaaaggactgtattgttgaacagagggacaattgttttacttttctttggttaattttgttttggccagagatgaattttacattggaagaataacaaaataagatttgttgtccattgttcattgttattggtatgtaccttattacaaaaaaaatgatgaaaacatatttatactacaaggtgacttaacaactataaatgtagtttatgtgttataatcgaatgtcacgtttttgagaagatagtcatataagttatattgcaaaagggatttgtattaatttaagactatttttgtaaagctctactgtaaataaaatattttataaaactaaaaaaaaaaaaaaaaaaaaaaaaaaaaaaaaaattttggaaaaaaaaaaaaaaaaaa

SEQ ID NO: 6469 - DNA, 2462 bp, Homo sapiens
cgaacacacacacacacacacacacacggcacactttcaaaagtagccagcacgtagtcggccttaagccatgcatgttacctccaacctcagattttctctctgtctgagtgtctgtttgcagataacttaaaatcacccatctgcatccccactcaccctccagaaagcaaacgtggagagctcactctgcagaataaaatcaagaacaccacggttgtagctgctgtggactcggcggtctgagcagcctccccgagagccgtagttgctagtagaaattcgcgcagaaaaacctctattttcttctaatccagaactggataacttgatgattcaagccatacaagtattaaggtttcatctattggaattagagaaggtacacgaattatgtgacaatttctgccaccggtatattagctgtttgaaagggaaaatgcctatcgatttggtgatagacgatagagaaggaggatcaaaatcagacagtgaagatataacaagatcagcaaatctaactgaccagccctcttggaacagagatcatgatgacacggcatctactcgttcaggaggaaccccaggcccttccagcggtggccacacgtcacacagtggggacaacagcagtgagcaaggtgatggcttggacaacagtgtagcttcccccagcacaggtgacgatgatgaccctgataaggacaaaaagcgtcacaaaaagcgtggcatctttcccaaagtagccacaaatatcatgagggcgtggctgttccagcatctaacacacccttacccttctgaagaacagaaaaagcagttggcacaagacacgggactcaccatccttcaagtgaacaattggtttattaatgcccggagaagaatagtgcagcccatgatagaccagtccaaccgagcagtaagtcaaggaacaccttataatcctgatggacagcccatgggaggtttcgtaatggacggtcagcaacatatgggaattagagcaccaggacctatgagtggaatgggcatgaatatgggccccccatgcatacgtacattcctggacaccctcaccacccaacagtgatgatgcatggaggaccgccccaccctggaatgccaatgtcagcatcaagccccacagttcttaatataggagacccaacaatgagtggacaagtcatggacattcatgctcagtagcttaagggaatatgcattgtctgcaatggtgactgatttcaaatcatgttttttctgcaatgactgtggagttccattcttggcatctactctggaccaaggagcatccctaattcttcatagggacctttaaaaagcaggaaataccaactgaagtcaatttgggggacatgctaaataactatataagacattaagagaacaaagagtgaaatattgtaaatgctattatactgttatccatattacgttgtttcttatagattttttaaaaaaaatgtgaaatttttccacactatgtgtgttgtttccatagctcttcacttcctccagaagcctccttacattaaaaagccttacagttatcctgcaagggacaggaaggtctgatttgcaggatttttagagcattaaaataactatcaggcagaagaatctttcttctcgcctaggatttcagccatgcgcgcgctctctctctttctctctcttttcctctctctccctctttctagcctggggcttgaatttgcatgtctaattcatttactcaccatatttgaattggcctgaacagatgtaaatcgggaaggatgggaaaaactgcagtcatcaacaatgattaatcagctgttgcaggcagtgtcttaaggagactggtaggaggaggcatggaaaccaaaaggccgtgtgtttagaagcctaattgtcacatcaagcatcattgtccccatgcaacaaccaccaccttatacatcacttcctgttttaagcagctctaaaacatagactgaagatttatttttaatatgttgactttatttctgagcaaagcatcggtcatgtgtgtattttttcatagtcccaccttggagcatttatgtagacattgtaaataaattttgtgcaaaaaggactggaaaaatgaactgtattattgcaatttttttttgtaaaagtagcagtttggtatgagttggcatgcatacaagatttactaagtgggataagctaattatactttttgttgtggataaacaaatgcttgttgatagcctttttctatcaagaaaccaaggagctaattattaataacaatcattgcacactgagtcttagcgtttctgatggaaacagtttggattgtataataacgccaagcccagttgtagtcgtttgagtgcagtaatgaaatctgaatctaaaataaaaacaagattatttttgtcaaaaaaaaaaaaaaaaaaaaaaaa

SEQ ID NO: 6470 - DNA, 3179 bp, Homo sapiens
  misc_feature (98)..(98): n is a, c, g, or t
  misc_feature (100)..(100): n is a, c, g, or t
  misc_feature (109)..(109): n is a, c, g, or t
  misc_feature (135)..(135): n is a, c, g, or t
  misc_feature (3049)..(3049): n is a, c, g, or t
  misc_feature (3073)..(3073): n is a, c, g, or t
  misc_feature (3147)..(3147): n is a, c, g, or t
ccactctggcgctcccgaggcggcctcttgtgcgatccagggcgcacaaggctgggagagcgccccggggcccctgctatccgcgccggagtttgaananggttggttnccgccgcccgagggcgagagcgccanaggagcgggaagaaggagcgctcgcccgcccgcctgcctcctcgctgcctccccggcgttggctctctggactcctaggcttgctggctgctcctcccacccgcgcccgcctcctcactcgccttttcgttcgccggggctgctttccaagccctgcggtgcgcccgggcgagtgcggggcgaggggcccggggccagcaccgagcagggggcgggggtccgggcagagcgcggccggccggggaggggccatgtctggcgcgggcgcagggggcccgtctgcagcaagtgaccgagcggcgcggacggccgcctgccccctctgccacctggggcggtgcgggcccggagcccggagcccgggtagcgcgtagagccggcgcgatgcacgtgcgctcactgcgagctgcggcgccgcacagcttcgtggcgctctgggcacccctgttcctgctgcgctccgccctggccgacttcagcctggacaacgaggtgcactcgagcttcatccaccggcgcctccgcagccaggagcggcgggagatgcagcgcgagatcctctccattttgggcttgccccaccgcccgcgcccgcacctccagggcaagcacaactcggcacccatgttcatgctggacctgtacaacgccatggcggtggaggagggcggcgggcccggcggccagggcttctcctacccctacaaggccgtcttcagtacccagggcccccctctggccagcctgcaagatagccatttcctcaccgacgccgacatggtcatgagcttcgtcaacctcgtggaacatgacaaggaattcttccacccacgctaccaccatcgagagttccggtttgatctttccaagatcccagaaggggaagctgtcacggcagccgaattccggatctacaaggactacatccgggaacgcttcgacaatgagacgttccggatcagcgtttatcaggtgctccaggagcacttgggcagggaatcggatctcttcctgctcgacagccgtaccctctgggcctcggaggagggctggctggtgtttgacatcacagccaccagcaaccactgggtggtcaatccgcggcacaacctgggcctgcagctctcggtggagacgctggatgggcagagcatcaaccccaagttggcgggcctgattgggcggcacgggccccagaacaagcagcccttcatggtggctttcttcaaggccacggagttccacttccgcagcatccggtccacggggagcaaacagcgcagccagaaccgctccaagacgcccaagaaccaggaagccctgcggatggccaacgtggcagagaacagcagcagcgaccagaggcaggcctgtaagaagcacgagctgtatgtcagcttccgagacctgggctggcaggactggatcatcgcgcctgaaagtacgccgcctactactgtgagggggagtgtgccttccctctgaactcctacatgaacgccaccaaccacgccatcgtgcagacgctggtccacttcatcaacccggaaacggtgcccaagccctgctgtgcgcccacgcagctcaatgccatctccgtcctctacttcgatgacagctccaacgtcatcctgaagaaatacagaaacatggtggtccgggcctgtggctgccactagctcctccgagaattcagaccctttggggccaagtttttctggatcctccattgctcgccttggccaggaaccagcagaccaactgccttttgtgagaccttcccctccctatccccaactttaaaggtgtgagagtattaggaaacatgagcagcatatggcttttgatcagtttttcagtggcagcatccaatgaacaagatcctacaagctgtgcaggcaaaacctagcaggaaaaaaaaacaacgcataaagaaaaatggccgggccaggtcattggctgggaagtctcagccatgcacggactcgtttccagaggtaattatgagcgcccaccagccaggccacccagccgtgggaggaagggggcgtggcaaggggtgggcacattggtgtctgtgcgaaaggaaaattgacccggaagttcctgtaataaatgtcacaataaaacgaatgaatgaaaatggttaggacgttacagatatattttcctaaacaatttatccccattatctcggtttatcctgatgcgtaaacagaagctgtgtcaagtggagggcggggaggtccctctccattccctacagttttcatcctgaggcttgcagagggcccagtgtttaccgaggtttgcccaaatccaagatctagtgggaggggaaagagcaaatgtctgctccgaggagggcggtgtgttgatctttggaggaaaaatatgttctgttgttcagctggatttgccgtggagaaatgaaactaggtgtgtgaaatacccgcagacatttgggattggcttttcacctcgccccagtggtagtaaatccatgtgaaattgcagaggggacaaggacagcaagtaggatggaacttgcaaatcaaccctgttgttaagaagcaccaatgggccgggcacagtagctcccacctgtaatcccagcactttgggaggctgaggtgggcggatcatttgaggtcaggagttcgagaccagcctggccaacatggtgaaaccccatctctactaaaaatacaaaaattagccgggcatggtggcacgcacctgtaatcccagctactctggaggctgaggcaggagaattgcttgaaccccagaggtggaggttgcagtgagccaagatcgtcccactgcactccagcttgggtgacaaaacaagactccatctcaaaagaaaaaaaaacagcaccaatgaagcctagttctccacgggagtggngtgagcaggagcactgcacatcgncccagtggaccctctggtctttgtctgcagtggcattccaaggctgggccctggcaagggcacccgtggctgtntcttcatttgcagaccctgatcagaagtctct

SEQ ID NO: 6471 - DNA, 3583 bp, Homo sapiens
  misc_feature (294)..(315): n is a, c, g, or t
  misc_feature (1696)..(1712): n is a, c, g, or t
cacgcgccaccacgcccggctaattcttttgtatttttagtagagacagggtttcgctatgtagaccaggctggtctcgcactcctggcctccagtgattcacccaccttggcctcccagagtgctggaatgacacgtatgagccaccacactgacctttttattatttttatccaccatctcgctgcaatttcagtattgcccatcgacctatattgcctcctggtaatgacccctgaggaatgagccatgccatttccataggtggaggcgacgggtcatggtggtgagaannnnnnnnnnnnnnnnnnnnnngagaagatgctgggaagctgctgagggctgcccacctgtgttaggagaaggcagatggggacccatggggacagtaatactattttggatccacacaacgggagtggaaaatgccttgaggcacagcagcgtctgaggcgggtgagaaatccggcctgcagagtcgcggctggccttcagatctgcgggctgcctgtgagatgccgtgttacctaaatccatttgggcactgagttccaggagtgggggcaagaattccgatgacggggctttatccggtgcgcatccagctcagagtggttcctgagaccagccaccatgggcagccaggatgtgctcatccttgaggctttccgaggcatcaaggagatggttggataaagaatttagcacagagcttgactgatggcaggcgcccacaacatgagacacattaataatgtgtgtggaggccaggtgtagtggttcatgcctgtcaccccagcactttgggaggcagaggtgggaagatttcttgaggccaggaattcaagaccagcctgggcaacacagcgagacctcatctctaccaaaaaaaaaaaaaaaaaaaaggaaaaaattcacctggcctagtggtgcacacttgtagtctccgctactcaggaggctgaggcaggaggattgcttgagctcgggagttccaggctgcagtgggctatgattgcatcactgcactccagtctgggcaatagagcaagaccctgtctcttaaaaaaataaagtctgttgaaaagaatgaatgaaggaaggaaggaatgagagggaaaccctgtctcagctcctcccgcagggaagctggggcagggcaggcagggggggcatccggccccgctccctcccttactctggcccagaaagcactggtgccatctgcacagggtggagccaaagaaagtgccccactcacagcagagggaggccatttgaggacagcagggaaaatgggatctcagccatctaggagggggccagagatgtgggatggacacctaggaaatccagccgaggacaccagagtggcttttgactctggtcccctggctgaacgcgttccctttacagtttaaatttaggctcaaggagaagaagctggcaatcggcagggccagtgctgtagagaggatgtagggtttccggaaaatagccaacacttcagcagtgctggctgcgagctcatccaagcatgttacgggtgttaactcatttcctctccagcaaccctgtgagagggtctgagtgttcccatctccattttacagaggctcagagaggtgcagtcctttgcctgaggtcacacagctagtaagaggcagagccgggatttgaaccctggcagtctggnnnnnnnnnnnnnnnnnttaaccattaggctttatagccccagttataacaacaataataatactaatacaagtgaaccttcactgagtgccatttatagatcaagcactattctaaggattttaaagcatatttaattctcacagcactctgatgaaggaggtattcattttacaattgaagaaacagaggcctagagacattgagtcacttgcgcaaggtcacacagctggccagtggcagagccagcctttgaacctgagccttctggttgcagagctacggcttttaggcaccgtgctgagggcctccagaatgacacagatgtggcctcgagttacacagggaggcaggttgagggtgacccccaccaggcctacccaaggctgggtattaataatcacagtgcatacaccaggcccagggaggttgagccactcatccaagctcacacagcaagctcacagcacactcaggctgtcatgcagcctgggctacccccttaaccctgcctggcccctgcagccaacagagacatggcatccatcgtgtctgagatcatgatgtatgtgctcattgtggtgttgaccatatggctcgtggcagagatgatttactgctacaagaagatcgctgccgccacggagactgctgcacaggagaatgcgtgagtagggtggctgggaggtgggagggcacccagggcaccgtcacacttgccagagaggaactccggagcccgggcagggaggaggcagcggagcggcccagggcgccatctctcagtactacccagaggggagtgctccctgtcagacacaggataggggtcgtcagacccagccccttcctccctccaactcaggagcccaggctcccagccagattcctcaaagaccctgaggagtccacccatagactccttctctctctaactaaggagccctgtgtacctggggtggagaccgctaccttcccccatcccccgggggttgggtcggtctgatgatggggtcactgtatacctggcctttcccccacagctcggaatacctggccatcacctctgaaagcaaagagaactgcacgggcgtccaggtggccgaatagccctggccctgggccccgcctcaaggaagagccagccgtaatggggactctccaggcaccgcctgcccccagcgtgggggtggccactcctgggccccagaaagcctcagagtcctgccgacggagccactggggtgggagggggcagggggcttggctcgcacccccactttcgcctcctccagctcctgccccgccggccgcgcaccgccatgcatgatgggtaaagcaatactgccgctgcccccaccctgcttctgctgcctgtttggggaggggggcggtgaggtgggggcagcggccccgcacccctcctccttgctgatttgcacacattggccgcttcagacacgcacttctggggccagcccctccccgcctcctccctgcctggcggcaggggtcgcgatgatgggctggagcagtttggggcagggggttctgggacccactccgactccccctccccggcatcatttcccctcccgcttcctccggctggacctggggtcccccctccctgtaatgcactcctgccccggcccaacctcgccctctctcaccagccttgaactgtggccacctagaaaggggcccattcagcctcgtctctttacagaagtagttttgttcatgaaataaagactcttggacttgaaaaaaaaaaaaaaaaaaaaaaaaaaaaaaaaaaaaaaaaaaaaaaaaaaaaaaaaaaaaaaaaaaaaaaaaaaaaaaaaaaaaaaaaaaaaaaaaaaaaaaaaaaaaaaaaaaaaaaaaa

SEQ ID NO: 6472 - DNA, 5553 bp, Homo sapiens
  misc_feature (378)..(396): n is a, c, g, or t
  misc_feature (5517)..(5550): n is a, c, g, or t
agaaggtagcagacagacagacggatctaacctctcttggatcctccagccatgaggctgctctgggggctgatctgggcatccagcttcttcaccttatctctgcagaagcccaggttgctcttgttctctccttctgtggttcatctgggggtccccctatcggtgggggtgcagctccaggatgtgccccgaggacaggtagtgaaaggatcagtgttcctgagaaacccatctcgtaataatgtcccctgctccccaaaggtggacttcacccttagctcagaaagagacttcgcactcctcagtctccaggtgcccttgaaagatgcgaagagctgtggcctccatcaactcctcagaggccctgaggtccannnnnnnnnnnnnnnnnnntggctaaaggactctctgtccagaacgacaaacatccagggtatcaacctgctcttctcctctcgccgggggcacctctttttgcagacggaccagcccatttacaaccctggccagcgggttcggtaccgggtctttgctctggatcagaagatgcgcccgagcactgacaccatcacagtcatggtggagaactctcacggcctccgcgtgcggaagaaggaggtgtacatgccctcgtccatcttccaggatgacgttggtgatcccagacatctcagagccagggacctggaagatctcagcccgattctcagatggcctggaatccaacagcagcacccagtttgaggtgaagaaatatgtccttcccaactttgaggtgaagatcacccctggaaagccctacattctgacggtgccaggccatcttgatgaaatgcagttagacatccaggccaggtacatctatgggaagccagtgcagggggtggcatatgtgcgctttgggctcctagatgaggatggtaagaagactttctttcgggggctggagagtcagaccaagctggtgaatggtcagagccacatttccctctcaaaggcagagttccaggacgccctggagaagctgaatatgggcattactgacctccaggggctgcgcctctacgttgctgcagccatcattgagtctccaggtggggagatggaggaggcagagctcacatcctggtattttgtgtcatctcccttctccttggatcttagcaagaccaagcgacaccttgtgcctggggcccccttcctgctgcaggccttggtccgtgagatgtcaggctccccagcttctggcattcctgtcaaagtttctgccacggtgtcttctcctgggtctgttcctgaagcccaggacattcagcaaaacacagacgggagcggccaagtcagcattccaataattatccctcagaccatctcagagctgcagctctcagtatctgcaggctccccacatccagcgatagccaggctcactgtggcagccccaccttcaggaggccccgggtttctgtctattgagcggccggattctcgacctcctcgtgttggggacactctgaacctgaacttgcgagccgtgggcagtggggccaccttttctcattactactacatgatcctatcccgagggcagatcgtgttcatgaatcgagagcccaagaggaccctgacctcggtctcggtgtttgtggaccatcacctggcaccctccttctactttgtggccttctactaccatggagaccacccagtggccaactccctgcgagtggatgtccaggctggggcctgcgagggcaagctggagctcagcgtggacggtgccaagcagtaccggaacggggagtccgtgaagctccacttagaaaccgactccctagccctggtggcgctgggagccttggacacagctctgtatgctgcaggcagcaagtcccacaagcccctcaacatgggcaaggtctttgaagctatgaacagctatgacctcggctgtggtcctgggggtggggacagtgcccttcaggtgttccaggcagcgggcctggccttttctgatggagaccagtggaccttatccagaaagagactaagctgtcccaaggagaagacaacccggaaaaagagaaacgtgaacttccaaaaggcgattaatgagaaattgggtcagtatgcttccccgacagccaagcgctgctgccaggatggggtgacacgtctgcccatgatgcgttcctgcgagcagcgggcagcccgcgtgcagcagccggactgccgggagcccttcctgtcctgctgccaatttgctgagagtctgcgcaagaagagcagggacaagggccaggcgggcctccaacgagccctggagatcctgcaggaggaggacctgattgatgaggatgacattcccgtgcgcagcttcttcccagagaactggctctggagagtggaaacagtggaccgctttcaaatattgacactgtggctccccgactctctgaccacgtgggagatccatggcctgagcctgtccaaaaccaaaggcctatgtgtggccaccccagtccagctccgggtgttccgcgagttccacctgcacctccgcctgcccatgtctgtccgccgctttgagcagctggagctgcggcctgtcctctataactacctggataaaaacctgactgtgagcgtccacgtgtccccagtggaggggctgtgcctggctgggggcggagggctggcccagcaggtgctggtgcctgcgggctctgcccggcctgttgccttctctgtggtgcccacggcagccgccgctgtgtctctgaaggtggtggctcgagggtccttcgaattccctgtgggagatgcggtgtccaaggttctgcagattgagaaggaaggggccatccatagagaggagctggtctatgaactcaaccccttggaccaccgaggccggaccttggaaatacctggcaactctgatcccaatatgatccctgatggggactttaacagctacgtcagggttacagcctcagatccattggacactttaggctctgagggggccttgtcaccaggaggcgtggcctccctcttgaggcttcctcgaggctgtggggagcaaaccatgatctacttggctccgacactggctgcttcccgctacctggacaagacagagcagtggagcacactgcctcccgagaccaaggaccacgccgtggatctgatccagaaaggctacatgcggatccagcagtttcggaaggcggatggttcctatgcggcttggttgtcacgggacagcagcacctggctcacagcctttgtgttgaaggtcctgagtttggcccaggagcaggtaggaggctcgcctgagaaactgcaggagacatctaactggcttctgtcccagcagcaggctgacggctcgttccaggacctctctccagtgatacataggagcatgcaggggggtttggtgggcaatgatgagactgtggcactcacagcctttgtgaccatcgcccttcatcatgggctggccgtcttccaggatgagggtgcagagccattgaagcagagagtggaagcctccatctcaaaggcaaactcatttttgggggagaaagcaagtgctgggctcctgggtgcccacgcagctgccatcacggcctatgccctgacactgaccaaggcccctgcggacctgcggggtgttgcccacaacaacctcatggcaatggcccaggagactggagataacctgtactggggctcagtcactggttctcagagcaatgccgtgtcgcccaccccggctcctcgcaacccatccgaccccatgccccaggccccagccctgtggattgaaaccacagcctacgccctgctgcacctcctgcttcacgagggcaaagcagagatggcagaccaggctgcggcctggctcacccgtcagggcagcttccaagggggattccgcagtacccaagacacggtgattgccctggatgccctgtctgcctactggattgcctcccacaccactgaggagaggggtctcaatgtgactctcagctccacaggccggaatgggttcaagtcccacgcgctgcagctgaacaaccgccagattcgcggcctggaggaggagctgcagttttccttgggcagcaagatcaatgtgaaggtgggaggaaacagcaaaggaaccctgaaggtccttcgtacctacaatgtcctggacatgaagaacacgacctgccaggacctacagatagaagtgacagtcaaaggccacgtcgagtacacgatggaagcaaacgaggactatgagtacgatgagcttccagccaaggatgacccagatgcccctctgcagcccgtgacacccctgcagctgtttgagggtcggaggaaccgccgcaggagggaggcgcccaaggtggtggaggagcaggagtccagggtgcactacagccgtgtgcatctggcggaacggcaaggtggggctgtctggcatggccatcgcggacgtcaccctcctgagtggattccacgccctgcgtgctgacctggagaagctgacctccctctctgaccgttacgtgagtcactttgagaccgaggggccccacgtcctgctgtattttgactcggtccccacctcccgggagtgcgtgggctttgaggctgtgcaggaagtgccggtggggctggtgcagccggccagcgcaaccctgtacgactactacaaccccgagcgcagatgttctgtgttttacggggcaccaagtaagagcagactcttggccaccttgtgttctgctgaagtctgccagtgtgctgaggggaagtgccctcgccagcgtcgcgccctggagcggggtctgcaggacgaggatggctacaggatgaagtttgcctgctactacccccgtgtggagtacggcttccaggttaaggttctccgagaagacagcagagctgctttccgcctctttgagaccaagatcacccaagtcctgcacttcaccaaggatgtcaaggccgctgctaatcagatgcgcaacttcctggttcgagcctcctgccgccttcgcttggaacctgggaaagaatatttgatcatgggtctggatggggccacctatgacctcgagggacacccccagtacctgctggactcgaatagctggatcgaggagatgccctctgaacgcctgtgccggagcacccgccagcgggcagcctgtgcccagctcaacgacttcctccaggagtatggcactcaggggtgccaggtgtgagggctgccctcccacctccgctgggaggaacctgaacctgggaaccatgaagctggaagcactgctgtgtccgctttcatgaacacagcctgggaccagggcatattaaaggcttttggcagcaaagtgtcagtgttggcaaaaaaaaaaaaaaaaaaaaaaaaaaaaaaaaaaaaaaaaaaaaaaaaacctcgaggggggccccggtcccttcgccctatagggagccgtataacannnnnnnnnnnnnnnnnnnnnnnnnnnnnnnnnncgg

SEQ ID NO: 6473 - DNA, 2467 bp, Homo sapiens
  misc_feature (315)..(359): n is a, c, g, or t
tattgagttcttcaaacattgtagcctctttatggtctctgagaaataactaccttaaacccataatctttaatacttcctaaactttcttaataagagaagctctattcctgacactacctctcatttgcaaggtcaaatcatcattagttttgtagtctattaactgggtttgcttaggtcaggcattattattactaaccttattgttaatattctaaccataagaattaaactattaatggtgaatagagtttttcactttaacataggcctatcccactggtgggatacgagccaattcgaaagaaaagnnnnnnnnnnnnnnnnnnnnnnnnnnnnnnnnnnnnnnnnnnnnnaaagtgtttgatgctggaggtgggagtggtattatataggtctcagccaagacatgtgataatcactgtagtagtagctggaaagagaaatctgtgactccaattagccagttcctgcagaccttgtgaggactagaggaagaatgctcctggctgttttgtactgcctgctgtggagtttccagacctccgctggccatttccctagagcctgtgtctcctctaagaacctgatggagaaggaatgctgtccaccgtggagcggggacaggagtccctgtggccagctttcaggcagaggttcctgtcagaatatccttctgtccaatgcaccacttgggcctcaatttcccttcacaggggtggatgaccgggagtcgtggccttccgtcttttataataggacctgccagtgctctggcaacttcatgggattcaactgtggaaactgcaagtttggcttttggggaccaaactgcacagagagacgactcttggtgagaagaaacatcttcgatttgagtgccccagagaaggacaaattttttgcctacctcactttagcaaagcataccatcagctcagactatgtcatccccatagggacctatggccaaatgaaaaatggatcaacacccatgtttaacgacatcaatatttatgacctctttgtctggatgcattattatgtgtcaatggatgcactgcttgggggatctgaaatctggagagacattgattttgcccatgaagcccagcttttctgccttggcatagactcttcttgttgcggtgggaacaagaaatccagaagctgacaggagatgaaaacttcactattccatattgggactggcgggatgcagaaaagtgtgacatttgcacagatgagtacatgggaggtcagcaccccacaaatcctaacttactcagcccagcatcattcttctcctcttggcagattgtctgtagccgattggaggagtacaacagccatcagtctttatgcaatggaacgcccgagggacctttacggcgtaatcctggaaaccatgacaaatccagaaccccaaggctcccctcttcagctgatgtagaattttgcctgagtttgacccaatatgaatctggttccatggataaagctgccaatttcagctttagaaatacactgggaaggatttgctagtccacttactgggatagcggatgcctctcaaagcagcatgcacaatgccttgcacatctatatgaatggaacaatgtcccaggtacagggatctgccaacgatcctatcttccttcttcaccatgcatttgttgacagtatttttgagcagtggctccgaaggcaccgtcctcttcaagaagtttatccagaagccaatgcacccattggacataaccgggaatcctacatggttccttttataccactgtacagaaatggtgatttctttatttcatccaaagatctgggctatgactatagctatctacaagattcagacccagactcttttcaagactacattaagtcctatttggaacaagcgagtcggatctggtcatggctccttggggcggcgatggtaggggccgtcctcactgccctgctggcagggcttgtgagcttgctgtgtcgtcacaagagaaagcagcttcctgaagaaaagcagccactcctcatggagaaagaggattaccacagcttgtatcagagccatttataaaaggcttaggcaatagagtagggccaaaaagcctgacctcactctaactcaaagtaatgtccaggttcccagagaatatctgctggtatttttctgtaaagaccatttgcaaaattgtaacctaatacaaagtgtagccttcttccaactcaggtagaacacacctgtctttgtcttgctgttttcactcagcccttttaacattttcccctaagcccatatgtctaaggaaaggatgctatttggtaatgaggaactgttatttgtatgtgaattaaagtgctcttattttaaaaaattgaaataattttgatttttgccttctgatatttttagtttatatatggtttattggcgccttctttatttaaaaag

SEQ ID NO: 6474 - DNA, 1277 bp, Homo sapiens
ggcaggcactcccatccatccatccgtccaccttcctccagactgtcggccagagtctgtttcaggagcggcgccctgcacctgacagctttatctccccaggagcagcatctctgagcacccaagccaggtgggtggtggctcttaaggaggtgttcctaaaatggtgatatcctctcaaatgctgcttgttggctccagtcttccgacaaactaacaggaacaaaatgaattctgggaatccacagctctggctttggagcagcttctgggaccataagtttactgaatcttcaagaccaaagcagctgtgtagtaaatctccccggcccagctggcgaaccctgggccatcctcacatgtgacaaagggccagcagtctacctgctcgttgcctgccactgagcagtctggggacggtttggtcagactataaataagataggtttgagggcataaaatgtatgaccactggggccggagtatctatttctacatagtcagctacttctgaaactgcagcagtggcttagaaagtccaattccaaagccagaccagaagattctatcccccgcagcgctctcctttgagcaagccgagctctccttgttaccgtgttctgtctgtgtcttcaggagtctcatggcctgaacgaccacctcgacctgatgcagagccttctgaggagaggcaacaggaggcattctgtggccagccaaaaggtaccccgatggccaagcaattcctctgaacaaaatgtaaagccagccatgcattgttaatcatccatcacttcccattttatggaattgcttttaaaatacatttggcctctgcccttcagaagactcgtttttaaggtggaaactcctgtgtctgtgtatattacaagcctacatgacacagttggatttattctgccaaacctgtgtaggcattttataagctacatgttctaatttttaccgatgttaattattttgacaaatatttcatatattttcattgaaatgcacagatctgcttgtcaattcccttgaatagggaagtaacatttgccttaaattttttcgacctcgtctttctccatattgtcctgctcccctgtttgacgacagtgcatttgccttgtcacctgtgagctggagagaacccagatgttgtttattgaatctacaactctgaaagagaaatcaatgaagcaagtacaatgttaaccctaaattaataaaagagttaacatcccatggcaaaaaaaaaaaaaaataaatttaat

SEQ ID NO: 6475 - DNA, 2639 bp, Homo sapiens
  misc_feature (573)..(600): n is a, c, g, or t
agcgggggggcgcgggcgctgtccagcgtgctgaagccggagcgagctagccgcccggagccgcgccgacccagctgagcccagcccacgggacgccagacctcgaccgtcgctcctaccccggccaccgctcggagccgaggcggacgcgtcccgatcttcccctgtccccaccctgccccgaccctcctctccacctctcgcgtcgtgacaccagctgtctccggcagcctcttggtcatgaaagccctcagattgtcggcttccgccctcttctgccttctgctgatcaacgggttaggggcagcaccccctggtcgccctgaggcgcagcctcctcctctcagctctgagcataaagagccggtagccggggacgcagtgcccgggccaaaggatggcagcgccccagaggtccgaggcgctcggaattccgagccgcaggacgagggagagcttttccagggcgtggatccccgggcgctggccgcggtgctgctgcaggcactcgaccgtcccgcctcacccccggcaccaagcggctcccagcaggggccggaggaagaagcagcnnnnnnnnnnnnnnnnnnnnnnnnnnnncagccagacccacagcctcccggcgccggagagcccggagcccgcggctccgcctcgccctcagactccggagaatgggcccgaggcgagcgatccctccgaggagctcgaggcgctagcgtccctgctccaggaactgcgagatttcagtccaagtagcgccaagcgccagcaggagacggcggcagcagagacggaaacccgcacgcacacgctgacccgagtgaatctggagagcccggggccagagcgcgtatggcgcgcttcctggggagagttccaggcgcgtgtcccggagcgcgcgcccctgccgcccccggccccctctcaattccaggcgcgtatgcccgacagcgggccccttcccgaaacccacaagttcggggaaggagtgtcctcccccaaaacacacctaggcgaggcattggcacccctgtccaaggcgtaccaaggcgtggccgccccgttccccaaggcgcgccggccggagagcgcactcctgggcggctccgaggcgggcgagcgccttctccagcaagggctggcgcaggtggaggccgggcggcggcaggcggaggccacgcggcaggccgcggcgcaggaagagcggctggccgacctcgcctcggacctgctgctccagtatttgctgcagggcggggcccggcagcgcggcctcgggggtcgggggctgcaggaggcggcggaggagcgagagagtgcaagggaggaggaggaggcggagcaggagagacgcggcggggaggagagggtgggggaagaggatgaggaggcggccgaggcggaggcagaggcggaggaggcggagagggcgcggcagaacgcgctcctgttcgcggaggaggaggacggggaagccggcgccgaggacaagcgctcccaggaggagacgccgggccaccggcggaaggaggccgaggggacagaggagggcggggaggaggaggacgacgaggagatggatccgcagacgatcgacagcctcattgagctgtccaccaaactccacctgccagcggacgacgtggtcagcatcatcgaggaggtggaggagaagcggaagcggaagaagaacgcccctcccgagcccgtgccgcccccccgtgccgcccccgcccccacccacgtccgctccccgcagcccccgccccccgcccccgctcccgcacgagacgagctgccggactggaacgaggtgctcccgccctgggatcgggaggaggacgaggtgtacccgccagggccgtaccaccctttccccaactacatccggccgcggacactgcagccgccctcggccttgcgccgccgccactaccaccacgccttgccgccttcgcgccactatcccggccgggaggcccaggcgcggcgcgcgcaggaggaggcggaggcggaggagcgccggctgcaggagcaggaggagctggagaattacatcgagcacgtgctgctccggcgcccgtgactgcccttcccggtcccgcccccgcgcgcccccgccgcgcgcgcgcgccggcgcccccctccgtgttgcccgctccccctcggtgtttgcatgcgccccggccctgccccttggccctgcccctgtccccgggctgcgtcgggacctgccagacccccctcccgggtcctgagcccgaactcccagagctcacccgcgggtgaccgggggccagcccaggagggcgggtggtttgtgcgagttcccttgccacgcggggccccggccccatcaagtccctctggggacgtccccgtcggaaaccggaaaaagcagttccagttaattgtgtgaagtgtgtctgtctccagcccttcgggcctcccacgagcccctccagcctctccaagtcgctgtgaattgaccccttctttcctttctctgttgtaaatacccctcacggaggaaatagttttgctaagaaataaaagtgactattttaaaaagaaaaaaaaaaaaaaaaaaaaaaaaaaaataagttatgtattaaatcaataatgaaaaaatggcg

SEQ ID NO: 6476 - DNA, 1224 bp, Homo sapiens
cctgggagaattttcggattcgatccccatcccgtgggtggccggcgacaagatggcagcagcgtgtcggagcgtgaagggcctggtggcggtaataaccggaggagcctcgggcctgggcctggccacggcggagcgacttgtggggcagggagcctctgctgtgcttctggacctgcccaactcgggtggggaggcccaagccaagaagttaggaaacaactgcgttttcgccccagccgacgtgacctctgagaaggatgtgcaaacagctctggctctagcaaaaggaaagtttggccgtgtggatgtagctgtcaactgtgcaggcatcgcggtggctagcaagacgtacaacttaaagaagggccagacccataccttggaagacttccagcgagttcttgatgtgaatctcatgggcaccttcaatgtgatccgcctggtggctggtgagatgggccagaatgaaccagaccagggaggccaacgtggggtcatcatcaacactgccagtgtggctgccttcgagggtcaggttggacaagctgcatactctgcttccaaggggggaatagtgggcatgacactgcccattgctcgggatctggctcccataggtatccgggtgatgaccattgccccaggtctgtttggcaccccactgctgaccagcctcccagagaaagtgtgcaacttcttggccagccaagtgcccttccctagccgactgggtgaccctgctgagtatgctcacctcgtacaggccatcatcgagaacccattcctcaatggagaggtcatccggctggatggggccattcgtatgcagccttgaagggagaaggcagagaaaacacacgctcctctgcccttcctttccctggggtactactctccagcttgggaggaagcccagtagccattttgtaactgcctaccagtcgccctctgtgcctaataaagtctctttttctcacaaaaaaaaaaaaaaaaaaaaaaaaaaaaaaaaaaaaaaaaaaaaaaaaaaaaccgctattcttggttggcggggggcggaaaaaagagcggttagatgaacagcggccccccgggggtccacaaggcctggttctctgaacaccacattctttgttgttcaccaaggggagagaattgccgcggggccccccaatagagagggcgcaaataatttggcaaaacgcccaggtaacgcggattaga

SEQ ID NO: 6477 - DNA, 3179 bp, Homo sapiens
agcgggatccaagaggtgcagagcaagcgcatgcgtcgtgacggcccggcttaggcgactctgggcgggtctgggccgctccagtgttttggggcacagaagctgtgggaggagctggaggcttcaccgtggtaaccacagcgccgctgctgccccgccttgcaggcctcaggactgtcatcgcctctgggtgtgagggtactttggccaccgtccccggaaataaccgcgcctgcctctcaagataccccatcctctccacgccgctgccgctgccgccatgcaaggggaggacgccagatacctcaaaaggaaagttaaaggagggaatatagatgtacatccatcagaaaaagcactcattgttcactatgaagtggaagctaccattcttggagaaatgggggaccccatgttgggagaacgaaaagaatgtcaaaaaatcattcgacttaagagtctcaatgccaacacagatataacttccctggcaaggaaggtggttgaagaatgtaaactcattcatccttcaaaactaaatgaggtagaacagctgttgtactatctacagaaccgccgtgattcattgtcaggaaaagagaaaaaagaaaaatcaagcaagcctaaagatccacctccttttgaaggaatggagattgatgaagttgctaacattaatgacatggatgaatatattgagttattatatgaagatattcctgacaaagttcggggttctgctttgatcctgcagcttgctcgaaatcctgataacttggaagaactactattgaatgaaactgcccttggtgcattagcaagggtcctgagagaagactggaagcaaagtgtcgagttagctacaaacataatttacatctttttttgtttctccagcttttctcaatttcatggacttattactcactataaaattggagctctgtgtatgaatattattgatcatgagttaaaaagacatgagctttggcaagaagaactctcaaagaagaagaaagctgttgatgaagaccctgaaaaccaaaccttgagaaaggattatgaaaaaacctttaaaaagtaccaggggcttgtggtaaaacaggaacagctattacgagttgctctttatttgcttctgaatcttgctgaggatactcgtaccgaactgaaaatgaggaacaagaacatagttcacatgttggtgaaagcccttgatcgggacaattttgagctgctaattttagttgtgtcattcttgaagaaactcagcatttttatggagaataaaaatgatatggtggaaatggatattgttgaaaaactggtgaaaatgataccttgtgagcatgaagacctgctgaatatcaccctccgacttttactaaacctatcctttgacacaggactgaggaataagatggtacaagttggactgcttcccaagctcactgcactcctaggcaatgacaactacaaacaaatagcaatgtgtgttctttaccacataagcatggatgaccgctttaaatcaatgtttgcatacactgactgtataccacagttaatgaagatgctgtttgaatgttcagatgaacgaattgacttggaactcatttctttctgcattaatcttgctgctaacaaaagaaatgtacagcttatctgtgaaggaaatgggctgaagatgctcatgaagagggctctgaagtttaaggatccattgctgatgaaaatgattagaaacatttctcagcatgatggaccaactaaaaatctgtttattgattatgttggggaccttgcagcccagatctctaatgatgaagaagaggagtttgtgattgaatgtttgggaactcttgcaaacttgaccattccagacttagactgggaattggttcttaaagaatataagttggttccatacctcaaggataaactaaaaccaggtgctgcagaagatgatcttgttttagaagtggttataatgattggaactgtatccatggatgactcttgtgctgcattgctagccaaatctggcataatccctgcactcattgaattgctaaatgctcaacaagaagatgatgaatttgtgtgtcagataatttatgtcttctaccagatggttttccaccaagccacaagagacgtcataatcaaggaaacacaggctccagcatatctcatagacctaatgcatgataagaataatgaaatccgaaaggtctgtgataatacattagatattatagcggaatatgatgaagaatgggctaagaaaattcagagtgaaaagtttcgctggcataactctcagtggctggagatggtagagagtcgtcagatggatgagagtgagcagtacttgtatggtgatgatcgaattgagccatacattcatgaaggagatattctcgaaagacctgaccttttctacaactcagatggattaattgcctctgaaggagccataagtcccgatttcttcaatgattaccaccttcaaaatggagatgttgttgggcagcattcatttcctggcagccttggaatggatggctttggccaaccagttggcattcttggacgccctgccacagcatatggattccgccctgatgaaccttactactatggctatggatcttgataaagtatctgtttccatgtgtaatctcagcttagaagaaatctgtgtgggttgggttaattttggatctttgcctaataatgcatgttgatgttattgtgggtctgtgtttgtttttatttttatatgttgttagctgcagattaaccccagcccctctgtcttctgttaagtacagttgatactgacattgttcactcatcaaaccacatcttgatgctaagtaacatttcccatgagcctcaaaactgaatgctgaaaagctactagactggaaaacaaacactgcattatgtatgttaagtgactaatttaatttcaattaaaaagcgtaaagtgaaaatgaaaaaaaaaaaaaaaaaagtttatatttcacacatttcactacgaattacatgttaatatagggtgcgcgtgaattttattttttctcctttttttctgtttgtaaactcttgagtaatttgtataatatatgctacctttaaaatttataaaaagaacatcaccttcatattcc

SEQ ID NO: 6478 - DNA, 2248 bp, Homo sapiens
  misc_feature (716)..(737): n is a, c, g, or t
tttaaccaatgaggaccaacccagccacttatgccacactgatctgaagccagaagaacgaaaaacctgccgtaatgtctataactgtgagttaccccagaattgcaaggaggtaaaaagacttaaaggtgccagtgaagatggtgaatatttcctgatgattagaggaaagcttctgaagatattctgtgcggggatgcactctgaccaccccaaagagtacgtgacactggtgcatggagactctgagaatttctccgaggtttatgggcacaggttacacaacccaacagaatgtccctataacgggagccggcgcgatgactgccaatgtcggaaggattacacggccgctgggttttccagttttcagaaaatcagaatagacctgaccagcatgcagataatcaccactgacttacagtttgcaaggacaagcgaaggacatcccgtcccttttgccacagccggggattgctacagcgctgccaagtgcccacagggtcgttttagcatcaacctttatggaaccggcttgtctttaactgaatctgccagatggatatcacaagggaattatgctgtctctgacatcaagaagtcgccggatggtacccgagtcgtagggaaatgcggtggttactgtggaaaatgcactccatcctctggtactggcctggaggtgcgagttttatagctaaggtgctttgaagagnnnnnnnnnnnnnnnnnnnnnnggatagtaatgcaatacctccaccttaatttgggtgcatgtgtatgtgtgtgtgtgtttgtgtgtgacttgtatgcttgtgtgtgtaaatgtgtgtacatatacatatatacatatctacacatacatatatacacatatatgtgtgtatgtagatatgtagactatcctaatgatgtaaagtttaatatttatgtttgaaattatttattgtgatgtaatatttttgtacgtaaaatgattctattatgactgcctttgcatgtagtaatatgacaaagtgatccttcattatcacggtacactattgtttacttttcatctgtaaatgttttattgttacttttttaaaatgaattttttttaaaacaatctagccatcatcaaggtgctataagagttgtataaaagatatttttggcatttctaggcaagtatcagccaataagtatgttagtgatatcacagattgtaccaactattaactatgttaaataagtattcagtttcatgtgatctctgggaaaaaaatatgctgccttggtgctaatattgtatgtatttaaatgatcatctgactcagaaatataaacacttttaatgaaagggaggaacggaaggacaatttccagtgcacagaatcacttggatgaaataagaccagctctttacccttatttttggatatgccttttttggaagagacttagactttatccttattgttgttagtgttgttaatattcgttgcttcagcccacggtgccttggtctctccacaatcaaatggaggatcccccaagcagcttcattacagagtgatattgggaaagtgagatcctctcaccattttgccaagatactctaaaatgacatccaagtttaccagtagaaagacacaggatgcacagaatgggcatgaccttcagctcacgagcacacctggagaaattcagaaccaggttctgaatcatcacgattgccttttgcatgaaaacatcggctggtgatgtgacttctcttcaggccatgagcctaacaccctgccggttttcatgcccgctgcagtaatggacgtttgtgtgaagaaatgaactgtggagtacaaaatgctttgagtctttccgattgctcattaattcacttttttgttacttctttccaaaatggaagtgctgaagccatggtctttctgcccctccaagctgatgaagggaagcctttgccaatggcccatggaagacacttggtttgagaaaccctgcccacttccaaagaccaaagagattaggaaaagcctggcagtattctccaactccaaacaagctctagagtgctccaggaaaagttatattcagtatatgaataagtgttattctccattattaatgtgttctgaaaatatattatgaataaatacatcaccacacccaaaaaaaaaaaaaaaaaaaaaaaaaaaaaaaaaaaaaaaaaaaaaaaaaaccaaaaaaaaaaaaaaaaaaaaaaaaaaaa

SEQ ID NO: 6479 - DNA, 3434 bp, Homo sapiens
  misc_feature (1841)..(1861): n is a, c, g, or t
  misc_feature (3410)..(3428): n is a, c, g, or t
ccctgaagagggaagacacgcggaaacagatacccagcagcctttggatcttgagccatgtggcccgaggagatgaccatcccatagtgagggaagacacgcggaaacaggcttgcacccagacacgacaccatgcatctcctcggcccctggctcctgctcctggttctagaatacttggctttctctgactcaagtaaatgggtttttgagcaccctgaaaccctctacgcctgggagggggcctgcgtctggatcccctgcacctacagagccctagatggtgacctggaaagcttcatcctgttccacaatcctgagtataacaagaacacctcgaagtttgatgggacaagactctatgaaagcacaaaggatgggaaggttccttctgagcagaaaagggtgcaattcctgggagacaagaataagaactgcacactgagtatccacccggtgcacctcaatgacagtggtcagctggggctgaggatggagtccaagactgagaaatggatggaacgaatacacctcaatgtctctgaaaggccttttccacctcatatccagctccctccagaaattcaagagtcccaggaagtcactctgacctgcttgctgaatttctcctgctatgggtatccgatccaattgcagtggctcctagagggggttccaatgaggcaggctgctgtcacctcgacctccttgaccatcaagtctgtcttcacccggagcgagctcaagttctccccacagtggagtcaccatgggaagattgtgacctgccagcttcaggatgcagatgggaagttcctctccaatgacacggtgcagctgaacgtgaagcacaccccgaagttggagatcaaggtcactcccagtgatgccatagtgagggagggggactctgtgaccatgacctgcgaggtcagcagcagcaacccggagtacacgacggtatcctggctcaaggatgggacctcgctgaagaagcagaatacattcacgctaaacctgcgcgaagtgaccaaggaccagagtgggaagtactgctgtcaggtctccaatgacgtgggcccgggaaggtcggaagaagtgttcctgcaagtgcagtatgccccggaaccttccacggttcagatcctccactcaccggctgtggagggaagtcaagtcgagtttctttgcatgtcactggccaatcctcttccaacaaattacacgtggtaccacaatgggaaagaaatgcagggaaggacagaggagaaagtccacatcccaaagatcctcccctggcacgctgggacttattcctgtgtggcagaaaacattcttggtactggacagaggggcccgggagctgagctggatgtccagtatcctcccaagaaggtgaccacagtgattcaaaaccccatgccgattcgagaaggagacacagtgaccctttcctgtaactacaattccagtaaccccagtgttacccggtatgaatggaaaccccatggcgcctgggaggagccatcgcttggggtgctgaagatccaaaacgttggctgggacaacacaaccatcgcctgcgcacgttgtaatagttggtgctcgtgggcctcccctgtcgccctgaatgtccagtatgccccccgagacgtgagggtccggaaaatcaagcccctttccgagattcactctggaaactcggtcagcctccaatgtgacttctcaagcagccaccccaaagaagtccagttcttctgggagaaaaatggcaggcttctggggaaagaaagccagctgaattttgactccatctccccagaagatgctgggagttacannnnnnnnnnnnnnnnnnnnnccataggacagacagcgtccaaggcctggacacttgaagtgctgtatgcacccaggaggctgcgtgtgtccatgagcccgggggaccaagtgatggaggggaagagtgcaaccctgacctgtgagagtgacgccaaccctcccgtctcccactacacctggtttgactggaataaccaaagcctcccccaccacagccagaagctgagattggagccggtgaaggtccagcactcgggtgcctactggtgccaggggaccaacagtgtgggcaagggccgttcgcctctcagcacccttactgtctactatagcccggagaccatcggcaggcgagtggctgtgggactcgggtcctgcctcgccatcctcatcctggcaatctgtgggctcaagctccagcgacgttggaagaggacacagagccagcaggggcttcaggagaattccagcggccagagcttctttgtgaggaataaaaaggttagaagggcccccctctctgaaggcccccactccctgggatgctacaatccaatgatggaagatggcattagctacaccaccctgcgctttcccgagatgaacataccacgaactggagatgcagagtcctcagagatgcagagacctccccggacctgcgatgacacggtcacttattcagcattgcacaagcgccaagtgggcgactatgagaacgtcattccagattttccagaagatgaggggattcattactcagagctgatccagtttggggtcggggagcggcctcaggcacaagaaaatgtggactatgtgatcctcaaacattgacactggatgggctgcagcagaggcactgggggcagcgggggccagggaagtccccgagtttccccagacaccgccacatggcttcctcctgcgtgcatgtgcgcacacacacacacacacgcacacacacacacacacactcactgcggagaaccttgtgcctggctcagagccagtctttttggtgagggtaaccccaaacctccaaaactcctgcccctgttctcttccactctccttgctacccagaaatcatctaaatacctgccctgacatgcacacctcccctgccccaccagcccactggccatctccacccggagctgctgtgtcctctggatctgctcgtcattttccttcccttctccatctctctggccctctacccctgatctgacatccccactcacgaatattatgcccagtttctgcctctgagggaaagcccagaaaaggacagaaacgaagtagaaaggggcccagtcctggcctggcttctcctttggaagtgaggcattgcacggggagacgtacgtatcagcggccccttgactctggggactccgggtttgagatggacacactggtgtggattaacctgccagggagacagagctcacaataaaaatggctcagatgccacttcaaagaaaaaaaaaaaaaaaactccagggcatctatgtccgggtgggcggaaaaagagggtaatgaaatgggcccatgggcccatnnnnnnnnnnnnnnnnnnncgcttt

SEQ ID NO: 6480 - DNA, 3605 bp, Homo sapiens
  misc_feature (2310)..(2310): n is a, c, g, or t
  misc_feature (2333)..(2333): n is a, c, g, or t
  misc_feature (3344)..(3344): n is a, c, g, or t
ggcacgaggggagggggcagttgggcggggataggccgtcctagctaaggtggtaaaggccaataactcttcaggctgcctctcctcgaaaagtcatcttctcgcgaacctttaaaatgccttcctccccaagcacctcaagggactagaactgagtgcttcatttgtcttttttcctccttgcaaaagtcccgtttgccaccatggggatgtaccaagtgagaccgagtagggggaacgagtggtgattgacgcgccaggttactggccactgctcacctaggcgctagcaaacttctgccaagatcggaactgagtactaaacagcctccacagttctccctggtgccgtctccggcttggcgccgcatcctcctctgggctcgcgatggccgcgtcccctcccgctgcggacgggtcctttggtacatgcagtccgagatcgccatggatcggatgaagaagatcaaacggcagctgtcaatgacactccgaggtggccgaggcatagacaagaccaatggtgcccctgagcagataggcctggatgagagtggtggtggtggcggcagtgaccctggagaggcccccacacgtgctgctcctggggaacttcgttctgcacggggcccactcagctctgcaccagagattgtgcacgaggacttgaagatggggtctgatggggagagtgaccaggcttcagccacgtcctcggatgaggtgcagtctccagtgagagtgcgtatgcgcaaccatcccccacgcaagatctccactgaggacatcaacaagcgcctatcactaccagctgacatccggctgcctgagggctacctggagaagctgaccctcaatagccccatctttgacaagcccctcagccgccgcctccgtcgtgtcagcctatctgagattggctttgggaaactggagacctacattaagctggacaaactgggcgagggtacctatgccaccgtctacaaaggcaaaagcaagctcacagacaaccttgtggcactcaaggagatcagactggaacatgaagagggggcaccctgcaccgccatccgggaagtgtccctgctcaaggacctcaaacacgccaacatcgttacgctacatgacattatccacacggagaagtccctcacccttgtctttgagtacctggacaaggacctgaagcagtacctggatgactgtgggaacatcatcaacatgcacaacgtgaaactgttccctggtccacctgctccgtggcctggcctactgccaccggcagaaggtgctacaccgagacctcaagccccagaacctgctcatcaacgagaggggagagctcaagctggctgactttggcctggcccgagccaagtcaatcccaacaaagacatactccaatgaggtggtgacactgtggtaccggccccctgacatcctgcttgggtccacggactactccactcagattgacatgtggggtgtgggctgcatcttctatgagatggccacaggccgtcccctctttccgggctccacggtggaggaacagctacacttcatcttccgtatcttaggaaccccaactgaggagacgtggccaggcatcctgtccaacgaggagttcaagacatacaactaccccaagtaccgagccgaggcccttttgagccacgcaccccgacttgatagcgacggggccgacctcctcaccaagctgttgcagtttgagggtcgaaatcggatctccgcagaggatgccatgaaacatccattcttcctcagtctgggggagcggatccacaaacttcctgacactacttccatatttgcactaaaggagattcagctacaaaaggaggccagccttcggtcttcgtcgatgcctgactcaggcaggccagctttccgcgtggtggacaccgagttctaagccacagaccgaggccccagcaggcagcggctggagggatgccacacccctcacagggcagcccccaactacatcttccctgcttactctctgcctacctgcctgagccatgttcacctgcccacttgtcccctgctgcctgcccaaacaccccaccattggcctgtcaacccacccattggcctgtctgctgggtgctaacaaagctctcatcactccttcacttggtctgtctgtctctgtcttggtagttgccggtggacagcatggccgtgccagcctcccacactgaggccaggtctaccccccatcataccagcccccaggaccactaccccacggccagccaggggtccagagctagcccaggntgggatctcgactcaaacaaganggtgacaatgccttgagtctgaggcatcctctgcctgctttcctgcctgccccacctgcctcatattgtgtgggcctttttttgtttgtttcattcattgttttttttttttttaattattttaaatgagatttttgttttttttaaatgcaatatctctgtatacagactggctgggccccaccccctgcgtgtggccctcccacagtattttgtgcaatgaagccctgctcccagcctttcagagacagggacacagcccctatttggaaccctgatcatcaccagaccctgggattggctatgggaaagcatgccacagccactcgccttcctacccccgcccgccatccccagttgcagggggatctggggactaccagagactctgggaaatggacaaggtggggggccccactctttctctcctgcagtcccgtagctggggcctccttccttctcagggtctccccagcccagtccccttgctcccatcccactcggtgctgttgggtaggggccctgccaggaactgaccagctcagcgaggagccataatgtgcatatgtgcacaagcagggttgggggaggggggtgtgaggggttgtgcccaggtgttgccccctatctcctggggagggtgaggcagggcagggacagtctccagggtcagtccctggatgggtggttacctccccttcctccaccctaagccctggggccctgaaatggggtgggagggcaggggtgggagccctcctagtgggtttggggggttgggttcctgaatgcaccataatcgctgtatgaaatattaaaaagtctaaagtgaaaaaaaaaaaaaaaaaaaaaacacaacacacacaaaaaacaaaacggggcgcggcacgcacacaaaaatcgatcacccccagcgggggcccccgcactttaccacgatcacacccacggttttcttggtcaacaggaggggggccaccataattgcggaggcacgacccataacaacanagcacagccccactggccccagagcataaacccgccagtgcatactcgtggcaaaccctcgaactacgcggcgacaccacgcagcaacgcacacccactacacccacggggctgggaaccatccctggcgccgacacccgcccacagcaacaccacccgcgaaaccaccaacactccaaggtccacagcggaagcctccacgacaaccggcagtggaaatagcccaggcgagacgacacgccaatacccgcgcacggcacc

SEQ ID NO: 6481 - DNA, 5601 bp, Homo sapiens
  misc_feature (3296)..(3321): n is a, c, g, or t
ggactgcgaaaggagcagggttgcggagctagggctccagcctgcggccgcgcattcttgcgtctggccagccgcgagctctaagggtcggccccgcccggtccgcccccgcggctccctgccaggctctcgcgggcgcgctcggggtggggcctcgcggctggcggagatgcggccggggctgcgcggtggtgatgcgagcctgctgggcggcgcgccggggcagccggagccgcgcgccgcggcgctgtaatcggacaccaagagcgctcgcccccggcctccggccactttccattcactccgaggtgcttgattgagcgacgcggagaagagctccgggtgccgcggcactgcagcgctgagattcctttacaaagaaactcagaggaccgggaagaaagaatttcacctttgcgacgtgctagaaaataaggtcgtctgggaaaaggactggagacacaagcgcatccaaccccggtagcaaactgatgacttttccgtgctgatttctttcaacctcggtattttcccttggatattaacttgcatatctgaagaaatggcattccggacaatttgcgtgttggttggagtatttatttgttctatctgtgtgaaaggatcttcccagccccaagcaagagtttatttaacatttgatgaacttcgagaaaccaagacctctgaatacttcagcctttcccaccatcctttagactacaggattttattaatggatgaagatcaggaccggatatatgtgggaagcaaagatcacattctttccctgaatattaacaatataagtcaagaagctttgagtgttttctggccagcatctacaatcaaagttgaagaatgcaaaatggctggcaaagatcccacacacggctgtgggaactttgtccgtgtaattcagactttcaatcgcacacatttgtatgtctgtgggagtggcgctttcagtcctgtctgtacttacttgaacagagggaggagatcagaggaccaagttttcatgattgactccaagtgtgaatctggaaaaggacgctgctctttcaaccccaacgtgaacacggtgtctgttatgatcaatgaggagcttttctctggaatgtatatagatttcatggggacagatgctgctatttttcgaagtttaaccaagaggaatgcggtcagaactgatcaacataattccaaatggctaagtgaacctatgtttgtagatgcacatgtcatcccagatggtactgatccaaatgatgctaaggtgtacttcttcttcaaagaaaaactgactgacaataacaggagcacgaaacagattcattccatgattgctcgaatatgtcctaatgacactggtggactgcgtagccttgtcaacaagtggaccactttcttaaaggcgaggctggtgtgctcggtaacagatgaagacggcccagaaacacactttgatgaattagaggatgtgtttctgctggaaactgataacccgaggacaacactagtgtatggcatttttacaacatcaagctcagttttcaaaggatcagccgtgtgtgtgtatcatttatctgatatacagactgtgtttaatgggccttttgcccacaaagaagggcccaatcatcagctgatttcctatcagggcagaattccatatcctcgccctggaacttgtccaggaggagcatttacacccaatatgcgaaccaccaaggagttcccagatgatgttgtcacttttattcggaaccatcctctcatgtacaattccatctacccaatccacaaaaggcctttgattgttcgtattggcactgactacaagtacacaaagatagctgtggatcgagtgaacgctgctgatgggagataccatgtcctgtttctcggaacagatcggggtactgtgcaaaaagtggttgttcttcctactaacaactctgtcagtggcgagctcattctggaggagctggaagtctttaagaatcatgctcctataacaacaatgaaaatttcatctaaaaagcaacagttgtatgtgagttccaatgaaggggtttcccaagtatctctgcaccgctgccacatctatggtacagcctgtgctgactgctgcctggcgcgggacccttattgcgcctgggatggccattcctgttccagattctacccaactgggaaacggaggagccgaagacaagatgtgagacatggaaacccactgactcaatgcagaggatttaatctaaaagcatacagaaatgcagctgaaattgtgcagtatggagtaaaaaataacaccacttttctggagtgtgcccccaagtctccgcaggcatctatcaagtggctgttacagaaagacaaagacaggaggaaagaggttaagctgaatgaacgaataatagccacttcacagggactcctgatccgctctgttcagggttctgaccaaggactttatcactgcattgctacagaaaatagtttcaagcagaccatagccaagatcaacttcaaagttttagattcagaaatggtggctgttgtgacggacaaatggtccccgtggacctgggccagctctgtgagggctttacccttccacccgaaggacatcatgggggcattcagccactcagaaatgcagatgattaaccaatactgcaaagacactcggcagcaacatcagcagggagatgaatcacagaaaatgagaggggactatggcaagttaaaggccctcatcaatagtcggaaaagtagaaacaggaggaatcagttgccagagtcataatattttcttatgtgggtcttatgcttccattaacaaatgctctgtcttcaatgatcaaattttgagcaaagaaacttgtgctttaccaaggggaattactgaaaaaggtgattactcctgaagtgagttttacacgaactgaaatgagcatgcattttcttgtatgatagtgactagcactagacatgtcatggtcctcatggtgcatataaatatatttaacttaacccagattttatttatatctttattcaccttttcttcaaaatcgatatggtggctgcaaaactagaattgttgcatccctcaattgaatgagggccatatccctgtggtattcctttcctgctttggggctttagaattctaattgtcagtgattttgtatatgaaaacaagttccaaatccacagcttttacgtagtaaaagtcataaatgcatatgacagaatggctatcaaaagaaatagaaaaggannnnnnnnnnnnnnnnnnnnnnnnnntataaaaacacgagttattcataaagagaaaatgatgagtttttatggttccaatgaaatatcttcccctttttttaagattgtaaaaataatcagttactggtatctgtcactgacctttgtttccttattcaggaagataaaaatcagtaacctaccccatgaagatatttggtgggagttatatcagtgaagcagtttggtttatattcttatgttatcaccttccaaacaaaagcacttactttttttggaagttatttaatttattttagactcaaagaatataatcttgcactactcagttattactgtttgttctcttattccctagtctgtgtggcaaattaaacaatataagaaggaaaaatttgaagtattagacttctaaataaggggtgaaatcatcagaaagaaaaatcaaagtagaaactactaattttttaagaggaatttataacaaatatggctagttttcaacttcagtactcaaattcaatgattcttccttttattaaaaccagtctcagatatcatactgatttttaagtcaacactatatattttatgatcttttcagtgtgatggcaaggtgcttgttatgtctagaaagtaagaaaacaatatgaggagacattctgtctttcaaaaggtaatggtacatacgttcactggtctctaagtgtaaaagtagtaaattttgtgatgaataaaataattatctcctaattgtatgttagaataattttattagaataatttcatactgaaattattttctccaaataaaaattagatggaaaaatgtgaaaaaaattattcatgctctcatatatattttaaaaacactacttttgcttttttatttaccttttaagacattttcatgcttccaggtaaaaacagatattgtaccatgtacctaatccaaatatcatataaacattttatttatagttaataatctatgatgaaggtaattaaagtagattatggcctttttaagtattgcagtctaaaacttcaaaaactaaaatcattgtcaaaattaatatgattattaatcagaatatcagatatgattcactatttaaactatgataaattatgataatatatgaggaggcctcgctatagcaaaaatagttaaaatgctgacataacaccaaacttcattttttaaaaaatctgttgttccaaatgtgtataattttaaagtaatttctaaagcagtttattataatggtttgcctgcttaaaaggtataattaaacttcttttctcttctacattgacacacagaaatgtgtcaatgtaaagccaaaaccatcttctgtgtttatggccaatctattctcaaagttaaaagtaaaattgtttcagagtcacagttccctttatttcacataagcccaaactgatagacagtaacggtgtttagttttatactatatttgtgctatttaattctttctattttcacaattattaaattgtgtacactttcattacttttaaaaatgtagaaattcttcatgaacataactctgctgaatgtaaaagaaaattttttttcaaaaatgctgttaatgtatactactggtggttgattggttttattttatgtagcttgacaattcagtgacttaatatctattccatttgtattgtacataaaattttctagaaatacacttttttccaaagtgtaagtttgtgaatagattttagcatgatgaaactgtcataatggtgaatgttcaatctgtgtaagaaaacaaactaaatgtagttgtcacactaaaatttaattggatattgatgaaatcattggcctggcaaaataaaacatgttgaattccccaaaaaaaaaaaaaaaaaaaaataaacaaagaaagaaaatatagaacagtaaataggaacgaaaagaataaaaatcagaagagggggagggcttcaagaaaatatgtctgtactagaggaccacaaaagtggtcgcgagcgccgaaacgcaattatcattaacaagggagggggcacaccacgacaggaagtcatcgaattcaagcagaaagacgggcgccaataaatagagattgaaaacgaagaaacaagggccgaccagtgaaaatagagaagaagaacacatacgagatcgggggagacaatgcggaagaaacgaacccaacgggtaagggcgacaagaagaaccacacccaagggaatagagccaacgaagaaaaataccaggggagaagccaagaggttaagggaatcacg

SEQ ID NO: 6482 - DNA, 15749 bp, Homo sapiens
  misc_feature (2697)..(2732): n is a, c, g, or t
  misc_feature (2919)..(2955): n is a, c, g, or t
  misc_feature (5326)..(5428): n is a, c, g, or t
  misc_feature (7434)..(7461): n is a, c, g, or t
  misc_feature (7960)..(8020): n is a, c, g, or t
  misc_feature (8630)..(8630): n is a, c, g, or t
  misc_feature (13169)..(13186): n is a, c, g, or t
cctaattacatagttgaaaagcgtgaatcgggtacaacagcttggcagcttgtcaattccagtgtcaagcgcactcaaattaaagtcactcatctcacaaaatacatggaatattctttccgtgtcagttcagagaacagatttggtgtcagcaaacctctagaatcagcaccaataattgctgaacatccatttgtcccaccaagcgctcctaccagacctgaggtctaccatgtgtctgccaatgccatgtctattcgttgggaagaaccctaccacgatggtggcagtaaaatcattggctactgggttgagaagaaagaacgtaatacaattctttgggtgaaagaaaacaaagtgccatgcttagagtgcaactacaaagtaactggtttagtagaaggactggaatatcagttcagaacttatgcactcaatgctgcaggtgttagcaaggccagcgaagcttcaagacctataatggctcaaaatccagttgatgcaccaggcagaccaggggtgacagatgtccaaagatcaacagtatcactgatttggtctgccccagcgtatgatggaggcagcaaggttgtgggctacatcatagagcgtaagccagtcagtgaggtaggagatggtcgctggctgaagtgcaactacaccattgtatctgacaatttcttcaccgtgactgctctcagtgaaggagacacttatgagttccgtgtgttagccaagaatgcagcaggcgtaattagcaaagggtctgaatctacaggccctgtcacttgccgagatgaatacgctccacccaaagccgaactggatgcccgattacacggtgatctggttaccatcagagcaggttctgatcttgttctggatgctgcagttggtggcaaacctgaacccaaaattatctggaccaaaggagacaaggagctagatctctgtgaaaaagtctctttgcagtatactggcaaacgagcaactgctgtgatcaagttctgtgacagaagtgacagtggaaaatacactttaacagtgaaaaatgccagcgggaccaaggccgtgtctgtcatggtcaaagtgcttgattcccctggcccatgtggaaagctcaccgtcagcagagtaacacaggagaagtgcactttagcctggagccttccgcaggaagacggaggagcagaaatcactcactacatcgtggaaagacgcgagactagcaggctcaactgggtgattgttgaaggcgaatgcccaaccctatcctatgtcgttaccaggctcatcaagaacaatgagtacatattccgagtgagggcagtaaacaaatatggccctggtgtgcctgttgaatcagagccaattgtagccagaaactcattcactattccatcaccacccggcatacctgaagaagttgggactggcaaagagcatatcatcattcagtggacaaaacctgaatctgatggtggcaatgaaatcagcaactacctagtagacaaacgtgagaaggagagcctgcgctggacacgtgtcaacaaagactatgtggtgtatgataccaggctgaaggtgaccagcctgatggagggttgtgattaccagttccgggtgaccgcagtgaatgcagctggtaacagtgagcccagcgaacgttccaacttcatctcatgcagagaaccatcatatacccctggaccaccttctgctccaagagttgtggataccaccaaacacagcattagtttggcatggaccaaacccatgtacgatggtggtactgacattgtaggatatgttctggaaatgcaagagaaggacactgatcagtggtaccgagtgcataccaatgccacaataagaaatactgaattcactgtgccagaccttaaaatgggccagaaatattccttcagagttgctgccgtgaacgtgaagggtatgagcgaatacagcgaatcaattgctgaaattgagcccgtggaaagaatagaaataccagatcttgagcttgcagatgatctaaagaagactgtgaccatcagggctggggcctccttgcgcttgatggtgtctgtatctggaagaccacctcctgtcataacgtggagcaagcagggcattgaccttgcaagccgggcaattattgacaccactgagagctactcattgctaatagtggacaaagttaatcggtacgatgctggaaaatacacaattgaagctgaaaaccaatctggcaagaaatcagcaacagtccttgttaaagtctatgatactcctggtccctgtccttcagtgaaagttaaggaagtatcaagagattctgtgactataacttgggaaattcccacgattgatggtggagctccaatcaacaattacatcgttgagaagcgtgaagctgctatgagagcattcaaaacagtaactaccaaatgcagcaagacactttacagaatttctggacttgtagaaggaaccatgcactatttcagagtgctgccagaaaatatttatggcattggagaaccttgtgaaacatctgatgcagtactggtctcagaagtgcctttggtgcctgcaaagctagaagtggtcgatgtcaccaaatccactgttacccttgcctgggaaaaaccactctacgatggtggtagccgactcactggatatgttctcgannnnnnnnnnnnnnnnnnnnnnnnnnnnnnnnnnnntgtcaccttaaaacccacagtcctagagcacactgttacttccttaaatgaaggtgaacaatacttatttagaataagggcacaaaatgagaaaggtgtgtcagaaccaagagagactgtcacagccgtgactgtacaagacctcagagtgttgccaacaatcgatctttctacaatgcctcagaannnnnnnnnnnnnnnnnnnnnnnnnnnnnnnnnnnnngtgatacctattgctggccgtccacctcctgctgcttcctggttctttgctggttctaaactgagagaatcagagcgtgtcacagttgaaactcacactaaagtagctaaattaaccatccgtgaaaccactatcagagatactggagaatacacacttgaattgaagaatgttaccggaactactttagaaaccattaaagttatcattcttgacaagcctggtccaccaacaggacctattaagattgatgaaattgatgctacatcaattaccatttcctgggaaccacctgaattggacggtggtgctccactgagtggttatgtggtagaacaacgtgacgctcatcgtccaggatggctgcccgtttctgaatcagtgactaggtccacgtttaagtttaccagactcaccgaaggaaatgagtatgtgttccgtgtggctgcaacaaaccgcttcgggattggctcttacttgcagtctgaggtcatagagtgtcgcagcagcatccgtattcctggacccccagaaacattacagatatttgatgtttcccgtgatggcatgacacttacttggtacccaccagaggatgacggtggctcccaagtgactggatatattgtggagcgcaaagaagtgagagcagatcgatgggtccgtgtaaataaagtacctgtgacaatgacacggtaccgctccactggccttactgaaggcttagaatatgaacaccgtgtcacagccattaatgcaagagggtctgggaaaccaagtcgtccttccaaacccatcgttgccatggatccaattgctcctccaggaaagccacaaaacccaagagttactgatacaacaaggacatcagtctccctggcctggagtgttccagaagatgaaggaggatctaaagtcacaggctacttgattgaaatgcaaaaagtagatcaacatgaatggaccaagtgtaacaccactccaaccaagattcgagagtatactctaacacacctacctcagggtgcagaatacaggttccgcgtcctagcttgtaatgctggtggacctggtgagcctgctgaggtaccaggaacagtcaaagtcactgaaatgcttgaatatcctgattatgaacttgatgaaagataccaagaaggtatctttgtaaggcaaggtggcgtcatcagacttaccataccaatcaaagggaaaccattcccaatatgtaaatggaccaaggaaggccaggatattagtaagcgtgccatgattgcaacatctgaaacacacactgagcttgtgatcaaagaagcagacaggggtgattctggcacttatgacctggttctggaaaataaatgtggcaagaaggctgtctacatcaaggtcagggtgataggaagtcccaacagtccagaagggccactggaatatgatgacatccaagtccgctctgtgagggtcagctggagacctcctgctgatgatggtggtgctgacatcttaggctacatcctcgagagacgagaagtgcctaaagccgcctggtataccattgattccagagtccgaggtacatctctggtggtaaaaggcctcaaagagaatgtagaataccatttccgtgtttcagcagaaaagcagtttggcataagcaaacccttgaaatctgaggaaccagtcacaccaaaaacaccattgaatcctccagaacctccaagcaatcctccagaagtactcgatgtaaccaagagttctgttagcttgtcctggtcccggcccaaagatgatggtggttctagagtcacaggctactacatcgaacgcaaagagacatccactgacaaggtggtcagacacaacaagactcagatcaccaccacaatgtacactgtcacagggcttgttcccgatgctgagtatcagttccgcatcatcgcacagaatgatgttggcctgagtgagaccagccctgcttctgaaccagttgtttgcaaagatccatttgataaaccaagccaaccaggagaacttgagattctttcaatatccaaagatagtgtcactctacagtgggagaaacctgaatgtgatggtggtaaagaaattcttggatactgggttgaatatagacagtctggagacagtgcctggaagaagagcaataaggaacgtattaaggacaagcaattcacaataggaggtttgctggaagctactgagtatgaattcagggtttttgctgagaatgagactgggctgagcagacctcgcagaactgctatgtctataaagactaaactcacatctggagaggccccaggaatacgcaaagaaatgaaggatgttaccacaaaattgggtgaannnnnnnnnnnnnnnnnnnnnnnnnnnnnnnnnnnnnnnnnnnnnnnnnnnnnnnnnnnnnnnnnnnnnnnnnnnnnnnnnnnnnnnnnnnnnnnnnnnnnnncagatggacgcacacacactcttacagtaatgacagaggaacaggaagatgaaggtgtttatacctgcatagccaccaatgaggttggagaagtagaaaccagtagtaagcttctcctgcaagcaacaccgcagttccatcctggttacccactgaaagagaaatattatggagctgtgggttccacacttcggcttcatgttatgtacattggtcgtccagtacctgccatgacttggttccatggtcagaaacttttgcaaaactcagaaaacattactattgaaaacactgagcactatactcatcttgtcatgaagaatgtccaacgtaagactcatgctgggaaatacaaagtccagctcagcaatgtttttggaacagttgatgccatccttgatgtggaaatacaagataaaccagacaaacctacaggaccaattgtgatcgaagctctattgaagaactccgcagtgatcagctggaaaccacccgcagatgacggaggctcctggatcaccaactatgtggtggaaaaatgtgaggccaaggagggggctgaatggcaattggtgtcttcagccatctcagtgacaacctgtagaattgtgaacctcacagaaaatgctggctattacttccgggtttcagctcagaacactttcggcatcagtgaccctctagaagtgtcctcagttgtgatcattaagagtccatttgaaaagccaggtgctcctggcaaaccaactattactgctgtcacaaaagattcttgtgttgtggcctggaagccacctgccagtgatggaggtgcaaagattagaaattactaccttgagaagcgtgagaagaagcagaataaatggatttctgtgacaacagaagaaattcgagaaactgtcttttcagtgaaaaaccttattgaaggtcttgaatacgagtttcgtgtgaaatgtgaaaatctaggtggggaaagtgaatggagtgaaatatcagaacccatcactcccaaatctgatgtcccaattcaggcaccacactttaaagaggaactgagaaatctaaatgtcagatatcagagcaatgctaccttggtctgcaaagtgactggtcatccaaaacctatcgtcaaatggtacagacaaggcaaagaaatcattgcagatggattaaaatataggattcaagaatttaagggtggctaccaccagctcatcattgcaagtgtcacagatgatgatgccacagtttaccaagtcagagctaccaaccaagggggatctgtgtctggcactgcctccttggaagtggaagttccagctaagatacacttacctaaaactcttgaaggcatgggagcagttcatgctctccgaggtgaagtggtcagcatcaagattcctttcagtggcaaaccagatcctgtgatcacctggcagaaaggacaagatctcattgacaataatggccactaccaagttattgtcacaagatccttcacatcacttgttttccccaatggggtagagagaaaagatgctggtttctatgtggtctgtgctaaaaacagatttggaattgatcagaagacagttgaactggatgtggctgatgttcctgacccacccagaggagtcaaagttagtgatgcctcacgagattctgtcaacttaacatggactgagccagcctctgatggtggcagcaaaatcaccaactacattgttgaaaaatgtgcaactactgcagaaagatggctccgtgtaggacaggcccgagaaacacgttataccgtgatcaacttatttggaaaaacaagttaccagttccgggtaatagctgaaaataaatttggtctgagcaagccttcagagccttcagaaccaaccataaccaaagaagataagaccagagctatgaactatgatgaagaggtagatgaaaccagggaagtctccatgactaaagcatctcactcttcaaccaaggaactctatgagaaatannnnnnnnnnnnnnnnnnnnnnnnnnnngagtttggaattgtccatcgttgtgttgaaacatcctcaaagaagacatacatggccaaatttgttaaagtcaaagggactgatcaggttttggtaaagaaggaaatttccattctgaatattgctaggcatagaaacatcttacacctccatgaatcatttgaaagcatggaagaattagttatgatctttgagtttatatcaggacttgacatatttgagcgcattaacacaagtgcttttgaacttaatgaaagagaaattgtaagttatgttcaccaggtctgtgaagcacttcagtttttacacagtcataatattggacactttgacattagaccagaaaatatcatttaccaaaccagaagaagctctaccattaaaatcatagaatttggtcaagcccgtcagctgaaaccaggggacaacttcaggcttctattcactgccccagaatactatgcacctgaagtccaccagcatgatgttgtcagcacannnnnnnnnnnnnnnnnnnnnnnnnnnnnnnnnnnnnnnnnnnnnnnnnnnnnnnnnnnnntcctggctgaaactaaccaacagatcattgagaatatcatgaatgctgaatatactttcgatgaggaagcattcaaagagattagcattgaagccatggattttgttgaccggttgttagtgaaagagaggaaatctcgcatgacagcatcggaggctctccagcacccatggttgaagcagaagatagaaagagtcagtactaaagttatcagaacattaaaacaccggcgttattaccacaccctgatcaagaaagacctcaacatggttgtgtcagcagcccggatctcctgtggtggtgcaattcgatctcagaagggagtgagtgttgctaaagttaaagtggcatccattgaaattggcccagtttctgggcagataatgcatgcagttggtgaagaaggaggacatgtcaaatatgtatgcaaaattgaaaattatgatcagtctacccaagtgacttggtactttggtgtccgacagctggagaacagtgagaaatacgaaatcacctacgaagatggagtggccatcctctatgtcaaagacattaccaaattagatgatggtacctacagatgcaaagtagtcaatgactatggtgaagncagttcttatgcagagctatttgttaaaggtgtgagagaagtctatgactattactgccgtagaaccatgaagaaaattaagcgcagaacagacacaatgagactcctggaaaggccaccagaatttaccctgcctctctataataagacagcttatgtaggtgaaaatgtccggtttggagtaactataactgtccacccagagcctcatgtaacatggtataaatcaggtcagaaaatcaaaccaggtgacaatgacaagaagtacacatttgagtcagacaagggtctttaccaattaacaatcaacagtgtcactacagatgatgacgctgaatatactgttgtggcaaggaacaaatatggtgaagacagctgtaaagcaaagctgacagtaaccctacacccacctccaacagatagtaccttaagacccatgttcaaaaggttactggcaaatgcagaatgccaagaaggccaaagtgtctgctttgagatcagagtgtctggcatccccccaccaacattaaaatgggagaaagatggtcagccactgtccctcgggcctaacattgaaattatccatgaaggcttggattattatgctctgcacatcagggacactttgcctgaagacacgggttattatagagtcacagccactaacacagctgggtccaccagctgccaggctcacctacaagtggaacgcctgaggtacaagaaacaggaattcaagagtaaggaggagcatgagcgacacgtacaaaaacaaattgacaaaaccctcagaatggctgaaattctttctggaactgaaagtgtaccactgacacaggtagctaaagaggctctgagagaagctgctgtcctttataaaccggctgtaagcaccaagactgtaaaaggggaattcagacttgagatagaagaaaagaaggaggagagaaaactccggatgccttatgatgtaccagagccacgcaagtataagcagactaccatagaagaagaccaacgcatcaagcagttcgtgcccatgtctgacatgaagtggtataaaaagatacgtgatcagtatgaaatgcctgggaaacttgacagagttgtacagaaacgacccaagcgcatccgcctttcaagatgggaacagttctatgtgatgcctcttccacgcattacagatcaatacagacctaaatggcgtattcctaaactgtcccaagatgatcttgagatagtgagaccagcccgccggcgtacaccttctcctgattatgacttttactaccgacctagaagacgttctcttggggacatctctgatgaagaattactcctccccattgatgactacttagcaatgaaaagaacagaggaagagaggctgcgtcttgaagaagagcttgagttaggtttttcagcttcacccccaagtcgaagccctccacactttgagctttctagcctacgttactcttcaccacaagctcatgtcaaggtggaggaaacaagaaaaaacttcaggtattcaacctatcacatcccaacgaaggctgaagctagtacaagttatgcagaactgagggaacggcatgcccaggctgcgtacagacagccaaagcaatggcaaagaatcatggctgagagggaggatgaagagttgcttcgcccagttacgaccacccagcatctctcagaatacaaaagcgaacttgacttcatgtcaaaggaggaaaagtctagaaagaaatcaaggcgacaaagagaagtgacagaaataacagaaattgaggaagaatacgaaatctcaaaacatgctcaaagagaatcatcctcatctgcgtctagactactgagacgacggcgctccctgtctccaacttatattgagttaatgaggccagtgtctgagctgatccggtcacgtccacaaccggctgaggaatacgaagatgacacagaaagaaggtcacctactccagagagaactcgcccacgatcccccagccctgtgtctagtgagagatcactctcgagatttgagaggtctgcaagatttgatatcttttccaggtatgagtccatgaaagctgctttaaaaactcagaagacatcagaaaggaagtatgaagttttgagtcagcagcctttcacactggaccatgcccctcgaatcacactgagaatgcgctcgcacagggtaccatgtggccaaaatacacgttttattttaaatgttcagtctaagccaactgccgaggttaaatggtaccacaatggtgtggaactccaagaaagcagtaagattcattacaccaacacgagtggagttctcaccctggaaattctggactgtcatactgatgacagtggaacctaccgtgctgtgtgcaccaactacaagggcgaaggttctgactatgcaacgttggacgtgacaggaggggattataccacctatgcttcccaacgcagagatgaagaggtccccagatctgttttccctgagctgacaagaacagaggcgtatgctgtttcatcatttaagaaaacatctgagatggaagcttcgtcttctgtcagggaagtgaaatcacagatgacggagacaagggaaagtctctcctcatatgaacactctgcatctgcagaaatgaaaagtgctgcattagaagaaaagtcactggaagaaaaatccacaaccagaaagatcaagacgactttggcggcaagaattctaacaaagccacggtccatgaccgtctacgagggcgagtctgcaaggttttcttgtgacaccgatggtgagccggtaccaactgtgacctggctgcgtaaaggacgagtgctaagtacttctgcccgccaccaagtgaccaccacaaagtacaaatcaacctttgagatctcttcagtccaggcttccgatgagggcaattacagcgtggtggtagaaaacagtgaagggaaacaagaagcagagttcactctgactattcaaaaggccagggtaactgaaaaggctgtgacatcaccaccaagagtcaaatccccagagcctcgggtgaaatccccagaagcagttaagtctccaaaacgagtgaaatctccagaaccttctcacccgaaagccgtatcacccacagagacaaaaccaacaccaatagagaaagttcagcacctcccagtctctgccccaccaaagattactcagttcctgaaagcagaagcttctaaagagattgcaaaactgacctgtgtggttgaaagcagtgtattaagggcaaaagaggtcacctggtataaagatggcaagaaactgaaggaaaatgggcatttccagtttcattattcagcagatggtacctatgagctcaaaatcaataacctcactgaatctgatcaaggagaatatgtttgtgagatttctggtgaaggtggaacgtctaaaaccaacttacaatttatggggcaagcctttaagagtatccatgagaaggtatcaaaaatatcagaaactaagaaatcagatcagaaaaccactgagtcaacagtaaccagaaaaactgaaccaaaagctcctgaaccaatttcctcaaaaccagtaattgttactgggttgcaggatacaactgtttcttcagacagtgttgctaaatttgcagttaaggctactggagaaccccggccaactgccatctggacaaaagatggaaaggccattacacaaggaggtaaatataaactctctgaagacaagggagggttcttcttagaaattcataagactgatacttctgacagtggactttatacttgtacagtaaaaaattcagctggatctgtgtcctctagctgcaaattaacaataaaagctataaaagatactgaggcacagaaagtctctacacaaaagacttctgaaattacacctcagaagaaagctgttgtccaagaggaaatttcccaaaaagccctaaggtctgaagaaattaagatgtcagaggcaaaatctcaagaaaagttagccctcaaagaggaagcttcaaaggttctgatttctgaagaagtcaagaaatcagcagcaacctccctggaaaaatccattgtccatgaggaaatcactaaaacatcacaggcatcagaagaagtcagaactcatgctgagattaaagcattttctactcagatgagcataaacgaaggtcaaagactggttttaaaagccaacattgctggtgccactgatgtgaaatgggtactgaatggcgtagagcttaccaactctgaggagtaccgatatggtgtctcaggcagcgatcagaccctaaccatcaagcaagccagtcacagagatgaaggaatcctcacctgcataagcaaaaccaaggaaggaatcgtcaagtgtcagtatgatttgacactgagcaaagaactctcagatgctccagccttcatctcacagcctagatctcaaaatattaatgaaggacaaaatgttctctttacttgtgaaatcagtggcgagccatcccnnnnnnnnnnnnnnnnnnaaaaacaacctgccaatttctatttcttcaaatgtcagcataagccgctccagaaatgtatactcccttgaaatccgaaatgcatcagtcagcgacagtggaaagtacacaattaaggccaaaaatttccgtggccagtgttcagctacagcttccttaatggtccttcctctagttgaagaaccttccagagaggtagtattgagaacaagtggtgacacaagcttgcaaggaagcttctcgtctcagtcagtccaaatgtctgcctccaagcaggaggcctccttcagcagtttcagcagcagcagtgctagcagcatgactgagatgaaatttgcaagcatgtctgcccaaagcatgtcctccatgcaagagtcctttgtagaaatgagttccagcagctttatgggaatatctaatatgacacaactggaaagctcaactagtaaaatgcttaaagcaggcataagaggaattccgcctaaaattgaagctcttccatctgatatcagcattgatgaaggcaaagttctaacagtagcctgtgctttcacgggtgagcctaccccagaagtaacatggtcctgtggtggaagaaaaatccacagtcaagaacaggggaggttccacattgaaaacacagatgacctgacaaccctgatcatcatggacgtacagaaacaagatggtggactttataccctgagtttagggaatgaatttggatctgactctgccactgtgaatatacatattcgatccatttaagagggcctgtgcccttatactctacactcattcttaacttttcgcaaacgtttcacacggactaatctttctgaactgtaaatatttaaagaaaaaaaagtagttttgtatcaacctaaatgagtcaaagttcaaaaatattcatttcaatcttttcataattgttgacctaagaatataatacatttgctagtgacatgtacatactgtatatagccggattaacggttataaagttttgtaccatttattttatgacattttacaatgtaagttttgaaactaactgttggtaggagaaagtttcttatggaacgaataccctgctcaacatttaatcaatctttgtgcctcaacatactgttgatgtctaagtatgcctcagtgggttgagaaaatccccattgaagatgtcctgtccacctaaaagagaatgatgctgtgcatatcacttgatatgtgcaccaatacctactgaatcagaaatgtaaggcattggtgatgtttgcatttaccctcctgtaagcaacactttaacgtcttacattttctctgatgatgtcacacaaaattatcatgacaaatattaccagagcaaagtgtaacggccaacactttgttcgctcattttacgctgtctctgacataaggagtgcctgaatagcttggaaaagtaacatctcctggccatcccttcatttaaccaagctattcaagtattcctatgccagagcagtgccaactcttggaggtcccagagtgcagccaatgcctttgtgtggtagttctaaattttaattgcacctgaaaaacctgggcacctaagcaatgagccacagcaaaaagtaaagaacaacaacaaaataaagctgttgttaaattttaaacaatattactaattgcccaaaatgtcaatttgatgtagttcttttcatgcaagtataaattcaattgttagttataattgttggacctccttgagatagtaacaacaaaataaagcaagctatctgcacctcaaaaaaaaaaaaaaaaaaaaaaaaaaaaaaaaaaaaaaaaaaaaaaaaaaaaaaaaaaaaaaaaaaaaaaaaaaaaaaaaaaaaaaaaaaaaaaaaaaaaaaaaaaaaaaaaagaaaaaaaaaaaagaaagaaaagagagagagaagaggagagagaagagagagaagaaggaagaaaaagagacagcaggcaaaaagcgagcgccccggcgggcgcacaggagaacataaaaataacttaccacctacctatcacaaaaatcaacaaaacaaataagaaaactcaaacttcaaaatataacacaaaacaaaaacaataaataaaaataaaaaaaaaaatacactaatacatataagagaagactgataggcgagaggagaacacgacaacacagacgaggcgaagagctaaaaaaaaaagagagaggagtaagagaaaacaaaagaaacagagcacagcaaagaaagaaaagaatgaaagaaaagaagaagagggagagcggaacgcacaggacgagagcagcgagcagaaggaaccgcgcaacagacgagagagaggcaaggaacacgaagagagaagaaaagaaagaaagaaaaagcaagaaggagggacgaaacaagagggagagagggagcagcacagacaccagaaagaacactaaagacggagagagaaagagaggatgaggaagcaggagagaagaaagcaggggagaaaaacaagaaggaagagaaagagacaaggggagaaaagaaaaaggaaagagggaggcaac

SEQ ID NO: 6483 - DNA, 1043 bp, Homo sapiens
  misc_feature (11)..(11): n is a, c, g, or t
  misc_feature (13)..(13): n is a, c, g, or t
  misc_feature (35)..(35): n is a, c, g, or t
tatgtgctggncnccccctttttaaaaaaccggcnccccccggttggggggggggaaaatttcaaaaacatacattttttttttacaaaaaatataaaaagcggtgccggctatccgatccgccccggggcaaaatttaaaatctcaaagcttaactttttgtgatgtggctaaaagttagctacaaagggcgtggatcaaaaaacctctccccatgtaagctttaatttaaaaaaaaagttttttagtgaacggatataaataggcctgcgaggtagaaatttagcctttcaaagcaccgttcaaatttatggtatcatgtaaaaatttagcccatttaggcccctaatcattgagccttatttttcccaccatgggaattttttcttaaatgggaaaaaatgtggaaattagatccgggtatggtattttgtgggatctcaggtaaaatgactttttgtgtcttgggaatttaaaatgcgctaacagtgtgcgcaaaaatgagttcatgccatttaacatattgtattttaattattaactgtattaatttactatgaaatggacatccttttaactaaaatggaattgaacattgcagttttcaaatatttttccttgttgggtctggaaaaggaattctactttgatctgcatagaaaattttgataccaattttttgaaagttccttaggtgaaacatttacccattaaaaaggaagcagaaatactgagacatgaaaggcattatcaactaactctagactctagaaccccattctagcatatctcacgtgcaatttttaaaaataagttaataattcatctcatatcaacaaaagcctttgaaacatgggttttcactagatatcacctagtgctaagataaaaaccaaaacaatatcagaattacatttatgctctaaatttgtagttgtccattgttgtgcttagtaaatgtgtgtcattaatgctgtattctcctagctattatggaaacttgtttaaataaagatatggatataaaaaaaaaaaaaaaaaaa

SEQ ID NO: 6484 - DNA, 6099 bp, Homo sapiens
  misc_feature (1089)..(1104): n is a, c, g, or t
  misc_feature (2717)..(2731): n is a, c, g, or t
  misc_feature (2733)..(2808): n is a, c, g, or t
ggtgtggacgttgtctaaatttcggtagccatggcacaagaatataagaaagcatgggattatggcaaccacagaatctcagtagtacaagttccattcagttttttctgaaagaaagccctctgttaaagtgaagcaaagaaactgttgtggattataacgtttagaagttccaatttttcagtgctttacaaataaagcatcatttaaccttttaaatgaaaaagattaagatctcatgcaactgttgtattttctggaagccattctccaaaagggaagtgcacatttaaaacacagatatgatggtccttgctgcagggatttaagtctacttgcttttacatcatgaccagcttgaaacggtcacagacagaaaggcctcttgccactgacagggcctctgttgttggcacagacggcacccccaaagtccacactgatgatttctacatgcggcgcttccggtcccaaaatggcagcttaggatcatcagttatggctcctgtaggacccccccgaagtgaaggttctcaccatataacctcaacccccggagtcccaaaaatgggggtaagggcaaggattgcagattggcccccaagaaaggaaaacataaaagaatctagccgttcaagccaggaaatagaaacctcaagttgccttgatagcctgtcctccaaaagcagtcctgtgagtcagggaagttctgttagcctcaattccaatgactcagccatgctgaaaagcatacagaacacgctgaaaaacaagacaagaccgtcggagaacatggactccagatttctcatgcctgaagcctaccccagctcccccagaaaagctcttcgcagaatacgccagcgaagcaacagtgatatcaccataagtgaacttgatgtggatagctttgatgaatgtatctcacctacatacaagactggaccatcactgcacagggaatatggtagcacatcttcaattgataaacagggaacatctggagaaagcttttttgatttgttaaagggctacaaagatgacaaatctgatcgaggtccaactccaaccaagctcagtgactttctnnnnnnnnnnnnnnnnaagggttctggtttctctttggatgtaatagacgggcctatctcacagagagagaacctcaggctttttaaggaaagggaaaaaccactcaagcgacgttcaaaatctgaaactggagactcctctatttttcgtaaattgcgcaatgccaaaggtgaagaacttgggaagtcatcagatcttgaagataaccgatcagaagactctgtcaggccctggacatgtccaaagtgctttgcccactatgatgtccagagtatattatttgatttgaatgaggcaattatgaacaggcacaatgttattaagaggagaaacaccaccactggagcttccgcagctgccgtggcatccttggtctctggacctctgtctcattcagccagttttagctccccaatgggcagcacagaggacctgaattccaaaggaagcctcagcatggaccagggagatgataaaagcaatgagcttgtaatgagctgtccatattttcggaatgagataggtggagaaggggagaggaaaatcagcctttcaaaatcaaattctggctcctttagtggatgtgaaagtgcctcctttgagtctacccttagttcccattgcacaaatgcaggagtggcagtacttgaagtgcccaaggagaacttggtgttgcacctagatagagtgaaaagatacatcgtggaacacgtagatctgggtgcatactattatagaaaatttttctaccagaaggaacactggaactattttggggctgatgagaatcttggtccagtggctgtgagcattcgaagggaaaaaccagatgaaatgaaagaaaatggatctccgtacaactaccgaataatttttagaactagtgagctcatgacactgagaggttcggtcctggaggacgccattccgtcgacagccaagcactcgacagccagaggcctgcctctcaaagaagtgctggagcacgtggttcctgagctcaatgtccagtgcctgcggttggccttcaacacacccaaggtcacagagcagctcatgaaactggatgaacaagggctgaactaccagcagaaagtaggcatcatgtactgcaaagctggacagagcactgaagaagagatgtacaacaatgagtcagctggcccagcctttgaagaattccttcaactattgggagagcgagttcggctcaaaggatttgagaagtatcgagcacagcttgataccaaaactgactccactggaacccattctctgtacacaacatacaaagattatgaaattatgttccatgtttctaccatgctgccatacacacccaacaacaaacaacagctcctgaggaagcggcacattggaaatgatatcgtaacaattgttttccaagagcctggagcacagccattcagcccaaaaaacatccgatcccacttccagcacgttttcgtcatcgtcagggtgcacaatccgtgctctgacagtgtctgttatagtgtggctgttaccaggtccagagatgtgccttcctttgggcctcccattcctaaaggggtcactttccctaagtcaaatgtgttcagggacttccttttggcgaaagtgattannnnnnnnnnnnnnncnnnnnnnnnnnnnnnnnnnnnnnnnnnnnnnnnnnnnnnnnnnnnnnnnnnnnnnnnnnnnnnnnnnnnnnnnnnnggcagaaaagaatgtcaccaacacccctatcgacccttctggcaagtttccgttcatctctctggcttccaagaagaaggaaaagtctaagccatatccaggagccgagctcagcagcatgggggccattgtatgggcagtccgggctgaagactacaacaaggccatggaactagactgccttttagggatctccaatgagttcattgtgctcattgaacaggaaacaaagagcgtggtcttcaattgttcctgtagagatgtgatagggtggacttcaactgacaccagcctcaaaatcttctatgaacgaggagaatgtgtttcagtgggtagttttattaacattgaggagatcaaagagattgtcaaaaggttgcagtttgtttcaaaaggctgtgaatcggtggagatgactctgcgaagaaatgggctaggacagcttggcttccatgtcaactatgagggcattgtggcggatgtggagccctacggttatgcctggcaggcagggctgaggcagggcagtcgcctggtggagatctgcaaggtggcggtagccactctgagccatgagcagatgatcgacctcctgagaacatctgtcacggtgaaggttgtcatcattcccccgcatgatgactgcaccccgcggaggagttgctctgaaacctaccgcatgccagtgatggagtacaaaatgaatgaaggtgtttcatacgaattcaagtttcccttccgaaataataacaagtggcagaggaacgccagcaaggggcctcattcacctcaagtcccgtcccaggtgcagagtcccatgacctcgcggctgaatgctggaaaaggagatgggaagatgcctcctccagaaagagccgccaacatccctcgaagcatctccagtgacgggcgcccactagagaggcggctgtctcctggttcggacatctatgtgacggtctcatccatggctttagcaagatcccagtgtcggaactctcctagcaacttgtcttcatccagtgatactggttctgtggggggcacttacaggcagaagtccatgcccgaagggtttggagtgagccgtagatccccagcctccattgacaggcagaacacccagtcagatattggtggcagcggaaaatccacgcctagctggcaaagaagtgaggatagcattgctgaccagatggcttacagttatagaggacctcaggatttcaattcttttgtcctcgagcagcatgaatatacagagccaacatgccatctcccagcagtatcaaaggtactgccagctttccgagagagccccagtgggagattaatgcggcaggatccagtggttcatttgtctccaaacaaacaagggcattctgatagccactactcgagccactccagtagcaatactctctccagcaatgcgtcaagtgcccatagtgatgagaagtggtacgatggggaccgcacagaatccgaactcaacagctataactatctgcaaggcacctctgctgacagtggcattgacaccacctcttatggccccagccacggcagcacagcctcgctgggggctgccacatcgtcacctcgctcagggccaggcaaggagaaagtggcacccctatggcacagctccagtgaagtaatctccatggcagatcggactttggagacagagagccacggcctggaccggaaaacagagtcttccctgagcttagacatacacagcaagagccaagccggctcgacccctctgacaagggagaacagcaccttcagtataaacgatgctgcttcccacacatgtgttcatgagcgcccgacaatgtgattagcccaggggttttcaccattgatcggagttcacctaaagaagagcttcatccagctgccccctcacagctcgcaccatccttctcctcctcttcctcctcctcctctggtcctaggagtttttaccctcgccagggcgctactagcaagtacctgattggatggaaaaaacccgaaggaaccataaactccgtgggatttatggacacgagaaagcgtcatcagagcgatggcaatgaaatagcccacaccaggctgcgtgcctcaaccagagacctccgggcatctcctaagccaacctccaagtccaccattgaagaagatctaaagaaactaattgatcttgaaagcccaactcctgaatcacagaagagttttaagttccaggcactctcctctcctcagtctcctttccccagcacccccacctcacggcgggccttgcacagaacactgtcggacgagagcatttacaatagccagagggagcactttttcacctccagggcgtcacttctggaccaagccctgcccaacgacgtcctcttcagtagcacgtacccttctctccccaagtcgctcccgttgaggaggccttcttacaccttaggaatgaaatcgctgcatggagagttctcagcctcggacagctccctcactgacatccaggagacccgcaggcagcctatgcccgaccctggcctgatgcccctgcctgacactgctgcagacttggattggtccaacctggtagatgctgccaaagcctatgaggtccagagagcctcattttttgctgctagtgatgaaaaccatcgccccttgagtgctgcatccaacagtgatcagctggaggaccaggctctggcccagatgaagccttacagcagcagtaaagactcctctcccactctggcttctaaagtggaccagctggaaggtatgctgaagatgcttcgggaagatttgaagaaggaaaaagaagacaaagctcaccttcaggcggaggtgcagcacctgcgagaggacaacctgaggctacaggaggagtcccagaacgcctcggacaagctgaagaagttcacagaatgggtcttcaacaccatagacatgagctagggaaggctgaggaggacaggagaagggcccagacactccctccagtgagtgtcctgcagcccttattccctccatagaaagcatcctcagagcaccttccctggcttcctactctgccccctttcggggagtgcacaacacaatagttgcagatcaacaatcatcacctgccttttgtagaaaagaaaaacaaaaaaagtaaataaaaattttaaacagtaaaataaaagtttaactgctaaaaaaaaaaaaaaaaaaaaaaaaagcacaatatctatctgttatgtatttaaggaagaaactgggccttggaccagggcg

SEQ ID NO: 6485 - DNA, 2480 bp, Homo sapiens
  misc_feature (434)..(449): n is a, c, g, or t
gagctgccaccgctcctgccactgcagtgctcgagccccgtgcaggggagcttgcgggaggatcgaccgacagacggacgcacgccgaggcactgcgcccccagccccgcgccggtgccaccgcagcccgaccccggccgccagtccagccgcccctcgcccggtgcctaggtgcccggccccacaccgccagctgctcggcgcccgggtccgccatgcgctccgccgctgtcctggctcttctgctctgcgccgggcaagtcactgcgctccctgtgaacagccctatgaataaaggggataccgaggtgatgaaatgcatcgttgaggtcatctccgacacactttccaagcccagccccatgcctgtcagccaggaatgttttgagacactccgaggagatgaacggatcctttccattctgagacatcannnnnnnnnnnnnnnnggcacgagggacctcgctctccaaggcgccaaggagagggcacatcagcagaagaaacacagcggttttgaagatgaactctcagaggttcttgagaaccagagcagccaggccgagctgaaagaggcggtggaagagccatcatccaaggatgttatggagaaaagagaggattccaaggaggcagagaaaagtggtgaagccacagacggagccaggccccaggccctcccggagcccatgcaggagtccaaggctgaggggaacaatcaggcccctggggaggaagaggaggaggaggaggaggccaccaacacccaccctccagccagcctccccagccagaaatacccaggcccacaggccgagggggacagtgagggcctctctcagggtctggtggacagagagaagggcctgagtgcagagccagggtggcaggcaaagagagaagaggaggaggaggaggaggaggaggctgaggctggagaggaggctgtccccgaggaagaaggccccactgtagtgctgaacccccacccgagccttggctacaaggagatccggaaaggcgagagtcggtcggaggctctggctgtggatggagctgggaagcctggggctgaggaggctcaggaccccgaagggaagggagaacaggagcactcccagcagaaagaggaggaggaggagatggcagtggtcccgcaaggcctcttccggggtgggaagagcggagagctggagcaggaggaggagcggctctccaaggagtgggaggactccaaacgctggagcaagatggaccagctggccaaggagctgacggctgagaagcggctggaggggcaggaggaggaggaggacaaccgggacagttccatgaagctctccttccgggcccgggcctacggcttcaggggccctgggccgcagctgcgacgaggctggaggccatcctcccgggaggacagccttgaggcgggcctgcccctccaggtccgaggctaccccgaggagaagaaagaggaggagggcagcgcaaaccgcagaccagaggaccaggagctggagagcctgtcggccattgaggcagagctggagaaagtggcccaccagctgcaggcactacggcggggctgagacaccggctggcagggctggccccagggcaccctgtggccctggctctgctgtccccttggcaggtcctggccagatggcccggacgctgcttccggtagggaggcagcctccagcctgcccaagcccaggccaccctatcgccccctacgcgccttgtctcctactcctgactcctacctgccctggaacatcctttgcagggcagccccacaactttaaacattgacgattccttctctgaacacaggcagctttctagaagtttcccttcctccatcctatccactgggcacaactgcaataacttctgaccttttggtgaaagctgagaactcctgactgtaacatattctgtatgaactttatctaaagaaaaataaatctgttctgggctctttaaaaaaaaaaaaaaaaaaaaaaaaaaaaaaaaaaaaaaaaaaaaaaaaaaggggctttttttggggggggcgcggaaacacggcggttttgcaaatgggggccatgggcaaagttgtttccttggccccattttttttttccaaggggggaaactcgcggggccaccccataggggggggcggtaaaaattggaagacgcgccgggttcccctttttgtatcttcgcccgtccataccgggtgtcactgcacctgacagcaaaacgaggtgcaacacaatttagaaaccaatgcgtcaggagagaaattgaccgacggcacataactgattgtcccgaagcgagtagcatcgaccaacactccgacacagcgtagtcatcgtgcacagcagactaatcgcagtaacagaacagtaagtcagcacagactatcgcgcagatctcgccacgtctgactcgtcaatcgctcaacgaccaagtgcaaggcc

SEQ ID NO: 6486 - DNA, 6346 bp, Homo sapiens
  misc_feature (291)..(308): n is a, c, g, or t
gctgggcggggccgggaagcggcagtggcggctacgcgcgcgggggtgcgcgcgggaacgaccgggaaacaccgcgagggccggggtgggccaggctgtggggacgacgggctgcgacgatggccgcagcggcgggcggcggcgggccggggacagcggtaggcgccacgggctcggggattgcggcggcagccgcaggcctagctgtttatcgacggaaggatgggggcccggccaccaagttttgggagagcccggagacggtgtcccagctggattcggtgcgggtcnnnnnnnnnnnnnnnnnnaagaagtatgttcatgcggatgctcctaccaataaaacactggctgggctggtggtgcagcttcttcagttccaggaagatgcctttgggaagcatgtcaccaacccggccttcaccaaactccctgcaaagtgtttcatggatttcaaagctggaggcgccttatgtcacattcttggggctgcttacaagtataaaaatgaacagggatggcggaggtttgacctacagaacccatctcgaatggatcgtaatgtggaaatgtttatgaacattgaaaaaacattggtgcagaacaattgtttgaccagacccaacatctacctcattccagacattgatctgaagttggctaacaaattgaaagatatcatcaaacgacatcagggaacatttacggatgagaagtcaaaagcttcccaccacatttacccatattcttcctcacaagacgatgaagaatggttgagaccggtgatgagaaaagagaagcaagtgttagtgcattggggcttttacccagacagctatgatacttgggtccatagtaatgatgttgatgctgaaattgaagatccaccaattccagaaaaaccatggaaggttcatgtgaaatggattttggacactgatattttcaatgaatggatgaatgaggaggattatgaggtggatgaaaataggaagcctgtgagttttcgtcagcggatttcaaccaagaatgaagagccagtcagaagtccagaaagaagagatagaaaagcatcagctaatgctcgaaagaggaaacattcgccttcgcctccccctccgacaccaacagaatcacggaagaagagtgggaagaaaggccaagctagcctttatgggaagcgcagaagtcagaaagaggaagatgagcaagaagatctaaccaaggatatggaagacccaacacctgtacccaatatagaagaagtagtacttcccaaaaatgtgaacctaaagaaagatagtgaaaatacacctgttaaaggaggaactgtagcggatctagatgagcaggatgaagaaacagtcacagcaggaggaaaggaagatgaagatcctgccaaaggtgatcagagtcgatcagttgaccttggggaagataatgtgacagagcagaccaatcacattattattcctagttatgcatcatggtttgattataactgtattcatgtgattgaacggcgtgctcttcctgagttcttcaatggaaaaaacaaatccaagactccagaaatatacttggcatatcgaaattttatgattgacacgtatcgtctaaacccccaagagtatttaactagcactgcttgtcggaggaacttgactggagatgtgtgtgctgtgatgagggtccatgcctttttagagcagtggggactcgttaattaccaagttgacccggaaagtagacccatggcaatgggacctcctcctactcctcattttaatgtattagctgataccccctctgggcttgtgcctctgcatcttcgatcacctcaggttcctgctgctcaacagatgctaaattttcctgagaaaaacaaggaaaaaccagttgatttgcagaactttggtctccgtactgacatttactccaagaaaacattagcaaagagtaaaggtgctagtgctggaagagaatggactgaacaggagacccttctactcctggaggccctggagatgtacaaggatgattggaacaaagtgtcggaacatgttggaagtcgtactcaggatgaatgcatcctccactttttgagacttcccattgaggacccataccttgagaattcagatgcttcccttgggcctttggcctaccagcctgtccccttcagtcagtcaggaaatccagttatgagtactgttgcttttttggcatctgtggtggaccctcgcgtggcatctgctgcagcaaaagcggctttggaggagttttctcgggtccgggaggaggtaccactggaattggttgaagctcatgtcaagaaagtacaagaagcagcacgagcctctgggaaagtggatcccacctacggtctggagagcagctgcattgcaggcacagggcccgatgagccagagaagcttgaaggagctgaagaggaaaaaatggaagccgaccctgatggtcagcagcctgaaaaggcagaaaataaagtggaaaatgaaacggatgaaggtgataaagcacaagatggagaaaatgaaaaaaaaaaaaaaaaggaacaggatagtgaagtgagtgaggataccaaatcagaagaaaaggagactgaagagaacaaagaactcactgatacatgtaaagaaagagaaagtgatactgggaagaagaaagtagaacatgaaatttccgaaggaaatgttgccacagccgcagcagctgctcttgcctcagcggctaccaaagccaagcacctggctgcagtggaagaaagaaagatcaagtccctggtagctctcttggttgagacacaaatgaagaaactagagatcaaacttcgacattttgaagagctggaaactatcatggacagagagaaagaagctctagaacaacagaggcagcagttgcttactgaacgccaaaacttccacatggaacagctgaagtatgctgaattacgagcacgacagcaaatggaacagcagcagcatggccagaaccctcaacaggcacaccagcactcaggaggacctggcctggccccacttggagcagcagggcaccctggcatgatgcctcatcaacagccccctccctaccctctgatgcaccaccagatgccaccacctcatccaccccagccaggtcagataccaggcccaggttccatgatgcccgggcagcacatgccaggccgcatgattcccactgttgcagccaacatccacccctctgggagtggccctacccctcctggcatgccaccaatgccaggaaacatcttaggaccccgggtacccctgacagcacctaacggcatgtatccccctccaccacagcagcagccaccgccaccaccacctgcagatggggtccctccgcctcctgctcctggcccgccagcctcagctgctccttagcctggaagatgcagggaacctccacgcccaccaccatgagctggagtggggatgacaagacttgtgttcctcaactttcttgggtttctttcaggatttttcttctcacagctccaagcacgtgtcccgtgcctccccactcctcttaccacccctctctctgacactttttgtgttgggtcctcagccaacactcaaggggaaacctgtagtgacagtgtgccctggtcatccttaaaataacctgcatctcccctgtcctggtgtgggagtaagctgacagtttctctgcaggtcctgtcaactttagcatgctatgtctttaccatttttgctctcttgcagttttttgctttgtcttatgcttctatggataatgctatataatcattatctttttatctttctgttattattgttttaaaggagagcatcctaagttaataggaaccaaaaaataatgatgggcagaagggggggaatagccacaggggacaaaccttaaggcattataagtgaccttatttctgcttttctgagctaagaatggtgctgatggtaaagtttgagacttttgccacacacaaatttgtgaaaattaaacgagatgtggaaggagaacctcagtgattttattccctagtgaggcctctgagggcctccacactgcctggcagaacataccactgaactagtatgtgctagaggagggcacaaacatccgctccttccctaggcctgctggctctggttttctatgcagatgattcattggattgggggtgagtgttttgtttttctgggggcagtgtgagctttgagggttggaatattgggaggcattccttagtttcctcaactagcctggaaagttaggagtctagggtaattaccccccaatgagtctagcctactattcactgctttgtgtgcatttttttctccctctttaaaaaaccctttaaaagaaaaaaaaaagtagatagtgctaaatattttagctcatgaaacttggttaggatggctgggggtacaagtccccaaactacctcttgttacagtagccagggagtggaatttcgtcaaccggtacttttaaggttaggatgggacgggaaaagtgaagcaggatattagctccttataccttctcccttccatttctgagatctcacattccatctatcacagggttttcaaagagatgctgagggtaacaaggaactcacttggcagtcagagcatcatgctttgaggtttggggtgctcaggctgggagggtagaatgccattccagaggacaagccacaaaaatgccttaatttgagctcgtatttacccctgctgataagtgacttgagagttcccggttttttcctcttgtccttccctcccttctgtccttccatgtgtggggaaagggtgtttttggtagagcttggtttccaaagcgcctggctttctcacttcacattctcaagtggcagtttcattatttagaatgcaaggtggacatcttttggatatctttttctatatattttctaaagctttacatatgagagggtatagggaggtgtttataaaacacttgagaacttttttccttaatatcagaaagcaaaaaaataaaaccacaattgagatttgcctttcaaaccctcaggtttgcctctaaccaggtttccctgccaccatcagagtactggaatacgggaaccgaggagaccttggtccttttgtttttgttctggactcttgggagtggaaatgagaatgagtttattcctactggagcttagttccaatgcatttggctccagaaagaccccagtgccttttgacaatggccagggttttacctacttcctgccagtctttcccaaaggaaactcattccaaatacttcttttttcccctggagtccgagaaggaaaatggaattctggttcatactgtggtcccttgtaacctcaggtctttaatgtgatcactttcaaatttaaaagatccaggtggaaatatttttactatagtaataattctacaaaatacctgaattcttaacactgttatatttcagtataagtggtggctttttcttttcatgtctttgatctggttttattcctgtaattcagccacctgattttgtgaggggggggaataatatgtggtttttgtacaaacatgtttctcagtgtgttgttattttggaaaaaatgaggggagggagtttggcaagaatggagaaaatgaatgaagaaggcctaatctctctctttttcagtgaataaatggaacaccatttctggaaaaaaaaaaaaaaaaaaaaaaaaaacaactaaaaacaagaaagaagcaaagaaaaataaagaaaaccacaaaaataaagaaaaagaaagataaagacaacagaaaaaaaaaactaatgataataacccacagaatcaggaggggggggcggcactaaaatttatataaactgcaggaggaatttagttgactcacacatcttatagttgtaaaagaggagtcaactatttattgaatttgatttaatatcaaggaggtgcgtcggcgtcttaaaaacaatgaaggaatcagagaaacaagcgcaggtcataacattgatggaagcaaccccaatgtgggggggggagaaaaagagaaaacaaccaagaaagaaagagccgaggaaaaaaaaaaatgtgaggtgttggaaatcacaacccatcatcatcgcggaaagaggttaggtcgtattttaaaataacgcaggcccagatcaaaagagaggacgatagcgaagaagcagaggatagagaccgacgcgcaatacaatcgtccgacgaccgtggaacaagcacggacggacaacaaccaacgacgagccaatcggtgagaaa

SEQ ID NO: 6487 - DNA, 632 bp, Homo sapiens
ttttttttttttttttttttttgacgttttaaaaaacttttaatgttgagttgacaggaaacaaaagctgaaaatgctaaatactagaaaatgaccatgatacaaactccccatgaaagaacttgagagcttgtagtacacagatgaaaagttagaacctcgcctgtttacaacattaagcaagaaagaatgaaaataaatggaatgaacattcaactcgagaagtcatcctgtgtggggagagtgggtatcacatgaaactccagaaaagcaggtggaggaaattaatgcattgaaaattgagaaatgatttgccaaataatttaaacattatctgagaaaactaaagtagacgaagataacaaactaaaataatgacagcacaaaacaagaagaatgcgagcttctccatacacttggaggatgcggaagaattataaacaactactttgttctaatctgcactgtgatatttgaaaacttaagtaaatacgaatgactttccaatgaagaagtagaaatacataaagttttttttttaaaaattcatttcccagccgggtacagtgactcacgcctgtcatcccagcactttgggaggccgaggaaggcagatcacttgaagtcaggag

SEQ ID NO: 6488 - DNA, 2114 bp, Homo sapiens
gcttaggggagaattagggagggactgaatactcaagggacagatttgtggataagtagcttggagggaggagaaaccgggagggggcagatggcgtagtgctggggaggcggggacacaggggaagagagagggggaaaggaatcccctgaatattcattcccagacttcaggcctgtcagtcgcagtctcggtcgtacctcccctagttgcaaccttagctgttggcagggtgaagagatggcttccccgtctagacagcccccgccaggggggtcaggactgcttcaagggagccgggctcgttcatatggaagcctggtgcaatcggcctgctccccagtgagggaaagacgcctggagcatcagttggagcccggagacaccctggctggactagcactcaaatatggggtgacgatggaacagattaaacgtgcaaaccgcctttatactaatgactccatcttcctgaagaaaaccctctacatccccatcctgacagagcccagagacctgttcaatggtttggactctgaggaagagaaagatggagaggaaaaagtacacccaagtaacagtgaagtttggccacactcaactgagaggaagaaacaagagacaggagcaggacgtgccaatggtgaagtcctccccacacctggccaggaaacccccacgcccatccatgacctctctgcctctgatttccttaagaagcttgattcacagatcagcctgtccaagaaggctgctgctcagaagctgaaaaaaggggaaaatggggtacctggggaggatgcaggtctccacctgagctccccttggatgcagcaacgagcagtcctaggtcctgtgccgctgacccgtacctctcggacccggacactacgggaccaggaggatgaaatcttcaaactctgatgtccccagaactgactgagagaagcaagatgttgaaagagaaacttcagggggagaggagcctgaggtgaggctcaagaacatggcttatgagcctgcctccctccactccagccatcctccccagcctccttgtctgccaaaaattccttggcctggggcagttttattggcaagattagggaatgggaactggaccttacccagggcttgggctgaatctagagttgagtccattacactacaaaaggcggcaatttatatcgcgagcgtgccatttacatatactttctttttatatccttgttgcctttcctatcctttttacctttccctggccttagaacagggaagcagagactccccctcagcttcttcctcatctccaactatgtgacataatttatttggtgctaatattgaagtaatatttatttgctatattttatttcttcccactcttagctgaaaaatggaatttctatagccctggggtgaggagaacccgggaacagtgagccagtgactgctggttctccactttccccaccttgttagccaaacatgttattgaggatgaggcaatcggtgatatagcccaccacagagaatggatgactgttggccttttctccaatctcaaagtgacagatttgggctgattcttttttttttttttttggtaccccattcctgttgaatgggctcagtcttgacaaaccaattccctgtaactttttcacaattcttgactctgagaaaaagcagcactgtagggacctgaactctccattctaccagttcacccttctgacctgttctgctcagcctgtggtgaggggaacagatggaagaaggctttccttggggtttgaagaggaagccagttgtgggagtctctttgttacaccccctcccctccagaccctctctctctatgccttcctcctcactgcatatttatttgcgatttgtagcactgatctatggtacagttgttttgtttcttaaacagaagtaggtaagggaacctcagtaataatggaaatctgcctcagtctcctgtttggaaatgatgagaggtgagataagtaatgtttatatacctcctttcttctgtgatgattataaggtatacgaagctggacagattaaacattgagccctgtgcaaaaaaaaaaaaaaaaaaa

SEQ ID NO: 6489 - DNA, 1079 bp, Homo sapiens
aaatgaaaggaccataaaaattaactttgtcatttaaaatatattgtatttcagtttagtttaacaattattgtatgaatttacttttaggatctctgatttggatatgtctcatatatttttatacctaaacacttgcttttcatttcccacccattgcacagtatttagaaaatataggtaagcaaatttaagtagtaattcccaaaacaataataaccaaagacaagtcagaattaatgttttgacgtgtatctttccagtctttcatctaagcctattttttggcttatccttttttatattattctaagtcacattatgcacagatatcttatacatgtagaattacgcaaaccacccaggttttaagaaaatgtcaatggaggacgttaacttaattgtcaaaaaagtttagaactatgagggacttaggagataagctctggttccatgacttcgtgtctgaggagagtgaagcccctcagagtgcagtgggggcctgcgtgccagatgctccaattcctgagcacctgttccttgccctgccctctgctgagaagccactagaatcctttcctagaacaaggcagggtatgaataagatcagtttatttttaggtcattgaacaaatcaagccccatgctatcctccttacccatatttgccctttaataataaaggcaggaagcctatggttgaatgtttgccatgtgcaatttcccataaaacacaaagcagcagcgcaccgcgtggtggccaagagcaggcaagttatctgatttcctgtgctggtttcatcatgtgtagtgtgtagaaaatggctgcatctcatcaaggtgttataagggttctatcagatcatgggtacaaagtacttagcacagggcttgacctataagctctcaaatacttgtgcatataaatattatgtatgtaaagttactcaataataaaggcttattataatagtattatgtaatccagctgctgaattctaacacagttttatgataagtaggagtattaactatctgtttttgaaaaaaaaaaaaaaaaaaagatctttaattaagcg

SEQ ID NO: 6490 - DNA, 1662 bp, Homo sapiens
ctaacttgagccaagcgaagtaccttgggcatttgcttttgatggcccctgtcatgcggatcactacgggtactgagagcctaggtctgcgtttcaccctccagtgtgctgtccttgcccaggccccacctctcctccctatagagttaatggcaccaacttttgtgtattggtttgtcagtgtcccccatcgactctctggggctgatcacttagtttttggccttctgctgcagccgtcatactgtccaaaatgtggcagcgggaacagagtaccctcttcaagccccggtcatgatggaggtcccagccacaggaaccatgagctcagtggtcttggaacagctcactaagtcagtccttccttagcctggaagtcagtagtggagtcacaaagcccatgtgttttgccatctaggccttcacctggtctgtggacttatacctgtgtgcttggtttacaggtccagtggttcttcagcccatgacagatgagaaggggctatattgaagggcaaagaggaactgttgtttgaattttcctgagagcctggcttagtgctgggccttctcttaaacctcattacaatgaggttagtacttttagtccctgttttacaggggttagaatagactgttaaggggcaactgagaaagaacagagaagtgacagctaggggttgagaggggccagaaaaacatgaatgcaggcagatttcgtgaaatctgccaccactttataaccagatggttcctttcacaaccctgggtcaaaaagagaataatttggcctataatgttaaaagaaagcaggaaggtgggtaaataaaaatcttggtgcctggaaaaaaaaaaaaaaaaaaaaaaaaaaaaaaaaaaaaaaaaaaaaaaaaaaaaaaaaaaaaaaaaagggggggcgcgcgccgccgaacaaataatctctcccaggagaggggcgccgccaactacgtacacgccgcacaccagaccttttgtggagaagcaggaggggcccaccacaaatggggagcgccctagataaacaacccgcagcaacggctgggccgcagatattaaaacacaccccagcagcaggggaaaaaaacgggcgcaatgcagcgcgaggaccacaccttgggggaagaacgagcgacacccccaccaacctgcgcagggaggcagcgaaaacaaaataatgaggcggccacacaacaccccccacgacacagagcgaaacgacatatatataccacaccgcccactagccaagcgggaccaacatccacacacaaaccgaagtccacaaccgcgcgagcacaaacagcagcgcgtcgcacgaaaacaccaaagccgccgccaatcactgcacccctcggccggagcccaccagcacgcagctctccgcgagcaaccaccaacagagagacaaacaaggagcaagacacgagaaacaacacaacatctatagcaacacgcgagcagacacccacaacacgcgaacacaaacacccgcgctcaaccgccagcagccgcacacaatcggaccccacatacccacgacgaccagccgcgccgaccgaacagacgaccccgaacgacgacggccgccacgaaagccacgccaagcaccagccgccgacccaccagccggcgcaccacaca

SEQ ID NO: 6491 - DNA, 10657 bp, Homo sapiens
  misc_feature (928)..(928): n is a, c, g, or t
  misc_feature (6188)..(6219): n is a, c, g, or t
  misc_feature (6487)..(6531): n is a, c, g, or t
  misc_feature (6628)..(6671): n is a, c, g, or t
  misc_feature (6723)..(6780): n is a, c, g, or t
  misc_feature (7811)..(7899): n is a, c, g, or t
  misc_feature (8960)..(8995): n is a, c, g, or t
tttttttttttttttttttttttttcttattttttaataaactttattctatattacaaataagttttttttgttctgaactgcaaaataggaatgccttatatttacatacacaggtatacaattaattataacaaaggtacagaagcttgcctttaccaagttacaactgggctccaatttaaatagcataggtttcctttttaaaaactttttaatttttttttaatattttactaggatactcttctttaaaaatcaaaaccagaagaccctcttcttagagatctcatccacatacatttgaggctcattttaacactgttgtttaaagatatgctttgctttgttctaacaaagggtcaatgttcgaggtgggagctttagtttgaaacagaagtgggatggggctggaagggggtgactggaacagagataacctgccctacctccttcaacggcttctctatgtgactcaaagacccctgccagttccttaaaccacccttccatcctgtttctccccttctctagcatttgaagctcaactctgggtcctctggctgggccaaaacccctgcatcatccccacacgtcggctcgctgagccattgtctgttgtggtaccctggagttgctggttgctatggtaactcagcaggaccctgctggaagagatgggctggcccctacatgctaaagtggggaggagggcagtggcatccaatccttccttcccacctcagggcctggaggcctcgttcctgctcaaagcagccaacacacgactaagcaaagaccgtatgtctcaaggacaccaggccaaggtagggagtggtgaggggagggctgtccattctaaaacacaaaatcgttggtttccgaatggaaacaagattctttgaggtaaacctagcttttcattttngaacagaaggtttaacaagtcaacaagctaactagaacgtcggggagggagaggaaaggaggacagacagatgagcacgtgtatcccatcttcgtcctgtgcctggattgcggctgacttctgtgcacgaaagtgttccttagtcctgttcggtgaagtggtctcggtttcttaagcgtcctttgggttgctctttaactgtatcctctgttttaaattctacttttgtaagggagcccttccaaaatgtgcttgagtcaaaagatcaaagatactaacaaaggaagttctaattccaaataaagaaattgttggaagaagagctgcatagaccaagtctacttgcttttgcaatcctggcggagggaaagcttgggtcttcccatgacccatccctcacagagcctccttaaagtttgaggaaagctgataagagatgtgtaggattcggcagtaccaggggcagcccagagagccaagcatagacatcaaagcgggtgggaatggaataaagtgaggctcccgcaacccaggattttcagcctacctgaatcacctcactacctctgccaatacaaacagaaagttctttttgtatatgaaggattttgtttcgttttgtttaactttgctttgctttctggtaggcaccagtctactcaaggaatttaatcgggatcctaatgagtatgtatttctcttacaaccaaaaaattctatatacttttaaaacttggatactccctctaataaaaaaataattttatgggggagcaaaaatttgtagtaaaaaaaaaaaaaaactctctcttgcatgtctgaaacttttactgcagtggattactttccaaatgagaggagtggtcatttaggtttcctgtcaagagcatgccacccttagcaccatgaggagaggtttgcagagtgtcccagcctcattcgggagctgtgtcagtgttacctgaggctgtgtctcagctccccactctataagataaggctcttgtttcctacatagagaatgcctgtagggtgaggtggcaggaggcggtaggagaaggactccatctgtcaaaagtgtggggaagcaccaggaatagcagcagccatgtgagatgccacccctagcattgtcctcatccagggaatgtcctgacccattttttttttttcaatgggggaggctcctcctgtcctctgaacctctcctcatccccttggaagtcataggttttgctcccactaaccgagtaatttggacttaacatccatagcagggctcccttcttactttcgaactattaagatataaaaacaaaaaccaaacaactccaaaatcccaaataaatggcccacagttttgttttgttttgttttttttaaaggaagaggctgagggttcaaggtctcccagtcacctgtcctgagagctgggaggaagaggggaagaggcccttgatgtagacgaggaccaggagggatggctgggggggatttggggcatggggagaagccagggcacggagctgcctggggtaggtcttctctgggggtcaggtgagctcctggaggtgactcagtcatggaaagaccccttgaaggccttgaagagctggctggggctgctcactgggctcactgttcctggaaggagcaggggaagttcccggagaggggcttctctgggccttgtgcctgcagagcaccttcctacctatgtctgtctgtctttccctcactgcttggctgtctgtgaggtgggaggtttgtccttgactgataacaatactggccctttgctcggttaagtatttgacttcacattactgtgtccccttggtcctgggaaagaagacagatggaaattgagcttttctttttaggtcacagagggtggtgctgagacctgggcccatcacagcatcgttcacggctctggaaacagtggtaaggattcttcttgcagtggaggtcatttgggaagtcattgcttgtggatcctcggatggggacccatagggccttggctagacgagggagctcctacagccaggaaggcagctttgggtggggtaggatggggctggggcagtcacagagggctgggctgagaggtctgagcagctcctgtactcaagtggataaatcgccctgggacagaggctatgtgtgcaggagagacacggtggaatgaggagggacagggaggatgctcgtggcaggaggagcacaggcagaagccagacatgcaacgggagacacggtaccagggacctggttgcatgggggaggtggagatgctgggccagtacatcaaccttcactgctggtgggcgcaggtagctgggcctgaggggaccaggtcagagacttttcctgtgggtaactcctgcttcttcctgggaacagtcctggacagtctgcctcaaactttgggatttatttaaaataacttctctttcacttgtagctcctcacaagcagccaagctcacttaccaggctgcgggtgcacaaggggtaggctttaggggctggctttgggtgcagggatcatgctgccattggaatgtaccttggcctgtgggacacttgggttatccactgttcccaaatttaaaaccatactgaaagaagaaggcaagaaaatattttcctgaggaagtaactggcatgatggccaccttcacttagtggcactatttgcagctaccaagaaatgtcagggtctctccttatggggaaggacaaagaatgggtaaaagctgcatctggggggacttgtggccaggagaaatgaccagcctaccactctgtttcttgtcttcctctacttattccttaaaatttaggaccccacaaagcccccttcttccctgctaccttaagcccttctctctccaacatgcaaaaaaaattcccacctaaactttgtcagtgattttgatggctcagtctggtaccattttccctgggagggtacgggataagttggaggggaaggtaaggaagatggccttttctctccttctgtctgctcatgactcaacataatggtgaccctacaaattaactttgcctcgagggaggccgtgaaggggcctccatcccacaggacaaagttggcccaattcctttctctgggagcccgcaagccacatggacagcccctggatgtttgctctgccagtggggtaaggaagatccctgggggagtttggaaaaaagatttgggtgggggatggggggcaaggacagctttttgacaatgttgcttgtctttgcttttaaataccatatcacacgtgcaccaagaatccaaacggaagaaatggaaaacaaacagcagaagataatttttataagcaagatgggctgtggctctggatacctggctcaaatttctcagtccccaagcaggccacggggactgcagcaaacagagcggcagaaacaacccacccaccaattaaagtcaaaccagccccaaacccctcccccaggagaaatggggacagccagaaaatttgtctgtccttgtctcctctttcttcctaacctttctatttctctgaggtgtttgaaatttttcttataacaaaaacgtgaataaaataaagtcctgtaccgccaaagtaacaataacaataatcatccagtaaaaaataaaagcttcagcagaaccgtgataagtcttttttcttttttttttctgcttgtttgattttttctcttaactgtgcaaaaaaaaaaaaaaaaaaaaatcaaaatgcactcactcatacacacgttcacacacgcagcttccatccagcaaatctgtgttaaatacgtttgtgtctctttcctccccaaccctttatatgtgcaaaaatattgtagtgaccgaggtacttcctcagaccgtctcccacatgcaccctttctggccttccaggtcctgtgactgacttcttgggagggaataaaatgatcaaggatagaaaagtcaagcttctccacctggtactgcacttgccaaaacctttggttatttattttttttcttcctcttccaatgcattgtttcccattttcctcttcccattaggttgctcatgtcttttccaccatctgtcctctgcgatgtcacatgatgccctgtggaacattcatgtgtgtcctgagtgaggaacatgggtgtgtatgcttataagagagtgtgggaacatgtgcatgagcataggtgtgggtgcatgggcacttgtctgagtgtgtatgtcagggagtgtatgtgagtgtgtgagtgtgacagtgtgtgagcatgtcagggagtgtgtgagtatgacagtgtgtgagcatgtcagggagtgtgtatgactgcatgtgtgtgtgtatgtcagtgagtgtgtaggcatgtgcaagtgtgaatgtcagtgtgtatgcatgtgtgaatgtgagtgcatggatgtgaatgaatgtatgtcaatgagtgtgtatgtgtgtgaatgtgagtgcctgcgtgggtgtgagtgcatgagtgtgtgtgtatgcttgtcagtgtgagtgtgcatatgtgtgttggtgtgtatgcaagtacgaatgtgagtgcatgtgtatgtctgtgtgtatgcatgtgtgagtgcatgcgtctatgtgtgcacgcatgtgtgaatgtgagtgcatgagtatgtgggcatgtgtgtgcacgcctgcaagttgagtgcgtgagtgtatgagtgtgcatgcatgtgtgcatgtgagtgcatgtgtatgcatgtgcaagtgtgagtgtgtaagtatatgtcagtgtgtgtgtacgaatgtgagtacatgagcgtgtgagcacatgagtgtatgtcagtgagtgtatgtatgtgaaagcatgagtgtgtgagcatgtcactatgtgtgggcatgtatgtgtgagtgcacgagtgagtgtatgtgagtgtgcatgcatgtgtgcatgtgagtgtatgtgtgagtccatgagtgtatgtcagtgagggtgtgtgggcctgtgtgggagtgtttgtaaatacacgggtatgtttatatatcagaagcttaggcccatgaagggcccagctgggtgtcttctgagtttgtgtagaggacgtcctggcttgctgtgaagtcttcaaggagaccccttggcttgggccagtgcagccctgtaaacgttcagtggctggctctgggcaagctgcaaagtgcctctgtggctagtctgacaagtcctttgctgtaagaccccttcttcctacgtgcacagcatnnnnnnnnnnnnnnnnnnnnnnnnnnnnnnnncctcctggggcctcagctgacaatcctgggtgggagctcccatcggctgctccctcccagttggggtgctcggcccacagggagcagaaggagggtgttggctttttatcagtctgcagctttcctttaagtcaccaagcgcctccaacattcaaagctgcgtgcctgccacacataaaagagattctaatcactacacctaattagaggaaagagtacattgcggagaaaaaaattaagcagcgtaaatataataaaaggcagtaannnnnnnnnnnnnnnnnnnnnnnnnnnnnnnnnnnnnnnnnnnnnatgtagagaggggatggaatggatccacttccccatcaaaaagagccgtggctgccctggtgggaatcggtgtgaagtgagagccccaggtatgggnnnnnnnnnnnnnnnnnnnnnnnnnnnnnnnnnnnnnnnnnnnntcagatcctcccaggatgagtcacaaaatgatatcctgggggttacaagagnnnnnnnnnnnnnnnnnnnnnnnnnnnnnnnnnnnnnnnnnnnnnnnnnnnnnnnnnngtggtgtttgtaattttttaatacaagctttgaaacacccttccttctaaatcacagatcagccctacagccttaccttcctgctagaggaagaaagctggagattgctgaaatgcgtcatgttaagacacccccagacctcccctcgagtagagtgcaaaacccactcaaccaggattccaggtatggaggctgctctagtggggtgaaggtgctctagtggggtgaaggtgacaatcctgggtgggagctcccctcggctgccccctcccagttggggtgctcggcccacagggagcagaaggagggagttggctttttatcagtctgcagctttcctttaagtcaccaagcgcctccaacattcaaagctgtgtgcctgccacacataaaagagattctaatcactacaccttcaaggagagggcaaggagaccttggcctctctggtgttgccagggtggggcctgcttgggtatgggtgtggtctgggacacaggcatagggactatagagtgagaggctttgcaggtatgcaggtaggatgcacagcctccagcattgcccacagctgcctggcctgcttgcttgtaaatgaaacacatacacatacacatacacacacacacacacacttgtaaatgaaacacatacacacacacacacacacacacacacagcctccagcactgcccacagctgcctgggctgcttgcttgtaaatgaaacacatacacatacacatatatacacacacacacacacacacacacacacagcctccagcactgcccacagctgcctggcctgcttgcttgtaaatgaaacacatacgcatacacacacgtgcacacacacacagcctccagcactgcccacagctgcctggcctgcttgcttgtaaatgaaacacatacacatatacaggcgcgcgcgcacacacacacacacacacacacacggcctccagcactgctcacagctgcctggcctgcttgcttgtaaatgacacacatacacatacacgtgcnnnnnnnnnnnnnnnnnnnnnnnnnnnnnnnnnnnnnnnnnnnnnnnnnnnnnnnnnnnnnnnnnnnnnnnnnnnnnnnnnnnnnnnnnatgaaacacatacacatacacacacacacgcgcacacagcctccagcactgctcacagttgcctggcctgcttgcttgtaaatggaacacatacacatacatacacacacatgcacacgcacacacagagcctccagcactgcccactgctgcccggcctgcttgcttgtacatgaaacatatacacatacacagatgcgcacgcacacagacacatatacagcctccagcactgctcactgctgcccggcctgcttgcttgtatatgaaacatatatacatacagatgtgcacacacacacatgcacacacacacattcgcacagacacacacaccgccagcctccagcactgcccactgctgcccagcctgcttgtttgtatatgaaacatatgcatacacatacacagatgtgcatgcacacacatatgcacacacgcacacacacatggcctccagcatggggccactcagtaccttccttgcactccagggccacacgggactccaggttgtccatctgcatctgcagccgcttcagcgtgaggtcactttcgcgggacttgcgtttataggcaatgagcacggccacgatgaaaatgatgaggaggccgccagccactgcgatgctgacgatggcgggcaggctgagcgggctgtccggggcaatgtacaccatccccggggagtactccatgccaccgacacgggccatcactttgtgcctgccgatgaggttgggggactcgcagagcagctggacatctgacacggtcacggtgcacggcttctccccaaccagcacagtgtagttcagcttcacgttgcccccagccacaggcgggatcaggttcttgccctttaggatgatgggcgtgccaggcttgagctccaggattcctgagggaccaaaggcctcaaacaccgggttgggatagtaggtgaagttggtcttgttgaggatgagcagggactggacgttgtccaggatgaagccaaactcctcgggcctctcggtcaggtctgactggtggtcaggacccagagcgagggcgggcgnnnnnnnnnnnnnnnnnnnnnnnnnnnnnnnnnnnncacagatattgatgtgctccttccctccatgcttggcacggatctgggggttctgtatgaggtccaggtgggtcccccatacggcgatgggtgtgtttccactgacaatgctccattctggctcaatccgcacgatggtggggtcttccacatactgaaagaccaggtcctggtggatcttggccctgtccacctgcaccgacaccttcatctctagcacctcatctgaggatgtggtgttgcagacaatgtaggatggagatcgcctgtggaagagacagggctgctttccaaacatcaccaccacgttgcttccggcattcaggttggtgcctgtgatggtcacttgggtccctccggacatgggcccccggctgggcttcagatctgagagagtcagtgtcatgaagtaatagagctgtgaggaccgggccatgaattcaggccgacacacagccacgcagatctccacgaagcctgcatgctggctgggcttggcctcccccatctcacacacgatctgttctgcagggatgtaaccatccactaaagggctgcactccacgccagcaaccttgacatgggaggcgatgtcgcgaaattccaggcccaggttctcccctcggatagtgaccttggtgcccccttcccgggggcctgtcaccgggattatctctgtgatgcgggggtttgtgcacttgcttttggcaccagacagctccagccactggctctcctgggcagggcagtgctggcgcagggtgcactggcctgggccctggcaccagccacatgcgaagtctgggtcagccttgaggcacagcccgcagctctcacgcatggctccacacttgtagaggtgaactttattctgagctgggttgtcaatgttgaagtgcccattccacacgactgtcaactccacgggcaggttgttgatctccatcccttcataggaataagaggtgttctggcactgtacgctggagctgttgaagcgcagggcgggcactcgctgctcgctgccctgaatgttgaggatgcattcgtagccacgctgcccagactggggctgggggaggttcttggccttcagcgtgataggcttgatcacctccacgggcaccaggatcttgtccactcgcagcagctgggggcagtcctcgggcagcttcactcggccttcctggaaggagcaggtcttggggtcatgggtgcagacatgccggtatttacaccagtggcagcggtatggactctccacgcaggacaggcacgaattgtggacgctgcaattgtagaagacaaagctggtgctggcgaaggtcatgccggtctcctttgatttgagctgaagctgtacgacatggtggtccccattctctgtgatgatccggggcacctccttggctgcaggggagtagcactggatctgattgcccacgaccagcccatccatctctgacaggtcctcaaaggtgcagttgacgccagctgacagctccgggacattgtacgtctccaggaccagcagcacgttgtactgagagacggagatattgttgggatggaccgtcagccggacacactgcttcatctccgaggcaaacctgcggggctccttgggaccgctcacaccgctccttccgggtggcaagtgtt

SEQ ID NO: 6492 - DNA, 926 bp, Homo sapiens
agcggcgtcttattgctggcggccggaggtaaaggccgcgcttgggtgtccctgggtggtcgggtccccgagttgggaggggcggaaggctgaacctccagcttgagccggacaagccgattcccagcgttgagagggtagagatgaactgtgtgtgaggccaaactggatctaccaaccgttcttattgctggcggcctgaggagcccatcatggcgacgccccctaagcggcgggcggtggaggccacgggggagaaagtgctgcgctacgagaccttcatcagtgacgtgctgcagcgggacttgcgaaaggtgctggaccatcgagacaaggtatatgagcagctggccaaataccttcaactgagaaatgtcattgagcgactccaggaagctaagcactcggagttatatatgcaggtggatttgggctgtaacttcttcgttgacacagtggtcccagatacttcacgcatctatgtggccctgggatatggttttttcctggagttgacactggcagaagctctcaagttcattgatcgtaagagctctctcctcacagagctcagcaacagcctcaccaaggactccatgaatatcaaagcccatatccacatgttgctagaggggcttagagaactacaaggcctgcagaatttcccagagaagcctcaccattgacttcttccccccatcctcagacattaaagagcctgaatgcctttgaaaaaaaaaaaaaaaaaaaaaaaaaaaaaaaaaaaaaaaaaaaaaaaacaccggggggcctttagtgggggggggggaaaacaggggtatgaaaggggccggggaaaggggttcccggcccattttttggcacaagggggaaacgggggggccccaaaaggggggggggaaaaaatgaaaacgcggggacccgct

SEQ ID NO: 6493 - DNA, 484 bp, Homo sapiens
tttttttttttttttgacctataagaaaaaacttttatttgtgaaaacagcattaaagtgattccatatcaactccaaaagtttaccacaatggttcagtttacatgaaacaatgatggaaatatacatagcaagtcttagcagggagaacaaagcttactatgattttcacacacttccatgagcaatatccactgcacaacatgccttcctgcagctattaaccagcagcgtctgacatgatctagtatttgtgaggtgccaactaagagaaatatattgttcagaaacttgaaaagactatttccttcctatagctaatttaaaggcactgctctatggttattcattatattattaatattatttctctgaaggcctcattcatgacctttttaagttaaacaggtaatttgtcatttttgatgttattgaaatcaccagaatttctatttctatttaggcagtgtctacaaaagtaaac

SEQ ID NO: 6494 - DNA, 900 bp, Homo sapiens
acacccagcgaaaagtttgtttgaataaacaatatccgaaagacaattagtttcttcagatgtattttgaaattctcctaaagagctagtgtttctattcattttcacaatttaaaaacagctcttaacattgctgaagttgggagaactttccatctcttcttaataacagtgcaagattttgtaaattcttttttgtgtttaatgtttaataaaacgagtattaagcttaaattactgaagtacctgggagaagtaatgatgtgtactttcaaaaaaatggaaaatgcttttattttattttctataatttgttaacatgatatgtaaaattaaacttcggagcacaatgaaatgccgattatttttaccttgtttgggcttaaagtaggtatttaaggtttatgtgttcaaaatgccttggtaaattggatgacctctaactttactgtccatatggagtttgtcattctttatggataagagaacttaaggaaaagttactgtttttcttcagtctttttatatctatctgatttaaaatctgttactttattaaaaggcttcaacaacaggttgttaggatgtagtcttacatccaggttcacataataaccccatttgaatccaaatttgtgtatattttcttatgccagcagtatttgtatccaattttaacttaggtttgttttcttgagtattaaaatttaaacatatataaagaacacacaccaacacgcacaacaaagaataacaaaaaaaggggggcgcaaaaacatccccggggcgcaaaacacccccttttgaaaggcgcaacaggagaataaaagaaacgcgcgtacaaaggcgagaaacgcccgcatggaagcacccgggggaccgccccaaaggccgactacg

SEQ ID NO: 6495 - DNA, 3781 bp, Homo sapiens
  misc_feature (825)..(839): n is a, c, g, or t
  misc_feature (969)..(1016): n is a, c, g, or t
  misc_feature (1221)..(1245): n is a, c, g, or t
agcgagtccgaactctgggcgggaacactggtgggggcggcggaggttgtgcccgcgaagttcctagagctcagcccgttgcggcgggagtagagagaattgggcgcctcgggaggtggcaccgcccctcccgtgggcacaagcaggttgggggcggcgggagccgagcggggacagtcgcgcctggcagcgtgcacgggcgtggacgtgcccgggtgcggccgcgtgtagcgcaagaaggaaactgttgagacgcagcaggtaattgctgccatggaaacacaactgtctaatgggccaacttgcaataacacagccaatggtccaaccaccataaacaacaactgttcgtcaccagttgactctgggaacacagaagacagcaagaccaacttaatagtcaactaccttcctcagaacatgacacaggaggaactaaagagtctctttgggagcattggtgaaatagagtcctgtaagcttgtaagagacaaaataacagggcagagcttgggatatggctttgtgaactacattgaccccaaggatgcagagaaagctatcaacaccctgaatggattgagacttcaaaccaaaacaataaaagtttcctatgctcgcccaagttcagcttctatcagagatgcaaatttatatgtcagcggacttccaaaaacaatgacccagaaggagttggaacagcttttttcacaatatggacgcattattacttctcgtattcttgtcgaccaggtcactggcatatcaaggggtgtagggtttattcgatttgacaagcgaattgaggcagaagaagctatcaannnnnnnnnnnnnnngaaacctcccggtgccacggagccaatcactgtaaagtttgctaataacccaagccaaaaaaccaatcaggccatcctttcccagctgtaccagtctccaaacagaaggtatccaggaccgctagctcannnnnnnnnnnnnnnnnnnnnnnnnnnnnnnnnnnnnnnnnnnnnnnncagtttggctggaattaatatccctgggcaccctggaacagggtggtgtatatttgtgtacaacctggctcctgacgcagatgagagtatcctgtggcaaatgtttgggccttttggagctgtcaccaatgtgaaggtcatccgtgactttaacaccaataaatgcaaaggttttggatttgtgactatgacaaactatgatgannnnnnnnnnnnnnnnnnnnnnnnncaatggataccgtctgggagacagagtactgcaggtctcctttaagacaaacaaaacgcacaaagcctaatgagctcttgtcctcagtccatttatatatgaaaactatacaacaaaggcaagttaagagaaactttatacattagtaaatgtctttgtaagtcagtgttgagatggggataaaatgactacttagcatcctaagaaatatgtgagattttttattgctagtatttgaattaaaacttcttaaatatcttttatgtttgaatatggacaagaggtacagggtttttacctgtcacattgcattctattgccttctttgaagaaggtggaccttttaaagtgtttcagctaagggaagacatttcttttctttttacataactgccttgaacctgtgagtaaatattgaggctttgtgttgtaattcttcagttggttgtgtcttttttttcccccctttttttcctttttctgattagctttgtgtttggtttacatttaaagcattgctgttatgtctgtttaagaaaagtattttgaagtttacatttttatttatgaagtttaaaacagtatttattttgtaattatgatttgggttggggaagggggggctacattataaacgcttattgtaagaatactggagaacttttcgtaaagcagtaccttgccaaagagataagagcctctttgatgtgggtttaaaaaaagcatctatttttataaaaaagaaaatttggagaaactttttactggtcctggaacaaatattttgacttgaatactttgagaaatctcttcatatgacacctagtgagcttttaaaatttaccaggaaatttgcagcggttggaaaatttagaaagatttatggtgtagaaaatacttttgagatctttgtatgaaaggagtagaatcaatggggggaaacactgctggtttcatttttgtaatcaccagtggagcgtctgatcatcctggttattatgtgataggtggctcacattgatttgtgattttgaaacaaataaaaaaaatttacaaaagaatatataagagcaggcaagaaatttaaattaccgagagatgggggaaaaaatctgttcttcctaaagaaatcccttcagatagagctcatggtgtttagtgatgtacttgcagtattgtttgaagaattgttttgtcttaaggaaaaaagacgttgcacatgatttgtactgcagcaaatcagcaaaagtgatctgagttggatatatttgaaggtattttgaaagttacgttcaaggctaacacctgagctttgtgtaatgtaaataagaccttgtgtttatgaacctttcagctaatttaattttttttcccttacatgccaagtgatgttcaggttttgaatgtttttgtatcagttttttcctttgtaaatggcattaacattgttacttgaggtcttgcttaatcacttttgttgtcctgaggacttgaatttacagtgcatcagatttgttgcaaattttgtctgtagatagtctagcttcagctgtttatggtgatgctacattttcgtttataaatatgtttgtggtataaaaaaatgagtataaccataggttttgaacaaatttccttacatttttcatacaaaaatcataaatatctgtatgctattgaaatttaactttgtatgatgcttaaaaaccactatttggggaaataataaaataagtctttaccatgtatgaaagaaattttaaaaaatacaaaatattttctgattagcatctagcttataataaattttcaaaaaagctgaaggcaaaaatgccttcatcaggatgcactgagaactatatagttacgtcctgctttttgtataaactgagatgctcacatgcttccccttagaacaggcaatgtgctatgcataacatagttgtacattatctttgcggttgctttgagttttattttttattatttaaaattgtagttataaaatttttcagtatagtacagtacatatactgtgaggcgcgtgctaaagtgaataagcgagttttcatgctgacccactcaatgctattcagaaatcaattggcttagcactttctcatatccttaggtgcatttagattgccagagttaaccttctgcgtttaaaaaaagaaaaacactaaaaaataaaatacatgtatatacttaaaaaaaaataataaggtttccctcaagggaaaacagcagctacatgcttctttcctatactactgtagcaaaccaaggcattgatgagagggcatgcaaattgtgcttcactttacagtgttttatcagagcacttaataaaatgtaaggctggtatttatttgaagttgtacagtatgacttaattcacatctgttggaatagaaaatatattctgttgagtatttaagaggctgtacatgttttcttttgtgtttggattctttgtactttttcatgttcagtacatcaataaacaaagttgaagggaaaaaaaaaaaaaaaa

SEQ ID NO: 6496 - DNA, 1275 bp, Homo sapiens
cagtagttagtgtgggaggctggggagactgggagcagtctcttaaacaaaagcaaaagaataagcttcgggcgctgtagtacctgccagctttcgccacaggaggctgccacctgtaggtcacttgggctccagctatgtggctgcctcttctgctgggtgccttactctgggcagtgctgtggttgctcagggaccggcagagcctgcccgccagcaatgcctttgtcttcatcaccggctgtgactcaggctttgggcgccttctggcactgcagctggaccagagaggcttccgagtcctggccagctgcctgaccccctccggggccgaggacctgcagcgggtggcctcctcccgcctccacaccaccctgttggatatcactgatccccagagcgtccagcaggcagccaagtgggtggagatgcacgttaaggaagcagggctttttggtctggtgaataatgctggtgtggctggtatcatcggacccacaccatggctgacccgggacgatttccagcgggtgctgaatgtgaacacaatgggtcccatcggggtcacccttgccctgctgcctctgctgcagcaagcccggggccgggtgatcaacatcaccagcgtcctgggtcgcctggcagccaatggtgggggctactgtgtctccaaatttggcctggaggccttctctgacagcctgaggcgggatgtagctcattttgggatacgagtctccatcgtggagcctggcttcttccgaacccctgtgaccaacctggagagtctggagaaaaccctgcaggcctgctgggcacggctgcctcctgccacacaggcccactatgggggggccttcctcaccaagtacctgaaaatgcaacagcgcatcatgaacctgatctgtgacccggacctaaccaaggtgagccgatgcctggagcatgccctgactgctcgacacccccgaacccgctacagcccaggttgggatgccaagctgctctggctgcctgcctcctacctgccagccagcctggtggatgctgtgctcacctgggtccttcccaagcctgcccaagcagtctactgaatccagccttccagcaagagattgtttttcaaggacaaggactttgatttatttctgcccccaccctggtactgcctggtgcctgccacaaaataagcactaacaaaagtgtattgtttaaaaaataaaaagaaggtgggcagaaatgtgcccagtggaaaaaaaaaaaaaaaaaaaaaaa

SEQ ID NO: 6497 - DNA, 823 bp, Homo sapiens
tttttttttttttcaagaatattctctatattttttgagggcttacaaagaaaaacacaatgtaaaaataccctgatttttctaaaatgctcaaagaatgatgtattctgatacatctaatttctggctaactggctaaacaaatattacttttctttaaactttattattgaatatggaaaggccttatttgattttcttattgcagcatgatatgtaatatgaatctttagtgcagctcatcttcgatgaagcttttgaaaatatgaaccgttttcagggtggccgtaggtttaactcacaggtgttggttggaaactcagtaacaacgaatctgaactctgatttctgttactttcttaagatggagtttttaataactcacatctcttttaatttagttagtagtgagtacatattacaatgaaatgccatatgtattaacccttttgtgacttccttcacccccccaatctgaataagcaaaatgttcatttgcattgatgggagtgcaggctcagtgtggtgggggaatgtgtccctcagggctgcaagtgccgcaaactcagtccaaaaatgagttcagttagatcattgattcactaaatcagagaaaggaggaattttgtttcgttttgctttgaatcagctactggttccagtaaggcaattaaagagtccagttttggcatagttgtaggtattttaattttgagccaggcactcttagatttgaagaatccgaattataaatgaaataataaaatttggtgcaagatgaaattcgtagagtctaggaattacagccctgtgggatttaatg

SEQ ID NO: 6498 - DNA, 6730 bp, Homo sapiens
  misc_feature (5397)..(5411): n is a, c, g, or t
agagcagacgggagtttctcctcggggtcggagcaggaggcacgcggagtgtgaggccacgcatgagcggacgctaaccccctccccagccacaaagagtctacatgtctagggtctagacatgttcagctttgtggacctccggctcctgctcctcttagcggccaccgccctcctgacgcacggccaagaggaaggccaagtcgagggccaagacgaagacatcccaccaatcacctgcgtacagaacggcctcaggtaccatgaccgagacgtgtggaaacccgagccctgccggatctgcgtctgcgacaacggcaaggtgttgtgcgatgacgtgatctgtgacgagaccaagaactgccccggcgccgaagtccccgagggcgagtgctgtcccgtctgccccgacggctcagagtcacccaccgaccaagaaaccaccggcgtcgagggacccaagggagacactggcccccgaggcccaaggggacccgcaggcccccctggccgagatggcatccctggacagcctggacttcccggaccccccggaccccccggacctcccggaccccctggcctcggaggaaactttgctccccagctgtcttatggctatgatgagaaatcaaccggaggaatttccgtgcctggccccatgggtccctctggtcctcgtggtctccctggcccccctggtgcacctggtccccaaggcttccaaggtccccctggtgagcctggcgagcctggagcttcaggtcccatgggtccccgaggtcccccaggtccccctggaaagaatggagatgatggggaagctggaaaacctggtcgtcctggtgagcgtgggcctcctgggcctcagggtgctcgaggattgcccggaacagctggcctccctggaatgaagggacacagaggtttcagtggtttggatggtgccaagggagatgctggtcctgctggtcctaagggtgagcctggcagccctggtgaaaatggagctcctggtcagatgggcccccgtggcctgcctggtgagagaggtcgccctggagcccctggccctgctggtgctcgtggaaatgatggtgctactggtgctgccgggccccctggtcccaccggccccgctggtcctcctggcttccctggtgctgttggtgctaagggtgaagctggtccccaagggccccgaggctctgaaggtccccagggtgtgcgtggtgagcctggcccccctggccctgctggtgctgctggccctgctggaaaccctggtgctgatggacagcctggtgctaaaggtgccaatggtgctcctggtattgctggtgctcctggcttccctggtgcccgaggcccctctggaccccagggccccggcggccctcctggtcccaagggtaacagcggtgaacctggtgctcctggcagcaaaggagacactggtgctaagggagagcctggccctgttggtgttcaaggaccccctggccctgctggagaggaaggaaagcgaggagctcgaggtgaacccggacccactggcctgcccggaccccctggcgagcgtggtggacctggtagccgtggtttccctggcgcagatggtgttgctggtcccaagggtcccgctggtgaacgtggttctcctggccccgctggccccaaaggatctcctggtgaagctggtcgtcccggtgaagctggtctgcctggtgccaagggtctgactggaagccctggcagccctggtcctgatggcaaaactggcccccctggtcccgccggtcaagatggtcgccccggacccccaggcccacctggtgcccgtggtcaggctggtgtgatgggattccctggacctaaaggtgctgctggagagcccggcaaggctggagagcgaggtgttcccggaccccctggcgctgtcggtcctgctggcaaagatggagaggctggagctcagggaccccctggccctgctggtcccgctggcgagagaggtgaacaaggccctgctggctcccccggattccagggtctccctggtcctgctggtcctccaggtgaagcaggcaaacctggtgaacagggtgttcctggagaccttggcgcccctggcccctctggagcaagaggcgagagaggtttccctggcgagcgtggtgtgcaaggtccccctggtcctgctggaccccgaggggccaacggtgctcccggcaacgatggtgctaagggtgatgctggtgcccctggagctcccggtagccagggcgcccctggccttcagggaatgcctggtgaacgtggtgcagctggtcttccagggcctaagggtgacagaggtgatgctggtcccaaaggtgctgatggctctcctggcaaagatggcgtccgtggtctgaccggccccattggtcctcctggccctgctggtgcccctggtgacaagggtgaaagtggtcccagcggccctgctggtcccactggagctcgtggtgcccccggagaccgtggtgagcctggtccccccggccctgctggctttgctggcccccctggtgctgacggccaacctggtgctaaaggcgaacctggtgatgctggtgccaaaggcgatgctggtccccctgggcctgccggacccgctggaccccctggccccattggtaatgttggtgctcctggagccaaaggtgctcgcggcagcgctggtccccctggtgctactggtttccctggtgctgctggccgagtcggtcctcctggcccctctggaaatgctggaccccctggccctcctggtcctgctggcaaagaaggcggcaaaggtccccgtggtgagactggccctgctggacgtcctggtgaagttggtccccctggtccccctggccctgctggcgagaaaggatcccctggtgctgatggtcctgctggtgctcctggtactcccgggcctcaaggtattgctggacagcgtggtgtggtcggcctgcctggtcagagaggagagagaggcttccctggtcttcctggcccctctggtgaacctggcaaacaaggtccctctggagcaagtggtgaacgtggtccccccggtcccatgggcccccctggattggctggaccccctggtgaatctggacgtgagggggctcctgctgccgaaggttcccctggacgagacggttctcctggcgccaagggtgaccgtggtgagaccggccccgctggaccccctggtgctcctggtgctcctggtgcccctggccccgttggccctgctggcaagagtggtgatcgtggtgagactggtcctgctggtcccgccggtcccgtcggccccgttggcgcccgtggccccgccggaccccaaggcccccgtggtgacaagggtgagacaggcgaacagggcgacagaggcataaagggtcaccgtggcttctctggcctccagggtccccctggccctcctggctctcctggtgaacaaggtccctctggagcctctggtcctgctggtccccgaggtccccctggctctgctggtgctcctggcaaagatggactcaacggtctccctggccccattgggccccctggtcctcgcggtcgcactggtgatgctggtcctgttggtccccccggccctcctggacctcctggtccccctggtcctcccagcgctggtttcgacttcagcttcctgccccagccacctcaagagaaggctcacgatggtggccgctactaccgggctgatgatgccaatgtggttcgtgaccgtgacctcgaggtggacaccaccctcaagagcctgagccagcagatcgagaacatccggagcccagagggaagccgcaagaaccccgcccgcacctgccgtgacctcaagatgtgccactctgactggaagagtggagagtactggattgaccccaaccaaggctgcaacctggatgccatcaaagtcttctgcaacatggagactggtgagacctgcgtgtaccccactcagcccagtgtggcccagaagaactggtacatcagcaagaaccccaaggacaagaggcatgtctggttcggcgagagcatgaccgatggattccagttcgagtatggcggccagggctccgaccctgccgatgtggccatccagctgaccttcctgcgcctgatgtccaccgaggcctcccagaacatcacctaccactgcaagaacagcgtggcctacatggaccagcagactggcaacctcaagaaggccctgctcctccagggctccaacgagatcgagatccgcgccgagggcaacagccgcttcacctagcgtcactgtcgaatggctgcacggagtcacaccggagcctggggcaagacagtgattgaatacaaaaccaccaagtcctcccgcctgcccatcatcgatgtggcccccttggacgttggtgccccagaccaggaattcggcttcgacgttggccctgtctgcttcctgtaaactccctccatcccaacctggctccctcccacccaaccaactttccccccaacccggaaacagacaagcaacccaaactgaaccccctcaaaagccaaaaaatgggagacaatttcacatggactttggaaaatatttttttcctttgcattcatctctcaaacttagtttttatctttgaccaaccgaacatgaccaaaaaccaaaagtgcattcaaccttaccaaaaaaaaaaaaaaaaaaaaaagaataaataaataagtttttaaaaaaggaagcttggtccacttgcttgaagacccatgcgggggtaagtccctttctgcccgttgggttatgaaaccccaatgctgccctttctgctcctttctccacaccccccttggcctcccctccactccttcccaaatctgtctccccagaagacacaggaaacaatgtattgtctgcccagcaatcaaaggcaatgctcaaacacccaagtggcccccaccctcagcccgctcctgcccgcccagcacccccaggccctggggacctggggttctcagactgccaaagaagccttgccatctggcgctcccatggctcttgcaacatctccccttcgtttttgagggggtcatgccgggggagccaccagcccctcactgggttcggaggagagtcaggaagggccacgacaaagcagaaacatcggatttggggaacgcgtgtcatcccttgtgccgcaggctgggcgggagagactgttctgttctgttccttgtgtaactgtgttgctgaaagactacctcgttcttgtcttgatgtgtcaccggggcaactgcctgggggcggggatgggggcagggtggaagcggctccccatttttataccnnnnnnnnnnnnnnnatgtgatgggtggggtggggagggaatcactggtgctatagaaattgagatgcccccccaggccagcaaatgttcctttttgttcaaagtctatttttattccttgatattttttctttctttttttttttttttgtggatggggacttgtgaatttttctaaaggtgctatttaacatgggaggagagcgtgtgcgctccagcccagcccgctgctcactttccaccctctctccacctgcctctggcttctcaggcctctgctctccgacctctctcctctgaaaccctcctccacagctgcagcccatcctcccggctccctcctagtctgtcctgcgtcctctgtccccgggtttcagagacaacttcccaaagcacaaagcagtttttccctaggggtgggaggaagcaaaagactctgtacctattttgtatgtgtataataatttgagatgtttttaattattttgattgctggaataaagcatgtggaaatgacccaaacataatccgcagtggcctcctaatttccttctttggagttgggggaggggtagacatggggaaggggccttggggtgatgggcttgccttccattcctgccctttccctccccactattctcttctagatccctccataaccccactcccctttctctcacccttcttataccgcaaacctttctacttcctctttcattttctattcttgcaatttccttgcaccttttccaaatcctcttctcccctgcaataccatacaggcaatccacgtgcacaacacacacacacactcttcacatctggggttgtccaaacctcatacccactccccttcaagcccatccactctccaccccctggatgccctgcacttggtggcggtgggatgctcatggatactgggagggtgaggggagtggaacccgtgaggaggacctgggggcctctccttgaactgacatgaagggtcatctggcctctgctcccttctcacccacgctgacctcctgccgaaggagcaacgcaacaggagaggggtctgctgagcctggcgagggtctgggagggaccaggaggaaggcgtgctccctgctcgctgtcctggccctgggggagtgagggagacagacacctgggagagctgtggggaaggcactcgcaccgtgctcttgggaaggaaggagacctggccctgctcaccacggactgggtgcctcgacctcctgaatccccagaacacaacccccctgggctggggtggtctggggaaccatcgtgcccccgcctcccgcctactcctttttaagctt

SEQ ID NO: 6499 - DNA, 3691 bp, Homo sapiens
  misc_feature (809)..(852): n is a, c, g, or t
  misc_feature (3365)..(3685): n is a, c, g, or t
cggctctcagctgcactcctgtacatccacctgtcttcgggggggctctctttccgcgccgccgccagccccgctgcgcgctctgctcttcgcagctccccggacccgcagccatggccgacatcaagacgggcatcttcgccaagaacgtccagaagcgactcaaccgcgcgcaggaaaaggtcctccaaaagctggggaaagctgatgagacaaaagacgaacagttcgaagaatatgtccagaacttcaaacggcaagaagcagagggtaccagacttcagcgagaactccgaggatatttagcagcaatcaaaggcatgcaggaggcctccatgaagctcacagagtcgctgcatgaagtctatgagcctgactggtatgggcgggaagatgtgaaaatggttggtgagaaatgtgatgtgctgtgggaagacttccatcaaaaactcgtggatgggtccttgctaacactggatacctacctggggcaatttcctgacataaagaatcgcatcgccaagcgcagcaggaagctagtggactatgacagtgcccgccaccatctggaagctctgcagagctccaagaggaaggatgagagtcgaatctctaaggcagaagaagaatttcagaaagcacagaaagtgtttgaagagtttaacgttgacttacaagaagagttaccatcattatggtcaagacgagttggattttatgttaatactttcaaaaacgtctccagccttgaagccaagtttcataaggaaattgcggtgctttgccacaaactgtatgaagtgatgacnnnnnnnnnnnnnnnnnnnnnnnnnnnnnnnnnnnnnnnnnnnnccaaggagcgcccagtgattcgggtcctctccgcattgcaaagacaccatcaccgcctgaggagccttcacccctcccgagcccgacagcaagtccaaatcatacattagcacctgcgtctcccgcaccagcacggcctcggtcaccttcacagacaaggaaagggcctcctgtcccacctctacctaaagtcaccccgacaaaggaactgcagcaggagaacatcatcagtttctttgaggacaactttgttccagaaatcagtgtgacaacaccttcccagaatgaagtccctgaggtgaagaaagaggagactttgctggatctggactttgatcctttcaagcccgaggtgacacctgcaggttctgctggagtgacccactcacccatgtctcagacattgccctgggacctatggacgacaagcactgatttggtacagccggcttctggtggttcatttaatggattcacacagccccaggatacttcattattcacaatgcagacagaccagagtatgatctgcaacttggctgaatctgaacaggctccacccacagagccaaaagcagaggagcctctggctgctgtcacacctgccgttggtctggaccttggaatggacactcgggctgaggagccagtggaggaggcagtgatcatacctggagctgatgctgatgcagctgttggaaccttggtgtcagcagctgagggggccccaggagaggaagcagaggcggagaaggccactgtccctgccggggaaggagtaagtttagaggaggccaaaattggaactgaaaccactgagggtgcagagagtgcccaacctgaagcagaggagctcgaagcaacagtgcctcaggagaaggtcattccttcggtggtcatagagcctgcctccaaccatgaagaggaaggagaaaacgaaataactataggtgcagagcccaaggagaccaccgaggacgcggctcctccgggccccaccagcgagacaccggagctggctacggagcagaagcctatccaggaccctcagcccacgccttctgcaccagccatgggggctgctgaccagctagcatctgcaagggaggcctctcaggaattgcctcctggctttctctacaaggtggaaacactgcatgattttgaggcagcaaattctgatgaacttaccttacaaaggggtgatgtggtgctggtggtcccctcagattcagaagctgatcaggatgcaggctggctggtgggagtgaaggaatcagactggcttcagtacagagaccttgccacctacaaaggcctctttccagagaacttcacccgacgcttagattagggcaacaagtactgcaagaaggagctcagttacggggtttttaaaccttcatgaaaacctgaagagttcacttttgttattatgctcttaatgatttacagactgatgccagacaaaccttgggaagatgtatcaatggagcatgtgtgcaaaaaaatgtaagaggaaaaaaagtaaattaaggaaaaaatcctcactcattcccatgttgtcaataacaggtttgtttgtgctttgtccaagctgtggagactcttgtacttgatcccctcccaccaattctaaagtagctttctccagatcagactttaatttctctgcatcaggtgtatcgtattgagtggctgccctgcagaagatgtgatgaattatcctgtagtacaagattatcttattcccctgcccaggtgtgagcacgtgctctcgctccctttcaggtttactatgtttaaaactaaactgctgcaaaagttctcaatgttcttttccaacacatctatatatatatggacacacagtcacgcaagctagttcccatgactcctggatctatgtgtatgcagaaggctacatatacatagttgcttctttcctttccattgtagctctttgcctctcaattgtcattgatacatgcattgctcttattctgtctggcattacaattgcagttttgcctaatggcaaaaccagccatcccattggcaaaagagtcaacagtatctgtgtttgtactgtgcagttttcaggatgagatgacagatagcacgactacactgaggcaccctcagagaaggcagggcctgatttatctagctgtccagccgctgtggctggaggtaggctagttgggatgggcagctaagcagtcttctcttctgcctttatgagattgggtagaaagatggggcatattcatctacccccaaaagaacactataaaaacagctcctctatatttccacctctttctatttatgcaactcatcttcacagattgttctaaagtaaaatagatggtgtatgctgtatccacaaatcatctgtaacaattatgttttcagtgctgtgtcattccaaataaacctttggtaatcttcaacgattaccctaaaaaaaaaaaaaaaaaaaaaaaaaaaaaaaaaaaaaaaaaaaaaannnnnnnnnnnnnnnnnnnnnnnnnnnnnnnnnnnnnnnnnnnnnnnnnnnnnnnnnnnnnnnnnnnnnnnnnnnnnnnnnnnnnnnnnnnnnnnnnnnnnnnnnnnnnnnnnnnnnnnnnnnnnnnnnnnnnnnnnnnnnnnnnnnnnnnnnnnnnnnnnnnnnnnnnnnnnnnnnnnnnnnnnnnnnnnnnnnnnnnnnnnnnnnnnnnnnnnnnnnnnnnnnnnnnnnnnnnnnnnnnnnnnnnnnnnnnnnnnnnnnnnnnnnnnnnnnnnnnnnnnnnnnnnnnnnnnnnnnnnnnnnnnnnnnnnnnnnnnnnnnctataa

SEQ ID NO: 6500 - DNA, 8514 bp, Homo sapiens
  misc_feature (780)..(797): n is a, c, g, or t
  misc_feature (5088)..(5109): n is a, c, g, or t
aacagggagagaggggatttatatctgctcggtttaggaattggcaagcctacacgcagtattgtgtgttgtgtgacaaagaattccttggtcacagaatagtacgacatgctcagaaacattacaaagatggaatttatagttgccccatatgtgcaaagaactttaattctaaagaaacttttgtccctcatgtcacactgcatgttaaacaatctagtaaagagagactagcagctatgaaaccattaagaagattgggaaggcctccaaagatcacaactaccaatgaaaatcagaagactaatactgtggctaaacaggagcagcgacctataaaaaagaatagtctctattcaacagattttatagtgtttaatgacaatgatggttcagatgatgagaatgatgacaaagataaatcctatgagccagaagtgattccagtccagaaaccagtacctgttaatgaatttaattgccctgtaactttttgtaaaaagggctttaagtactttaaaaatttaattgctcatgtgaaggggcataaagataatgaagacgccaagcgctttcttgaaatgcagagcaaaaaagttatttgccagtactgtaggcggcattttgtgagtgttactcatctcaatgatcacttacagatgcactgtggcagtaaaccatatatctgtatacagatgaaatgtaaagctggttttaatagttacgccgagcttttaacccaccgaaaggagcatcaagtctttagagcaaaatgtatgnnnnnnnnnnnnnnnnnnattttttcggaagcttatttactatatgatcatgaagcacaacattataatacgtacacttgtaagttcacaggttgtggtaaagtttatcgttctcagggtgagctggaaaagcatctggatgatcacagtactcctcctgaaaaagtgctgcctcctgaagcccaacttaattcatctggagattccattcagccttctgaagtgaatcagaacacagcagagaatattgagaaagaaagatctatgcttccttcagaaaataacattgaaaacagcttactagcagatagaagtgatgcttgggataaaagcaaagcagtatcagctgtgaccaaacaagaccagatttctgcctctgagctcaggcaagctaatggaccattgtcaaatggtttggaaaaccctgctactactcctctacttcaatccagtgaagtagctgtgtccattaaggtgtctctcaatcaggggattgaggataactttggaaagcaagaaaactcaactgtggaaggcagtggtgaagcactggtcacagacttacatacgccagttgaagatacttggaatgatttgtgtcatccaggtttccaggagagaaaagcacaagaattgctttaatgatgcccatgttactcagaattctttagtaaattcagaaactctcaaaataggtgaccttaccccacaaaacttagaaagacaagtgaacaacttgatgaccttttctgtgcaaaatcaggcagcatttcaaaacaatttaccaacttccaaatttgaatgtggagataatgttaaaacatcatccaatctttataatttacctcttaagacattagaaagtattgcatttgttccaccgcagtccgacctaagtaattcattaggaactccatcagtgcctccaaaagctccagttcagaaattcagctgccaggtcgagggatgtactcgaacctataattcttcacagagtattgggaaacacatgaagacagcacaccctgaccaatatgctgcatttaaaatgcagcgcaaaagtaaaaaaggtcagaaagctaacaacttaaatacaccaaataatggaaagtttgtttattttttgccatcaccggtgaacagctcaaatccattttttacatcacagaccaaagccaatgggaatcctgcttgttcggcccagttgcagcatgtctcgccacccatttttccagctcatttagcaagtgtgtcaactccattgttgtcctcaatggaaagtgtcataaatccaaatataacttctcaggataaaaatgaacaaggtggtatgttatgttcccaaatggaaaatttacctagtactgccttgccagcacaaatggaagatctaaccaaaacagttctgcctttgaatattgacagtggctcagatcctttccttcctttacctgcagaaagtagttcaatgtctctcttcccttcaccagcagatagtgggactaattctgttttttcccaactggaaaataatacaaatcattattcctcacagattgaaggaaacactaattcctcctttctaaaggggggtaatggtgaaaatgcagtttttccttcacaagtgaatgttgcaaataacttcagtagcaccaatgcccaacagtctgcacctgaaaaagttaaaaaagaccgtgggcggggcccaaatgggaaggaaagaaaacctaagcacaacaaaagggctaaatggcctgcaattatcagagatgggaaatttatctgtagcaggtgttacagggcttttactaatcccagatcactgggtgggcacttatccaagcgatcttactgtaaaccactggatggagccgaaattgctcaagaacttctacagagtaatggacagccttctcttcttgccagcatgattctctccacaaatgcagtaaatttgcagcagccacaacaatctaccttcaatccagaagcatgttttaaagatccatcatttctacagcttcttgctgaaaatcgctcgccagcatttttaccaaatacatttcctcgatctggtgtgactaactttaataccagtgtcagtcaagaaggtagtgaaattattaaacaggctttggaaactgctggcattcccagtacatttgagggtgccgaaatgctttctcatgtttcaacaggttgtgtctctgatgcatcacaagtaaatgcaacggtgatgccaaatccaactgtaccacccctgttgcacactgtatgccatccaaacaccttgctgaccaaccagaataggacgtcaaactccaaaacttcctccattgaggaatgtagcagcttgcctgtttttccaacgaatgacttactactgaagactgttgaaaatggtttgtgctctagttcatttcctaattctggtgggccatcacaaaattttaccagtaacagttctcgtgtttctgttataagtggtcctcagaacacaagatccagtcatttaaataaaaagggaaacagtgcttctaagagaagaaagaaagttgctcctccactaattgcacctaacgcttcccaaaacttggtaacaagtgacttaacaacaatgggactcatagcaaagagtgttgaaatcccaactactaaccttcattcaaatgtaattccaacttgtgaacctcagagtttggtggaaaatctaacacagaaattaaataatgttaacaatcagttatttatgactgatgtaaaagagaatttcaaaaccagtcttgagtcccatacagtgttagcccctttaacattaaaaactgaaaatggtgattcccaaatgatggctttgaattcatgcacaacttcagtaaattctgatttgcagatttctgaagacaatgttatacaaaactttgaaaagactcttgaaattattaaaactgctatgaattctcaaatacttgaggtaaaaagtggatctcagggtgctggtgaaacttcacaaaatgctcaaataaattataacattcagcttccttcagtaaacactgtgcaaaataacaaattacccgattcttctccgttttcctcctttataagtgtcatgccaacaaaaagtaacattcctcagtctgaagtatcacataaggaggatcaaatacaggaaattttagaaggcttacagaaattaaaattagaaaatgacctatccactccagcatcccaatgtgtactgataaatacatcagtgacactgactcccacgcctgttaaatcaactgcagatatcacagttattcagccagtttctgaaatgataaacattcaatttaatgacaaagttaataaaccctttgtgtgtcaaaaccaaggctgtaactacagtgctatgacaaaggatgcactatttaagcactatggtaaaattcatcaatacactccagaaatgattcttgaaattaagaagaatcaattgaaatttgctccctttaaatgtgtagtacctacatgtacaaaaacatttacaagaaattctaacctccgggcacactgtcagttggtgcatcattttacaactgaagaaatggtaaagttaaaaattaaaaggccttatggaagaaaatctcagagtgaaaatgtgccggcctcacgaagtacacaagtgaaaaaacagctagctatgacagaggaaaataaaaaggaatctcagcctgctttagaattgagagcagagacccaaaatacccacagtaatgtagcagtgatcccagaaaaacaacttgtagaaaaaaaaagtcctgacaaaacagaaagttctttacaagtgattacagttacttcagaacaatgtaatacaaatgcactcacaaacacacaaaccaaaggacggaagattaggaggcataaaaaagaaaaggaggagaaaaaacgaaagaagccagtttcccaatcccttgagtttccaacaagatacagtccttacagaccttatcgatgtgttcaccagggatgctttgctgcctttacgatacagcaaaatttgattctccattaccaggctgtacacaaatcagatctacctgcattttcagcagaggtcgaagaggaaagtgaagctggtaaagaaagtgaagaaactgaaactaaacaaactttgaaagaatttcgatgtcaggtaagtgactgttctcgaattttccaagcaattactggcctaatacaacactacatgaaacttcatgaaatgactcctgaagaaattgaaagtatgactgcttcagtggatgttgggaagtttccatgnnnnnnnnnnnnnnnnnnnnnnttcatttactacatatttgaactatgttgttcatctagaggcagaccacgggattggactaagggcaagtaaaacagaagaagatggtgtatacaaatgtgattgtgaaggctgtgaccgtatatatgcaacccggtcgaatctcctccgacacatttttaataagcataatgacaaacataaggctcatttgattcgtccaagaagattaacaccaggccaggaaaatatgtcaagcaaggcaaaccaagaaaaatcaaagtctaaacatcgggggacgaagcacagcagatgtggaaaggaaggaataaaaatgcccaagaccaaacgaaagaaaaaaaataatttagaaaacaagaatgcaaagattgtgcagattgaagaaaataagccttattctctgaaacgtgggaagcatgtatattctataaaggctagaaatgatgccctgtctgagtgtacaagcagatttgtaacccagtatccatgtatgataaagggatgtacttcagttgttacaagtgaaagcaatataattagacattataagtgccataaattatctaaggcatttacatcacaacaccgaaatcttcttattgtattcaaacggtgttgcaactcacaagtaaaggaaacgtctgagcaagaaggtgctaagaatgatgtgaaagattctgacacgtgtgtatcagagagcaatgataattcaagaacaacagctacagtttcacaaaaggaagttgaaaaaaatgaaaaagatgaaatggatgaactaacagaattgtttattacaaaattaataaatgaagatagcacaagtgtagagacccaagctaatacttcttcaaatgtaagtaatgattttcaggaagataacctctgccagtcagaaagacaaaaagcaagtaatttgaagagagttaataaggaaaaaaatgtctcacaaaataaaaaaaggaaagttgaaaaagctgaaccagcatcagcagctgagttaagtagcgtgcgtaaagaagaagaaactgctgttgccattcaaaccattgaggagcatcctgcatcttttgactggagctcttttaagccaatgggatttgaagtatcatttctgaagtttcttgaggagtctgcagtgaagcagaagaaaaatactgacaaagaccatccgaatactggaaacaaaaaaggatcccattcaaattcaagaaaaaatattgataagactgctgtgactagtggaaatcatgtatgtccttgtaaagaaagcgaaacgtttgtacagtttgccaatccatcacagcttcagtgcagtgataatgtaaaaattgttttagacaagaatcttaaagattgcactgagcttgtcttaaagcaacttcaggaaatgaaacctaccgtcagtctgaaaaaacttgaagtacattcaaatgatccagatatgtctgttatgaaagatatcagtataggtaaagccacaggcagaggtcagtactgataattaatgtagtataaatacatcatttaccattttattttaaataggaagccatcaagcatgctagaattgtgaaactttcattatatttttttgttgttgacatgaattaacctggccaaaaacaaaaaagaaaaaaaaaacatgacatttgtcatgtaaaacttttttttatccctatgggacttgaggaacagaatcagtacttcagttattgtaaatagtgagctaaacctcaaatttctatcacccagttgcccttttcatgaactaaacaattatctgtgtgattggtatgtttcaccaggtcactgctcatgtataacagtactctttatttgtagataccttttttgtatatatttattattgtaaatcatgtgctgccaccagcagtctgtaagtctaaactattaaatgacacatttatatttggaattttaatttttaactaagcgatcaagttttttaaattgttcttttattgttttaaattaagaactttttgaactaaaaccagaaactctgccatagttcattgatttttacatgaaacatttatttacaagatgatatcaagattacttttcacaaaataggcacattatatcaacactttgctctgctttgtaaatttgccatccaggattttggggtggtattcatgtgaaattaaagcagattctctagcagtttcctatagctacagtttttttttttcattgcttctaattggatatagttactatgagtccatgaaatacaatggaaatgtgaataaagaatttactacattgaagattttaaacatttggtattaaaaaaaaatcctttgtgaatgtgatagaaaactagtagtgtggagcagtgtaaatatttgaggtggtgatttgtgaagtagcccagtattgccttaaataaaatcacatttcatttcttgttttatacatgtgatcttataaagattttttgttttgttttgttttccattttctgagatttatagattggtgtatagctttaaactgtataaagttttgtggaaagatttttttaaacatttttataaatcttaaaattgatatcatcaaagtgagcccatcttgtgtttataaaatacaagagtccttaacatttataattacatagataaaacactttctataaggaagttggatgttttgattttactgtttatagatgttagattgtacagatttgtctgtatttctcaccatatctaatgatacttttttcattagattggtcttcaagaacagtattagttataattattttggttattcagtatatagttagctcttacagtttagctttattcaccatatttatactgtggattcacagcgagaggtagaggttattccaggagagttgatgaccttcatttaaagtccaactaaaatcagtagtagaaacataagaaaacatctttgcaatatttacttttgtttctgtttgccgtaaatagtaacattgtttttttttattttgtgtttgttataaaacagttgcattcacaatattattggcctgagatattgatgatattgtgatggtatgaaaatgtgtacattccctgtgcaacatcagatttgcaggaaaaatgaagcacttactgaaatcgctggtactctgaataaataagcatggtcaaggagtgaactattttcttttggaaatttctttttaatttttattattaaagtattttatttttagggccttttgggttttattgaatagttcatttcacctgtttaagacttactaccaataagcataaaacctgacacgttaaaatccctgccctttggtgagcccactgttatttattaaaataaaagttattttatgggtgattaaaaaaaaaaaaaaaaaaaaaa

SEQ ID NO: 6501 - DNA, 4930 bp, Homo sapiens
  misc_feature (1827)..(1864): n is a, c, g, or t
  misc_feature (4515)..(4518): n is a, c, g, or t
  misc_feature (4527)..(4528): n is a, c, g, or t
acagttgtacgttcgtgacgtcggcggttgccgtggagagacccgctcggtcccgaccgagagctggcgtcaggagccgcagggtcacagcgtgtctttgaagctgcctccgccgccaccatgagcggccgaagtcggggtcgaaagtcctcccgcgccaaaaaccggggcaaaggccgcgccaaagcccgagtccgccctgctccagacgacgccccgcgcgacccggacccttcacagtaccagagtctcggggaagacacccaggcggcacaggtgcaggctggcgcggggtggggtggcctggaagccgctgcgtccgcgcagctcctccggctcggggaggaggccgcctgccggctccccctggactgtggcctcgcgctgcgggcccgagctgcgggggaccacgggcaggccgcggccaggcccggcccggggaaggccgcatctctctcggagcgcctggccgcagacactgtcttcgtgggaacagcgggaaccgtgggaaggccgaaaaatgccccccgcgttggaaaccggcgtggccctgccgggaagaaggccccagaaacctgtagcaccgcggggagggggcctcaggtcatagctggtgggaggcagaagaaaggggcggcaggggagaatacctcggtgtcagctggggaggaaaagaaggaagagagggatgcagggtcggggcccccagcgacggaaggcagcatggatacgctggagaacgtgcagctgaagctggagaacatgaacgcccaggcggacagggcctaccttcggctctccaggaagtttgggcagttgcgactgcagcacttggagcgcaggaaccacctcatccaaaatatcccgggcttctgggggcaagcatttcagaaccatccccagctagcatcctttctgaatagccaagagaaagaggtactgagctacttaaacagcttggaagtggaagagctcggccttgccagattgggctacaaaatcaagttctacttcgatcgcaacccgtatttccaaaataaggtgctcatcaaggaatatgggtgtggtccttctggccaggtggtgtctcgttctactccaatccagtggctcccagggcatgatctccagtccctaagccagggaaacccagaaaacaaccgtagtttctttgggtggttttcaaaccacagctccattgagtctgacaagattgtggagataatcaacgaagaattgtggcccaatcccttgcagttctaccttttgagtgaaggggctcgtgtagagaaaggaaaggaaaaagaaggcaggcaaggtccaggaaagcagccaatggagactactcagcctggggtgagccaatccaactgatcctgcacaagtctccctgctacctcctgctgggctgctcctggttgactacatatttggctctctgccttctcttcatgttggcctctgtgtactatagaccctttggactttagttacaagaatatggcatttatgatcatgttcttttgcctcccatagcctcttgcttttctacgttagtgtcacatgttatgtgatcgcacccggactgttcatatgttaagcacacatactttagatgtgtgctccctgttatctacattgcctggaccttgttcttggctctggcctttcctacttgtctttaacatggacactcatgagtcatcctccaggacgaccagtgcatcctcaagctctgctccttcagggccagtgacttgctgggcttcgtgttcatgctggccatgcatgtcatctatgcaagcgtttccattgccactgcagaannnnnnnnnnnnnnnnnnnnnnnnnnnnnnnnnnnnnnttcctgttctgtgggtctggggtcaccagctgagatgtcacctgctttatttctggctttggcctgtggtctgtgatacccatcctgcttgatgttctgcagaatggcacttgactgctgggcatgcatgaagttaagggcaagaaacagtatgccatgtgttcggtaccatcatgtgtctcttcttgcttctgggcccttctactggtgaactttcatcaagatctgcgccatgccgtgtcactatcaagccattaagttttgtctgggttgctgtcagccccagttggcttcctggtcaacaaggacctcaagaactgcctgtggaccgaggccccctaccagtgcatgagacacacacctaccctccccagctttccaggaaccctactggctgccagactgatgggcgggctggtatgtgtggacatgtgttcactgtcattatgctgtggctccaggtgagggtgaggactgggcctatatagaatccagataccattgtcaacttcccttattcccgtctaagatgtgagcagagtgccatagtaggggttctgggaagaggtatttctgatttgtgggcctctgcttgcttgacttcaggtcacttatacttcttattttgcttgcctgccttcatccctcatttcctccctctcattcttctttcctccctccctttcctggtagcctcctttcctccccttctgccttccccttccttctttccttattcttttttattttgtttaaatagtaccacagagaaaacaactgaaaaaccacatttttctacatacagctggggaggtagctgagaacttggcactgcgcacacatactaggttgaaagagagttgaggaaaccagaaggccaagtggatctgctggcaaaccctgaacctgtctcctgcgcttgctctacagttctgaagttgaaaatccttttcatgcctagcatctgcttgagttataaaccccaaggcagccatgtcatagactagtgtttactcttgttttgactttgttttaatgcttcctaagacccaagtgcctcctgctgtttcctcctttgtggtagcctctggccatctggacctcaatccccagctttcccactttcagcagtcctttgctctctttgcttctacctcaaatagccccaggagtgggctttagtctccaatatggagcatctcaagcttctcctgggggatggggattgggatgggcagaatctgttttggatctccgggttatttccagtgggtgtaaaagcagagctgggcctttccctctcttatccctgagggtgggtaagaaggactgtatctacacctgttcttccctaccttctcttttgttagggaggcctcattctaagttcctcaagagagtccttggcttaaagctgtagcaagggtgtgctaggtgggggatttggagcaaaaccgtcgagtaggcatgatactggtatggagtgggcctgcaaaatcagacagaaatggcttgagaagccgcagggggagcatgcctgtctctcagtgatagagtatgggagggacctccctagcttggaaaatgagaattgaaggggttatgaacaaataggatgcctagttgaggatgttcccaaagttttgtccaatcttatcattagtagattttataagccacagagacaaaccagaaacggaataatgttactttggatgctttatttttttgttctaggtgtggctttgtacatgcagaagaatgctatatgctgcacattttgcctttaaagtcttacgactttccccattttagtctaatgggaagatacagatgtgcaagtctgcttttttgttttttgttattatttttttttttttgctctgtgttatggacattttcagacatgcacagaagtggagaggatggtccttggaccccatgtgtccatcacctagctgcatcacttatcagctatggtcaacctggtttcatctgtatctctctcttttcacctgtattgtttattgaaaatccaagacactatgccaatgcaaccgtgactactttgggagattggtagtctcttttgatggtgatagtgatggggtgcactatcataatcacatcaggtctgctttttgcttttaatgttaactaatgaagttccagagatgggccttagaaatgtgttttaagaattaacaaggagtctcaaaaagaaatgagagggatgcttcctttcccttgcatctacaaaacaagagagagactgttctgttgtaaaactctttcaaaaattctgatatggtaaggtacttgagacccttcaccagaatgtcaatctttttttctgtgtaacatggaaacttgtgtgaccattagcattgttatcagcttgtactggtctcataactctggttttggaagaataatttggaaattgttgctgtgttctgtgaaaataacctccccaaaataattagtaactggttgttctacttggtaatttgacaccctgttaataacgcaattatttctgtgttcttaaacagtataaatagttgtaagtttgcatgcatgatggaaaaataaaaacctgtatctctgttaaaaaaaaaaaaaaaaaaaagaggaaacaaaaaaaaaannnnaaaaaaacnnaaaagggggccgctttaatatccccctcgagggggccaagactttacggaaccccagttttttgtgaacaaaggggccccataaagggaggcccttttttaacttaggccttggcccccccttttttacaactcccgggcctgggaaaactgctaactctggggaaccttttggaaaggaaccttccctcttgtggggggggccaaaattcgggcacaccccccctccgaaatttttaacagccccaacggcgaatataaaattttttacgggataaacgggggtaaaacaaccgcgaataactctcgctccctaaaaagatttttctctttctggggtcgttttttctacaattgtttaccacccgcgccgggggctcccaacggggggggggagactcca

SEQ ID NO: 6502 - DNA, 3883 bp, Homo sapiens
aaaaaaatgtgaggcccctgcagcagcagcggcgtggtcagagcgagcttcggagaagcagtggtgggttccatgtgatggtggagtaggaggcaggtctccgcggttcatctgtgttgctctaaatgacactgcttcattattttgatggctggagaatatttcctagtgtatgtatatgagagtttcttgatctctttatctgtggatgaacagctactttgaaacatatggtacatttgtgttaaggctagtcaccctgctgtggaatagaaggccagaattgatcagtctcatctgagagtaactttgtacccatcactgattccttctgagactgcctccacttccccagcagcctctggtttcttcatgtggctgcagatggcaggatttcccaaaggtttctggctgaaacatattccgtggtgtatctgtacagcagtttcctcatccctgcagctgtgtttgaacaggtcatttaccatgctgtcctccaggttcaacagtatggctccaaatgatgaaatttcattctgattttctggctgaagactattctctttgtgtatgtccaccacagttactttatcccttcatctgtggatgggcaggatggagtctcgctgtattgcccaggctggagtgcagtggcatgatctcagctcactgcaagctctgcttcctgggttcacgccattctcctgcctcagcctcctgagtagctgggattacaggcacccgccaccacgcccaggaaagaaaaaagaagaaaacaaacctccatacgagaatgggtctaaaggaacttcccaaacctccatgattttgcaggaaacaagataaaggtggtttccacaagaaaaatggcacaatgtttctcagaagacaattacataagaatcagcatacttcaaattcacagcaaataatcagacaattgatgaaaatacttacccaaacactaattgtagactatgccttctgaatatgtttgtcataaacttggagtaaggaatcctcacaggcactggacaattcaaaaaacgtaaagttgtttgttagaatactggtgcttttgggtagaaaccctcatccatatcctggtaaggcttgaagttgcacaggagttttcatttgtcaaaacccagaaaaccataagctttagatttgtgaattttatattgtattatatgtgacctttctttttaaaaaatgagctgtaagcagtctcccagacagtagctcagcctccagaactctctttctgcatagttgaagacccctcttcacacaagatggtagcaacaaatcataggtgcaattgcaccaaattcacagaagatcaattgaaaatcctcatcaataccttcactcaaaaaccttacccaggttatgctaccaaacaaaaacttgctttagcaatcaatgcagaagagtccagaatccagatttggtttcagaatcaaagagctaggcatggattccagaaaacaccagaacctgactttagatttaagccacagccatggacaagattaacctggtgtggagtttcaaaatagagaagccagatggtgttgtaccacctatagcacctttcaattacacacagtcatccatgcatttatgaaaaacccataccctgggattgattccagagaacaacttgctgaagaaattggtgcttcagagtcaagagtccaaatttggttccaaaatcaaagatctagatttcatctccagagaaaaagagaacctgttatgtccttagaatgagaagaccagagaagaccaggggcaaggtttctgagggacttcaaggtacagaagatacacaaagtggcaccagcctcactagcactctcatttctcaagagccagaacatggtgaatacagtcaagttcagtgtatttgataatatcaatttgggccccaaatctctctcacagtcttcctgggagtctattcttcttccaaaagtgcaagctaagccttctgaagatggtaaagaacttggccgggtgtggtggctcatgcctgtaatcccagcactttaggaggctgaggctggaagattgcttgagcctaggagtttgaaaccagtctgagcaacatagtaagaccctgtctctattctaaaaaacaaaataagtaaaaaggactgtaggaggccaagacaggtacaggaggcaccacactaccctgttgacacagcctggatccagagttcagcagaccttgagacaatgaaaacaaacttagtaataatcatttttcaatcattgcagtaattattgatttggacaaaaatcaattgacgtcaaaaccttaaagtgacgtttctctgcctatggagtggtcattcttttattcctttagtttcataataaattttcttttacttaaaaaaacttatagatttgatgaagagtgagatatatacctcatctcaaagaatcttcacacacacacttattaattacaaaaggaaaatcagtaattttgcagtggagacatatggccaactccaccttacccaagtggctgaaagtcactgcaccagtaatggcacaaaccaatgtgagatgattcctgatatgatacactaaaaagggcactgtctcttctgcatgttgcagacaaaaagtgggtaagctgacactgaaactaataattaggcaatgtcaagcaaatacaaattcaagttgacagtctgcaaagtaacatccatgtactcttcaacaatggatcgaccctagctactcaggaggctgaggtggaataattgtttgaggccaggagttccagatcagcctgggcaacatcatgcgaccccatctctaaaaacatctttttaaaaatgagccaggtgtggtagcatgcacccgtagtctcagctactcaggagcctgaggcaggaggatggtttcaacataggagatcgaggctgctgtgagctatgatcgtgctactgcactccagcctgggtgacacagcaagttcctgtttccaaacaacaacaagaaaacaaaacaaaacaaaacaaaaaatagatagaatagtgacaataaaaatggagaaaaagtaggctgactcaggaaatgcttagaaagtacagccatacctcaaagatattgtagatttgattcgagaccaccacaataaagcagatattgctacaaagtgagtcacacaaattgttttgtttccttgtgaatatgaagttatattggctgggtgtgatggctcatgcctataatcccagtactttaggagacggaggcgggagggtcacttgagcccaggaattgtgagatcaacctgggcatatagggagatcctgtctctatttaaaaaaagaagctatgtttacactacactatagtctatttaaagtgtgaaatggcgttatgtccttaattttaaaactcttgatgctggctgggttcggtggctcatacctgtaatcccatcactttgggaggccaagacaggttgattacttgaattcaggagttcaagaccagcctggacaacatggcaaaacacgtctttaaaaaaagaaaagaaaaaagaaaaacagaaagaaaaagaagaaaaactacttgctgcccttacttgaagctcaattatttaaaacaaagacagggggcgaatccctcacatatgaaaaacagatggagcacaccaacatagattcctctaataaagacgaccaccaacctacaacaggcagccaggaagcttgtaatgactacagctgaacgacaaacacagcatcaacaggatgagacacagtttaaggtgtgatcagttacaaaacgaacgaacataattgcttcccaatgcagtacgacaagcgacagccaagacggtaaa

SEQ ID NO: 6503 - DNA, 2035 bp, Homo sapiens
cttgtgcccatgtgattcgtgcctccctgggtggcgttgtcttactggtgatcgatcctcttgtgcctttgctcagctagatgggtcttcgtttttgccctcccgtacccttagtggcattgttgaatggggtgcgcacacttgtgaaaatgagcgagatttacattggatactagtggatgtaagaagtcttcgctcgttggtttttgccaaccgagaatagtttccgtcaagcacgaaatcagtggttccacggacatagtccgagtgaagagacacttaagggtttaatgggtgaataagacgcatagggagcttcttccccccaacgccctggctatttctatattaatgggagaggggatttttaaatgtcatagatttgaagatggtggttgcattgttcgttcatggtttatgttttcgtttcattttggactccaatttcacatcaccaaattcctcatttatacttggggaaaaaacaaggccatatgtaaaaacccttccaatgcctaagtgtctgttctcctgcaactccaaacccagactcgccactttgggtgcacaggtggttaggtcagccaactggttctgcctgtcgccttgccacggaggaggcttctaattagctggaaaagagtatttttcttatacgttgcaaaggattagccaaatcttcttattgaagaaagaagaaaagtgaagagtggttacctatacctagcatagtacaatcagaacctcgtggagaccaccggggacaggcttgcggacgccggctgttcttcccgccacgatctttctgtggtagcggccagcagaagacatggcctgctccccactccctttccccactccttctttattgcacacaggacaccagtcttcaaggaaagggacttttttccagtctgccaatcatattgggaaagtgctagctggtgctcaccttcatggggctgtttccagctcgtccacaagctcatcgattttctttagtagattaccggtgtaattacccagggtggctaggagtcagttagtagacgtcttcattcattggagtaactggtttaggctttccagtttggaaaaggagcagagagctgtccatctggattgatggaagaaaagagaacctcatccatgcctggagaacatctagaaaaccttcagccagcctccagtgctgtcgagagaccaccttcccccgacccggaggcacttccttggggtctttctctagggtctcttctctacaaagcacaacactaatgttcgtttccttagacctcagttcaagtgcccctatttatttcaataagaacgcacatatcccagctgttttttgtttgtcacctctatttagttgttacctgtttctctcttctttcaccccttgtccttttccacccttttaagagttacgctagcagatcttactccacgtatactttttggtttgtgaaggcatcggttaagggcacaaagacagccatggggacatttatgtaaatacgtctctaattgccacactgcagctgaacagtgtgtagtattttcccagtcagctttgccatactgacgtcaatcatttgagagaaattattcagattttatttttgtatctgtggtaacaaaacattaaccaaaagattttctgtccagaagcctccccgaccccccaagctatttgctcacattaacaaattaaagtgcctgaagcataattcattctttacctgtatactaaaaaccctgttgtattgatttttttataataagcctttttacctctgtgtaaaaaatatatatacaagtgtatgatgtacattttagttcttaacttttttttatggtttctaatatgtatgaccaatgtagccattgctttaaaatgtaccgtgtaaatataaacacatcctatcagaaaaaaaaaaaaaaaaaccaagataaagggagaaaaaagggcagagaaaaagggggcgaaagagaaagaggaaaaaaaaaaaagggggggggcaaaaaacgg

SEQ ID NO: 6504 - DNA, 2237 bp, Homo sapiens
  misc_feature (909)..(923): n is a, c, g, or t
  misc_feature (959)..(988): n is a, c, g, or t
  misc_feature (1747)..(1749): n is a, c, g, or t
aaaagccttgttggtcccgcggtacatgcttcctgttcccagagagattcacccttgggctttcctatcagtcttccctaaagttggctgctcctgtgtcctgtcacataaaactgtgaaccgaggtctccgacttacgtcatgtcagtcacagcagggtgaggctccacaagtgtgagttctggcccctgctgctttcctttcaaatgcagtttacagtttattatggtattggacaccccatgctccttactgcattggctttgggtaagaaggagtgaaaattagtgtgcgaacctgaaaacctagaatttctgattgggactgaagaaaacctttgtgctgcagtcagtccccgagccagacgcctgtgactctcttcacatggaaatagatgactatccacagtaaaagcaaaattaaaaagtgacttgtgaaaaatatcctccatgctcctcttaccaagcctgcaacttaaaacctatggtttaaactgtgctttcaattatctggagggggccagcactgatgagcccatccacatcttttcctttccccagaagagatccctaacctattgttttattgacagccttgctgttagaggctctttcccagaagttggacgaagaggctcaggcgttgctgtttcttgtcttccaagtcaagtggttactctggtaatggattgcctctctccgagctttcaccctggtgagactgtccagatctagtctgtaaacccagcttagaagcactgttgtaaaaatgactgaagagcccatcaaggagatcctgggagccccaaaggctcacatggcagcgacgatggagaagagccccaagagtgaagttgtgatcaccacagtccctctggtcagtgagattcagttgatggctgctacaggnnnnnnnnnnnnnnnctgctaccgctgcatcatcccctttgctgtggttgnnnnnnnnnnnnnnnnnnnnnnnnnnnnnntccccgtacgcccaaattcccatgggtctattatctccatctttggcctggttgttctgtcatctggactttttttactagcctccagtgccttgtgctggaaagtgagacaaaggagcaagaaagccaagagacgggagagtcaaacagctctcgtggcaaatcagagaagcttgtttgcttgagactgaatacgaccaaatgggccattgggcctggaaaacgtgctctgactttgtcacccaattcacccagaaccatggtgggagagaacagacttggcgttggagcagactggaagaatgggggtgggagggtggaggggcttctcctttgtgaggaatgactcatgtcttctttaacgacaaacttaaccctaagggctacttctgagactgaaaaatcagctttctatttacatgaaacactttgggggtcatgggagtgcacagcattagacagtatttggttcaccctgtaaagtagccaagaaaagatgagaaaaatcaagataggcctggcacactagacatttgcctccaaaagaaataacctacagtcttaagatgtatcataaaaatgttctgccaaggatctaaattaccttgggtttcgcatatgtctatgaaattctgtgataatttttttcaatacattgattcactggcgtctgttttcattttatacttttaataactcatcactggtggtactttatcttgaaaagtaatattttttatattttaccattggacagtnnnacccagttgtaatgatgtatcagacgtaaagaaaaacccattaaagttatagctaatagatgctgttgggggttaaattaatagtaaaataatccaatatagcacttttgatgatttttatataaaagtcaactgtacatttcattcagaataataaatacttattgctgctaaaacttcttaaatggttgtttctgctatagttatttctattgcagttccaaattgccatcttcccttgtctcatttgcaagttctcaattgtatttctctcaaatggacaggttccttctttactggaggatttttgtttttatcatattggtttttcattacttctgaatagtcttaattacgtttactaaattctaaaggatttctgtgctattataattaggaaatcaacgtctttggtcaggaactttataatgtgctattaaatgtatattacatttttgtggaaaaaaaaaaaaaaaaaaaaaaaaaaa

SEQ ID NO: 6505 - DNA, 6595 bp, Homo sapiens
  misc_feature (2)..(6): n is a, c, g, or t
  misc_feature (6138)..(6138): n is a, c, g, or t
annnnntgcctgccagctagccggagccgcgggtgagcgcggcgagcggcgaccctggtgaggagcgcggcgcgggaggcacgttccttagctccgccgcggccgtcctccgcggctcgaggactccgcttccttccctcccctcccctgcgctccggcctggggtctcggcgcggggagcggagggaagggacgaaggaggagtaggtgaaagcggggtgaggggcggaagggtcccggcgcggggtgaggcgagggctgcctcttgttctcccgccgctgccgccgtctcctggtcgggtgccgcggccagaggcgcgcggggctgccgaggcacccgcactatgcaggcagactgccggccgccgcgatggcgagccgggcggtggtgagagccaggcgctgcccgcagtgtccccaagtccgggccgcggccgccgcccccgcctgggccgcgctccccctctcccgctccctccctccctgctccaactcctcctccttctccatgcctctgttcctcctgctcttacttgtcctgctcctgctgctcgaggacgctggagcccagcaaggtgatggatgtggacacactgtactaggccctgagagtggaacccttacatccataaactacccacagacctatcccaacagcactgtttgtgaatgggagatccgtgtaaagatgggagagagagttcgcatcaaatttggtgactttgacattgaagattctgattcttgtcactttaattacttgagaatttataatggaattggagtcagcagaactgaaataggcaaatactgtggtctggggttgcaaatgaaccattcaattgaatcaaaaggcaatgaaatcacattgctgttcatgagtggaatccatgtttctggacgcggatttttggcctcatactctgttatagataaacaagatctaattacttgtttggacactgcatccaattttttggaacctgagttcagtaagtactgcccagctggttgtctgcttccttttgctgagatatctggaacaattcctcatggatatagagattcctcgccattgtgcatggctggtgtgcatgcaggagtagtgtcaaacacgttgggcggccaaatcagtgttgtaattagtaaaggtatcccctattatgaaagttctttggctaacaacgtcacatctgtggtgggacacttatctacaagtctttttacatttaagacaagtggatgttatggaacactggggatggagtctggtgtgatcgcggatcctcaaataacagcatcatctgtgctggagtggactgaccacacagggcaagagaacagttggaaacccaaaaaagccaggctgaaaaaacctggaccgccttgggctgcttttgccactgatgaataccagtggttacaaatagatttgaataaggaaaagaaaataacaggcattataaccactggatccaccatggtggagcacaattactatgtgtctgcctacagaatcctgtacagtgatgatgggcagaaatggactgtgtacagagagcctggtgtggagcaagataagatatttcaaggaaacaaagattatcaccaggatgtgcgtaataactttttgccaccaattattgcacgttttattagagtgaatcctacccaatggcagcagaaaattgccatgaaaatggagctgctcggatgtcagtttattcctaaaggtcgtcctccaaaacttactcaacctccacctcctcggaacagcaatgacctcaaaaacactacagcccctccaaaaatagccaaaggtcgtgccccaaaatttacgcaaccactacaacctcgcagtagcaatgaatttcctgcacagacagaacaaacaactgccagtcctgatatcagaaatactaccgtaactccaaatgtaaccaaagatgtagcgctggctgcagttcttgtccctgtgctggtcatggtcctcactactctcattctcatattagtgtgtgcttggcactggagaaacagaaagaaaaaaactgaaggcacctatgacttaccttactgggaccgggcaggttggtggaaaggaatgaagcagtttcttcctgcaaaagcagtggaccatgaggaaaccccagttcgctatagcagcagcgaagttaatcacctgagtccaagagaagtcaccacagtgctgcaggctgactctgcagagtatgctcagccactggtaggaggaattgttggtacacttcatcaaagatctacctttaaaccagaagaaggaaaagaagcaggctatgcagacctagatccttacaactcaccagggcaggaagtttatcatgcctatgctgaaccactcccaattacggggcctgagtatgcaaccccaatcatcatggacatgtcagggcaccccacaacttcagttggtcagccctccacatccactttcaaggctacggggaaccaacctcccccactagtgggaacttacaatacacttctctccaggactgacagctgctcctcagcccaggcccagtatgataccccgaaagctgggaagccaggtctacctgccccagacgaattggtgtaccaggtgccacagagcacacaagaagtatcaggagcaggaagggatggggaatgtgatgtttttaaagaaatcctttgaagatgatgctgctttttacaaagcatcgttttaaagcacatggccttttttttttaattattagtggtagtaatatatagaatgtattacataactgtcactgaagtggttggggaaaatgtggtgactgaggtacaggaaactactaatcttgccatcttgctttaaggtgttatggtggcacagttactgctcgcctgttaaatttcaaatgtcctgtttgatactactgtagaacactatttttaatacagaaaaagctccctataatgcacttcagagaaattaaaaatcacagagtatttattaccaatgctgcaggtacattaatgaactcgagatggctctgtaagcctgactggcaataacgcacggtactgttcttgaaatacctaatggcttgaaattctagtctgtttgtgaaagatgggtactatcatgatttcctcttctattcctatattcttttctggattttttttaataattagtgatataagcattgtttttattgcagccatatccacttatccatcttaagatctgtagctgggattttctgacttgtaatgagcagggggattgctttttcactttgtgacactctttagagctttaatgcttcacagtatatggcctggtctcatccttgcgtgttccacttgaggccctttggtgtcttgccccattcttgtgtttataaaatgtttgagtatttctgatgagtgatgcttgccttagtctcatgaattcagatcccttcatgtcctttaagtatgctcctcaatgtgtaaacaggaacaactttatgatttgaaagctttaaaggagattcttctcccacccccaactttatttgcaatgggatttttcctaggagagttatgaaaagttgaaggcttctaagggaatactgtaaacatgacccacttatatttatcacagtgaaaggcaaaattattcactcagaagtaatataaattacctctttaaaaagtaaccagaatttgtcctttttggttttatacattcacaaacatatacatttttcttgagtctcaaggtattttatatttttagtcagaaaaaataatttttcatttcagttttccataaactgttacacaaaatataaacctaacgtgtatttttcaggactgcgtgatcgtgcactttgtgtggtaagaggtttgagtagtcctatatgtcacctagggaacagacattatagcttcctagcaaatgaatattcatgccttgtttttgatacctcctggcagcttccatgtcaccacttgttcatacctgcccagagctagttttagacatggcaaaatagaaatcatctgtaatttattagctaacaatgtaaaaccatcttttaaagccttcagactgtcaagacgacatgagcagctcaccatatgataaaaatacataaatttgacattccctcttccataaacctttgtttgtagatttaatgttgaacagtacttttccataaagttctagtcacttctgttggcctgagccaccagattatgatgttgccagaattcactcaatttgaataaagatgaacagtatttgttttcttgtttccatgaattatatcagtattctaaaacatcgcttcagaaagagaactgtttatttctgcaggcttcctgtccttttgtggtatggttttttggccttattttcactggcttttccttctccaaactttgaggcgtgatttcattcattgaagaatcaatacatattttgtttcaaaatgtttgaaacaaaagacatagatggtagacttttattaaaacatatatggatgtggaaagcacatatattaatgcagtcatcccttttcaggtgggaagagagcaaaccagttgattttttaattcatccttagtacacagagaatatacttttcctcaagtaatatacctgtttgaagctttaagagagatgtttttggtaactatttcattttcccaaagaagtttgctattcttgtgttaattgtgtatacctgattgttttttcctggaggtttttgttgttgttgtttagttttgggtttttttttttttaagaggggcaagtgttttctgaaatgatgcatattttaagactcgattcatattgccactgtgctatccttgaactaccaataatttttataaaatatctagtttttactacttttatataaactttactttccagatgaagagctgagcctgattcaaatggtttttctgctttatacttctttttagttcattggtttttatagtagaggttttctatttttttttttttttttttactacatttatatgtctgatacatatacggctttggagacaatcaagtaacaactgaaaatgtgaaagtaaccatatctgacaaaattcccttgaatttttatcctttgcttgcaacatttaagactcaaagtcactggtatattggattaagttttttcctgttaatgcaattatagaaatacatcggagacacaacaaatgtggccattacaggtttcataaaattacactgacttggctgttacttgatcttaggaaacagcacagtttaagatattgtgaattctgacttatactttattaaatgctgtaaatctaaatagatcctgttggatgtgatgggtctagtccagtttatttaagttcatgtttcactgtttgcactttgcattgaacaatgggtttattcgctgatgtaaacggttcgagtgaagaattaatgcagtaagtatgacaaacacatacacacttgcctctccccatctccagaagaggggagcagagtccgagcttatctaaatatgaatgtggccacaaagctgtggaaggtgacaaagcttaaacacctttgccctggctctgcattgtcacctagagagcaagaggtctatagaaacatcatgtcacatgaaacgattctctgctttttggttctgaacttgaagtccctaaactgcaaaatctaagagttgggtggttattaaaatgcttttaaagtcaactgtggcaccaattctaatgtaatccaacttgtgactgtttttttttgttttgttttgtttttgtgtgtgtgtgtgtggcactgggaaaagtggaaacaaacatgtattgaaatacatattggaaataaaaatggtttgagcgtcagtgatattctcccagaatgtacttatcttacctcggcatgtactgtagtcactcagtatttgtatatgttgctagaatttagattgtaaaatagtgaaattttaatgtgttcatttgtttttaatgtatatatgtcttgctcagattatttggtttaaataaaacaaccttgaggtttgtagcttttccttatactataaaaaaaaaaaaaaaaaaaaaatacacctaaaacacgcnaataccccgctccctacttgatatcttcacaccgcgaggcactgggggtggcaaaaggcgtcgctggggccccaggctgttccccgtgggcggccccgcgccggtccacctctcgctggagccccgctgcaaacatttatttcgccccgcgcgtctccccgactttgtttgcgccccaacagacggggcaatgggggaacacctctttccacgggccgccgctacttctgtccccccactgcacccgcctccggcaacaccttaaaatcatcggcgccgtccttttggggagagagctcactgtccaggcctcccgccgggcgcaaagccataccccgcagctacagtggctaaggccacccacacccacaagaactgcttcaaggctgtcgaagagcccaatgccgatcccaatatcttccatccacgcacaccatatcttcgttacattcccaat

SEQ ID NO: 6506 - DNA, 2136 bp, Homo sapiens
tttggaggagaaaggatcacaatgaactcctgaaacatacaacgtgctagtttctttcatgcctctgagctcttaagtcttcagagagagaggcaggcaggtataatgcagagaacacaggctttggagttagaacctgagttggaacctcactgtaatcagctacctgtgtggttccctgaagttgcatgtctccaactgtaaaatgaggcagaatcatgcctgccttgaagggctgctgtgaggaatgactaaaacaacatatttggtattgaatactcatcatttttagtattctggaaataagagaacaaattttattataaggcaagggggctgaagtgtgggactcagaggatgcagatggaggaggacagtcgtgccatggggagcatcctgtgtgcatcagatgcagtttaattgctgagagtccacaataccaaggaagagggcgcccctcaggaagcttatggtagagtggagaatacaggaaacaagtaacaaactaaatcacagaagaagaaacattcaagtcactatcaaaggaataagaaacagcacattcagtaggagggttcagtcaagagcagagggctttgccaggcgtggtggtgcacgcatgtaatcccagctactcgggaggctgaggcaggagaatggcgtgaacccgggaggcggagcttgcagtgagctcaaatcgtgccactgcactccagcctgggtgacagagcaagactctgtctctaaaaaaaagtacttctcattcaaggaaggcttgtagaggaaaatgaccacagcttgcatcttttaggcagtcattccgaaaatccctcctgatgacaggttccccactcattccccccttcctccacaggcttccacctctacctcggatgggatgctgaccttggacttgacccaagaggaagacccttcccctgaggaaccaacctcttgtgctgagagctttcgggttgacctggacaagtctgtggcccagctggcagggagccggcggagagcggactcagaccgcatccagccctccgcagaccgggcaagcagtctctcccgaccttgggaaaaaacagacaaaggggccacctacaccccccaggcacccaagaagttgacgcccacagagaaaggccgctgcgcctccctggaggagatcctatctcagcgggatgctgcctctgcccgcaccctccagctgcgggctgaggaacccccaacccctgccctccccaacccggggcagctgtcccggatccaggacctggtagcaaggaaactggaggagactcaggagcttctggcagaggttcagggactgggagatgggaagcgaaaggccaaggacccccctcggtctccgccggattctgagtcagagcagctgctgctggagacggaacggctgctgggagaggcatcatcgaattggagccaggcaaagagggtgctgcaggaggtcagggagctgagagacctgtacagacagatggacctgcagaccccggactcccacctcagacagaccaccccgcacagtcagtaccggaagagcctgatgtgagggcagggtggggtctggaacttgtcgggttggacagactcttatctccgtgttgctggataaagcttttttatttacctcaatcaaaaaaagaaaacaaaaatgaactcattgctcttgctgatgcctgaccccactacaacccttattgccccacctactttccatatgcccctcgtatgcccctcaggtttgaggaagtgaccccgcagcagtagcaggaagtttttacccagccagagagagagaaggcacggtaaagacacagtctgaccactccacacaccgcccgcccccaagacggcacagggagtccactgctgctcccaaggatacagtgggcttctaagcttagagcgggagggggatgaggatgttttctgttatgtcccaccccaggccttcagtttgagggtgaagtttcagctgcccaactctagttgtagggatgtggaggccagtgtcacctgtccgtgcacatggaagtgaaatttatcccagccctgaggaggatttgtggaattaaaatctccccagccagaaaaaaaaaaaaaaaa

SEQ ID NO: 6507 - DNA, 962 bp, Homo sapiens
tgagtggtaccttcgaggtgtctgggaggagttacggaggcagggttgtggttgctggctgttacaggacaaccggaggcgattgaccgttatctgcggtttggagccgttagcgggagaggcagagatattcagaggtcttttaggatgcgctaaagggtcgtgagggctctcttaaaattttcttcacaagcggttatccagtcgtgccccgcggccctgctgctggccccggggatctgagtcgtaccctcttgtttttctctgagtcagtcttaaggtgaaatgaagtgtggcccagtggctcctcactgtcgcttctctagttttctgcctccttttagaaaattgaattgaaaagacaggatgaagtggacacagcatgtgaagacaattctttcaagaagtttggctgtcaaggaaaacagagaatgtgctaaagaacatacagacacagagcagacaggccacctttgcaaccacatggaggtttgtctgatattgaagctaaagaagctaagctggaagacagagagaccaagtcctgatgacattgtttgaacccagagatccagacatgcctgaaaactagttttaccactggacttatccgttgaatgagccaataaactctcttttatacttaaaaaaaaaaaaaaaaaaagagacaaacgataaaaaaacaaaccttgtgttgcgcccgacttgggccccctaagaaaggtttttaaaacccatccggttggcgcacgcggggcccccacagagggacacgtcgacgcggtgcacaaaaggggtgcacagaggaaaccccgggcacacaaaaagggggcgggggattctcccccagaataaaaaagcgccggcgggaaaacgaaggggtttggaacaaacactaagagaaggctaagcggacaaatacggagactaaaacaaagaggccccaagcagagccgaatcat

SEQ ID NO: 6508 - DNA, 2153 bp, Homo sapiens
ttctttttcggcaaccccggccgaacggccacccagaggctgtgctgagctggcgcagcggcagcagcatgagccggaccctcgcatcggccgtgctcctgtcgagtcccgactactacgagaggctgggccaactccagcacgggctgcgggacagtgaaaagaagagattggacctggaaaagaaactttatgaatataatcagtctgatacatgcagagttaagctgaaatatgtaaaactaaagaattatctgaaggaaatatgtgaatctgaaaagaaggctcatactcgaaaccaagaatatttaaagcgatttgagcgtgtccaagctcatgtcgtacacttcaccacaaatacagagaagcttcaaaaactgaagctcgaatatgagactcaaattaagaagatgctatgctcaaaagatagcctgggactaaaagaggaactgacagatgaagacagagaaaaggttgcagtgcacgaggggattaactcaggaacagccatgtcaagaggattgtatcaaccagcaacaatctttatgggccgccaaatgtcagccatcttaagcatgagagatttcagtacagagcacaaatctccccagcccacaaagaacttttcaattcctgacccacattcacaccgacagacagcccagagcagtaatgtgacagacagctgtgtagtacaaactagtaatgacacacagtgcttaaataagtctgacaacatagatggaaaggcatctcttcagattggtgagaaaatgccagtcacagccagtgtattgtctgaggaggaacaaactcattgcttggagataggaagtaacacacgtcatggcaagagtaatttatctgaaggcaaaaagtctgctgaactcaattccccgttacgggaaagattaagtccagagaacagaaccactgatttaaagtgtgacagttccagcggatcagagggagaaatactgacacgggaacatattgaagttgaggaaaaaagagccagcccgccagtctctccgataccagtttcagaatactgtgaatctgaaaataagtggtctcaagagaagcattctccttgggaaggtgtttcagatcatcttgctcacagggaaccaaagtcacaaaagcccttcagaaaaatgcaggaagaggaggaggaaagttggagcaccagcagtgaccttaccatttcaataagtgaagatgatctgattttagagagcccagaaccacagccaaatccaggtggcaagatggagggagaagatggaatagaggccttaaaattaatccatgctgagcaagaaagagttgccctatccactgaaaaaaattgtattttgcaaaccctaagctctcctgattcagaaaaggaatcctccactaacgcaccaacaagagaacctggacaaacaccagactcagacgtaccgagggcacaggtgggtcagcatgttgccaccttgaaagaacatgataattctgtcaaagaagaggcaacagcattattgagaaaagcccttacagaagagtgtggccgtaggtcagctattcacagtagtgaatcatcttgcagcttgccatctattctgaatgacaatagtggaataaaggaagccaaacctgctgtatggctcaacagtgttcctacaagggaacaagaagtttcaagtggctgtggagacaagagcaagaaagaaaatgtggctgcagatatcccaatcacagaaacagaagcctatcagttgctgaagaaggccacccttcaggataatacaaatcaaactgaaaacaggtttcaaaagacagatgcttctgtgtcacacttgtcaggtttgaatattggcagcggtgcattcgagacaaagacagctaacaaaattgcttcggaagctagtttttcatctagtgaaggaagtcctttgtcaaggcatgaaaacaaaaagaaacccgtgatcaatttaaaatctaatgccctctgggatgagtctgatgacagtaactcagaaattgaggctgctttacgccccagaaaccataacaccgatgattctgatgatttttatgactaacgtgctgtgacattggtttcaaataaagtctttaaacaaactaaaaaaaaaaaaaaaaaaaaa

SEQ ID NO: 6509 - DNA, 6771 bp, Homo sapiens
  misc_feature (1407)..(1428): n is a, c, g, or t
  misc_feature (3730)..(3750): n is a, c, g, or t
aggtgcttccttgactctacactttgagcgagccccgttcatgagccaggagcgcactgtgtggctgccgtggaacagcttttacgccatggacaccctggtgatgaagaccgaggagaactccatccccagctgtgacctcagtggctttgtccggcctgatccaatcatcatctcctccccactgtccaccttctttagtgctgcccctgggcagaatcccatcgtgcctgagacccaggttcttcatgaagaaatcgagctccctggttccaatgtgaaacttcgctatctgagctctagaactgcagggtacaagtcactgctgaagatcaccatgacccagtccacagtgcccctgaacctcattagggttcacctgatggtggctgtcgaggggcatctcttccagaagtcattccaggcttctcccaacctggcctacaccttcatctgggacaagacagatgcgtatggccaaagggtgtatggactctcagatgctgttgtgtctgtcgggtttgaatatgagacctgtcccagtctaattctctgggagaaaaggacagccctccttcagggattcgagctggacccctccaacctcggtggctggtccctagacaaacaccacatcctcaatgttaaaagtggaatcctacacaaaggcactggggaaaaccagttcctgacccagcagcctgccatcatcaccagcatcatgggcaatggtcgccgccggagcatttcctgtcccagctgcaacggccttgctgaaggcaacaagctgctggccccagtggctctggctgttggaatcgatgggagcctctatgtgggtgacttcaattacatccgacgcatctttccctctcgaaatgtgaccagcatcttggagttacgaaataaagagtttaaacatagcaacaacccagcacacaagtactacttggcagtggaccccgtgtccggctcgctctacgtgtccgacaccaacagcaggagaatctaccgcgtcaagtctctgagtggaaccaaagacctggctgggaattcggaagttgtggcagggacgggagagcagtgtctaccctttgatgaagcccgctgcggggatggagggaaggccatagatgcaaccctgatgagcccgagaggtattgcagtagacaagaatgggctcatgtactttgtcgatgccaccatgatccggaaggttgaccagaatggaatcatctccaccctgctgggctccaatgacctcactgccgtccggccgctgagctgtgattccagcatggatgtagcccaggttcgtctggagtggccaacagaccttgctgtcaatcccatggataactccttgtatgttctagagaacaatgtcatccttcgaatcaccgagannnnnnnnnnnnnnnnnnnnnngggacgccccatgcactgccaagttcctggcattgactactcactcagcaaactagccattcactctgccctggagtcagccagtgccattgccatttctcacactggggtcctctacatcactgagacagatgagaagaagattaaccgtctacgccaggtaacaaccaacggggagatctgccttttagctggggcagcctcggactgcgactgcaaaaacgatgtcaattgcaactgctattcaggagatgatgcctacgcgactgatgccatcttgaattccccatcatccttagctgtagctccagatggtaccatttacattgcagaccttggaaatattcggatcagggcggtcagcaagaacaagcctgttcttaatgccttcaaccagtatgaggctgcatcccccggagagcaggagttatatgttttcaacgctgatggcatccaccaatacactgtgagcctggtgacaggggagtacttgtacaatttcacatatagtactgacaatgatgtcactgaattgattgacaataatgggaattccctgaagatccgtcgggacagcagtggcatgccccgtcacctgctcatgcctgacaaccagatcatcaccctcaccgtgggcaccaatggaggcctcaaagtcgtgtccacacagaacctggagcttggtctcatgacctatgatggcaacactgggctcctggccaccaagagcgatgaaacaggatggacgactttctatgactatgaccacgaaggccgcctgaccaacgtgacgcgccccacgggggtggtaaccagtctgcaccgggaaatggagaaatctattaccattgacattgagaactccaaccgtgatgatgacgtcactgtcatcaccaacctctcttcagtagaggcctcctacacagtggtacaagatcaagttcggaacagctaccagctctgtaataatggtaccctgagggtgatgtatgctaatgggatgggtatcagcttccacagcgagccccatgtcctagcgggcaccatcacccccaccattggacgctgcaacatctccctgcctatggagaatggcttaaactccattgagtggcgcctaagaaaggaacagattaaaggcaaagtcaccatctttggcaggaagctccgggtccatggaagaaatctcttgtccattgactatgatcgaaatattcggactgaaaagatctatgatgaccaccggaagttcaccctgaggatcatttatgaccaggtgggccgccccttcctctggctgcccagcagcgggctggcagctgtcaacgtgtcatacttcttcaatgggcgcctggctgggcttcagcgtggggccatgagcgagaggacagacatcgacaagcaaggccgcatcgtgtcccgcatgttcgctgacgggaaagtgtggagctactcctaccttgacaagtccatggtcctcctgcttcagagccaacgtcagtatatatttgagtatgactcctctgaccgcctccttgccgtcaccatgcccagcgtggcccggcacagcatgtccacacacacctccatcggctacatccgtaatatttacaacccgcctgaaagcaatgcttcggtcatctttgactacagtgatgacggccgcatcctgaagacctcctttttgggcaccggacgccaggtgttctacaagtatgggaaactctccaagttatcagagattgtctacgacagtaccgccgtcaccttcgggtatgacgagaccactggtgtcttgaagatggtcaacctccaaagtgggggcttctcctgcaccatcaggtaccggaagattggccccctggtggacaagcagatctacaggttctccgaggaaggcatggtcaatgccaggtttgactacacctatcatgacaacagcttccgcatcgcaagcatcaagcccgtcataagtgagactcccctccccgttgacctctaccgctatgatgagatttctggcaaggtggaacactttggtaagtttggagtcatctattatgacatcaaccagatcatcaccactgccgtgatgaccctcagcaaacacttcgacacccatgggcggatcaaggaggtccagtatgagatgttccggtccctcatgtactggatgacggtgcaatatgacagcatgggcagggtgatcaagagggagctaaaactggggccctatgccaataccacgaagtacacctatgactacgatggggacgggcagctccagagcgtggccgtcaannnnnnnnnnnnnnnnnnnnnacagctatgaccttaatgggaatctccacttactgaacccaggcaacagtgtgcgcctcatgcccttgcgctatgacctccgggatcggataaccagactcggggatgtgcagtacaaaattgacgacgatggctatctgtgccagagagggtctgacatcttcgaatacaattccaagggcctcctaacaagagcctacaacaaggccagcgggtggagtgtccagtaccgctatgatggcgtaggacggcgggcttcctacaagaccaacctgggccaccacctgcagtacttctactctgacctccacaacccgacgcgcatcacccatgtctacaatcactccaactcggagattacctcactgtactacgacctccagggccacctctttgccatggagagcagcagtggggaggagtactatgttgcctctgataacacagggactcctctggctgtgttcagcatcaacggcctcatgatcaaacagctgcagtacacggcctatggggagatttattatgactccaaccccgacttccagatggtcattggcttccatgggggactctatgaccccctgaccaagctggtccacttcactcagcgtgattatgatgtgctggcaggacgatggacctccccagactataccatgtggaaaaacgtgggcaaggagccggccccctttaacctgtatatgttcaagagcaacaatcctctcagcagtgagctagatttgaagaactacgtgacagatgtgaaaagctggcttgtgatgtttggatttcagcttagcaacatcattcctggcttcccgagagccaaaatgtatttcgtgcctcctccctatgaattgtcagagagtcaagcaagtgagaatggacagctcattacaggtgtccaacagacaacagagagacataaccaggccttcatggctctggaaggacaggtcattactaaaaagctccacgccagcatccgagagaaagcaggtcactggtttgccaccaccacgcccatcattggcaaaggcatcatgtttgccatcaaagaagggcgggtgaccacgggcgtgtccagcatcgccagcgaagatagccgcaaggtggcatctgtgctgaacaacgcctactacctggacaagatgcactacagcatcgagggcaaggacacccactactttgtgaagattggctcagccgatggcgacctggtcacactaggcaccaccatcggccgcaaggtgctagagagcggggtgaacgtgaccgtgtcccagcccacgctgctggtcaacggcaggactcgaaggttcacgaacattgagttccagtactccacgctgctgctcagcatccgctatggcctcacccccgacaccctggacgaagagaaggcccgcgtcctggaccaggcgagacagagggccctgggcacggcctgggccaaggagcagcagaaagccagggacgggagagaggggagccgcctgtggactgagggcgagaagcagcagcttctgagcaccgggcgcgtgcaagggtacgagggatattacgtgcttcccgtggagcaatacccagagcttgcagacagtagcagcaacatccagtttttaagacagaatgagatgggaaagaggtaacaaaataatctgctgccattccttgtctgaatggctcagcaggagtaactgttatctcctctcctaaggagatgaagacctaacaggggcactgcggctgggctgctttaggagaccaagtggcaagaaagctcacattttttgagttcaaatgctactgtccaagcgagaagtccctcatcctgaagtagactaaagcccggctgaaaattccgaggaaaacaaaacaaacgaatgaatgaacagacacacacaatgttccaagttcccctaaaatatgacccacttgttctgggtctacgcagaaaagagacgcaaagtgtccaaaaggaacaaaagaacaaaaacgaataagcaaagaagaaaacaaacaaaaacaaaacaaaacaaacacacggaccgataaacaaagaagcgaagataagaaagaaggcctcatatccaattacctcactcattcacatgtgagcgacacgcagacatccgcgagggccagcgtcaccagaccagctgcgggacaaaccactcagactgcttgtaggacaaatacttctgacattttcgtttaagcaaatacaggtgcatttaaaacacgactttgggggtgatttgtgtgtagcgcctggggaggggggataaaagaggaggagtgagcactggaaatactttttaaagaaaaaaaaacatgagggaataaaagaaattcctatcaaaaatcaaagtgaaataataccatccagcacttaactctcaggtcccaactaagtctggcctgagctaatttatttgagcgcagagtgtaaaatttaattcaaaatggtggctataatcactacagataaatttcatactcttttgtctttggagattccattgtggacagtaatacgcagttacagggtgtagtctgtttagattccgtagttcgtgggtatcagtttcggtagaggtgcagcatcgtgacacttttgctaacaggtaccacttctgatcaccctgtacatacatgagccgaaaggcacaatcactgtttcagatttaaaattattagtgtgtttgtttggtccagaaactgagacaatcacatgacagtcaccacgaggagagaaaatttaaaaaataaaaataaaaacaaaaaaaattttaaaaattaaaaaaacaaaaataaagtctaataagaactttggtacaggaacttttttgtaatatacatgtatgaattgttcatcgagtttttatattaattttaatttgctgctaagcaaagactagggacaggcaaagataatttatggcaaagtgtttaaattgtttatacataaataaagtctctaaaactcctgtggaaaaaaaaaaaaaaaaaaag

SEQ ID NO: 6510 - DNA, 3249 bp, Homo sapiens
gctttttcttactaatgtggtagatctacacgaacattctaggctgttctgctcagagcgaggaaccactgctcctcaatggggagggaacataccacccagccaggcttagcgttgggttttatcctttaataaaagttttataatgattcctgttcaccttaaagtgtgattatggagatgattggctccatatttcaccacgtcattccttcaactcaccagacacctttctttagttgaaataaaccagcatgacctggagatcatggtgactgtaagctaagtctgttttcatgccagatttcagccccacccagagtgtgctctagatgttgttgatttgaatggttttcccagttcccactccacatggggaagttgaatgaatgcacacctgctgctcacttcttgtgaggctgccttttgtgatcaaataacaggaagttctgctttagaggagggcacgatgaccatgtggcagtctgcaagtggaattttgggatggcagcccgaggaacatccagagttactgtgtgacttggtcctgccattgttagctttgaaatcacaggcattgggctctgttttgacaccattcattggactgcgggacagtcattctttacgttctctcttgagctggtgagagaggaggaagagggaagtcaagagcaacctccaaggcctatgtcagcctcttctccttgggtcttggggtgggttagaactgggttccagtctggccagatgggttgctggctgcactgagggtgattcttctcagaagatgggctgcctgtggtcaggacagggcataccagtctggactccaccttcccagacacctactttaaggacctgtggaaactgggtgatccaattatagggctggggcaaccctgctttggccaccctcatttacaaacttaggttgggagcttgggtttcctgtctcacttccaaaagccttcaagatggcagcagatggacacaccctctcatttcttgtgtcttgtctgtcagatggcaggaggcctgtatcagtaaatttgaggaaaatgttctctcctgggccagcctcacagcttgcgttgggtgtgttggaattgttctcttcggccttgttctgccttgtgatcttttcaattcagtgaataaaccaggtatccattttttcaccaacccaccctgtagattgtcagctttttgtttgagagatgcctggtctcacagttacatgtatcagagtgtgtgtaagttgtctgtgttagaaaggttggggtgggggctttgttgcaggggattagactgttctttcttcatcataatttgagatacatcctgagtatgactgtctaaccctttctgtgtggcagaaaaatatgttttccaggtagtttttactactacagagagtctgtaaataagtgctttaaaaaaataacaaaccaataagatatttgtctcctatataaacattctgtgtatttagcacttgaaaatcaacaaatccagaatttaaaaaaatgccacagacttttcaaagcccaactgtacttttttgagaatttgtccgtacctactaatatgccttattcttcttcacctagtgttttaaaagtcctgggtagaaagagttttagaaatgtaatcagttgttcagcttcaataatatagagatctaacatagtcagtcctcaggccccctaaagaaacaagcaagaaagtgagggccatcactagggttggctttggggaggggaaaactaaggactgcttttgccaaatgatatttttgataatgtaaggaaacacagggaccacaaaaccttttttttttttaagtgtgaaagattagtgccttttggcatacttttgattttagaggatatagtatcggcattgacaaatcacgtagaaacaaagaatgctatagatgacaacagtattaaatgttactcctgattctgcagaacagcttttgaagatactggggggtatcttcaagcctcagagcagcttgtttcagatagaaattctctatgggttgaaatgccaaaaacagaaaacatgatgttgactcatgtaatttagtccattttagcagagcctttagtgttaacaccagtggcgaggagcattgcatattctctgtcagcagcagcactcccacaccaggtggttctgggctctctgtaggctggtcctagtaggtgacacccagcaacacccctgttggacaggattgattgttcgcagtcttagaccaacacttcagtcagaaatgttactgggaggaggaaaggaaaatcactttttttcctccatgtggaaatgaggagagaggaaagtggattgcaaaccaaaatgtgagtcagtgtgatgaagcagtggctctgtcatctcggcctttatccaataacaaaccagcatctcttaaaggcgcttttggcctagacacccctgaagtttggatgaagtctggtggattccctgtccgttgtatttctgtgtgcctgttcccttcattgctgtgagttgggagtgcattgagagatgatgtccatctgatatattcctgtgaaataaactgccagcaaactttctaacttgtattttaactgttaaagaagagattaaaaacttcggctttggacatgtccacattatggactgtcatcttatttttaaaagtcattctttacgtttaaaattttaaaataaaaaccttctgaggtattgatgtagtccaccgtgtaaatgttaccttctctccatgctgccattatgccaaaacaaaagctgtgataaaaaaagtgcttgagagagtgtgttgataagaaagtgatttatttacagatggaagtctttgtttcatgaagctaccaaactttaaaaagaatgtcacccttttttttgtttgttatggaaaccagagattgtaaaatggaaaaagaatcgttttttttgttgactttttgatgctggcacgaggtttttgtccacttttttcatatatctgtgtataaaaaaattgttgtttactatggaattagtattacattttgaggtaaacaaaagaatttgtattgcttgataaatattagcttgtaaatttaaagtttctttacttcaattaacttaaaggaccaataaacccataaaagatgctttctttaaaaaaaaaaaaaaaaaaaaaaaaaaaaaaaaaaaaaaaaaaaaaaaaaaaaaaaaaaaaaaaaaaaa

SEQ ID NO: 6511 - DNA, 3626 bp, Homo sapiens
  misc_feature (56)..(78): n is a, c, g, or t
gcaccaggcgcccagtggagccgtttgggagaattgcctgcgccacgcagcggggnnnnnnnnnnnnnnnnnnnnnnnttaggctttcgaacttgagtttgactgatgtcttctgtgtggtgtccgctaaatcccacagcatataggatcagtcgcattggttataaggtttgcttctggctgggtgcggtggctcatgcctgtaatccaacattgggaggccgtgggggacagtagaagcctggaggaggagcttgtttgagccggcgactgtgggtactgccagccatcgggcccaggtctctggggttgtcttaccgcagtgagtaccacgcggtactacagagaccggctgcccgtgtgcccggcaggtggagccgcccgcatcagcggcctcggggaatggaagcggagaacgcgggcagctattcccttcagcaagctcaagctttttatacgtttccatttcaacaactgatggctgaagctcctaatatggcagttgtgaatgaacagcaaatgccagaagaagttccagccccagctcctgctcaggaaccagtgcaagaggctccaaaaggaagaaaaagaaaacccagaacaacagaaccaaaacaaccagtggaacccaaaaaacctgttgagtcaaaaaaatctggcaagtctgcaaaatcaaaagaaaaacaagaaaaaattacagacacatttaaagtaaaaagaaaagtagaccgttttaatggtgtttcagaagctgaacttctgaccaagactctccccgatattttgaccttcaatctggacattgtcattattggcataaacccgggactaatggctgcttacaaagggcatcattaccctggacctggaaaccatttttggaagtgtttgtttatgtcagggctcagtgaggtccagctgaaccatatggatgatcacactctaccagggaagtatggtattggatttaccaacatggtggaaaggaccacgcccggcagcaaagatctctccagtaaagaatttcgtgaaggaggacgtattctagtacagaaattacagaaatatcagccacgaatagcagtgtttaatggaaaatgtatttatgaaatttttagtaaagaagtttttggagtaaaggttaagaacttggaatttgggcttcagccccataagattccagacacagaaactctctgctatgttatgccatcatccagtgcaagatgtgctcagtttcctcgagcccaagacaaagttcattactacataaaactgaaggacttaagagatcagttgaaaggcattgaacgaaatatggacgttcaagaggtgcaatatacatttgacctacagcttgcccaagaggatgcaaagaagatggctgttaaggaagaaaaatatgatccaggttatgaggcagcatatggtggtgcttacgagaaaaatacatgcagcagtgaaccttgtggcttctcttcaaatgggctaattgagagcgtggagttaagaggagaatcagctttcagtggcattcctaatgggcagtggatgacccagtcatttacagaccaaattccttcctttagtaatcactgtggaacacaagaacaggaagaagaaagccatgcttaagaatggtgcttctcagctctgcttaaatgctgcagttttaatgcagttgtcaacaagtagaacctcagtttgctaactgaagtgttttattagtattttactctagtggtgtaattgtaatgtagaacagttgtgtggtagtgtgaaccgtatgaacctaagtagtttggaagaaaaagtagggtttttgtatactagcttttgtatttgaattaattatcattccagctttttatatactatatttcatttatgaagaaattgattttcttttgggagtcacttttaatctgtaattttaaaatacaagtctgaatatttatagttgattcttaactgtgcataaacctagatataccattatcccttttatacctaagaagggcatgctaataattaccactgtcaaagaggcaaaggtgttgatttttgtatataagttaagcctcagtggagtctcatttgttagtttttagtggtaactaagggtaaactcagggttccctgagctatatgcacactcagacctctttgctttaccagtggtgtttgtgagttgctcagtagtaaaaactggcccttacctgacagagccctggctttgacctgctcagccctgtgtgttaatcctctagtagccaattaactactctggggtggcaggttccagagaatcgagtagaccttttgccactcatctgtgttttacttgagacatgtaaatatgatagggaaggaactgaatttctccattcatatttataaccattctagttttatcttccttggctttaagagtgtgccatggaaagtgataagaaatgaacttctaggctaagcaaaaagatgctggagatatttgatactctcatttaaactggtgctttatgtacatgagatgtactaaaataagtaatatagaatttttcttgctaggtaaatccagtaagccaataattttaaagattctttatctgcatcattgctgtttgttactataaattaaatgaacctcatggaaaggttgaggtgtatacctttgtgattttctaatgagttttccatggtgctacaaataatccagactaccaggtctggtagatattaaagctgggtactaagaaatgttatttgcatcctctcagttactcctgaatattctgatttcatacgtacccagggagcatgctgttttgtcaatcaatataaaatatttatgaggtctcccccacccccaggaggttatatgattgctcttctctttataataagagaaacaaattcttattgtgaatcttaacatgctttttagctgtggctatgatggattttattttttcctaggtcaagctgtgtaaaagtcatttatgttatttaaatgatgtactgtactgctgtttacatggacgttttgtgcgggtgctttgaagtgccttgcatcagggattaggagcaattaaattattttttcacgggactgtgtaaagcatgtaactaggtattgctttggtatataactattgtagctttacaagagattgttttatttgaatggggaaaataccctttaaattatgacggacatccactagagatgggtttgaggattttccaagcgtgtaataatgatgtttttcctaacatgacagatgagtagtaaatgttgatatatcctatacatgacagtgtgagactttttcattaaataatattgaaagattttaaaattcatttgaaagtctgatggcttttacaataaaagatattaagaattgttatccttaaaaaaaaaaaaaaaaatgcggggataagaaggggggggcaaacacggactcgaagggcacaggacataggaggtccgaaccaaggttctggaacaaggggaaacacgcggacccaaaggaacgatcattggaaaccaggtacaggtagaacgacaaggggcaaagaggcaaagacgaacgggcgcaggacgacacatggaaaacggg

SEQ ID NO: 6512 - DNA, 2325 bp, Homo sapiens
  misc_feature (283)..(304): n is a, c, g, or t
  misc_feature (2088)..(2091): n is a, c, g, or t
  misc_feature (2093)..(2094): n is a, c, g, or t
  misc_feature (2098)..(2098): n is a, c, g, or t
  misc_feature (2101)..(2101): n is a, c, g, or t
  misc_feature (2112)..(2112): n is a, c, g, or t
aattcggcacgaggttgctttgagggaagttacgcttattttttttttttcctttttctggagaacggggtctcgctatattgcccaggcaggtctcgaactcctgggctcaagctatcctcccgcctcttagcctccctgagagctgggattacaggcgtgagctcgtgccgaattcggcacgagctttgttcacaaagtggatccccggaaggatgcccactccaccctgctgtccaagaaggaaaccagcaacctctataagatccagtttcacaatgtnnnnnnnnnnnnnnnnnnnnnnctacaacagcctcacggaggttgtgctgcccaagcttcacctggatgaggactacccatgctcactcgtgggcaactggaacacgtggtatggggagcaggaccaggcagtgcacctgtggcgattctcaggtggctacccagccctcatggactgcatgaacaagctcaaaaacaataaggagtacctggagttccgaagggagcggagccagatgctgctgtccaggagaaaccagctgctccttgagttcagcttctggaatgagccacagcccagaatgggtcccaacatctatgagctgaggacatacaagctcaagccaggaaccatgatcgagtgggggaacaactgggctcgggcatcaagtaccggcagaagaaccaggaggcagtgggcggcttcttctcacagataggagagctctacgtggtgcaccatctctgggcctataaagacctgcagtctcgggaggagactcgaaacgctgcctggaggaagagaggctgggatgaaaatgtctactatacagtccccctggtgcgacacatggagtctaggatcatgatccccttgaagatctcgcctctgcagtgatgctgcctacacctccacctccttccccttctccctcaggcaaccccgacagacagtggcactcctggtcctgctgtcttggttttgtctttggctctgggaggactctgaggggcagtgctcagttcagacaagggggaactgaaggctgacaagttctgaggattacagctctgcccaggccctttctactttcccttgcctgcctcccctccccctgctaggaagtagtttctgatttccctgaatgaaagatagtgatcttttagggccttcatatatcttctaaaattcctcatctcaagggccaccagtccccagttatcacccttggaaatcctctgtttagcttagttgcacaaaaggtagtatgtccagtggctagaggtggggtgggaagagaggaggccaggccaggccctcaggaattccctggtttccactgggccacccacttgctggacagtctgagccaagtccctcctgctggagaaaagcctggaactgccaaaacaaaaaaacaaatacaaacaaacctcgtcaccacggtcaggaggaggttcagacattctgcccagaggggctggggaaagggatgggagccaggaaagatttaggggcaggagacagacacgtaacaggaactcggaaggtagaacttagaattcagaacttgggtttcaattgtagaatttggaatctggaatacagaattgggaagaagaacagagatgacaaaagaccacttgaagagaggttcctaatactagacagatggagagtggcttggctgtttccccctgcatattggggttgaaaacttaaatgtgtagttccagtccttctatgcagagtctctcctgccctccctccttcctgcaggcaaatatacaagctagaccctgttccctcaccctgtatcctgtctcccctaattgacattctatcagcccaaccctcattctgcagggccacctggtgtgtggaggtggcgggaggggtcagtgactctgggggtctcctcagtgacccccatacctcatcatgaacccttgggtagcttgattctgcctaccatccaggaaaacttgtgctggaattgctgatggaaacaattaaatatttactataaaaaaaaaaaaaaaaaaaatccggactagttctagatcgcgagcggccgccctttnnnntnntttncgncgtcttttgtntttcttttccccaaggaactctgaactttttattggcctcctgctccccaagggggaccctggtttctggtgggttaaaggcctcaaaaactttgggggcccttgggcctccaaacccccattttggccattccactattccgggggggggggggggcttttgggagggtttgcaatggaatttttcttggttgtcccggggattccccaaaa

SEQ ID NO: 6513 - DNA, 7287 bp, Homo sapiens
  misc_feature (20)..(20): n is a, c, g, or t
  misc_feature (26)..(26): n is a, c, g, or t
  misc_feature (166)..(204): n is a, c, g, or t
  misc_feature (5415)..(5432): n is a, c, g, or t
  misc_feature (5840)..(5854): n is a, c, g, or t
gcgatcgaggaggaggctgngtgtgngttgctattgaaatacatgaccacgcaaaaggaagtccattctgataattctgatacctgagatgtaactggactgaagagtagaaacaggaaaaattttagtgccaactttaattacaatggccactgattcaggggannnnnnnnnnnnnnnnnnnnnnnnnnnnnnnnnnnnnnnttcatttgaaaacagagttccccaggtcgctgcaactttgacagtagaagctagactaaaggagaaaaacagtaccttctctgcttctggggaaactgtagaaaggaagagatttttccgaaagagtgttgaaatgacggaagatgacaaagttgccgaatcatcccccaaagatgagagaattaaggctgcaatgaatattccaagagtagataagcttccttcaaatgtgttgagaggtggacaagaagttaaatatgaacagtgttcaaagtcaacctcagaaatctcaaaagattgtttcaaggagaaaaatgaaaaggaaatggaagaagaagcagaaatgaaggctgtagctacttctcctagtggcagattcctgaaatttgacatagaactaggaagaggagcatttaaaacagtatataaaggactggacactgaaacatgggttgaggttgcttggtgtgagctgcaggaccgaaagttaaccaaagctgagcagcaaagattcaaggaagaagcagagatgttgaagggtctccagcaccccaatatagttcgattttatgattcctgggaatctatattaaaaggaaagaaatgtattgtattagtgactgaactaatgacatctgggaccttaaagacgtacttaaaacgatttaaagtcatgaaaccaaaggtcttaaggagctggtgcaggcaaattttaaaggggttgcagttcttgcacactaggactcctcctattattcaccgggatctgaagtgtgacaatattttcatcacgggacccactggatctgtgaagattggtgatctaggattagccaccttaatgcgtacctcatttgctaagagtgtcattggaactcctgagtttatggctccagagatgtatgaagaacactatgatgaatccgtagatgtttatgcttttggaatgtgtatgctggaaatggccacatcggagtatccttattctgagtgtcagaatgcagctcaaatataccggaaagtaactagtggcataaaaccagccagcttcaataaagtcactgatcctgaagtcaaagaaatcattgaaggatgtattcgtcaaaacaaatctgaaaggttgtctatcagggacctattaaaccatgcattttttgctgaggatacaggactgagggtggagttagcagaagaagatgattgctcaaattcatcccttgctttaagactatgggttgaagaccctaaaaaattgaaaggcaaacacaaagacaatgaagctattgaatttagtttcaacttagaaacagatacacctgaggaagtagcatatgaaatggtcaagtctgggttcttccatgaaagtgattccaaagctgttgctaaatccattagagaccgggtgacgccaataaagaagacaagagagaagaagcctgctggctgtttggaagaacgcagggattctcagtgcaagtctatggggaatgtattccctcagccccagaatacaactttaccccttgctcccgctcagcaaactggggctgaatgtgaagaaactgaagttgatcaacatgttagacaacagcttctacaaagaaaaccacagcagcactgctcctctgttacaggtgacaatttgtctgaggcaggagctgcatcagttatacattcagatacttcaagtcagcccagtgtagcctattcctcaaatcaaacgatgggctctcaaatggtttctaatatcccgcaggctgaagtaaatgttccagggcaaatttattcatctcagcaactagtaggacattaccagcaagtttcagggttacagaagcattcaaagctgactcagccgcagattttgcctttggttcaaggtcagtccactgttttacctgtacatgtccttggaccgacagttgtttcacaaccccaggtttccccattaactgttcagaaggtcccacagataaagcctgtatcccaaccagttggagctgaacaacaagcagctcttctaaaaccagatttagttcgaagcttgaatcaagatgtggcaactacgaaggaaaacgtcagtagccctgataacccaagtggaaatggcaaacaggatcggatcaaacagagaagagcttcctgtccccgaccagagaaggggactaaatttcagcttaccgtccttcaggtatcaacctctggagataacatggtagagtgtcagctggagacacacaacaacaagatggtcaccttcaagtttgatgttgatggtgatgcgccagaggatattgcagactatatggttgaagataactttgtgctggaaagtgagaaagaaaaatttgtagaagaattgagagctattgtaggtcaagcccaggagatccttcatgtccactttgccacagaaagagccactggagttgattctattactgtggactccaacagtagccagacagggtcatctgaacaagtacagataaattctacatctactcaaaccagcaatgaatctgctcctcagtcatccccagttggtcggtggcgattctgtatcaatcagacgataagaaaccgtgagactcagtctcctccttctcttcagcattccatgtctgcggttcctggccgacatccacttcctagtccaaaaaacacaagtaataaggaaatatcacgggacacattgctcactatagaaaataatccatgccaccgtgcacttttcacctccaaatcagaacacaaggatgtggttgatggtaagatttctgaatgtgctagtgtagaaaccaagcagccagctatactttatcaagtggaagataacaggcagataatggcaccagttactaatagttccagttactctactacttcagttcgtgcagttccagctgaatgtgagggactcaccaaacaagcaagcatattcatacctgtgtatccatgtcaccaaactgccagtcaggctgatgcacttatgtcccatcctggcgaatcaactcagacttctggtaactctcttacaactctggcatttgatcaaaagcctcaaaccttatcagtacagcagccagctatggatgcagagtttatttctcaagaaggagaaactacagtgaacactgaagcaagttctcctaagacagtcattcccactcagacccctggccttgaaccaactacccttcaacccactactgtcctggaatcagatggagaaagacctccaaaactggagtttgcagacaaccgaattaaaactctggatgaaaaattaagaaacttgctctatcaggagcacagcatctctagcatctatcccgagagtcagaaggatacccaaagcatagactctccattttcttcctctgctgaagataccctctcctgtccagtgacagaagtcatagccatcagtcactgtggaattaaagatagccctgtacaatcccctaatttccaacagacaggctctaagcttctgtccaatgtggctgcaagtcagcctgctaatatatcagtgttcaaaagggacctgaatgtgataacttctgtatccagcgaattgtgtttacatgagatgtcctcagatgcttcacttccaggggatccagaggcctatcctgctgctgtgtcaagcggtggagccattcatctgcagacaggagtggaaacagaagagatgagatcagcaattgctcctgatcccattcctctgacacgggagtccacagctgatactagggctttgaatagatgtaaagcgatgagtggatcatttcagcggggtcggttccaggtgattacaattcctcagcagcagtcagcaaaaatgacatcttttggaatagaacacatatcagtgttcagtgagacaaaccattctagtgaagaagcctttattaaaacagcaaagtctcagttggtagaaatagaacctgccacacaaaatccaaaaacttcgttttcttatgagaagttacaagctcttcaggaaacctgtaaagaaaataaaggagttcccaaacaaggtgacaacttcttatctttcagcgcagcttgtgagactgatgtatcttcagtgaccccagaaaaggaatttgaagaaacttcagccacaggaagtagcatgcagtctggatctgaactgttgcttaaagagagagagatattgactgctgggaaacagcctagctctgatagtgaattttcagccagtcttgctggcagtggaaagtcagtggcaaagactggtccagagagtaatcagtgcttaccacaccacgaagaacaagcttatgctcaaacacagagttcactcttctattcgccatcttccccaatgagcagtgatgatgaatcagaaatagaggatgaggacttgaaggtggagcttcaaagattacgagaaaaacacattcaggaggtggtaaatcttcaaacccagcagaataaggagctgcaggagctctatgaacgccttcggtcaattaaagatagcaaaacccaatctactgagattcctttgccacctgcatcaccacgtcgaccaagatctttcaaaagcaaacttcgaagccgcccccagtccttgacacatgtggacaatggcatagttgctacagatccactgtgtgtggagagtaatgcagcatcatgccaacagtctccagccagtaaaaaagggatgttcacagatgacttacacaagctggtggatgactggacaaaggaagcagtaggaaattctcttattaagccaagtttaaaccaacttaaacaaagtcaacacaaactagagacagaaaactggaataaagtatctgaaaatactccgtctactatgggctacacatcaacatggatttcttctctgtcccaaatccgtggagctgtcccaacttccttgccacaaggactctcactcccttcatttcctgggccattatcatcatatggaatgcctcacgtttgtcagtataatgctgtggcgggggcggggtatccagtacagtgggtaggaatttcaggaacaacacaacaatctgtagtaattcccgcccaatctgggggaccattccagccagggatgaatatgcaggcatttccaacttcatcagtgcagaatcctgccacaatccctcctggtcctaaatgaatcagagtagatggtgataaaaagggaggttttttcannnnnnnnnnnnnnnnnnccaagatattaaagtttcttcctcttgggttctgtcatattttccctcatttgagtttactttagactatatattttttgttccagtgtggtatttgatacagctcatcattctgtagaaatgtgcagtttgcagatagaacactgcacacagaaatgttttttcacttcaaattctatcctctttgatacttgattttttaaaaatactgttcagaatgctttaataagctcagcttgagcattaccatttccaggacactttccatgaattgttgagaagctccccatcccccgcctttttttttttttttttaactgctgctatctgcagctggatactcttctttaaaaatgtttaaaaattatttagattgattctccccaaatgtggatgaactgagacccnnnnnnnnnnnnnnncttatgggatcttcacttcacatgtttgtcttaggtttacctttcacagaaggcagggtaacttgctgcaggaaacgttttggtgtataaaattagaatcacttttttttttttttttgagatggagtctctctctgtcacccaggttggagtgcagtggtgtgatcttggctcactgctgcaacctccccctcctgggttcaagcgattctcctgcctcagcctcctgagtagctgggactacaggcgccagccaccatgcctggctaatttttgtatttttagtagaggatggggtttcactatgttggccagactggtctcaaactcctaaccttgtgatccgccctccttagcccccccaaaaaattacaataattttgtcaaccaatacagaacatgagccctttttaaatgtgatttcccgtcatcacagcagtaggatgaagccttgttttgggtgagacagagggaaagggaaaaaacagaattgtaacagttccttgattctgcagatactgctgctgttttacgatttcagtaataattcaaagcagctgtctccttgtttctcacatgcatactacattggttttgagcatctgagaggcattggtttgtcttgcattcttttgcaaggcatatattgcagctgatatgaatctcgtttggggggaatccttgtattcctaacaagggggattaaagctacacctcaatccattcttctgaagtgaaatttacttgacacagtaggtttcgagacttacatatgaaacactggctttacagggttctcagagatgtggggtatacactgtcctgcagtgagatagtagaccctagaaggatactatttaagttgtccttagctctttttaattacaatttttagttgttagaatttctttttagtatctatagtatcttagatgattttagatcttaaatgagtttggcagcctctttagaatctgagagagatcactgtcaagttgcactttactgggttttatccagttttaggaggaggggaggcaatgtcaaaatgtacacctttggtttttaagaaggttaactataataatgttaaaggctagtcacagggttacctaatgctcagtctgtgaaacctaaatagaattcttaaaatgttatttaccaactaagtattcatgttcaaattacttaccttccactctgaagactttaaggtcatttctaatacacatttacctaattaggagttctgtctactagtaaacattccaaattgctacccaacattactgttaacagattttcctccgtattcttctaaaaattataccccatgggcttgccaggtaatgacgaaaacttaatgggtgtacttttttttttttttgcacagtctactttgtgacattaagtacctcttttccaaaaaaaaa

SEQ ID NO: 6514 - DNA, 627 bp, Homo sapiens
ttttttttcaccacatgtaaaactttatttatgcataaaaccaccacacacacacaacctacacaaggaatgtgcagtcctgagtctatttagctacatgtgagtatatactccataaggcatataaaaccagtgcacagaaaatgcatccagatattaatatatctacattttaaaactgcatggaaaatacattattatatatacacaaagtgcatacctacccaatgtatggaaaatatattctgtgagttgtgtttatatacatactgtgtgtgtactaaatacattgaaattgcattcttctgggttcatgaactgtttaagacacaattctctagcaatcttaatagcaggaggaagttcaggcattgggaatggtaatctccatctgctgagttttttttctgttcttctgtacttctattatttctgtcttttaaataccccttctgtgtctacatgcatcacttatttaagtgttctcctatgtctatttttctactgcaacttttgtcccaagctggggtctatatttagagtgcaaagtcccgtttgcagcaggcacccaaccaggaatccacctgcctgttacacgcctctcctagacacagatcacccttcgtg

SEQ ID NO: 6515 - DNA, 1519 bp, Homo sapiens
  misc_feature (27)..(58): n is a, c, g, or t
  misc_feature (132)..(213): n is a, c, g, or t
  misc_feature (486)..(537): n is a, c, g, or t
  misc_feature (1518)..(1518): n is a, c, g, or t
gagggagacagttggatgagtctgagnnnnnnnnnnnnnnnnnnnnnnnnnnnnnnnntagaagatatgttggagctgggaggcgctgtgagatgagcgaagctgtgcggggatggcgcgcagtctagcagnnnnnnnnnnnnnnnnnnnnnnnnnnnnnnnnnnnnnnnnnnnnnnnnnnnnnnnnnnnnnnnnnnnnnnnnnnnnnnnnnnggttttaaggatgtatctttcggatctgtaagtgtgaggcgtggtgtggagagaaagtggtctggctaaggctgacttatgaatggatgcgccgtcaatgatagtcgggtggataaaacaccgtgaaaagtgcagacgggagagggtgggaatatagcatgttaggaggggatagtggtggtgggggcgaaggaggaagacaaccagggaaaggggcgcgagaaattacataggaggtgaacaatagcaattgctcagcggcggggagtaaannnnnnnnnnnnnnnnnnnnnnnnnnnnnnnnnnnnnnnnnnnnnnnnnnnnggcggggatgtacgcgggcgagcggcaccggagatagaagtcatggagggaggggggaggggccccgtgggtgtcgacggtggggcagggagtagggaagtgcggggggcagcaacagggggggtgagaggagagagagagtagtggccggccccaaccaaggggatacttcctgaccaagatcttccacccgaacgtgggcgccaatggcgagatctgcgtcaacgtgctcaagagggactggacggctgagctgggcatccgacacgtactgctgaccatcaagtgcctgctgatccaccctaaccccgagtctgcactcaacgaggaggcgggccgcctgctcttggagaactacgaggagtatgcagctcgggcccgtctgctcacagagatccacgggggcgccggcgggcccagcggcagggccgaagccggtcgggccctggccagtggcactgaagcttcctccaccgaccctggggccccagggggcccgggaggggctgagggtcccatggccaagaagcatgctggcgagcgcgataagaagctggcggccaagaaaaagacggacaagaagcgggcgctgcggcggctgtagtgggctctcttcctccttccaccgtgaccccaacctctcctgtcccctccctccaactctgtctctaagttatttaaattatggctggggtcggggagggtacagggggcactgggacctggatttgtttttctaaataaagttggaaaagcaaaaaaaaaaaaaaaaaaaaaaaacaaaaaaaagtcgtatcgaagtaaacccccggggcccttaggcggggggcggaaaccggcggcacatgacaaaggggccacggtggcacaagcgtgtctctggtccccagttttttggtcaccaggggcaaacacgcgggagccccaataagggagccgaaaacagtcaaaacaccgggtaccgtgaaaccctcgcaaaang

SEQ ID NO: 6516 - DNA, 977 bp, Homo sapiens
ttttttttttttccctttttttttttttttttatttttttttttttttaagtctgaagacattttatttttcctatgggggaaccaaggatgatcttacactttttgttttctgtttttaagaagggcagcacaaggatatgtgcagattttcttttaagtaccttgctaagcgacactagactaataaccattttctagaattaggtgacctacttctgaataaaattgaaactggattgcgtattcccttactaataataatactaaatatattcttaaatcagttttcaaaattcaagatgaaatctagaaatatggaacaactagcaggaataagcccgaagatgattctagctccgttactactaaaacctagtttctaaactttcgaggattttatatgaactcgcatgaaaaaatgagctcagaggctagaatatgactccagaacataccttggtcgggtatgttcatgctcaagtaatcagactctgctccaaatttcttgacataagcccttttatctacctaataagcatagcattatgccaaggactatattgaaaaaagaacactggcctaagattgatagtctggatttaagtccagatttagtcacagcctcatatatggccttgggcaagttatctcagctctctgaaattcacatttggaatctgcaaaatgagcaactgggcctgaggttccttctagctttaactttctttgcatctaagtttcgtagctcaagcatctggaattccaggtgagagaaggtatggtagattgaactgttggccccaattcttcatgccttcctgcatcctcactcttgtcatggcttcactgtgggcagtgcatatttccctgcctcttcatcttggccctctgacttcctttgaccaatgagatatcagtagacatgacacaaccaggggctgaaaatgtgcccgagcagtggggctcatcttattg

SEQ ID NO: 6517 - DNA, 4240 bp, Homo sapiens
  misc_feature (2175)..(2203): n is a, c, g, or t
ggcttcaggaagggcagacagagtgtccaaaagcgtgagagcacgaagtgaggagaaggtggagaagagagaagaggaagaggaagaggaagagaggaagcggagggaactgcggccaggctaaaaggggaagaagaggatcagcccaaggaggaggaagaggaaaacaagacaaacagccagtgcagaggagaggaacgtgtgtccagtgtcccgatccctgcggagctagtagctgagagctctgtgccctgggcaccttgcagccctgcacctgcctgccacttccccaccgaggccatgggcccaggagttctgctgctcctgctggtggccacagcttggcatggtcagggaatcccagtgatagagcccagtgtccccgagctggtcgtgaagccaggagcaacggtgaccttgcgatgtgtgggcaatggcagcgtggaatgggatggccccgcatcacctcactggaccctgtactctgatggctccagcagcatcctcagcaccaacaacgctaccttccaaaacacggggacctatcgctgcactgagcctggagaccccctgggaggcagcgccgccatccacctctatgtcaaagaccctgcccggccctggaacgtgctagcacaggaggtggtcgtgttcgaggaccaggacgcactactgccctgtctgctcacagacccggtgctggaagcaggcgtctcgctggtgcgtgtgcgtggccggcccctcatgcgccacaccaactactccttctcgccctggcatggcttcaccatccacagggccaagttcattcagagccaggactatcaatgcagtgccctgatgggtggcaggaaggtgatgtccatcagcatccggctgaaagtgcagaaagtcatcccagggcccccagccttgacactggtgcctgcagagctggtgcggattcgaggggaggctgcccagatcgtgtgctcagccagcagcgttgatgttaactttgatgtcttcctccaacacaacaacactaagctcgcaatccctcaacaatctgactttcataataaccgttaccaaaaagtcctgaccctcaacctcgatcaagtagatttccaacatgccggcaactactcctgcgtggccagcaacgtgcagggcaagcactccacctccatgttcttccgggtggtagagagtgcctacttgaacttgagctctgagcagaacctcatccaggaggtgaccgtgggggaggggctcaacctcaaagtcatggtggaggcctacccaggcctgcaaggttttaactggacctacctgggacccttttctgaccaccagcctgagcccaagcttgctaatgctaccaccaaggacacatacaggcacaccttcaccctctctctgccccgcctgaagccctctgaggctggccgctactccttcctggccagaaacccaggaggctggagagctctgacgtttgagctcacccttcgataccccccagaggtaagcgtcatatggacattcatcaacggctctggcacccttttgtgtgctgcctctgggtacccccagcccaacgtgacatggctgcagtgcagtggccacactgataggtgtgatgaggcccaagtgctgcaggtctgggatgacccataccctgaggtcctgagccaggagcccttccacaaggtgacggtgcagagcctgctgactgttgagaccttagagcacaaccaaacctacgagtgcagggcccacaacagcgtggggagtggctcctgggccttcatacccatctctgcaggagcccacacgcatcccccggatgagttcctcttcacaccagtggtggtcgcctgcatgtccatcatggccttgctgctgctgctgctcctgctgctattgtacaagtataagcagaagcccaagtaccaggtccgctggaagatcatcgagagctatgagggcaacagttatactttcatcgaccccacgcagctgccttacaacgagaagtgggagttcccccggaacaacctgcagtttggtaagaccctcggagctggagcctttgggaaggtggtggaggccacggcctttggtctgggcaaggaggatgctgtcctgaaggtggctgtgaagatgctgaagtccacggcccatgctgannnnnnnnnnnnnnnnnnnnnnnnnnnnngaagatcatgagccacctgggccagcacgagaacatcgtcaaccttctgggagcctgtacccatggaggccctgtactggtcatcacggagtactgttgctatggcgacctgctcaactttctgcgaaggaaggctgaggccatgctgggacccagcctgagccccggccaggaccccgagggaggcgtcgactataagaacatccacctcgagaagaaatatgtccgcagggacagtggcttctccagccagggtgtggacacctatgtggagatgaggcctgtctccacttcttcaaatgactccttctctgagcaagacctggacaaggaggatggacggcccctggagctccgggacctgcttcacttctccagccaagtagcccagggcatggccttcctcgcttccaagaattgcatccaccgggacgtggcagcgcgtaacgtgctgttgaccaatggtcatgtggccaagattggggacttcgggctggctagggacatcatgaatgactccaactacattgtcaagggcaatgcccgcctgcctgtgaagtggatggccccagagagcatctttgactgtgtctacacggttcagagcgacgtctggtcctatggcatcctcctctgggagatcttctcacttgggctgaatccctaccctggcatcctggtgaacagcaagttctataaactggtgaaggatggataccaaatggcccagcctgcatttgccccaaagaatatatacagcatcatgcaggcctgctgggccttggagcccacccacagacccaccttccagcagatctgctccttccttcaggagcaggcccaagaggacaggagagagcgggactataccaatctgccgagcagcagcagaagcggtggcagcggcagcagcagcagtgagctggaggaggagagctctagtgagcacctgacctgctgcgagcaaggggatatcgcccagcccttgctgcagcccaacaactatcagttctgctgaggagttgacgacagggagtaccactctcccctcctccaaacttcaactcctccatggatggggcgacacggggagaacatacaaactctgccttcggtcatttcactcaacagctcggcccagctctgaaacttgggaaggtgagggattcaggggaggtcagaggatcccacttcctgagcatgggccatcactgccagtcaggggctgggggctgagccctcaccccccgcctcccctactgttctcatggtgttggcctcgtgtttgctatgccaactagtagaaccttctttcctaatccccttatcttcatggaaatggactgactttatgcctatgaagtccccaggagctacactgatactgagaaaaccaggctctttggggctagacagactggcagagagtgagatctccctctctgagaggagcagcagatgctcacagaccacactcagctcaggccccttggagcaggatggctcctctaagaatctcacaggacctcttagtctctgccctatacgccgccttcactccacagcctcacccctcccacccccatactggtactgctgtaatgagccaagtggcagctaaaagttgggggtgttctgcccagtcccgtcattctgggctagaaggcaggggaccttggcatgtggctggccacaccaagcaggaagcacaaactcccccaagctgactcatcctaactaacagtcacgccgtgggatgtctctgtccacattaaactaacagcattaatgcaaaaaaaaaaaaaaaaaaggggcgggccggtctaaaaaaatccctcgaggggggcccaagcttacccccgaccccagcttttctttggaacaaaggggttccccaaaaggggaggccgtatattaaaaccaaggccattggcccgcccttttaccaccgcccggacatgggaaaaactggccaaccttgcggaaaccttttttgaaagagaacccctactctctcgtgggggaggagaaacatta

SEQ ID NO: 6518 - DNA, 1375 bp, Homo sapiens
ataagaggttgggctttggatagatagacagactcctgggtccggtcaaccgtcaaaatgtccaaagaacctctcattctctggctgatgattgagttttggtggctttacctgacaccagtcacttcagagactgttgtgacggaggttttgggtcaccgggtgactttgccctgtctgtactcatcctggtctcacaacagcaacagcatgtgctgggggaaagaccagtgcccctactccggttgcaaggaggcgctcatccgcactgatggaatgagggtgacctcaagaaagtcagcaaaatatagacttcaggggactatcccgagaggtgatgtctccttgaccatcttaaaccccagtgaaagtgacagcggtgtgtactgctgccgcatagaagtgcctggctggttcaacgatgtaaagataaacgtgcgcctgaatctacagagagcctcaacaaccacgcacagaacagcaaccaccaccacacgcagaacaacaacaacaagccccaccaccacccgacaaatgacaacaaccccagctgcacttccaacaacagtcgtgaccacacccgatctcacaaccggaacaccactccagatgacaaccattgccgtcttcacaacagcaaacacgtgcctttcactaaccccaagcacccttccggaggaagccacaggtcttctgactcccgagccttctaaggaagggcccatcctcactgcagaatcagaaactgtcctccccagtgattcctggagtagtgctgagtctacttctgctgacactgtcctgctgacatccaaagagtccaaagtttgggatctcccatcaacatcccacgtgtcaatgtggaaaacgagtgattctgtgtcttctcctcagcctggagcatctgatacagcagttcctgagcagaacaaaacaacaaaaacaggacagatggatggaatacccatgtcaatgaagaatgaaatgcccatctcccaactactgatgatcatcgccccctccttgggatttgtgctcttcgcattgtttgtggcgtttctcctgagagggaaactcatggaaacctattgttcgcagaaacacacaaggctagactacattggagatagtaaaaatgtcctcaatgacgtgcagcatggaagggaagacgaagacggcctttttaccctctaacaacgcagtagcatgttagattgaggatgggggcatgacactccagtgtcaaaataagtcttagtagatttccttgtttcataaaaaagactcacttaaaaaaaaaaaaaaattgatccaggcttgctttagtttcatgaatgaagggtactttagagaccacaaattatatgtaaaaaaa

SEQ ID NO: 6519 - DNA, 3915 bp, Homo sapiens
  misc_feature (3791)..(3791): n is a, c, g, or t
  misc_feature (3798)..(3798): n is a, c, g, or t
  misc_feature (3818)..(3818): n is a, c, g, or t
  misc_feature (3824)..(3824): n is a, c, g, or t
  misc_feature (3829)..(3829): n is a, c, g, or t
  misc_feature (3854)..(3854): n is a, c, g, or t
  misc_feature (3856)..(3856): n is a, c, g, or t
  misc_feature (3864)..(3864): n is a, c, g, or t
tttttttttttttttttctttccttttattttttctttttctttcttttctttttttttttttttttttttttttttgacgtagtttcgctcttgttgcccaggctgcagtacagtggtgcggtctcggctcactgcaacctctgcctccagggttcaagccattcttctgcctcagcctcccgagtagctgaaattacaggtactaccaccatgcctggctaatttttttgtatttttattagagatggggtttcatcattttggccaggctggtcttgaactcctgacctcaggtgatcctcggcctcccaaagtgcagggattacaagtatgagccactatgcctggccaaccaacaatctttttaaaagaatcggtttttttttttctgagcagttctcaatagtgggattaaaatattcagtaaaccatgctattaacagatgtgctgtcacccagacagtgatgttccatttctagagcacagaaagaatagattttgcataattcttaagggccctgagattttcagagtggtcaatgagcactggctgtaacttaaagtcaccagctgcagtgctcctcaaagagagtcagcccatcctttgaagttttgaagccaagcgttgacttctctctagctatgaaaattctgcatcttcactaagcttaatcatttctagctctggacttagagtgagagacttgcaagtcttcctttcatttgagttctttgaggccactgtggttactaattagcacccctggtgggtgtcaccctcctccctcctctaccgagttcacctacaccggggcgtggggaaaggcgcttcctgcaccccacatgccctgcgctcctggggctctcccacagggggctttcgtgagccaggcagcaagggccatccccctgctccagcccagccaggctgcgcaggcagaaggactctcccaacctgcccgggcatgcggggctttgtgttcactgccctggcccctccgaaactggggatctcccatcctcagactccctggtggcctccgaaccccaacaaatgacaggaagaccagaacccgcagcgcgatggcctgctgggcgcgtgctcagtgggacaccttggggcccctcaagctgagtcacaggggaaaggtgtgcttgcgccacccacgtcccaccggagtccgtggtgggcctggagccgcaggtcgccagggcggcatgggaacccgaagacggggcaccttcacctccggagctcgtgaccccggaggcctccgcgtcaagcacagatgccagccaaccgggcacctcccaaccgctccaggagccggggctctcctctgcactcacctccagcctgttagatgagctcctgtcaaccccagagtttcagcaaaaggcacaacctttcctagatccggcgccactgggggagctgaaggacgtggaagagcccgctttgctggaaccactcctcagccaggaagaacacagggctctgctggaggagcaggttggggcgggtttggggcagggtggcggcctctctttcgcggtgaacctcaggcttggtgtggagaggcgtgtcttcccttccagctgacctgcctaggatccctgagttccaggtccagcgagagactccacacagaggagggctgtcaacaatgacaagaaagcattcctgagcatcccggggatcccagggctggtccaggtacagggaggtaggctgtctactgcgcatgcgcgggtttccaggcagcagcctagttttctaactagcccaggcggagctctcatcccttttccccctgcgttcttcaatcgggttggcggagacctcagtccgcgaaacactgggccggggcagaagccaggccagttctcctttctgcggctcgactcctccgcctcttcgctcaccatcagttgccaacccgtgtcccgccagcctcctcgccagcaccatagagcgccttgcgactaaataaagaccccagacctcgcgcaaaccagggtgctgccctttccaggcaagagggaaggcaggcagagatgaggacaggaacggagacagagtgagatggaaggatggagctaggcaaggatgggtggaaggagggaccccggaagggagagaaagagggagggagggagaaagggaggaaaaagccaggggagggagggaagaacagatggaaggatggaccaagggacaaaaggagcaagaagcagagaacggaaggcagagacaaaaacggtcttatgcctccagaaccaacaggacccagaactccgggaaaatgttgggtgcccagtacaggctgagtgctgggcccacagccccgttggccggcggggcgctcagcggccctctggatcaccagcctgggttacttcgtcccggagcaattcagaccaattccgtttccgaaggaatgagcgaattccccagagagcaatgagccgagacccaggtagttgtctgtttttcatccacatggttcacagatgacatatccccacgttgagccctgcaacagagctcgaggcggatagtcccatccacacaggagtcacactcaggccaactgaagcgtgattctggattccacgtttctttgccctctgtaaaggtgcctgttgctcaagtttctgccccccgaaagcgtgaccatgttgactgtttcgcgagctctgtggggccccagaaacttccaggaatgcgtggaagaccagcatcgtgtcggtgctctcctttccagttttcaaacaggctatattggagactccccattttgcaggaaacaggaatccatcatcaggccgtgatgcacgggatgtttcttttctctgtggtttcgctctcgttgtctacgtgaaaacgaacgagatgaacacaactgcgtgtgtgagactatcacggcaactgtgacacccaggcgttggcaatagagttggcagcctgatcctgggacaaaggtactgatggacatccagacacaccccaccacaatcactagcaaacccactcccaaacacacagacacacacgggcgcacgcgcgggaacacaagcacacacacagacacacaaagacacagacaacttgaaggagagcaagggacagagggatgagaaatagaaacggaaggagagaaacagcgatggagagagagacagagaggaactggggagattgagagagagagagagagagagagcaaggtggagagggaagtagagaaagggaaagggtgagggagctagagagggagagcaacggagccttggagagggaggctctatctggtagacaggggcccctttggccagggtagggtggagggtgcctgggctgggctggaacatgggggcagggccgcccacgcgggaaaaccaacggagccctgagacgtgtttttacttggatttgttggttgctttgggggtgcttttcgtagcgtcattcctttgttggctcctccctgtcctcttggtgctgtgggccctgaaagttgtagagtgcgcccctcactgtggcaggagcagtggcgctgagcgtgcccacgggccgcggcttgggtctctctcattttccaggtggtatggccgtggacaatggcagtggcgcctggctggcccaagagcccagtccagctacgcctgcctgattccaggcgtcaccaccaacccgggggccgcgaggctgggatcaggcaccccggagccgcgtccgtggccgggctgctctccccctctaggcccaaacaccaccagtcgcncactgcntttccgccgacctcccagangtcccntgtcncggcggccagaccacccgccatgancnccgaggcncagaggcctccaatcccctgccagggctctggactctccaggcagccaccc

SEQ ID NO: 6520 - DNA, 667 bp, Homo sapiens
ggtcttctgcccggccccttcgctcacgtgaagaacgccagggagctgtgaggcagtgctgtgtggttcctgccgtccggactctttttcctctactgagattcatctgtgtgaaatatgagttggcgaggaagatcgacctattattggcctagaccaaggcgctatgtacagcctcctgaaatgattgggcctatgcggcccgagcagttcagtgatgaagtggaaccagcaacacctgaagaaggggaaccagcaactcaacgtcaggatcctgcagctgctcaggagggagaggatgagggagcatctgcaggtcaagggccgaagcctgaagctgatagccaggaacagggtcacccacagactgggtgtgagtgtgaagatggtcctgatgggcaggagatggacccgccaaatccagaggaggtgaaaacgcctgaagaaggtgaaaagcaatcacagtgttaaaagaaggcacgttgaaatgatgcaggctgctcctatgttggaaatttgttcattaaaattctcccaataaagctttacagccttctgcaaagaaaaaaaaaaaaaaaaaaaaaaaaaaaaaaaaaaaaaaaaaaaaaaaaaaaaaaaaaaaaaaaaaaaaaaaaaaaaaaaaaaaaaaaaaaaaaaaaaaaaaaaa

SEQ ID NO: 6521 - DNA, 2406 bp, Homo sapiens
gattctgtgtgtgtcctcagatgctcagccacagacctttgagggagtaaagggggcagacccacccaccttgcctccaggctctttccttcctggtcctgttctatggtggggctcccttgccagacttcagactgagaagtcagatgaagtttcaagaaaaggaaattggtgggtgacagagatgggtggaggggctggggaaaggctgtttacttcctcctgtctagtcggtttggtccctttagggctccggatatctttggtgacttgtccactccagtgtggcatcatgtggcagctgctcctcccaactgctctgctacttctagtttcagctggcatgcggactgaagatctcccaaaggctgtggtgttcctggagcctcaatggtacagggtgctcgagaaggacagtgtgactctgaagtgccagggagcctactcccctgaggacaattccacacagtggtttcacaatgagagcctcatctcaagccaggcctcgagctacttcattgacgctgccacagtcgacgacagtggagagtacaggtgccagacaaacctctccaccctcagtgacccggtgcagctagaagtccatatcggctggctgttgctccaggcccctcggtgggtgttcaaggaggaagaccctattcacctgaggtgtcacagctggaagaacactgctctgcataaggtcacatatttacagaatggcaaaggcaggaagtattttcatcataattctgacttctacattccaaaagccacactcaaagacagcggctcctacttctgcagggggcttgttgggagtaaaaatgtgtcttcagagactgtgaacatcaccatcactcaaggtttggcagtgtcaaccatctcatcattctttccacctgggtaccaagtctctttctgcttggtgatggtactcctttttgcagtggacacaggactatatttctctgtgaagacaaacattcgaagctcaacaagagactggaaggaccataaatttaaatggagaaaggaccctcaagacaaatgacccccatcccatgggggtaataagagcagtagcagcagcatctctgaacatttctctggatttgcaaccccatcatcctcaggcctctctacaagcagcaggaaacatagaactcagagccagatcccttatccaactctcgacttttccttggtctccagtggaagggaaaagcccatgatcttcaagcagggaagccccagtgagtagctgcattcctagaaattgaagtttcagagctacacaaacactttttctgtcccaaccgttccctcacagcaaagcaacaatacaggctagggatggtaatcctttaaacatacaaaaattgctcgtgttataaattacccagtttagaggggaaaaaaaaacaattattcctaaataaatggataagtagaattaatggttgaggcaggaccatacagagtgtgggaactgctggggatctagggaattcagtgggaccaatgaaagcatggctgagaaatagcaggtagtccaggatagtctaagggaggtgttcccatctgagcccagagataagggtgtcttcctagaacattagccgtagtggaattaacaggaaatcatgagggtgacgtagaattgagtcttccaggggactctatcagaactggaccatctccaagtatataacgatgagtcctcttaatgctaggagtagaaaatggtcctaggaaggggactgaggattgcggtggggggtggggtggaaaagaaagtacagaacaaaccctgtgtcactgtcccaagttgctaagtgaacagaactatctcagcatcagaatgagaaagcctgagaagaaagaaccaaccacaagcacacaggaaggaaagcgcaggaggtgaaaatgctttcttggccagggtagtaagaattagaggttaatgcagggactgtaaaaccaccttttctgcttcaatatctaattcctgtgtagctttgttcattgcatttattaaacaaatgttgtataaccaatactaaatgtactactgagcttcgctgagttaagttatgaaactttcaaatccttcatcatgtcagttccaatgaggtggggatggagaagacaattgttgcttatgaaagaaagctttagctgtctctgttttgtaagctttaagcgcaacatttcttggttccaataaagcattttacaagatcttgcatgctactcttagatagaagatgggaaaaccatggtaataaaatatgaatgataaaaaaaaaaaaaaaaaaaaaaaaaaaaaaaaaaaaaaaaaaaaaaaaaaaaaaaaaaaaaaaaaaaaaaaaaaaaaaaaaaaaaaaaaaaaaaaaaaaa

SEQ ID NO: 6522 - DNA, 2386 bp, Homo sapiens
  misc_feature (1691)..(1691): n is a, c, g, or t
aatccccgccatgtgggggctcctgctcgccctggccgccttcgcgccggccgtcggcccggctctgggggcgcccaggaactcggtgctgggcctcgcgcagcccgggaccaccaaggtcccaggctcgaccccggccctgcatagcagcccggcacagccgccggcggagacagctaacgggacctcagaacagcatgtccggattcgagtcatcaagaagaaaaaggtcattatgaagaagcggaagaagctaactctaactcgccccaccccactggtgactgccgggccccttgtgacccccactccagcagggaccctcgaccccgctgagaaacaagaaacaggctgtcctcctttgggtctggagtccctgcgagtttcagatagccggcttgaggcatccagcagccagtcctttggtcttggaccacaccgaggacggctcaacattcagtcaggcctggaggacggcgatctatatgatggagcctggtgtgctgaggagcaggacgccgatccatggtttcaggtggacgctgggcaccccacccgcttctcgggtgttatcacacagggcaggaactctgtctggaggtatgactgggtcacatcatacaaggtccagttcagcaatgacagtcggacctggtggggaagtaggaaccacagcagtgggatggacgcagtatttcctgccaattcagacccagaaactccagtgctgaacctcctgccggagccccaggtggcccgcttcattcgcctgctgccccagacctggctccagggaggcgcgccttgcctccgggcagagatcctggcctgcccagtctcagaccccaatgacctattccttgaggcccctgcgtcgggatcctctgaccctctagactttcagcatcacaattacaaggccatgaggaagctgatgaagcaggtacaagagcaatgccccaacatcacccgcatctacagcattgggaagagctaccagggcctgaagctgtatgtgatggaaatgtcggacaagcctggggagcatgagctgggggagcctgaggtgcgctacgtggctggcatgcatgggaacgaggccctggggcgggagttgcttctgctcctgatgcagttcctgtgccatgagttcctgcgagggaacccacgggtgacccggctgctctctgagatgcgcattcacctgctgccctccatgaaccctgatggctatgagatcgcctaccaccggggttcagagctggtgggctgggccgagggccgctggaacaaccagagcatcgatcttaaccataattttgctgacctcaacacaccactgtgggaagcacaggacgatgggaaggtgccccacatcgtccccaaccatcacctgccattgcccacttactacaccctgcccaatgccaccgtggctcctgaaacgcgggcagtaatcaagtggatgaagcggatcccctttgtgctaagtgccaacctccacgggggtgagctcgtggtgtcctacccattcgacatgactcgcaccccgtgggctgcccgcgagctcacgcccacaccagatgatgctgtgtttcgctggctcagcactgtctatgctggcagtaatctggccatgcaggacaccagccgccgaccctgccacagccaggacttctcccgtgcacgcnaacatcatcaacgggctgactggcacacggtccccgggagcatgaatgacttcagctacctacacaccaactgctttgaggtcactgtggagctgtcctgtgacaagttccctcacgagaatgaattgccccaggagtgggagaacaacaaagacgccctcctcacctacctggagcaggtgcgcatgggcattgcaggagtggtgagggacaaggacacggagcttgggattgctgacgctgtcattgccgtggatgggattaaccatgacgtgaccacggcgtggggcggggattattggcgtctgctgaccccaggggactacatgtgacttgccaagttccgagggctaccattcagtgacacggaactgtcgggtcacctttgaagagggccccttcccctgcaatttcgtgctcaccaagactcccaaacagaggctgcgcgagctgctggcagctggggccaaggtgcccccggaccttcgcaggcgcctggagcggctaaggggacagaaggattgatacctgcggtttaagagccctagggcaggctggacctgtcaagacgggaaggggaagagtagagagggagggacaaagtgaggaaaaggtgctcattaaagctaccgggcaccttaaaaaaaaaaaaaaaaaaaaaaaaaaaaaaaaaaaaaaaaaaaaaattgaaagcc

SEQ ID NO: 6523 - DNA, 1353 bp, Homo sapiens
ggaaattgggattcaactgaaagaaagggacaaagaagaacacctgtatattctcatcagtacccccgagtccctggctggcatactgggaacgaccaaaggcacacccccaaggtcgggtctcctcttggtgattttgggtgtcatcttcatgaatggcaaccgtgccagtgaggctgtcctctgggaggcactacgcaagatgggactgcgtcctggggtgagaacatcccctccttggagatctaaggaaacttctcacctatgagttgtaaagcagaaatacctgggactacagacgagtgcccaacagcaaccccccggggagtatgagttcctctggggcctccgttcctaccatgagactagcaagatgaaagtgctgagattcattgcagaggttcagaaaagagaccctcgtgactggactgcacagttcatggaggctgcagatgaggccttggatgctctggatgctgctgcagctgaggccgaagcccgggctgaagcaagaacccgcatgggaattggagatgaggctgtgtctgggccctggagctgggatgacattgagtttgagctgctgacctgggatgaggaaggagattttggagatccctggtccagaattccatttaccttctgggccagataccaccagaatgcccgctccagattccctcagacctttgccggtcccattattggtcctggtggtacagccagtgccaacttcgctgccaactttggtgccattggtttcttctgggttgagtgagatgttggatattgctatcaatcgcagtagtctttcccctgtgtgaggctgaagcctcagattccttctaaacacagctatctagagagccacatcctgttgactgaaagtggcatgcaagataaatttatttgctgttccttgtctactgctttttttccccttgtgtgctgtcaagttttggtatcagaaataaacattgaaattgcaaagtgaaaaaaaaaaaaaaaaaatattccaaaacactccccagggcggccccccctaaactacccccccgaagggcccccgctttacgcgtcccccgttttcttggaccaagcggcccccaataagggcccgtattcataacctggcccgtgcccccccctttaacaacgccccggcccgggggcaaaatcccaaacccgggaaacccttttgcacgaacccctaacccggcggcggaggaacctatttggaacaaaatactctcccaaatacctccccctttccccctgcgccccccaccatctctccttcccccaaacaggttggctaaacccactcgtctaatactctcgccggcctaacca

SEQ ID NO: 6524 - DNA, 4804 bp, Homo sapiens
agcggattgtctgaagaagtttggaggctgagagcagcagtagactggccaactgcagagcaagttgtttctccagccgtgcggtgcagcctcatgcccccaacccagcttagccactgtaagaagacgttcactgtacagacgaccaaacttgccgtggaagagacagttgtgagattcccttgcaaatttacatacgagaatggcttgtgaaatcatgcctctgcaaagttcacaggaagatgaaagacctctgtcacctttctatttgagtgctcatgtaccccaagtcagcaatgtgtctgcaaccggagaactcttagaaagaaccatccgatcagctgtagaacaacatctttttgatgttaataactctggaggtcaaagttcagaggactcagaatctggaacactatcagcatcttctgccacatctgccagacagcgccgccgccagtccaaggagcaggatgaagttcgacatgggagagacaagggacttatcaacaaagaaaatactccttctgggttcaaccaccttgatgattgtattttgaatactcaggaagtcgaaaaggtacacaaaaatacttttggttgtgctggagaaaggagcaagcctaaacgtcagaaatccagtactaaactttctgagcttcatgacaatcaggacggtcttgtgaatatggaaagtctcaattccacacgatctcatgagagaactggacctgatgattttgaatggatgtctgatgaaaggaaaggaaatgaaaaagatggtggacacactcagcattttgagagccccacaatgaagatccaggagcatcccagcctatctgacaccaaacagcagagaaatcaagatgccggtgaccaggaggagagctttgtctccgaagtgccccagtcggacctgactgcattgtgtgatgaaaagaactgggaagagcctatccctgctttctcctcctggcagcgggagaacagtgactctgatgaagcccacctctcgccgcaggctgggcgcctgatccgtcagctgctggacgaagacagcgaccccatgctctctcctcggttctacgcttatgggcagagcaggcaatacctggatgacacagaagtgcctccttccccaccaaactcccattctttcatgaggcggcgaagctcctctctggggtcctatgatgatgagcaagaggacctgacacctgcccagctcacacgaaggattcagagccttaaaaagaagatccggaagtttgaagatagattcgaagaagagaagaagtacagaccttcccacagtgacaaagcagccaatccggaggttctgaaatggacaaatgaccttgccaaattccggagacaacttaaagaatcaaaactaaagatatctgaagaggacctaactcccaggatgcggcagcgaagcaacacactccccaagagttttggttcccaacttgagaaagaagatgagaagaagcaagagctggtggataaagcaataaagcccagtgttgaagccacattggaatctattcagaggaagctccaggagaagcgagcggaaagcagccgctgaggacattaaggatatgaccaaagaccagattgctaatgagaaagtggctctgcagaaagctctgttatattatgaaagcattcatggacggccggtaacaaagaacgaacggcaggtgatgaagccactatacgacaggtaccggctggtcaaacagatcctctcccgagctaacaccatacccatcattgaagaagaggaggggtcagaagacgatagcaatgtgaagccagacttcatggtcactctgaaaaccgatttcagtgcacgatgctttctggaccaattcgaagatgacgctgatggatttatttccccaatggatgataaaataccatcaaaatgcagccaggacacagggctttcaaatctccatgctgcctcaatacctgaactcctggaacacctccaggaaatgagagaagaaaagaaaaggattcgaaagaaacttcgggattttgaagacaactttttcagacagaatggaagaaatgtccagaaggaagaccgcactcctatggctgaagaatacagtgaatataagcacataaaggcgaaactgaggctcctggaggtgctcatcagcaagagagacactgattccaagtccatgtgaggggcatggccaagcacagggggccggcagctgcggtgagagtttactgtccccagagaaagtgcagctctggaaggcagccttggggctggccctgcaaagcatgcagcccttctgcctctagaccatttggcatcggctcctgtttccattgcctgccttagaaactggctggaagaagacaatgtgacctgacttaggcattttgtaattggaaagtcaagactgcagtatgtgcacatgcgcacgcgcatgcacgcacacacacacacagtagtggagctttcctaacactagcagagattaatcactacattagacaacactcatctacagagaatatacactgttcttccctggataactgagaaacaagagaccattctctgtctaactgtgataaaaacaagctcaggactttattctatagagcaaacttgctgtggagggccatgctctccttggacccagttaactgcaaacgtgcattggagccctatttgctgccgctgccattctagtgacctttccacagagctgcgccttcctcacgtgtgtgaaaggttttccccttcagccctcaggtagatggaagctgcatctgcccacgatggcagtgcagtcatcatcttcaggatgtttcttcaggacttcctcagctgacaaggaattttggtccctgcctaggaccgggtcatctgcagaggacagagagatggtaagcagctgtatgaatgctgattttaaaaccaggtcatgggagaagagcctggagattctttcctgaacactgactgcacttaccagtctgattttatcgtcaaacaccaagccaggctagcatgctcatggcaatctgtttggggctgttttgttgtggcactagccaaacataaaggggcttaagtcagcctgcatacagaggatcggggagagaaggggcctgtgttctcagcctcctgagtacttaccagagtttaatttttttaaaaaaaatctgcactaaaatccccaaactgacaggtaaatgtagccctcagagctcagcccaaggcagaatctaaatcacactattttcgagatcatgtataaaaagaaaaaaaagaagtcatgctgtgtggccaattataatttttttcaaagactttgtcacaaaactgtctatattagacattttggagggaccaggaaatgtaagacaccaaatcctccatctcttcagtgtgcctgatgtcacctcatgatttgctgttacttttttaactcctgcgccaaggacagtgggttctgtgtccacctttgtgctttgcgaggccgagcccaggcatctgctcgcctgccacggctgaccagagaaggtgcttcaggagctctgccttagacgacgtgttacagtatgaacacacagctgaggcaccctcgtatgttttgaaagttgccttctgaaagggcacagttttaaggaaaagaaaaagaatgtaaaactatactgacccgttttcagttttaaagggtcgtgagaaactggctggtccaatgggatttacagcaacattttccattgctgaagtgaggtagcagctctcttctgtcagctgaatgttaaggatggggaaaaagaatgcctttaagtttgctcttaatcgtatggaagcttgagctatgtgttggaagtgccctggttttaatccatacacaaagacggtacataatcctacaggtttaaatgtacataaaaatatagtttggaattctttgctctactgtttacattgcagattgctataatttcaaggagtgagattataaataaaatgatgcactttaggatgtttcctatttttgaaatctgaacatgaatcattcacatgaccaaaaattgtgtttttttaaaaatacatgtctagtctgtcctttaatagctctcttaaataagctatgatattaatcagatcattaccagttagcttttaaagcacatttgtttaagactatgtttttggaaaaatacgctacagaatttttttttaagctacaaataaatgagatgctactaattgttttggaatctgttgtttctgccaaaggtaaattaactaaagatttattccaggaatccccatttgaatttgtatgattcaataaaagaaaacaccaagtaagttatataaaataaattgtgtatgagatgttgtgttttcctttgtaatttccactaactaactaactaacttcttatattcttcatggaatggagcccagatgaaatgagaggaagcccttttcacactagatcttatttgaagaaatgtttgttagtcagtcagtcagtggtttctggctctgccgagggagatgtgttccccagcaaccatttctgcagcccagaatctcaaggcactagaggcggtgtcttaattaattggcttcacaaagacaaaatgctctggactgggatttttcctttgctgtgttgggaatatgtgtttattaattagcacatgccaacaaaataaatgtcaagagttatttcataagtgtaagtaaacttaagaattaaagagtgcagacttataattttcaaaaaaaaaaaa

SEQ ID NO: 6525 - DNA, 2268 bp, Homo sapiens
  misc_feature (11)..(11): n is a, c, g, or t
caagaattcgncacgaaatggaaaagaaaaaaaaagacaaaaaaaaaaaaaaagaaaagaaaaaaatctcatcacttgaagccaccgggagcctgcggcccgggccagcccgggctttctccggagcagagcagcgctgctggcctggcagccaggacttctccgtgtacgtgcatccccagtccccgccggggcgggcgggccgccagagcagctgtttacaatccagagacagaaaacaaaatctagatgcaacagcgaaacaaagaacccatttccttcctggcacccgtttctgtcccctcctttcctgctccgcctgcccggcatcatcagcccttctggggcgtgtacctctcactgcctgccccaggaccagaggcctgtctcccccttccctccccaccggcccgggggagacctcttcacacccaaagatgctttgtcaagatggctgcgctgtccctttgagttcctgcttcttgtatattgctctggggactctcgccggggaagatggggctgatttcccacctagagaggttgatggcagaaggaaaatggggaggcactggggttgtggagggcatgggtatggctgaggagggtgctgggaacggcaaggcggtctgggggatggggaggggcaaaggtgagagatcaccttccctatcctccaccttcccgcagggaagacgaagccaggtgccagggctggggtcgggacacccatgttctgggcggcttgaccccaaatcccagaccccggaagctccaggctcgggatgtgtcctgagcacctgtcccggccccctcctctccagcctgtcaggccagcctccccagcccccttccctcaactctaggggcagcatagccccaggccaccctagcccagcccctgcattgccgtttccccagaggtggcccctccacctctgctctgacctctccccatctctctgcccctccttttctcacaagtgccatgagttttcaaacatcttcgggtctcagcctgctgctgccatgaactttgttgggttaagggggaggggctctaggaaggaactggggggaaggggacaggtaggtggctggagggaccctttttgctgctagaaagcccctcccttctcccggggagctggggctggcttgtccccatcaattaggggagaaggggtcagaccaaagatggtggtttgtcccgtgtaagggaacaggtgtggggaagaggtggggttgggttccaactctggctttttctggtagaaaggcctaacccattacaccagaagaccatgggtgaagtctagatggggaggagaagtgaggccagggacagtcttgccagacgactctgaggagggcaagggacagttccatggcccttcccggactgcactaggctgggagctctgttgtgtggaggggtggtcagaggtctgtgaagagcgggcaggaggcatgagcaggcgaggagctggcctgtcccgggaagcagcccagcctgtggctgcccccgacaccaggaggagggccaggagagttccagggggctgaggcacacagagaggccaacttcctccctgcccagccttccttgtatctctccagactcggacaatcaaagggagagagggtgtatcgggtcctgttccagccggcatcgccgggtggcttccaggcctcagagctgtgtggcagggccccctgctggggctggacatcactgcagtccagtgcaaagccgcccccagagcccaggtgtccccccaacctaaccagacctggtgccttgacgcccccaccccagctgggacggtacagagaagggtcttggtttcctctcctactcccttccttaggctcctgaactcgtttgctcctaaatcttgttaattctttttctctggattttggtttcttttggctttcccttgccttcccctttctctgtctccaacactctttccccatgtctttctggctgtctctatgttcctcttctcttatcctcaactttctgtccattcgggcctcctccccacctcccacgccccagcccctccctccttggtctccttttcgatatgccaaaccaattttgggtcgagtgcatttaacgagaacaaaacaaaaggctcataacaacaagaacgtttcagaaaaaaacaaaaagttttaaaaaaattgttgagtcaaaaagtcaaacaataaagaaattaagatttcttggaaaaaaaaaaaaaaaaaaaaactagg

SEQ ID NO: 6526 - DNA, 4100 bp, Homo sapiens
ttcggcttggtaccaatctatcagggaacggcggtggccggtgcggcgtgttcggtgcgctctggccgctcaggccgtgcggctgggtgagcgcacgcgaggcggcgaggcggcagcgtgtttctaggtcgtggcgtcgggcttccggagctttggcggcagctaggggaggatggcggagtcttcggataagctctatcgagtcgagtacgccaagagcgggcgcgcctcttgcaagaaatgcagcgagagcatccccaaggactcgctccggatggccatcatggtgcagtcgcccatgtttgatggaaaagtcccacactggtaccacttctcctgcttctggaaggtgggccactccatccggcaccctgacgttgaggtggatgggttctctgagcttcggtgggatgaccagcagaaagtcagaagacagcggaaagctggagggagtgacaggcaaaggccaggatggaattggtagcaaggcagagaagactctgggtgactttgcagcagagtatgccaagtccaacagaagtacgtgcaaggggtgtatggagaagatagaaaagggccaggtgcgcctgtccaagaagatggtggacccggagaagccacagctaggcatgattgaccgctggtaccatccaggctgctttgtcaagaacagggaggagctgggtttccggcccgagtacagtgcgagtcagctcaagggcttcagcctccttgctacagaggataaagaagccctgaagaagcagctcccaggagtcaagagtgaaggaaagagaaaaggcgatgaggtggatggagtggatgaagtggcgaagaagaaatctaaaaaagaaaaagacaaggatagtaagcttgaaaaagccctaaaggctcagaacgacctgatctggaacatcaaggacgagctaaagaaagtgtgttcaactaatgacctgaaggagctactcatcttcaacaagcagcaagtgccttctggggagtcggcgatcttggaccgagtagctgatggcatggtgttcggtgccctccttccctgcgaggaatgctcgggtcagctggtcttcaagagcgatgcctattactgcactggggacgtcactgcctggaccaagtgtatggtcaagacacagacacccaaccggaaggagtgggtaaccccaaaggaattccgagaaatctcttacctcaagaaattgaaggttaaaaagcaggaccgtatattccccccagaaaccagcgcctccgtggcggccacgcctccgccctccacagcctcggctcctgctgctgtgaactcctctgcttcagcagataagccattatccaacatgaagatcctgactctcgggaagctgtcccggaacaaggatgaagtgaaggccatgattgagaaactcggggggaagttgacggggacggccaacaaggcttccctgtgcatcagcaccaaaaaggaggtggaaaagatgaataagaagatggaggaagtaaaggaagccaacatccgagttgtgtctgaggacttcctccaggacgtctccgcctccaccaagagccttcaggagttgttcttagcgcacatcttgtccccttggggggcagaggtgaaggcagagcctgttgaagttgtggccccaagagggaagtcaggggctgcgctctccaaaaaaagcaagggccaggtcaaggaggaaggtatcaacaaatctgaaaagagaatgaaattaactcttaaaggaggagcagctgtggatcctgattctggactggaacactctgcgcatgtcctggagaaaggtgggaaggtcttcagtgccacccttggcctggtggacatcgttaaaggaaccaactcctactacaagctgcagcttctggaggacgacaaggaaaacaggtattggatattcaggtcctggggccgtgtgggtacggtgatcggtagcaacaaactggaacagatgccgtccaaggaggatgccattgagcacttcatgaaattatatgaagaaaaaaccgggaacgcttggcactccaaaaatttcacgaagtatcccaaaaagttctaccccctggagattgactatggccaggatgaagaggcagtgaagaagctgacagtaaatcctggcaccaagtccaagctccccaagccagttcaggacctcatcaagatgatctttgatgtggaaagtatgaagaaagccatggtggagtatgagatcgaccttcagaagatgcccttggggaagctgagcaaaaggcagatccaggccgcatactccatcctcagtgaggtccagcaggcggtgtctcagggcagcagcgactctcagatcctggatctctcaaatcgcttttacaccctgatcccccacgactttgggatgaagaagcctccgctcctgaacaatgcagacagtgtgcaggccaaggtggaaatgcttgacaacctgctggacatcgaggtggcctacagtctgctcaggggagggtctgatgatagcagcaaggatcccatcgatgtcaactatgagaagctcaaaactgacattaaggtggttgacagagattctgaagaagccgagatcatcaggaagtatgttaagaacactcatgcaaccacacacaatgcgtatgacttggaagtcatcgatatctttaagatagagcgtgaaggcgaatgccagcgttacaagccctttaagcagcttcataaccgaagattgctgtggcacgggtccaggaccaccaactttgctgggatcctgtcccagggtcttcggatagccccgcctgaagcgcccgtgacaggctacatgtttggtaaagggatctatttcgctgacatggtctccaagagtgccaactactgccatacgtctcagggagacccaataggcttaatcctgttgggagaagttgcccttggaaacatgtatgaactgaagcacgcttcacatatcagcaagttacccaagggcaagcacagtgtcaaaggtttgggcaaaactacccctgatccttcagctaacattagtctggatggtgtagacgttcctcttgggaccgggatttcatctggtgtgaatgacacctctctactatataacgagtacattgtctatgatattgctcaggtaaatctgaagtatctgctgaaactgaaattcaattttaagacctccctgtggtaattgggagaggtagccgagtcacacccggtggctctggtatgaattcacccgaagcgcttctgcaccaactcacctggccgctaagttgctgatgggtagtacctgtactaaaccacctcagaaaggattttacagaaacgtgttaaaggttttctctaacttctcaagtcccttgttttgtgttgtgtctgtggggaggggttgttttggggttgtttttgttttttcttgccaggtagataaaactgacatagagaaaaggctggagagagattctgttgcatagactagtcctatggaaaaaaccaagcttcgttagaatgtctgccttactggtttccccagggaaggaaaaatacacttccacccttttttctaagtgttcgtctttagttttgattttggaaagatgttaagcatttatttttagttaaaaataaaaactaatttcatactatttagattttcttttttatcttgcacttattgtcccctttttagttttttttgtttgcctcttgtggtgaggggtgtgggaagaccaaaggaaggaacgctaacaatttctcatacttagaaacaaaaagagctttccttctccaggaatactgaacatgggagctcttgaaatatgtagtattaaaagttgcatttgaaattcttgactttcttatgggcacttttgtcttccaaattaaaactctaccacaaatatacttacccaagggctaatagtaatactcggattaaaaatggcagatgcccttctttagagcagaagacagaaggacacacaaaacagtgtgtgaggcgcgctgcgcctcggaaaagcctgtaaacacacagatgggccgcggcccaaagtaatggaaagtgcgcaag

SEQ ID NO: 6527 - DNA, 583 bp, Homo sapiens
ggtggtttcagaggggctcatgcttcctagggcagctgaacccatccccaggaagacaggccatgggcagcatgcacaggtagcctggtagcactctcctccttgtccctttttgattgaaacatggctgtagctgggggtaggggcagtgccaggcccatcaataattcagcaagatggggaaaagctgcagctcctccagcaccccctgctgctggggccaggctagtgttcgcaagcatgcctcagtctggcatgtgacttctcgccctgcaggtgccctggcaggagggactggcttacgccaccctgtgcaggatcgtcttctcagcttacagagcctagtgtgattcaacaaccctccatctctgcccccaacatgcccaactgatctggtggagggaactgaagatgaaggcctctcaggcaccatggatgggatgggtgtgtgtgaagggggcagggtccccaggagctgccccaggtctggctggacagttgcacgggaagtcctgtttgtgaactcaacgtttccacggcttttccattaaactttaccccaaatcaaaaaaaaaaaaaaaaa

SEQ ID NO: 6528 - DNA, 742 bp, Homo sapiens
ttttttttttttttttttattgatcagaattcaggctttattattgagcaatgaaaacagctaaaacttaattccaagcatgtgtagttaaagtttgcaaagtgggatattgttcacaaaacacattcaatgtttaaacactatttatttgaagaacaaaatatatttaaaattgtttgcttctaaaaagcccatttccctccaagtctaaactttgtaatttgatattaagcaatgaagttattttgtacaatctagttaaacaagcagaatagcactaggcagaataaaaaattgcacagacgtatgcaattttccaagatagcattctttaaattcagttttcagcttccaaagattggttgcccataatagacttaaacatataatgatggctaaaaaaaataagtatacgaaaatgtaaaaaaggaaatgtaagtccactctcaatctcataaaaggtgagagtaaggatgctaaagcaaaataaatgtaggttctttttttctatttccgtttatcatgcaatctgcttctttgatatgccttagggttacccatttaagttagaggttgtaatgcaatggtgggaatgaaaattgatcaaatatacaccttgtcatttcatttcaaattgcggctggaaacttccaaaaaaagggtaggcatgaagaaaaaaaaaaaatcaaatcagaacctcttcaggggtttgtgttctgatatggcagacaagatacaagtc

SEQ ID NO: 6529 - DNA, 1777 bp, Homo sapiens
  misc_feature (465)..(487): n is a, c, g, or t
gtgaccacagaggcagaggggtgggcgggctggcccatggctgagacctctctcccagagctggggggagaggacaaagccacgccttgccccagcatcctggagctggaggagctcctgcgggcagggaagtcttcttgcagccgtgtggacgaagtttggcccaaccttttcataggagatgcggccacggcaaacaaccgctttgagctgtggaagctgggcatcacccacgtgctgaacgccgcccacaggggcctctactgtcagggcggccctgacttctacggcagcagtgtgagctacctgggggtgccagcccacgacctccctgattttgacatcagtgcctacttctcctctgcggctgacttcatccaccgtgccctcaacacgcctggggccaaggtcctggtgcactgtgtggtgggcgtgagccgctctgccacgctggtcctggcctannnnnnnnnnnnnnnnnnnnnnnccctgcgccaggcggtgatcaccgtgaggcagcaccgatgggtcttccccaaccgaggcttcctgcaccagctctgcaggctggaccagcaactgcggggtgccggccagagctgaggggccagagctggtccttactccctgccatggggctctgccactttgccaccctggcactgatcctgctggtgctgctggaggctctggcccaggcggacacacagaagatggtggaagcccagcgtggggtcggccctagagcctgctactccatctggctcctcctggcgcctacaccccctctcagccactgtcttcagtctccacagaaacagcatcaagtgtgcggagaaattcggcatgagggctcaggcagcacgtactgcccgtgcagagaattgcacattcctggcgccaggccatgccccaggatggactcactgcagaagcaggacctccggaggcccaagatccatggggcagtccaggcatctccctaccagccgcccacattggcttcgctgcagcgcttgctgtgggtccgtcaggctgccacactgaaccatatcgatgaggtctggcccagcctcttcctgggagatgcgtacgcagcccgggacaagagcaagctgatccagctgggaatcacccacgttgtgaatgccgctgcaggcaagttccaggtggacacaggtgccaaattctaccgtggaatgtccctggagtactatggcatcgaggcggacgacaaccccttcttcgacctcagtgtctactttctgcctgttgctcgatacatccgagctgccctcagtgttccccaaggccgcgtgctggtacactgtgccatgggggtaagccgctctgccacacttgtcctggccttcctcatgatctatgagaacatgacgctggtagaggccatccagacggtgcaggcccaccgcaatatctgccctaactcaggcttcctccggcagctccaggttctggacaaccgactggggcgggagacggggcggttctgatctggcaggcagccaggatccctgacccttggcccaaccccaccagcctggccctgggaacagcaggctctgctgtttctagtgaccctgagatgtaaacagcaagtgggggctgaggcagaggcagggatagctgggtggtgacctcttagcgggtggatttccctgacccaattcagagattctttatgcaaaagtgagttcagtccatctctataataaaatattcatcgtcataaagaaaaaaaaaaaaaaaaaaaaaa

SEQ ID NO: 6530 - DNA, 1925 bp, Homo sapiens
tgctggtactggtccggaagtcccgaaatcagactgctgccttggaccgggacagctcgcggcccccgagagctctagccgtcgaggagctgcctggggacgtttgccctggggccccagcctggcccgggtcaccctggcatgaggagatgggcctgttgctcctggtcccgttgctcctgctgcccggctcctacggactgcccttctacaacggcttctactactccaacagcgccaacgaccagaacctaggcaacggtcatggcaaagacctccttaatggagtgaagctggtggtggagacacccgaggagaccctgttcacctaccaaggggccagtgtgatcctgccctgccgctaccgctacgagccggccctggtctccccgcggcgtgtgcgtgtcaaatggtggaagctgtcggagaacggggccccagagaaggacgtgctggtggccatcgggctgaggcaccgctcctttggggactaccaaggccgcgtgcacctgcggcaggacaaagagcatgacgtctcgctggagatccaggatctgcggctggaggactatgggcgttaccgctgtgaggtcattgacgggctggaggatgaaagcggtctggtggagctggagctgcggggtgtggtctttccttaccagtcccccaacgggcgctaccagttcaacttccacgagggccagcaggtctgtgcagagcaggctgcggtggtggcctcctttgagcagctcttccgggcctgggaggagggcctggactggtgcaacgcgggctggctgcaggatgccacggtgcagtaccccatcatgttgccccggcagccctgcggtggcccgggcctggcacctggcgtgcgaagctacggcccccgccaccgccgcctgcaccgctatgatgtattctgcttcgctactgccctcaaggggcgggtgtactacctggagcaccctgagaagctgacgctgacagaggcaagggaggcctgccaggaagatgatgccacgatcgccaaggtgggacagctctttgccgcctggaagttccatggcctggaccgctgcgacgctggctggctggcagatggtagcgtccgctaccctgtggttcacccgcatcctaactgtgggcccccagagcctggggtccgaagctttggcttccccgacccgcagagccgcttgtacggtgtttactgctaccgccagcactaggacctggggccctcccctgccgcattccctcactggctgtgtatttattgagtggttcgttttcccttgtgggttggagccattttaactgtttttatacttctcaatttaaattttctttaaacatttttttactattttttgtaaagcaaacagaacccaatgcctccctttgctcctggatgccccactccaggaatcatgcttgctcccctgggccatttgcggttttgtgggcttctggagggttccccgccatccaggctggtctccctcccttaaggaggttggtgcccagagtgggcggtggcctgtctagaatgccgccgggagtccgggcatggtgggcacagttctccctgcccctcagcctgggggaagaagagggcctcgggggcctccggagctgggctttgggcctctcctgcccacctctacttctctgtgaagccgctgaccccagtctgcccactgaggggctagggctggaagccagttctaggcttccaggcgaaagctgagggaaggaagaaactcccctccccgttccccttcccctctcggttccaaagaatctgttttgttgtcatttgtttctcctgtttccctgtgtggggaggggccctcaggtgtgtgtactttggacaataaatggtgctatgactgccttccgccaaaaaaaaaaaaaaaaaa

SEQ ID NO: 6531 - DNA, 2844 bp, Homo sapiens
  misc_feature (2665)..(2666): n is a, c, g, or t
  misc_feature (2672)..(2672): n is a, c, g, or t
  misc_feature (2677)..(2677): n is a, c, g, or t
  misc_feature (2683)..(2683): n is a, c, g, or t
  misc_feature (2685)..(2686): n is a, c, g, or t
  misc_feature (2694)..(2694): n is a, c, g, or t
  misc_feature (2700)..(2700): n is a, c, g, or t
  misc_feature (2705)..(2705): n is a, c, g, or t
  misc_feature (2722)..(2722): n is a, c, g, or t
  misc_feature (2724)..(2724): n is a, c, g, or t
  misc_feature (2729)..(2730): n is a, c, g, or t
  misc_feature (2737)..(2737): n is a, c, g, or t
ataattcaccaataaaggacttacaggtgttcataacttgtctaagctcaaatctcccatatataacttgctggcaaatcatttattccagggcattagctatgagttgctagctttaagttgaactatatcctgtcatggcttacttcgaattgacatgctgcaggctgtatcttgacatgaacaagatagcatgtgatgtggctttgttttaattcagttagccactggtttttaatgtgtgggttatattctactcccaaagcaaaattctgtggcatctctggaatactacctgagaatttttgtgtgccatgtcgaagaaacgcaaatgggatgatgactatgttcgctactggttcacctgtacaacggaagtagatggaactcagcgtccacagtgtgtgttgtgtaactcagtattttcaaatgctgacctcagaccatcaaaactgtcagaccattttaacagacagcatggtggtgtagctgggcatgatctcaatagcctgaagcatatgccagcaccatctgatcagagtgaaaccttgaaagcatttggagttgcatctcatgaggatactttattacaagcatcgtatcaatttgcgtatttatgtgccaaggagaagaatcctcatacagtagctgaaaagttagtgaaaccttgtgcactggaaatagcacaaatagttttgggaccagatgcacaaaaaaagcttcagcaggtacccttatcagatgatgtgatccattctagaattgatgaaatgagccaggatatcttacagcaagttctagaagatatcaaagccagtcctcttaaagtgggtattcagcttgctgagacaactgacatggatgactgcagtcagctaatggcatttgtgcgctatataaaagaaagagagatcgtagaagaatttctcttctgtgaaccattgcagctatccatgaaaggaatagatgtgttcaatctcttcagagacttctttctgaagcataagatagcacttgatgtatgtggctctgtttgtactgatggtgcctcctctatgctaggagaaaattccgagtttgttgcctacgtgaaaaaagagatacctcatatcgtagttacacattgtttattgaatcctcatgcacttgtcataaagacattgcctacaaaactgagggatgctctgtttactgtggtgagggtaataaatttcatcaaagggagagctccaaatcatcgcctatttcaggctttctttgaagaaattggcatagaatatagtgtcctccttttccatactgaaatgaggtggctttcccgaggccaaatacttactcacatttttgaaatgtatgaagaaataaatcagtttcttcaccacaagagcagtaatttagttgatggctttgaaaataaagagtttaaaattcacctagcataccttgcagatttattcaaacacttaaatgaactcagtgcatctatgcagaggactgggatgaacacagtatcagctagagagaagttatctgcttttgttaggaagtttccattttggcaaaaacgaattgagaaaagaaattttaccaattttccttttcttgaagaaataattgtttcggataatgaaggcatattcattgcagctgaaataacactgcatctgcaacaattgagcaacttcttccatggatatttttccattggagatcttaatgaggcaagtaaatggatattggatccatttctttttaatatcgattttgttgatgatagttatttaatgaaaaatgatcttgctgaattacgagctagtggccaaatcctaatggaatttgagacaatgaagcttgaggatttctggtgtgcccaattcacagcatttccaaacctggcaaagacagctctagaaatccttatgccatttgcaactacatacctttgtgagttgggattttcatcacttttacatttcaaaccaaagtccagaagctgctttaatctgagtgatgatatccgtgtggctatttcaaaaaaagttcctcgtttctcggacatcattgaccaaaagctacagctacaacagaagtcactgtaagctgatatacttttttaatgaataatttcaatcttaatatcattgtaaaattaagctgtaattctgtctctttcatatttatgatatactgaattctatgtctaaaaaacttaagaactttaattttgaatgaggcatgtgaaaatatgttttgagaataaaaacacagcagaaaagattaagtaaaaaaaaaaaaatgctatcatgagattttcccaattctaagtatctgtttaacctgttcgtgtggtatatgaaaaagatacctaagcactagaatatccagctaaatggtgcaataggctaggaattgagccaggagaaaagagaagatatcccagaagtcaaaaaggcaaaatgaaagattgagttcgcccgtctttgttatggagaggttaatgaaatcagaagaggattatgaaatataatgggaaaaggaatgatctggcttatgtaagacttacttttaaatatactctttggagttagtctcacaatgtccattcccctagctcctgtgctatgaatatcatattaataaatagcctaatatattaaaaaaaagnnaaaaanaaaanaaaaanannaaaaaaanaaaaanaaaanaaaaaaaaaaaaaaaananaaaannaaaaaanaaaaaaaaaggggggggccccccctaagagaaacccctcccagagggggcccacagtttaaccgggtaccccgcattttttttttggtggaaaaaggggggcccccc

SEQ ID NO: 6532 - DNA, 2690 bp, Homo sapiens
  misc_feature (399)..(448): n is a, c, g, or t
  misc_feature (2255)..(2272): n is a, c, g, or t
gaattcagtggcctaccaagtggcatagctgaggtcagtggagaatcctccagagctgagattgggagcagcctgccctcgggagcatattatggcagtggaactccatctagtttccccacggtctctcttgtagacagaactttggtggaatctgtaacccaggctccaacagcccaagaggcaggagaagggccttctggcattttagaactcagtggtgctcattctggagcaccagacatgtctggggagcattctggatttctggacctaagtgggctgcagtccgggctgatagagcccagcggagagccaccaggtactccatattttagtggggattttgccagcaccaccaatgtaagtggagaatcctctgtagccatgggcaccagnnnnnnnnnnnnnnnnnnnnnnnnnnnnnnnnnnnnnnnnnnnnnnnnnntggcgggtgttactgaaccaactatttctcaggaactaggccaaaggccccctgtgacacacacaccccagctttttgagtccagtggaaaagtctccacagctggggacgttagtggagctaccccagtgctccctgggtctggagtagaagtatcatcagtcccagaatctagcagtgagacgtccgcctatcctgaagctgggttcggggcatctgccgcccctgaggccagcagagaagattctgggtcccctgatctgagtgaaaccacctctgcattccacgaagctaacctcgagagatcctctggcctaggagtgagcggcagcactttgacatttcaagaaggcgaggcgtccgctgccccagaagtgagtggagaatccaccaccaccagtgatgtggggacagaggcaccaggcttgccttcagccactcccacggcttctggagacaggactgaaatcagcggagacctgtctggtcacacctcgcagctgggcgttgtcatcagcaccagcatcccagagtctgagtggacccagcagacccagcgccctgcagagacgcatctagaaattgagtcctcaagcctcctgtactcaggagaagagactcacacagtcgaaacagccacctccccaacagatgcgtccatcccagcttctccggaatggaaacgtgaatcagaatcaactgctgcagaccaggaggtatgtgaggagggctggaacaagtaccagggccactgttaccgccacttcccggaccgcgagacctgggtggatgctgagcgccggtgtcgggagcagcagtcacacctgagcagcatcgtcacccccgaggagcaggagtttgtcaacaacaatgcccaagactaccagtggatcggcctgaacgacaggaccatcgaaggggacttccgctggtcagatggacaccccatgcaatttgagaactggcgccccaaccagcctgacaacttttttgccgctggagaggactgtgtggtgatgatctggcacgagaagggcgagtggaatgatgttccctgcaattaccacctccccttcacgtgtaaaaagggcacagtggcctgcggagagccccctgtggtggagcatgccaggaccttcgggcagaagaaggaccggtatgagatcaattccctggtgcggtaccagtgcacagaggggttgtccagcgccacatgcccaccatccggtgccagcccagcgggcactgggaggagcctcagatcacctgcacagaccccaccacctacaaacgcagactacagaagcggagctcacggcaccctcggaggagccgccccagcacagcccactgagaagagcttccaggacgcacccaggacgctgagcccaggagcctgccaggctgacgtgcatcccacccagacggtgtcctcttcttgtcgctttttgtcatataaggaatcccattaaagaaggaaaaaaataaatcccacatttgtgtatgcacccactcacccctccaaatcagcaaaaccgcatttaatttgtccgccgaatgccaaagcaaagcaaacttattataacccttggactgagtttagagacatttcttcaatttcccatcgtgcctttccagggaccagtgcagggacagggggagaaggggaggggttaagttaaataaagaagattatttttgtttcctgactttaaaaaaaaaaaaaaaaaatcgttggttatttcacctccagggagagctagggaggagggaggagggctccaaaggagctggaaggagcagaggnnnnnnnnnnnnnnnnnntcggaaccgcagctgaatgtattggatgagaaggagccaggagggctacaccatctgtatgagggaaaagccttgggggagaggggtgggttcctgcctcctgccgagggtaagccggcaggagagagccatcagagggacctccgctgcctgggagttgggttccctccaagggtccctctttcagtgtcctctctctcacctgggtctgccaccctaacaggtggcaactcggcagggctgctgggggcacttcctgcccagtggggggtgccgcccaaccttctcccctccccacccccgcccccgggaccgtgcaggcaccagggttccgtgcacctatttatatttttgaaaactgaagattataatattataataataataaagacattggaagagaaaaaaaaaaaaaaaa

SEQ ID NO: 6533 - DNA, 4451 bp, Homo sapiens
  misc_feature (1279)..(1302): n is a, c, g, or t
  misc_feature (4182)..(4199): n is a, c, g, or t
aatgctaatgagcgagttgccaggcgagacaggaacttctttccccttctctgtgtcagggtcgcagaaagtatgtcccttctctcaccatgagctggctctccagttcccagggagtggtactaacagcctaccaccccagcggcaaggaccaggccgtcgggaacagccatgcaaaggcaggggaggaagccacctcgagtcgcagatatggccagtacactatgaaccaggaaagcaccaccatcaaagttatggagaagcctccatttgatcgatcaatttcccaggattctttggatgaactatctatggaagactattggatagaactagaaaacatcaagaaatctagtgaaaacagccaagaagatcaagaggtggttgttgtcaaagagcctgatgagggagaattggaagaagagtggcttaaagaggccggtttatccaatctcttcggagagtctgctggagatccacaggaaagcattgtgtttttatcaacattgacgcggacccaggcagcagcagttcagaagcgagtagagacggtctcccagaccttgaggaaaaaaaacaaacagtaccagattcctgacgtcagagacatatttgctcaacagagagaatcaaaagaaacagctccaggtggcactgaatcgcagtcacttagaacaaatgaaaacaaataccaaggaagagatgacgaggcatctaaccttgttggtgaagagaagctgatcccacctgaggagacgcctgcccctgaaacagacatcaacctggaggtatcatttgccgagcaagcactcaatcagaaagagagctccaaggagaaaatccagaagagcaaaggcgatgatgccacattacctagtttcagattgccaaaagacaaaacgggtaccacaaggattggtgacctcgcaccccaggacatgaagaaagtttgccatttagccctaattgagctgactgccctctatgatgtattgggtattgagctgaaacaacaaaaagctgtgaaaatcaaaacaaaagattctggtcttttttgcgttccattgacagcgctattagaacaagatcagaggaaagtaccaggaatgcgaatacccttgatctttcaaaaactgatttctcgaattgaagagagaggtttggaaacagaaggcctcttacggatccctggagctgccattagaatcaagaatctttgccaagaactagaagcaaagttttatgaagggacttttaattgggaaagtgtcaaacagcnnnnnnnnnnnnnnnnnnnnnnnngctcttcattcgggagttgccccagccactgctcagtgtggagtatctcaaagcctttcaggctgtccagaatcttccaaccaagaagcagcaactacaggctttgaaccttcttgtcatcctcctacctgatgcaaacagggacacactgaaggcccttcttgaatttctccaaagagtaatagataataaagaaaaaaataaaatgacagtcatgaatgtagcaatggtcatggccccgaatctctttatgtgtcatgcattgggattgaagtccagtgaacagcgagaatttgtaatggcagctgggacagcaaataccatgcacttattgattaagtaccaaaaacttctgtggacaattcccaagtttattgtaaaccaagtgaggaagcaaaacacggaaaatcataaaaaggataaaagagccatgaagaaattgctgaagaaaatggcttatgaccgagaaaaatatgaaaagcaagataagagtacaaatgatgctgacgttcctcagggagtgattcgagtgcaagctccccatctttcgaaagtttccatggcaatacagctaactgaagaactaaaagccagtgatgtacttgccaggtttctcagccaagaaagtggggttgcccagactctcaagaaaggagaagtttttttgtatgaaattggaggaaatattggggaacgctgccttgatgatgacacttacatgaaggatttatatcagcttaacccaaatgctgagtgggttataaagtcaaagccattgtagaagacttaacatgcggcagataaccatgtggacttctgtcataattcttgctgagtcaagagtgtaaataaaagaaatggcaggactcatattattcagttgtacccaagtatttaaaaatgactctcttaagccttaaaaagtcatagatttgtgctgctgccagaattatattaattattattaatgttattattagaaaaaaaatttctggagtgagagtaaagaggcttaattagtttgtgggcagttttcatatgctctgtgaaatgtgtccagatgtgacatagtttttttttttaatatgtggaaatgtcttctcttcccattcttttctcctaaaatcatatatactgtaatatatgctctctcacctctattacctcctcacatctaccctttcccagttaggtttgctttttgaccaaaaagataacaaataccaggtatggcaagttgtgaagacagcacattaaaacatacctaatttcacagtattcctgtcacgacagaatgttagtattcatctctttgaatcatttgctcaaataataacattccaccttttcctgctgtatcacaggaagtgatttgcattttttttcagttcatctgacttatgttcacagaaccgtatcagcgaccaagaaaataggactgtcagaagctgccagttattactgaaccattaaatacttatatactaagaataaataaaatatacccatgtgaaataataattggattatggataacaagagagtgaaagccaaagcactttctgtctactgtactcttctaaatggaattttaaaagtcatagctggctttacgtgttgtcattattagcattataaatatgcatgatagtataatccagtaatggttgaagaatgtattttacttaaagagggatttttttttttaagtcctgaataagtctactggaagaattattcttctgggtgaaaaagcttttgtttgtgttcttattttaaataatcggagtcaatttattaaaatgttcttgaaagtactattcccagggattttaatgcacaaaccatattgtgacaagagatgagcctctgtactgtaaataagaaatgaagtagagaaatgttaaatattttatgagtttagaatatagtaaataaaaggtgatgtaaatgaatgctgcacaaacggtgttcatgatacttttagtagtactttaggaaaaactacacattctcagaagctcttgatgtctctaatgaagggggggaatgctgttaatgagaacagtcataaatttttagcatataattacaagaacagcctgtggatatgatcacttaaatgattttgtggtgattcgtgccattgcttttttatttaaaagaaaattttgtaattaaatgcctttttctaaattaaaaaaaaaaagaatcattacttttaatcctatgtgtttatgagtatttttgccttttttttattaatattgagaaatggacttttttgttattaaaagtcacctctattttctattttctttgtaatttttaaagtaggaagatgtcagagatgtaaatatgttttcgtctttagtttttttccttttacaaatttttattcttcaggattttcaaaatacagtttagtctgtttctttgacaatatgtattaatttcccaattaacaaaatggtacttattagtgggttgaaaacaattaataatataaaagaaaaattaagtgcttaaaacattttaggagtatacaacttcaaaaaaaaagatagcagtgaggataatgatttaagtaaaaggttgtctgaagcatatgccaactaaatttcgcaacgtttgctacctacctgaaaaggagggtcaggagggagacacaacatatttttgatcatgaaaaagtatcttaattttaaaaaagtgaaaatgccattttattttgaatcccttttagaactcacgacccaagttcatcaatgttgaataataccacgtttaaataacaaaaaaatatggactttaaaaaatctcaaattttttagagacagggtcctgctctgttttccagattggagtacagcagtgcannnnnnnnnnnnnnnnnnctcaagcactggggctcaagcaaacctcctgcctcagcctcgtgagtagctaggaccacaggtgcatgccaccatgcctggctctaaagagaaaaaaaacttgataccatagagccttgaatataaatatcctgatgttaacctactgcttttgctgtgattttttttccttagtgagttttaaatctcaggctagatttttatctgtttttctgtgtgtgtatgagacaaaataaaaataaatatatttgc

SEQ ID NO: 6534 - DNA, 3149 bp, Homo sapiens
  misc_feature (689)..(751): n is a, c, g, or t
  misc_feature (1749)..(1775): n is a, c, g, or t
  misc_feature (1858)..(1874): n is a, c, g, or t
  misc_feature (2942)..(2957): n is a, c, g, or t
  misc_feature (3117)..(3139): n is a, c, g, or t
gcgggccgaggagccgggcgcaatggagcggaagaggtgggagtgcccggcgctcccgcagggctgggagagggaagaagtgcccagaaggtcggggctgtcggccggccacagggatgtcttttactatagcccgagcgggaagaagttccgcagcaagccgcagctggcgcgctacctgggcggctccatggacctgagcaccttcgacttccgcacgggcaagatgctgatgagcaagatgaacaagagccgccagcgcgtgcgctacgactcctccaaccaggtcaagggcaagcccgacctgaacacggcgctgcccgtgcgccagacggcgtccatcttcaagcagccggtgaccaagattaccaaccaccccagcaacaaggtcaagagcgacccgcagaaggcggtggaccagccgcgccagctcttctgggagaagaagctgagcggcctgaacgccttcgacattgctgaggagctggtcaagaccatggacctccccaagggcctgcagggggtgggacctggctgcacggatgagacgctgctgtcggccatcgccagcgccctgcacactagcaccatgcccatcacgggacagctctcggccgccgtggagaagaaccccggcgtatggctcaacaccacgcagcccctgtgcaaagccttcatggtgaccgacnnnnnnnnnnnnnnnnnnnnnnnnnnnnnnnnnnnnnnnnnnnnnnnnnnnnnnnnnnnnnnncggctggaggaggcgctgatggccgacatgctggcgcacgtggaggagctggcccgtgacggggaggcgccgctggacaaggcctgcgctgaggacgacgacgaggaagacgaggaggaggaggaggaggagcccgacccggacccggagatggagcacgtctagggcaggtgctgcggggccacgggggctccctggagtcgggtcctggcagtggggactgcctggtgaacacagatgtgcttgggatgacgggtgcctcccaagagcttcccatctccctagaagagcccaagcgtccccgtcccgtggagtcgctaaagccagccctccatgtccattccagaggccctgccgagagcccgtgctgcctgctggagccgcctgcagacgcggtcctcggccccacgtgaaccaggctcggcggcgaagcccagccttggagacacccaggaggaaggccgtgctcctggctccctcctcggcccgtccccacttcccggggcctcggggcacacagctggggctgcccccacccgaaagaccctccacgctcgtcctctacagagtccggcttcgggaagtgccgggtgctcctgggccctgcctggctccctacgacctttgggctcgaggccagctcctccccatgcccgctgtcccagctccttgagactggagagcagccagcaggtgcccggcagctcggcgccacggcttgctgacagctgggagggtttctcggtctggaggcgtagttttgaaactcacatcacccactgtgcagcgtgaggacgggactctggtctgctgtggggggcatgcaggacggcgccactctctgccctgccatgcggctggtggtgccacagagcctcaccgtgcctgagtggcgtgcccaggaggccgctctccttcagtaaatgtaacacagtcgaggcacgtcatcgggcagccttccctgtgtgccaacgccagccttcgcttctgaaaaccannnnnnnnnnnnnnnnnnnnnnnnnnnacttggtcgcccggcgctgccagaatgctccactgccagccggcccccctgcctcggtttcccttctgtttagtggcgacacnnnnnnnnnnnnnnnnngggtggtgctgacgctcccaggggtgccaggagccactgggacagggtgaggctcccagacgctcctcgaggtgcccagctctccagggagcttctggcccaaggccgtctgagggatctgctccttaaccccccagtgccttggcgagggcaggttccaagccacagacgcctgccccgagtggactctgcggccagtccctggtgccctcctggccctgctgcccagtgagggctcctacgggtgggttcattggcctgggcccagcgagcccccacctgcattgaccttaggcccatagagagggcctgtcccggtgctgccccagccaggatctggtcgctgccccagggggactgatgggcagagtcgcccctgtggctggactgtgaccatccctgatggggcctgaccgcgggagctgaggaagcgccgctccaccgtctgccctccaaggacccgcatggaggcagtgggctggcagcttcctgctgctccctgtcagagtcaaagcacaaatcctcaggacgggctcaagggccagggcagccgagggaagctccaggtggggaccacgtcttcctgaggttggtgcccactggctgggaccctttgcagtggggtggcctcccctctgtctgcctggtggagggagccgtgggcgtggggacgtgactgaataaagccaccatgggtggatgtgcttggaaaaaaaaaaaaaaaaaaaaaaaaaaacaaaaaaaaaaaaaaaaaaaaaaaagggggcgcaaagaaagattctcccacgggggcccacaatatttactgtgtaaccccacgttatttttgtaacaagcaggggcccccatataagggaggccttcgcctaaacatagcagtcgagagacttggcaggcactaatttaaaacacacgacgtgagatggggaaccacggtagcctaggtcgagaggaccatcggagagaggcaccataaccttcgttgcggggtgggaacaatctggcgccacccagcctcaccgcgcgaagatatattaaagctccgacaggaaacaatacacacccatnnnnnnnnnnnnnnnngtgtagtaacaacacggcgaccatatcgtctgggacagaaaaattggtccccggcgatattattggacaaaatttcgccgcaccgatcaaaaaagacgaacaagcgccgcacagaaccacaaaacgagacgcgcacaccgaacacaaaacgaagccaggnnnnnnnnnnnnnnnnnnnnnnnacaaacgaac

SEQ ID NO: 6535 - DNA, 2381 bp, Homo sapiens
  misc_feature (617)..(626): n is a, c, g, or t
cttcccttggggctttaaaaaccacagcccttgggcaggagggaccttcgatcagggggagcccaggagaccagaacatgaactccttcaattataccacccctgattatgggcactatgatgacaaggataccctggacctcaacacccctgtggataaaacttctaacacgctgcgtgttccagacatcctggccttggtcatctttgcagtcgtcttcctggtgggagtgctgggcaatgccctggtggtctgggtgacggcattcgaggccaagcggaccatcaatgccatctggttcctcaacttggcggtagccgacttcctctcctgcctggcgctgcccatcttgttcacgtccattgtacagcatcaccactggccctttggcggggccgcctgcagcatcctgccctccctcatcctgctcaacatgtacgccagcatcctgctcctggccaccatcagcgccgaccgctttctgctggtgtttaaacccatctggtgccagaacttccgaggggccggcttggcctggatcgcctgtgccgtggcttggggtttagccctgctgctgaccataccctccttcctgtaccgggtggtccgggaggannnnnnnnnnccaaaggtgttgtgtggcgtggactacagccacgacaaacggcgggagcgagccgtggccatcgtccggctggtcctgggcttcctgtggcctctactcacgctcacgatttgttacactttcatcctgctccggacgtggagccgcagggccacgcggtccaccaagacactcaaggtggtggtggcagtggtggccagtttctttatcttctggttgccctaccaggtgacggggataatgatgtccttcctggagccatcgtcacccaccttcctgctgctgaataagctggactccctgtgtgtctcctttgcctacatcaactgctgcatcaaccccatcatctacgtggtggccggccagggcttccagggccgactgcggaaatccctccccagcctcctccggaacgtgttgactgaagagtccgtggttagggagagcaagtcattcacgcgctccacagtggacactatggcccagaagacccaggcagtgtaggcgacagcctcatgggccactgtggcccgatgtccccttccttcccggccattctccctcttgttttcacttcacttttcgtgggatggtgttaccttagctaactaactctcctccatgttgcctgtctttcccagacttgtccctccttttccagcgggactcttctcatccttcctcatttgcaaggtgaacacttccttctagggagcaccctcccaccccccacccccccccacacaccatctttccatcccaggcttttgaaaaacaaacagaaacccgtgtatctgggatatttccatatggcaataggtgtgaacagggaactcagaatacagacaagtagaaagattctcgcttaaaaaaatgtatttattttatggcaagttggaaaatatgtaactggaatctcaaaagttctttgggacaaaacagaagtccatggagttatctaagctcttgtaagtgagttaatttaaaaaagaaaattaggctgagagcagtggctcacgcctgtaatcccagaactttgggaggctaaggtgggtggatcacctgaggtcaagagttccagaccaggctggccagcatggtgaaaccccgtctgtactaaaaatacaaaaaattaactgggcatggtagtgggtgcctgtaatcccagctacttgggaggctgaggtgggagaattgctcgaaccttggaggtggaggttgtggtgagccatgatcgcaccactgcactctagcctgggtgaccgagggaggctctgtctcaaaagcaaagcaaaaacaaaaacaaaaacacctaaaaaacctgcagttttgtttgtactttgtttttaaattatgctttctattttgagatcattgcaaactcaacacaattgtaagtaatgatacagagggatcttgtgtacccttcacccagcctcccccaatggcaacatcttgcaaaactacaatgtagtctcataaccaggatattgacattgatacagtgaagatacaggacattctcatcaccacagggatccccaggatgcccacttccctccacccccacaccccagccgtgtccctaacccctggcaaccaggaatccactctccatttctataatgttgtcatttcaagaatgttattcaatggaatcatatagtatgtaacctgttttgagcttaaaaaaaaaagtatacatgactttaatgaggaaaataaaaatgaatattgaaaaaaaaaactttagag

SEQ ID NO: 6536 - DNA, 756 bp, Homo sapiens
  misc_feature (155)..(155): n is a, c, g, or t
gatcacagcggcccgctttctagcagaatgcgtcctcgatctgcgtccccgatcaagacacagccattcgggtcttcgccatccccccctcttttgccagcatcttcctcacaagcttcaccaagttgacttgcctggtcacagacctgaccacntatgacagcgtgaccatctcctggacccgccagaatggcgaagctgtgaaaacccacaccaacatctccgagagccaccccaatgccactttaacctggggagtcggcccccatcacgtgcctggtgacgggcttctctcccgcggacgtcttcgtgcagtggatgcagagggggcagcccttgtccccggagaagtatgtgaccagcgccccaatgcctgagccccaggccccaggccggtacttcgcccacagcatcctgaccgtgtccgaagaggaatggaacacgggggagacctacacctgcgtggtggcccatgaggccctgcccaacagggtcaccgagaggaccgtggacaagtccaccggtaaacccaccctgtacaacgtgtccctggtcatgtccgacacagctggcacctgctactgaccctgctggcctgcccacaggctcggggcggctggccgctctgtgtgtgcatgcaaactaaccgtgtcaacggggtgagatgttgcatcttataaaattagaaataaaaagatccattcaaaagaaaaaaaaaaaaaaaaaaaaaaaaaaaaaaaaaaaaaaaaaaaaaaa

SEQ ID NO: 6537 - DNA, 3254 bp, Homo sapiens
  misc_feature (1589)..(1603): n is a, c, g, or t
  misc_feature (3184)..(3184): n is a, c, g, or t
ctcgaggtaacctttggtagcggaggagttcggaagttttcgcgccgcggtggagtcatcctgggaacctccacgcgactttggtggaggtagttctttggcagcgggcatggcgggtaccgtggtgctggacgatgtggagctgcgggaggctcagagagattacctggacttcctggacgacgaggaagaccagggaatttatcagagcaaagttcgggagctgatcagtgacaaccaataccggctgattgtcaatgtgaatgacctgcgcaggaaaaacgagaagagggctaaccggcttctgaacaatgcctttgaggagctggttgccttccagcgggccttaaaggattttgtggcctccattgatgctacctatgccaagcagtatgaggagttctacgtaggactggaaggcagctttggctccaagcacgtctccccgcggactcttacctcctgcttcctcagctgtgtggtctgtgtggagggcattgtcactaaatgttctctagttcgtcccaaagtcgtccgcagtgtccactactgtcctgctactaagaagaccatagagcgacgttattctgatctcaccaccctggtggcctttccctccagctctgtctatcctaccaaggatgaggagaacaatccccttgagacagaatatggcctttctgtctacaaggatcaccagaccatcaccatccaggagatgccggagaaggccccagccggccagctcccccgctctgtggacgtcattctggatgatgacttggtggataaagcgaagctggtgaccgggttcaaggtggtggggaacctaccgttgccttcctggaaagaagggaggctacacctctgggaccttcaggactgtcctgattgcctgtaatgttaagcagatgagcaaggatgctcagccctctttctctgctgaggatatagccaagatcaagaagttcagtaaaacccgatccaaggatatctttgaccagctggccaagtcattggccccaagtatccatgggcatgactatgtcaagaaagcaatcctctgcttgctcttgggaggggtggaacgagacctagaaaatggcagccacatccgtggggacatcaatattcttctaataggagacccatccgttgccaagtctcagcttctgcggtatgtgctttgcactgcaccccgagctatccccaccactggccggggctcctctggagtgggtctgacggctgctgtcaccacagaccaggaaacaggagagcgccgtctggaagcaggggccatggtcctggctgaccgaggcgtggtttgcattgatgaatttgacaaaatgtctgacatggatcgcacagccatccatgaagtgatggagcagggtcgagtgaccattgccaaggctggcatccatgctcggctgaatgcccgctgcagtgttttggcagctgccaaccctgtctacggcaggtatgaccagtataagactccaatggagaacattgggctacaggactcactgctgtcacgatttgacttgctcttcatcatgctggatcagatggatcctgagcannnnnnnnnnnnnnnagaccatgtccttcggatgcaccgttacagagcacctggggagcaggatggcgatgctatgcccttgggtagtgctgtggatatcctggccacagatgatcccaactttagccaggaagatcagcaggacacccagatttatgagaagcatgacaaccttctacatgggaccaagaagaaaaaggagaagatggtgagtgcagcattcatgaagaagtacatccatgtggccaaaatcatcaagcctgtcctgacacaggagtcggccacctacattgcagaagagtattcacgcctgcgcagccaggatagcatgagctcagacaccgccaggacatctccagttacagcccgaacactggaaactctgattcgactggccacagcccatgcgaaggcccgcatgagcaagactgtggacctgcaggatgcagaggaagctgtggagttggtccagtatgcttactttaagaaggttctggagaaggagaagaaacgtaagaagcgaagtgaggatgaatcagagacagaagatgaagaggagaaaagccaagaggaccaggagcagaagaggaagagaaggaagactcgccagccagatgccaaagatggggattcatacgacccctatgacttcagtgacacagaggaggaaatgcctcaagtacacactccaaagacggcagactcacaggagaccaaggaatcccagaaagtggagttgagtgaatccaggttgaaggcattcaaggtggccctcttggatgtgttccgggaagctcatgcgcagtcaatcggcatgaatcgcctcacagaatccatcaaccgggacagcgaagagcccttctcttcagttgagatccaggctgctctgagcaagatgcaggatgacaatcaggtcatggtgtctgagggcatcatcttcctcatctgaggaggcctcgtctctgaacttgggttgtgccgagagagtttgttctgtgtttcccaccctctccctgacccaagtctttgcctctactcccttaacagtgttgaattcaactgaaggcgaggaatgttggtgatgaagctgagttcaggactcggtggaccctttgggaatgggtcatgaaagctgccatggggtgaggaaagaggagacagtgggagaggacaatgactattgcatcttcattgcaaaagcactggctcatccgccctacttcccatcccacacaaacccaattgtaaataacatatgacttctgagtacttttgggggcacaactgttttctgtttgctgtttttttgttttgttttttttctccagagcactttggtctagactaggctttgggtggttccaattggtggagagaagctctgaggcacgtcatgcaggtcaagaaagctttctttgcagtagcaccagttaaggtgaatatgtattgtatcacaaaacaaacccaatatccagatgaatatccgagatgttgaataaacttagccatttcgtacaaaaaaaaaaaaaaaaaaaaaaaaaaaaaaaaaaaaaagtcgggggccgggaaaagaagggaatgtaatgggccccgggnccatagctggtttccgtgacccaccttttcttggtaaaaagaggggtaaaatcggccggggcctccctta

SEQ ID NO: 6538 - DNA, 2647 bp, Homo sapiens
  misc_feature (2096)..(2096): n is a, c, g, or t
  misc_feature (2165)..(2167): n is a, c, g, or t
  misc_feature (2328)..(2328): n is a, c, g, or t
  misc_feature (2415)..(2415): n is a, c, g, or t
  misc_feature (2535)..(2535): n is a, c, g, or t
tcttaccgccatcttggctcctgtggaggcctgctgggaacgggacttctaaaaggaactatgtctggaaggctgtggtccaaggccatttttgctggctataagcggggtctccggaaccaaagggagcacacagctcttcttaaaattgaaggtgtttacgcccgagatgaaacagaattctatttgggcaagagatgcgcttatgtatataaagcaaagaacaacacagtcactcctggcggcaaaccaaacaaaaccagagtcatctggggaaaagtaactcgggcccatggaaacagtggcatggttcgtgccaaattccgaagcaatcttcctgctaaggccattggacacagaatccgagtgatgctgtacccctcaaggatttaaactaacgaaaaatcaataaataaatgtggattggaagcgcagcaactcgtgtctgagcgcccggcggaaaaccgaagttggaagtgtctcttagcagcgcgcggagaagaacggggagccagcatcatggcagaacaggatgtggaaaacgatcttttggattacgatgaagaggaagagccccaggctcctcaagagagcacaccagctccccctaagaaagacatcaagggatcctacgtttccatccacagctctggcttccgggactttctgctgaagccggagctcctgcgggccatcgtggactgtggctttgagcatccttctgaggtccagcatgagtgcattccccaggccatcctgggcatggacgtcctgtgccaggccaagtccgggatgggcaagacagcggtcttcgtgctggccaccctacagcagattgagcctgtcaacggacaggtgacggtcctggtcatgtgccacacgagggagctggccttccagatcagcaaggaatatgagcgcttttccaagtacatgcccagcgtcaaggtgtctgtgttcttcggtggtctctccatcaagaaggatgaagaagtgttgaagaagaactgtccccatgtcgtggtggggaccccgggccgcatcctggcgctcgtgcggaataggagcttcagcctaaagaatgtgaagcactttgtgctggacgagtgtgacaagatgctggagcagctggacatgcggcgggatgtgcaggagatcttccgcctgacaccacacgagaagcagtgcatgatgttcagcgccaccctgagcaaggacatccggcctgtgtgcaggaagttcatgcaggatcccatggaggtgtttgtggacgacgagaccaagctcacgctgcacggcctgcagcagtactacgtcaaactcaaagacagtgagaagaaccgcaagctctttgatctcttggatgtgctggagtttaaccaggtgataatcttcgtcaagtcagtgcagcgctgcatggccctggcccagctcctcgtggagcagaacttcccggccatcgccatccaccggggcatggcccaggaggagcgcctgtcacgctatcagcagttcaaggatttccagcggcggatcctggtggccaccaatctgtttggccgggggatggacatcgagcgagtcaacatcgtctttaactacgacatgcctgaggactcggacacctacctgcaccgggtggcccgggcgggtcgctttggcaccaaaggcctagccatcacttttgtgtctgacgagaatgatgccaaaatcctcaatgacgtccaggaccggtttgaagttaatgtggcagaacttccagaggaaatcgacatctccacatacatcgagcagagccggtaaccaccacgtgccagagccgcccacccggagccgcccgcatgcagcttcacctcccctttccaggcgccactgttgagaagctagagattgtatgagaataaacttgttattatggaaaaaaaaaaaaaaaaaaaaaaaaaaaaaaaaaaaaaaaaacgggcggtccttagagaacttaattcacctgttccgaaggggggggcccacaataggcctttaatcggcggggctacaccccccacagctgccgtccctcttgtgtacacaaacaaagcagaggcggctcgcccccngcaatatatagtgggggggagagcccgcgcgcgagagttccagagtctaacagacctattgaagagccnnncgcacgcaggggggcgctgcgcggttcacgcccatgtatatatacacacagacgcagccacctacgcgcggagacaccgtgtggtgtgagcacacgcatagtgctgtgtgcgataaacagccacgtgttgtggcagatgcgagataccttcattcttcggncgcgcgcgcacgtaggtgaagacaacccccagtgcgcagcgctttcttctcgggctcgacgcgagcgggccgcggccaacacgtatncaataactgcggggcggcacacatataccgccgctctgctctgtcgccaatagcaaacatcgtgtgacacaaagcaccccgtcgtgcttgagacggcgcaacacagagcaaccgcgtgancgatgccgttgtcttgcaccggcgcgtgctgatatcagagggggggacgcgctctcttacaacatcaacagccccgggcgacgagagctcgaataatagggccgcggcggcg

SEQ ID NO: 6539 - DNA, 1887 bp, Homo sapiens
  misc_feature (1804)..(1804): n is a, c, g, or t
  misc_feature (1816)..(1816): n is a, c, g, or t
  misc_feature (1839)..(1839): n is a, c, g, or t
  misc_feature (1851)..(1851): n is a, c, g, or t
  misc_feature (1864)..(1864): n is a, c, g, or t
  misc_feature (1868)..(1868): n is a, c, g, or t
cagtatccctcctgacaaaactaacaaaaatcctgttagccaaataatcagccacattcatatttaccgtcaaagtttttatcctcattttacagcagtggagagcgattgccccgggtcccacgttaggaagagagagaactgggatttgcacccaggcaatctggggacagagctgtgatcacaactccatgagtcagggccgagccagccccttcaccaccagccggccgcgccccgggaaggaagtttgtggcggaggaggttcgtacgggaggagggggaggcgcccacgcatctggggctgactcgctctttcgcaaaacgtctgggaggagtccctggggccacaaaactgcctccttcctgaggccagaaggagagaagacgtgcagggaccccgcgcacaggagctgccctcgcgacatgggtcacccgccgctgctgccgctgctgctgctgctccacacctgcgtcccagcctcttggggcctgcggtgcatgcagtgtaagaccaacggggattgccgtgtggaagagtgcgccctgggacaggacctctgcaggaccacgatcgtgcgcttgtgggaagaaggagaagagctggagctggtggagaaaagctgtacccactcagagaagaccaacaggaccctgagctatcggactggcttgaagatcaccagccttaccgaggttgtgtgtgggttagacttgtgcaaccagggcaactctggccgggctgtcacctattcccgaagccgttacctcgaatgcatttcctgtggctcatcagacatgagctgtgagaggggccggcaccagagcctgcagtgccgcagccctgaagaacagtgcctggatgtggtgacccactggatccaggaaggtgaagaagggcgtccaaaggatgaccgccacctccgtggctgtggctaccttcccggctgcccgggctccaatggtttccacaacaacgacaccttccacttcctgaaatgctgcaacaccaccaaatgcaacgagggcccaatcctggagcttgaaaatctgccgcagaatggccgccagtgttacagctgcaaggggaacagcacccatggatgctcctctgaagagactttcctcattgactgccgaggccccatgaatcaatgtctggtagccaccggcactcacgaaccgaaaaaccaaagctatatggtaagaggctgtgcaaccgcctcaatgtgccaacatgcccacctgggtgacgccttcagcatgaaccacattgatgtctcctgctgtactaaaagtggctgtaaccacccagacctggatgtccagtaccgcagtggggctgctcctcagcctggccctgcccatctcagcctcaccatcaccctgctaatgactgccagactgtggggaggcactctcctctggacctaaacctgaaatccccctctctgccctggctggatccgggggacccctttgcccttccctcggctcccagccctacagacttgctgtgtgacctcaggccagtgtgccgacctctctgggcctcagttttcccagctatgaaaacagctatctcacaaagttgtgtgaagcagaagagaaaagctggaggaaggccgtgggccaatgggagagctcttgttattattaatattgttgccgctgttgtgttgttgttattaattaatattcatattatttattttatacttacataaagattttgtaccagtggaaaaaaaaaaaaaaaaaaaaagggccgctcgtccaagtggcctataggggcgattacatnactggccgcgtncaacgtctgattggaaacccgcnttccaactattngcttgagcatccntttngcagtgctatacgaaagcc

SEQ ID NO: 6540 - DNA, 2691 bp, Homo sapiens
  misc_feature (498)..(522): n is a, c, g, or t
cacacacgggcgcacgcacacggcagccgggccagggacgaccctgtcagctgcagccccagaggtccggggcgcgcagccgggtcccctcgagggcgcagccggccgccccgccccgcccctcgaagcagccgggccgggcgcgcagtgggctacaaactttcgcagcgcgagtccgccaaggcagcgcgccgactcgggctcggctcggctctgcgctgctccggacggctgtgaccgctggccgggggctcgggccgccggtacccacggaccgcgcgcccgggtgcctgctccgctaagcccctcgccccgcgcggacctcggtatccagcgccctgctgcccgggctctccccgcgcgccctactgccgcgaggtcagtccgcagcctccggtgcgccagcgctcgccttcctcctcctggacttcggccctttgccgccctcaccacgccatggctcatgtccccgctcggaccagcccgggacccgggccnnnnnnnnnnnnnnnnnnnnnnnnnttgtttctgctgttgctccgggatgtggccggcagccacagggcccccgcctggtccgcactgcccgcggccgccgacggcctgcagggggacagggatctccagcggcaccctggggacgcggccgccacgttgggccccagcgcccaggacatggtcgctgtccacatgcacaggctctatgagaagtacagccggcagggcgcgcggccgggagggggcaacacggtccgcagcttcagggccaggctggaagtggtcgaccagaaggccgtgtatttcttcaacctgacttccatgcaagactcggaaatgatccttacggccactttccacttctactcagagccgcctcggtggcctcgagcgctcgaggtgctatgcaagccgcgggccaagaacgcttcaggccgcccgctgcccctgggcccgcccacacgccagcacctgctcttccgcagcctctcgcagaacacggccacacaggggctactccgcggggccatggccctggcgcccccaccgcgcggcctgtggcaggccaaggacatctcccccatcgtcaaggcggcccgccgggatggcgagctgctcctctccgcccagctggattctgaggagagggacccgggggtgccccggcccagcccctatgcgccctacatcctagtctatgccaacgatctggccatctcggagcccaacagcgtggcagtgacgctgcagagatacgaccccttccctgccggagaccccgagccccgcgcagcccccaacaactcagcggacccccgcgtgcgccgagccgcgcaggccactgggcccctccaggacaacgagctgccggggctggatgagaggccgccgcgcgcccacgcacagcacttccacaagcaccagctgtggcccagccccttccgggcgctgaaaccccggccagggcgcaaagaccgcaggaagaagggccaggaggtgttcatggccgcctcgcaggtgctggactttgacgagaagacgatgcagaaagcccggaggaagcagtgggatgagccgagggtgtgctcccggaggtacctgaaggtggacttcgcagacatcggctggaatgaatggataatctcaccgaaatcttttgatgcctactactgcgcgggagcatgtgagttccccatgcctaagatcgttcgtccatccaaccatgccaccatccagagcattgtcagggctgtgggcatcatccctggcatcccagagccctgctgtgttcccgataagatgaactcccttggggtcctcttcctggatgagaatcggaatgtggttctgaaggtgtaccccaacatgtccgtggacacctgtgcctgccggtgagaccactccagggtggaaagaagccacgcccagcagagctgccttctcggagccttctgcaaccaggacttgtggtgcagctgcagacacagagcacagctcatgggcaacatcactggggcccagagagagctgtccgccagtgcatcattagggggtctttcattgctagtgactagccccttaaatgccagcctgagtacctgaaggaatctgggaattagccctggcctgaaagtggcccatcattcatacccactgttctgaaggcttgaaaacaaaacatatccacaacattggcttgatgtgatcatcatctcataactgagcaagaagactatgcaaatcttagggcgctcgctccctgcacacggaaagaactctgtttaaatgctcagttcagaacactttgggccacatagtgattttggaaaacaggataatcgtggtgtaaatgagtgtttcctttcaaagtccactgcagagcttttatccatatggtatgcacatgtagccaatattggtttctttttcttaatatatatattttattttaaaacaacaaaaagggagggcgttgacaccattccccacagagatagtcatgctgagtgtgggttgtttaaacatgcatattgaaataacacatatagtaacgtgggaatactaaaaaataaccaagattttatatttttgtaaattatactttctatactgtagattgtgtatgttatgtgtttttatggaaagctaataaattaaaggtacagtggtatcttgaaaaaaaaaaaaaaaaaa

SEQ ID NO: 6541 - DNA, 2172 bp, Homo sapiens
  misc_feature (452)..(479): n is a, c, g, or t
ctgggcatggctgtgagggaggcacttggtgggatacatgcctgagatggaaacagtctcgtcctcacccagcaggtgggacttgtcggtgggggacaagccaagggtcccgcagctgccagttggccctccttcacatgcttatctgatgtggtgcaggaacaacaggcggaggtgagaggtcagtccacagaagggaggtctgagggagcagccgccacgggtgtcccacccaacgctggcaaacagttctgtgcacaagggatgcagctgaatggtgctgacggtggagctcacagagctcctgcattctcaaggtttggatacattctgggaagggtgaactggtgtaagagtcacataatacgtggaggggtgtaataatcaaaaaaacgtagcaaaacaccttctgtgcctgagccagggttgagggagccgagaagaaagtccannnnnnnnnnnnnnnnnnnnnnnnnnnncatgtctgctggctgatcctccccaaagcctctcctgccacctttttttttttttttttaactaaactaaatggtcaatactgccatctctcttgataatgacaaagtgtttgcacaggatgcctacaggtgtgtgtgtcgctcctcactaatggatccgtagtcatatagctgtgagaggcactcctgggttgaaaatgaaggcaattatcacattactgtcagtcctgactgagtcacctctagagtttatgctttcagccttaattgaaatgaagacaattatataaaattctcacataattgatcacaaatgtgatcacagccactcttgactaagattggtgccggccaatctgctgtgagggaatgaagagaggagaggaactgcgatgtcagtccctgattctactgcaagtttccaagcacatgaaatcccattctagctttggagaccccaatgtgacaagaatctccctgtgctttaaatcatctctcacccatgctaagctgtgatccctcaccaagtctatgaaacctggaaaaggagtgagagtgcgcggggtgtgtgtgtgttttatatattcaggggtcgttccaaaaggggcaaactattgctcttcgtgtgtgtgttttatatattcaggggtcgttccaattaaggctgaaagcataaactctagaggtgactcagtcaggactgacagtaatgtgataattgccttcattttcaacccaggagtgcctctcacagctatatgactacggatccattagtgaggagcgacacacacacctgtaggcatcctgtgcaaacactttgtcattatcaagagagatggcagtattgaccatttagtttagttaaaaaaaaaaaaaaaaaggtggcaggagaggctttggggaggatcagccagcagacatgaaccttctggccgtgtgccagagctgtggactttcttctcggctccctcaaccctggctcaggcacagaaggtgttttgctacgtttttttgattattacacccctccacgtattatgtgactcttacaccagttcacccttcccagaatgtatccaaaccttgagaatgcaggagctctgtgagctccaccgtcagcaccattcagctgcatcccttgtgcacagaactgtttgccagcgttgggtgggacacccgtggcggctgctccctcagacctcccttctgtggactgacctctcacctccgcctgttgttcctgcaccacatcagataagcatgtgaaggagggccaactggcagctgcgggacccttggcttgtcccccaccgacaagtcccacctgctgggtgaggacgagactgtttccatctcaggcatgtatcccaccaagtgcctccctcacagccatgcccagaagcctcacacctcgtcaccaccaccaccccccaccccatcctgaggcactgcctggcagataaccctggttggccacagaagctattaatacacgacagcatgtggggaaggacttatggtgggccaggtggacctcatcctgcttcttcctccctctggtttaaagagatatataaactaatttcacataatttgtgtgtgcaggtgattggtttttacataagtcctatttataccttttatatgttacagaaataaaagttaatttatataaaaaaaaaaaaaaaaa

SEQ ID NO: 6542 - DNA, 1674 bp, Homo sapiens
ctccccttccctgggggggttttcgaataaaaccccccggggagggggccccctggcgttttggccaacttttggggccagaccccccagggtttttgaacaaatggtttgggacccccgtgggggggcggccaggttgttccccggcaaggggggggagatggggccttccaggttttttttccaaaaggaggcgcttgttcaggactgggccttggaactccattcattggagggagggacatcaggccccggagaagcagaaagaggaaagcttggggttgcggggggagcccccatccaagaaagttccggaagtctctgggctcttgaccattgtggatgaggatgtgaagcttgatgatgtccaccactgccccaagtctctatccttgccgacaactgccccttcaaatttttccagccctcaccctgtcaggtatcaaagaagacaacagcttgctcaaccagggcttcttgcaggccaagcccgagaaggcagcagtggcccagaagccccgaagccacttcacgacacctgcccctatgtccagtgcctggaagacggtggcctgcggggggaccagggaccagcttttcatgcaggagaaagcccggcagctcctgggccgcctgaagcccagccacacatctcggaccctcatcttgtcctgaggtgttgagggtgtcacgagcccattctcatgtttacaggggttgtgggggcagagggggtctgtgaatctgagagtcattcaggtgacctcctgcagggagccttctgccaccagcccctccccagactctcaggtggaggcaacagggccatgtgctgccctgttgccgagcccagctgtgggcggctcctggtgctaacaacaaagttccacttccaggtctgcctggttccctccccaaggccacagggagctccgtcagcttctcccaagcccacgtcaggcctggcctcatctcagaccctgcttaggatgggggatgtggccaggggtgctcctgtgctcaccctctcttggtgcatttttttggaagaataaaattgcctctctctttaaaaaaaaaaaaaaaaaaaaaaaaaaaaaaaaaaaaaacaaaaaaaaaaaaaaaaaaaaaaaaaaaagagagggggggccgcgcgcacaagaagatatctccccgcgggggggcgcgccacaagtgccgcgcgcgccgcccgcgcgatatttgcgagcacaagaggggggccccactaaaagggagacgcgcctctcactaaatacgagcagacagacggaggtgcggagccgccagtttaacacacacgcgccgtgacaggggggcgacaaacagcggccgaaagctgggaaccacccatgtgaggaaagaacaccccataaacacgcggaggggggggagggaacccaccacatgggtggggacacacaaccacctccccctctaccgaaggaaatatatatctcacacggcccccctccgcgggcggcgaacactatcacaccaacccctctagcacacgacgggatctcgaccgcgcgggggggtcaacccccaactcccccgccatatcttgttgcccgcggggccagccaagcacagaaagtggtcggcgcccccaccgcggggggcttacatcacccacggacaacccatatcccg

SEQ ID NO: 6543 - DNA, 3373 bp, Homo sapiens
  misc_feature (1006)..(1050): n is a, c, g, or t
  misc_feature (3077)..(3102): n is a, c, g, or t
gcacgaggtttttacccctcctgggatcaccactgacagcatccatcaccttctgcactgctcatctgggcagaggaagcttcagaaagctgccaaggcaccatctccaggaactcccagcacgcagaatccatctgagaatatgctgccacaaataccctttttgctgctagtatccttgaacttggttcatggagtgttttacgctgaacgataccaaatgcccacaggcataaaaggcccactacccaacaccaagacacagttcttcattccctacaccataaagagtaaaggtatagcagtaagaggagagcaaggtactcctggtccaccaggccctgctggacctcgagggcacccaggtccttctggaccaccaggaaaaccaggctacggaagtcctggactccaaggagagccagggttgccaggaccaccgggaccatcagctgtagggaaaccaggtgtgccaggactcccaggaaaaccaggagagagaggaccatatggaccaaaaggagatgttggaccagctggcctaccaggaccccggggcccaccaggaccacctggaatccctggaccggctggaatttctgtgccaggaaaacctggacaacagggacccacaggagccccaggacccaggggctttcctggagaaaagggtgcaccaggagtccctggtatgaatggacagaaaggggaaatgggatatggtgctcctggtcgtccaggtgagaggggtcttccaggccctcagggtcccacaggaccatctggccctcctggagtgggaaaaagaggtgaaaatggggttccaggacagccaggcatcaaaggtgatagaggttttccgggagaaatgggaccaattggcccaccaggtccccaaggccctcctggggaacgagggccagaaggcattggaaagccaggagctgctggagccccaggccagccagggattccaggaacaaaaggtctccctggggctccaggnnnnnnnnnnnnnnnnnnnnnnnnnnnnnnnnnnnnnnnnnnnnngccaggcctgaagggagaaagaggacctgctggccttcctgggggtccaggtgccaaaggggaacaagggccagcaggtcttcctgggaagccaggtctgactggaccccctgggaatatgggaccccaaggaccaaaaggcatcccgggtagccatggtctcccaggccctaaaggtgagacagggccagctgggcctgcaggataccctggggctaagggtgaaaggggttcccctgggtcagatggaaaaccagggtacccaggaaaaccaggtctcgatggtcctaagggtaacccagggttaccaggtccaaaaggtgatcctggagttggaggacctcctggtctcccaggccctgtgggcccagcaggagcaaagggaatgcccggacacaatggagaggctggcccaagaggtgcccctggaataccaggtactagaggccctattgggccaccaggcattccaggattccctgggtctaaaggggatccaggaagtcccggtcctcctggcccagctggcatagcaactaagggcctcaatggacccaccgggccaccagggcctccaggtccaagaggccactctggagagcctggtcttccagggccccctgggcctccaggcccaccaggtcaagcagtcatgcctgagggttttataaaggcaggccaaaggcccagtcttctggggccctcctggtaagtgccaaccagggggtaacaggaatgcctgtgtctgcttttactgttattctctccaaagcttacccagcaataggaactcccataccatttgataaaattttgtataacaggcaacagcattatgacccaaggactggaatctttacttgtcagataccaggaatatactatttttcataccacgtgcatgtgaaagggactcatgtttgggtaggcctgtataagaatggcacccctgtaatgtacacctatgatgaatacaccaaaggctacctggatcaggcttcagggagtgccatcatcgatctcacagaaaatgaccaggtgtggctccagcttcccaatgccgagtcaaatggcctatactcctctgagtatgtccactcctctttctcaggattcctagtggctccaatgtgagtacaccccacagagctaatctaaatcttgtgctagaaaaagcattctctaactctaccccaccctacaaaatgcatatggaggtaggctgaaaagaatgtaatttttattttctgaaatacagatttgagctatcagaccaacaaaccttccccctgaaaagtgagcagcaacgtaaaaacgtatgtgaagcctctcttgaatttctagttagcaatcttaaggctctttaaggttttctccaatattaaaaaatatcaccaaagaagtcctgctatgttaaaaacaaacaacaaaaaacaaagcaacaaaaaaaaaaattaaaaaaaaaaacagaaatagagctctaagttatgtgaaatttgatttgagaaactcggcatttcctttttaaaaaagcctgtttctaactatgaatatgagaacttctaggaaacatccaggaggtatcatataactttgtagaacttaaatacttgaatattcaaatttaaaagacactgtatcccctaaaatatttctgatggtgcactactctgaggcctgtatggcccctttcatcaatatctattcaaatatacaggtgcatatatacttgttaaagctcttatataaaaaagccccaaaatattgaagttcatctgaaatgcaaggtgctttcatcaatgaaccttttcaaaacttttctatgattgcagagaagctttttatatacccagcataacttggaaacaggtatctgacctattcttatttagttaacacaagtgtgattaatttgatttctttaattccttattgaatcttatgtgatatgattttctggatttacagaacattagcacatgtaccttgtgcctcccattcaagtgaagttataatttacactgagnnnnnnnnnnnnnnnnnnnnnnnnnngatatattatttatttatgcactgtactgtatttttatattgctgtttaaaacttttaagctgtgcctcacttattaaagcacaaaatgttttacctactccttatttacgacacaataaaataacatcaatagatttttaggctgaattaatttgaaagcagcaatttgctgttctcaaccattctttcaaggcttttcattcgacacaataaaataacatcaataggacaataaagtgatgggtggcttttaaaaaaaaaaaaaaaaaa

SEQ ID NO: 6544 - DNA, 3608 bp, Homo sapiens
ccgcggagcactggttggagcgccgcgaagcgcccgagcctcttgccttcgcgggcggcgccctggccgccggcagccttgtggccggtgccccgatccgccgcgctccggacccgggcaggcggggcgcgcccgctgcgcgcgggatgtggcagcccagacggccctggccccgcgtgccctggcgctgggcgctggcgctgctggccctggttggcgcggggctgtgccacgccggcccgcagcccgggtatcccgcgcggcccagcgccaggaacaagaactggtgcgcctacatcgtgaacaagaatgtgagctgcagcccgagcccgccccgccgaggcccagcggccccgcaaccgcagaggaccctgggcgacggcccgtcctgccccagcggccccccgaggagaggccgccccagccgccaggctccaccggggtcatcgcggagacgggccaggccgggccccccgcaggcgcaggcgcaccaggatacccgaagtcacctcctgtagcttccccaggagctccggtgccttctctggtgtctttttctgcggggctcacccagaagcctttccccagtgatgggggcgttgtcctctttaacaaagtgctggtgaacgacggggatgtttacaaccccagcaccggggtcttcacggctccttatgatgggcgctacctgatcacggccaccctcacccccgagagagacgcctacgtggaagcagtgctgtcggtctccaacgccagcgtggcccagctgcataccgctgggtacaggagagagttcctggaataccaccgccctccaggagctttgcatacctgcgggggcccgggggcattccacctcatcgtgcacctgaaggcgggagatgcagtcaacgtcgtggtgactgggggcaagctggctcacacagactttgatgaaatgtactccacatttagtggggttttcttatatcctttcctttcccacctctaaggtggctggggagatgtcaggggaaagatagatagttgtaaaaactctaaagctttaatatattcggtttgtatgtaatggaagcacggggctagagtttccacataggccccaacataaaggccttccctcgctgttgaggccaccatgccttactgcatccagccaggctgcagggagtgaggcacacggtgaacatggccactgacttttctgccactctaactggacaactggaagacttggaaaggcctccacctgtatctacactctgagggccctggactgggcctgagcttgccacagaggctccgtctgactgtgggctgggaggagggaggcaggggagagccggtcacggtggctggtctttactgcagggcagcactgtggccagctgtctgtctttacactgcatgcagaagtttaaacactgaagtgccgaagtggcccgtgccgccgcacagagaccccgactttagtttgggctgttccacgcttggctcaccattgccgcctgggacttaacctgctcaggcgggccttcgcccagctgcaaatagggatgcgttagagactgttcccaaagcttgttgggctccttaaatggcatgtacaatttaagtgcaaagacagggagtgtcaataaagatggaaagccatttccagttaaaaaaaaaaaaaaaaaagtggtcccttacagatcgggagttgttgctaaaaagcaaactgaagaaatgttttgtttcaaaaagggctacagaaagtaaccttgagtaaaattaatctcagctacaaaactgttacccctccgcatccaagctatacacttgggttttgtttctggcttgtgaagacggaccagatgtgcacggaggtcaaggccccatgtcatctgcagctggagcggctcctctggggatgctgcactcagatcccacagcagctgcccaggctaacttgatccctgctgcttcactgcaccaatctccagcagacacagctcgccgagctcttgggtttctaagcagcaggaagctcaacctaacgctggccacacgctgacagctgagcccatctgagaacacggcatcttcacacagcgagacgcctccactgaggggaggcccgggagtatcaatctgtcaccagtggccacggagacctctcagcacccttagttcaaggtagtctctgtggatcaggttggtaacacctactggttaatcaagtcccactggggaaaggtttggacggtagaatcaagagctgcagtttccttggcccacaagatgctcttatgctgtaaaaaaaatgctttaagaattgtttgcaaatgaatttacagggtggccactggacacttcagagttcctatttactccccccgccacagctaggaagaccagcaagaactaaaggtttgccgttttactatttaaaatgtggacctctttgtccaggagcgggagggagaatggcatctcaccccattacaacagctggggaactggctaaagagagctgtcagagagtatccttggctgtcctaggaatgactcatggaaagcgccccagtgcagcagtgttttcaggaaaacccagtgggcacgcgccatcgccctctcctctcctctcacgctccttttgaaaagaccgcactcggcgcccaaggggacgtgctcaagagctgcaggggcagggcccaggcaaaaggtgggtgatgactacctgctgctttccctactccgtagatgggtctggaacatcgggtaaaacccagtcctcctctcagtgcatctctactcaccaacaatggtgaatctcagctctgtgtattcaagacaggcaaaacagaatatgcctcattatggctggagcgtgcctctactttgagataaagctggatgacaggtggatcctggcccacttaggagacatctttagaaagggaaaggctgtctttttgtacaggtagtagaacaacaaggtcagctgagcttaaggctgtggggttcgaagcagcccttcaagaagtcatcacccctgaagtagtgcctgcgagtcagtcagaggcataccaaaccctgagacagaatcaggcacaagttcacaacttttttttttttttggggggagacagtcctactctgtcgcccaggctggagtgcagtagcgcgatctcagctcactgcaacctccgcctcccgggttcaagcaattctcctacctcagcctcccgagtagcggggactacaggtgcatgccgccacgcccggttaattttttgtattttagtagagatggggtttcaccgtgttgcccaggctggtcgcgaactcctgagctcagccaatccgcccacctcggcctcccaaagtgctgggattacaggtatgagccaccatgcccagccaagttcacaacttctgatatcaagttgttgctgagaaaaggtcaggacacttcttaagtagagaaggactgtgacatcccctccaaacctccatgtaacactaacaaatggcctcatttacacgattaaaaacaaaatggtatcgtcaataaatgcaaaccttaaactgcatttgaaaaaaaaaaaaggaaaaaaaaa

SEQ ID NO: 6545 - DNA, 1228 bp, Homo sapiens
  misc_feature (12)..(12): n is a, c, g, or t
ggcgactacggngaagaccagagatctagcgactgaagcagcatggccaagcgtgtggggtgcgcctgacggggaaggccaaaacaggtggaggtcttcaggcaaaatcttttccaggaggctgaggaattcctctacagatttcttgccacagaaaatcatatacctgaatcagctcttgcaagaggactccctcaaatgtggctgacttgacttccctctcgggccccactggacatccccatcccagaccctccacccaaggatgatgagatggaaacagataagcaggagaagaaagaagtccctaagtgtggatttctccctgggaatgagaaagtcctgtccctgcttgccctggttaagccagaagtctggactctcaaagagaaatgcattctggtgattacatggatccaacacctgatccccaagattgaagatggaaatgattttggggtagcaatccaggagaaggtgctggagagggtgaatgccgtcaagaccaaagtggaagctttccagacaaccattttccaagtacttctcagaacgtggggatgctgtggccaaggcctccaaggagactcatgtaatggattaccgggccttggtgcatgagcgagatgaggcagcctatggggagctcagggccatggtgctggacctgagggccttctatgctgagctttatcatatcatcagcagcaacctggagaaaattgtcaacccaaagggtgaagaaaagccatctatgtactgaacccgggactagaaggaaaataaatgatctatatgttgtgtggaaaaaaaaaaaaaaaaaaacctccacgagggttcagctgtctcttacttttaaccagtgaaattgacctgcccgtgaagaggcgtgcatgacacagcatgacgagaagaccctatggagctttaatttattaatgcaaacagtacctaacaaacccacaggtcctaaactaccaaacctgcattagtaagactttaccagtcaaagcgaactactatactcaattgatccaataacttgtccaacggaacatgttacccctagggataacagggcattcctattctagagtccatattaacattagggtttacgacctttatggtggatctggacttcccgatggtgcagcccgtaataaggttcgttcgtttaacgtttaaagctttacgtggatctgagttcagaccggggaaattcagg

SEQ ID NO: 6546 - DNA, 1487 bp, Homo sapiens
aacgaaagcttgtatgattgtcgtcacacacccatctgctcactcaccctggcacattcagcccccctaacccaccttgaacattgaccaccacacactccctggcacgctcttctcaccctcaacttctgccacctctccctgggcaatactgccagcctttccctaatctcagagctgcagccctgccctgtcactcacctcaaacctgccatgtccctggggctactgaaattccaggcagtgggtgaagaggacgaggaggatgaggagggggagagcctggactctgtgaaggcactgacagccaagctgcagctgcagactcggcggccctcatatctggagtggacagcccaggtccagagccaggcctggcgcagggcccaagccaaacctggaccagggggacctggggacatctgtggtttcgactcaatggactccgcccttgagtggctccgacgggagctgcgggagatgcaggcgcaggacaggcagctggcagggcagctgctgcggctgcgggcccagctgcaccgactgaagatggaccaagcctgtcacctgcaccaggagctgctggatgaggccgagctggagctggagctggagcccggggccggcctagccctggccccgctgctgcggcacctgggcctcacgcgcatgaacatcagcgcccggcgcttcaccctctgctgaggaacacctgtgccccccgactccccgccccctctcccaatgccgcttcccctgcctgcctgggaagaggaaagggaggggtgccccagaggcaccagctcctggcgggggaggaggaacattcaggtttctgagagctgaattccaagagtgcaaaaccccagcatcctgtttcctctgctgacccagctgggagggggaggaggaggagctcacaccctcaaactcctcaataaacgctttctctggttcccaaaaaaaaaaaaaaaaaaaaaaaaaggcccatactaccccccccgagccccctcacgatcccctcccccacccttccgagggaatccccatagcctaggcgccttcgcgccacccccttgggaattcgcccggggcccccgcactcccgcttccccccccccccggaccaaaaaggccctacgcccccgatgcccccccacgccccccagcagtttccccccccctcctttgcccctatattatgttttcccgcccctaaggtgccgccttgcgcgccgaatattagttcccctcccccccacaccccccctcgtccgccccgagaaagacggcacccgcggtattccccttcccccttaagctcatgtacccccgcccgatccggaccttctccccccctaataatcccccgaccccagtaaccgtcccacaccttaccctccgacccgtgcgacgtccatcggccccatccgcccatcagtcccccccccgcacacccccatcgcccgcccgaacccaatcccccc

SEQ ID NO: 6547 - DNA, 1126 bp, Homo sapiens
actgctttcttgacatctgctagtttgacacgtggcaccggattccatgtgcagctggtaccttggatttgaatgttcttctaaatccaatgactacttgaccttgaatgctgggagccaacaagagagagaccaagcgaaattgacttgtccttcagaggtcagtggaacgattttacaagaaagggaattcgaagcaaacaaacttcaagggatgcagcaaagtgacctcttcaaagctgaatatgtccttattgtggactccgaaggggaagatgaggctgcaagcagaaaagttgaacaaggccccccaggggggattggcaccgcagctatccggcccaagtctctagctatctcgtccagtctggtctctgatgtagtgcgtcccaaaacacaggggactgatctcaagacctcatcacatcctgaaatgcttcatgggatggcccctcagcaaaagcatgggcagactcctacaactcttccaagagcagctggtcgagaaaccaaatatgcaaatctctcctcaccaacttctacagtatctgagagtcagctgactaagcctggagtaattcgcccagtacctgtaaaatccagaatattactgaaaaaagaggaggaagtctatgaacccacccctttcagtaaatacttggaagataacagcgacctcttttctgaacagctgagtcatccaatggtggctattcctgaacatgaagctcttgattccaaagagcaatgaagttggagcagaggctgaaaacacaggctgctgaagttttttggaatgctggtgctaaccacttgctagatttaactttttttttttttccagaatgagtgctccctttatgagctgcagtgcagcagaaccaaaaaaaaagtttgctgcaattatatagcatcacagtgctctgctaacagccagcatagaagagatttacctacagctttttgcaccactgttctagcctttaatgccttctacttaatattaagctgaccgcaatactaacgtgcccctatatttggcagccaaataaagaagaatcgtgggtaaatagaaaaaaaaaaaaaaaaaaaaaaaaaaaaaaaaaaaaaaaaaaaaaaaaaaaaa

SEQ ID NO: 6548 - DNA, 2381 bp, Homo sapiens
tgtcagcttctacagaaaaactctcacactgctctcctctcaacagtagtgcctgttcccactactccacatgacacctacgagggcactacatcactgttgagaggagagcagtgtgagagtttttctgtagaagcagaactgtcagcttgtgccttgaggcttccagaacgtgtcagatggagaagtccaagtttccatgcttcaggcaacttagctgtgtacagaagcaatccagtgtggtaataaaaagcaaggattgcctgtataatttattataaaataaaagggattttaacaaccaacaattcccaacacctcaaaagcttgttgcattttttggtatttgaggtttttatcctgaaggttaaagggcaagtgtttggtatagaagagcagtatgtgttaagaaaagaaaaatattggttcgcgtagagtgcaaattagaactagaaagttttatacgattatcattttgagatgtgttaaagtaggttttcactgtaaaatgtattagtgtttctgcattgccatagggcctggttaaaactttctcttaggtttcaggaagactgtcacatacagtaagcttttttccttctgacttataatagaaaatgttttgaaagtaaaaaaaaaaaaatctaatttggaaatttgacttgttagtttctgtgtttgaaatcatggttctagaaatgtagaaattgtgtatatcagatactcatctaggctgtgtgaaccagcccaagatgaccaacatccccacacctctacatctctgtcccctgtatctcttcctttctaccactaaagtgttccctgctaccatcctggcttgtccacatggtgctctccatcttcctccacatcatggaccacaggtgtgcctgtctaggcctggccaccactcccaacttgacctagccacattcatctagagatggttcctgatgctgggcacagactgtgctcatggcacccattagaaatgcctctagcatctttgtatgcatcttgatttttaaaccaagtcattgtacagagcattcagttttggctgtggtaccaagagaaaaactaatcaagaatataaaccacattccaggctgctgttttctctccatctacaggccacacttttactgtatttcttcatacttgaaattcattctgctattttcatatcagggtacagacttataagggtgcatgttccttaaaggtgcataattattcttattccgtttgcttatattgctacagaatgctctgttttggtgctttgagttctgcagacccaagaagcagtgtggaaattcactgcctgggacacagtcttataagaatgttggcaggtgactttgtatcagatgttgcttctcttttctctgtacacagattgagagttaccacagtggcctgtcgggtccaccctgtgggtgcagcacagctctctgaaagcaagaaccttcctacctattctaacgtttttgccctctaagaaaaatggcctcaggtatggtatagacatagcaagaggggaagggctgtctcactctagcaaccatccctccattacacacagaaagccctcttgaagcaaaagaagaagaaagaaagaaagcttatctctaaggctactgtcttcagaatgctctgagctgaatgctcttgctcctttcccaagaggcagatgaaaatatagccagtttatctatacccttcctatctgaggaggagaatagaaaagtagggtaaatatgtaacgtaaaatatgtcattcaaggaccaccaaaactttaagtaccctatcattaaaaatctggttttaaaagtagctcaagtaagggatgctttgtgacccagggtttctgaagtcagatagccattcttacctgccccttactctgacttattgggaaagggagaactgcagtggtgtttctgttgcagtggcaaaggtaacatgtcagaaaattcagagggttgcataccaataatcctttggaaactggatgtcttactgggtgctagaatgaaaatgtaggtatttattgtcagatgatgaagttcattgtttttttcaaaattggtgttgaaatatcactgtccaatgtgttcacttatgtgaaagctaaattgaatgaggcaaaaagagcaaatagtttgtatatttgtaataccttttgtatttcttacaataaaaatattggtagcaaataaaaataataaaaacaataactttaaactgctttctggagatgaattactctcctggctattttcttttttactttaatgtaaaatgagtataactgtagtgagtaaaattcattaaattccaagttttagcaaaaaaaaaaaaaaaaaaaaaaaag

SEQ ID NO: 6549 - DNA, 2138 bp, Homo sapiens
gtgtggaggagggagcaggctgcctgggtggttgtgggacgcgactcctcctaagccctggacacacttgccctccacccccgccctcgggcatccaggcgcccgtttttgagatagacgtgcccagagggaccccagccccattgcagtgtttcctaggccctgtgggtggaacccccactgggaccccccggggactcctgcaatgcgggccccgaaacgactttcagtccccgacgcgccccgcccaacccctacgatgaagagggcgtccgctggagggagccggctgctggcatgggtgctgtggctgcaggcctggcaggtggcagccccatgcccaggtgcctgcgtatgctacaatgagcccaaggtgacgacaagctgcccccagcagggcctgcaggctgtgcccgtgggcatccctgctgccagccagcgcatcttcctgcacggcaaccgcatctcgcatgtgccagctgccagcttccgtgcctgccgcaacctcaccatcctgtggctgcactcgaatgtgctggcccgaattgatgcggctgccttcactggcctggccctcctggagcagctggacctcagcgataatgcacagctccggtctgtggaccctgccacattccacggcctgggccgcctacacacgctgcacctggaccgctgcggcctgcaggagctgggcccggggctgttccgcggcctggctgccctgcagtacctctacctgcaggacaacgcgctgcaggcactgcctgatgacaccttccgcgacctgggcaacctcacacacctcttcctgcacggcaaccgcatctccagcgtgcccgagcgcgccttccgtgggctgcacagcctcgaccgtctcctactgcaccagaaccgcgtggcccatgtgcacccgcatgccttccgtgaccttggccgcctcatgacactctatctgtttgccaacaatctatcagcgctgcccactgaggccctggcccccctgcgtgccctgcagtacctgaggctcaacgacaacccctgggtgtgtgactgccgggcacgcccactctgggcctggctgcagaagttccgcggctcctcctccgaggtgccctgcagcctcccgcaacgcctggctggccgtgacctcaaacgcctagctgccaatgacctgcagggctgcgctgtggccaccggcccttaccatcccatctggaccggcagggccaccgatgaggagccgctggggcttcccaagtgctgccagccagatgccgctgacaaggcctcagtactggagcctggaagaccagcttcggcaggcaatgcgctgaagggacgcgtgccgcccggtgacagcccgccgggcaacggctctggcccacggcacatcaatgactcaccctttgggactctgcctggctctgctgagcccccgctcactgcagtgcggcccgagggctccgagccaccagggttccccacctcgggccctcgccggaggccaggctgttcacgcaagaaccgcacccgcagccactgccgtctgggccaggcaggcagcgggggtggcgggactggtgactcagaaggctcaggtgccctacccagcctcacctgcagcctcacccccctgggcctggcgctggtgctgtggacagtgcttgggccctgctgacccccagcggacacaagagcgtgctcagcagccaggtgtgtgtacatacggggtctctctccacgccgccaagccagccgggcggccgacccgtggggcaggccaggccaggtcctccctgatggacgcctgccgcccgccacccccatctccaccccatcatgtttacagggttcggcggcagcgtttgttcctagaacgccgcctcccacccagatcgcggtatatagagatatgcattttattttacttgtgtaaaaatatcggacgacgtggaataaagagctcttttcttaaaaaaaaaaaaaaaaaaaaatccactggccacgaaaaccacccaccagtgtaaggagcaagaggtaattatacagagcagtacgacatacaagcgaagagtgagcatctagtgtatgaccacccaaaatgcgcgacgatacaatacatatcagacgaccta

SEQ ID NO: 6550 - DNA, 1426 bp, Homo sapiens
  misc_feature (348)..(357): n is a, c, g, or t
  misc_feature (361)..(377): n is a, c, g, or t
gacagacaattcccggatccctgcggctgcctgcactctggaccacgagctctgagagcagcaggttgagggccggtgggcagcagctcggaggctccgcgaggtgcaggagacgcaggcatggccggtgagctgactcctgaggaggaggcccagtacaaaaaggctttctccgcggttgacacggatggaaacggcaccatcaatgcccaggagctgggcgcggcgctgaaggccacgggcaagaacctctcggaggcccagctaaggaaactcatctccgaggttgacagcgacggcgacggcgaaatcagcttccaggagttcctgacggcggcaaggaaggcnnnnnnnnnnctgnnnnnnnnnnnnnnnnncttccgcgccttcgaccaggatggcgacggccacatcaccgtggacgagctcaggcgggccatggcggggctggggcagccgctgccgcaggaggagctggacgccatgatccgcgaggccgacgtggaccaggacgggcgggtgaactacgaggagttcgcgaggatgctcgcccaggagtgaggctccccgcctgtgtccccctggctgcgctctgagccttcagggccaccgcccgctgctgcttttgtgctgggactctccggggaaacctggtcggtggatgggaaactgcctccccctgggaggaaggctttgcgctccggggcctggatgcggcgccctcgggccgcctgcgagcccctctctgccttcagaccttgggcagaaggaggcctccttgggcctggtccccctttgccctgcagtggaatgagggccccttaaccccgcattgatctaaataaaggactgccgagttccaaaaaaaaaaaaaaaaaaaaaaaaaaaaaaaaaaaaaagagagggggcgggccgccgcagaaaatttctcccgcggagggggcccacaaattaggaggcgctcaccccgttttgctggtgcgaacaagagggtggccccctaagaggggggagccgcttaattataaaagcgcattgaggagcggtgggcgcggggtttttataaacaaggtgtcggttaggtgggaaaaagcgtggcgataagcgtgggagaatttttgggggaggaggggaacacctctttatcttgcgggggggggggggagaaatatatgtgtggggacaaaatacaccccagagagagagatttttttaaagagctctttaagagggggaaacaaatataataagccgatttttaaaagggggtgcatcaagagggtgggttaacacactaggcgcggattatatgtgcggcgcggtgggcgtcaggaaaagaattgtgtggactcacagggggggggtgtgcatgatttggtggaagacatttttttatacccgggggggatctgtgtttaaatatact

SEQ ID NO: 6551 - DNA, 1919 bp, Homo sapiens
  misc_feature (259)..(275): n is a, c, g, or t
agcggacttggcacctgcgacggcgctctctaaggatctcacccgcaaggcggcacgagccggaatcttccagtctcaggctgtttgttcccccgcggggcaatgcgactgcgcgtcgcttcctgattggccgagagttgcgggctgcgtgcgcaggcgcctacctctgttacttagggcgggagcccggcgagggcgccggtgctttgttctgtctgaggccaggaagtttgaccgcgctgccatgccgaaccgtaannnnnnnnnnnnnnnnnactatttcttcgtgcaggagaagatccccgaactacggcgacgaggcctgcctgtggctcgcgttgctgatgccatcccttactgctcctcagactgggcgcttctgagggaggaagaaaaggagaaatacgcagaaatggctcgagaatggagggccgctcagggaaaggaccctgggccctcagagaagcagaaacctgttttcacaccactgaggaggccaggcatgcttgtaccaaagcagaatgtttcacctccagatatgtcagctttgtctttaaaaggtgatcaagctctccttggaggcattttttattttttgaacatttttagccatggcgagctacctcctcattgtgaacagcgcttcctcccttgtgaaattggctgtgttaagtattctctccaagaaggtattatggcagatttccacagttttataaatcctggtgaaattccacgaggatttcgatttcattgtcaggctgcaagtgattctagtcacaagattcctatttcaaattttgaacgtgggcataaccaagcaactgtgttacaaaacctttatagatttattcatcccaacccagggaactggccacctatctactgcaagtctgatgatagaaccagagtcaactggtgtttgaagcatatggcaaaggcatcagaaatcaggcaagatctacaacttctcactgtagaggaccttgtagtggggatctaccaacaaaaatttctcaaggagccctctaagacttggattcgaagcctcctagatgtggccatgtgggattattctagcaacacaaggtgcaagtggcatgaagaaaatgatattctcttctgtgctttagctgtttgcaagaagattgcgtactgcatcagtaattctctggccactctctttggaatccagctcacagaggctcatgtaccactacaagattatgaggccagcaatagtgtgacacccaaaatggttgtattggatgcagggcgttaccagaagctaagggttgggagttcaggattctctcatttcaactcttctaatgaggaacaaagatcaaacacacccattggtgactacccatctagggcaaaaatttctggccaaaacagcagcgttcggggaagaggaattacccgcttactagagagcatttccaattcttccagcaatatccacaaattctccaactgtgacacttcactctcaccttacatgtcccaaaaagatggatacaaatctttctcttccttatcttaatgatggtactcttttcaatttctgaaaacagtaacaggcccaacttccttcttactacagtcatattaaacagatcacatcaatgacaaatgtcactactataaaaactacttaatttgtaaggaaattgtttcatagatttaaaaaaattgtggttggagagcatcttggcatttgtgctttttttcttgagggattgttctgcttcctggctgtatgatgggtatatcattaaagtttggagtcctatatgaacaaaactgacatttttagagttgtacttttgggaatgttatagattgatcattctttctcctgataataaaggtattgaatatctgttatgaaaggttctaaaaaaataaaaaaa

SEQ ID NO: 6552 - DNA, 541 bp, Homo sapiens
cccccatcatcctttcctgtggctcctcaggcttcacctaaagaggaatgcagattccaggacagaatttggaaaatatgccatttactgccagcgttgtgtagaaagaacgcaacaaaatggtgacagagaagcaagaccctcaaggatggaaattctttcaactcttctccgaaacccttatcaccattctttgccctttagtatacctgtgcacttcatgaatgggatataccaggtagttggttttgacgcatctaccacagtggaagaatttttgaatactttgaaccaggacacaggaatgaggaaaccagcgcagtctggatttgcgttgttcactgacgatccttctggcagagatttagagcattgtcttcaaggaaacatcaaggtgaaaccaagtccttttcaggagccaagcccaacgaacagcaaagaagctactctttacaagaagagtaaactttgcaagaagtttaattcaggagttttccaaaactttaaccaatctaatctccacgataagaaaaaaaaaaaa

SEQ ID NO: 6553 - DNA, 2343 bp, Homo sapiens
gacttcttttcttggctaagccgcgtttgtactgtgtcttaccatgcctgaaccggcaaaatccgctccggcccctaaaaagggctccaagaaagccgtcaccaaagcccagaagaaagacggcaagaagcgcaagcgcagccgcaaagagagctactccatctacgtgtacaaggtgctgaagcaggtccaccccgacaccggcatctcgtccaaggccatgggcatcatgaactccttcgtcaacgacatcttcgagcgcatcgcgggagaggcttcccgcctggcgcactacaacaagcgctccaccatcacatcccgcgagatccagacggccgtgcgcctgctgctgcccggcgagctggccaagcacgccgtgtccgagggcaccaaggcggtcaccaagtacaccagctccaagtgagtccctgccgggacctggcgctcgctcgctcgagtcgccggctgcttgactccaaaggctcttttcagagccacccacctaatcactagaaaagagcttgttcacttattcccttagtttcttttcataaagtaagttattttagtgtgaaggtcatgggaaatggcatacgtagctttttaactatttggaactcgaggtccccagtgcgtcattggatttgcttttgaatctagagcgtgtctttactcattgtgctgcttagccttcccaggagtcggttctcaattaggctgttgggaatccgcctctttacccgcccccactcccgccccacacgcgccctggtggctccttgggtctgtttcattctaaaacgaagtggctgagttcggctgtcatttaagagaactccaggacacaattcagcccgggttccgcaaacactgcgtgacagctctgtatgactgacgcttggcagcagcttttgtgtccggtcagccagtttctgccgggcgatgggcctcctgtggataccagccgttctgtgtattttggacgaaggccgcgcagccgggtcccagccttgtcctgattgggcgacaagaatattcaaaattctgcgcctttttctaatttgtagatttcagtttccgtcgttcactttgagactttgaaattcctatttctcattttgttgataatttctgcatttaatggtctgtgctttaaatggtaacgctacggccccaggtcactgcgaggcacttaccatgtagatacgggctcaaaagtcacctctcagagacctacgtcatccactcaggaattcgcgcctctcatacttgcctgtctcattttatcttccttctagcagctgtctgaaattggttcgtctgttttcttgtttatggtattctcaagcccttgacagaccggctagtgtggttttcccgtgcatcttcagcctggcacattatggacacttaaatactacgtattgatctaatattgttgggttaatttttccatcccacccttttcttaatcgcttccgtggatggatgaagggtgctgttcatttccattagatgtatgtgaaggcacagtgaaaatggaaatgttcttggagctacttcctcaaaatgtatccttagtcacctcagtgcaacagctgggagggggccgtgttaagattttttttgctacaaagaggaggtggcaatggtagatccacccttatgcttctcagtttagcataacctcttatggattttcatcaaattcagcgtgttggtcactggaaagagccttttccttctccttttcttactctcccctcatggtgttcccctcttaaaggagaggagcttttaatttacacttaccacctcatttgcttttctggaggccatgcaatataggcgggactacagagttaatctcctttttacaaatgaggccaagagaagcctcattggttcacagtcatgcagctcatactgtccacccttgtattctcagatgcaggacaattgcattttagttttattttgtggaggtgcagaatatttactctttctgtccaacccttgattctgccgaggaagacactgatggtttgatgagtgattcagctgtttttggctaagggcttttggagctgatggcaggggtttgatgaatccaaatgagctctagacattatcacagactgaatagatcttaactgtctcctacatgtgtgttttcaaatgtgtatagatgctattgttattaataaagttaccaattaatttaaaaaaaaaaaaaaaaaaaggccggacccaatggcaaagggatggtacaatcagggccgcgttaaagtggcttggaacctgggtcccattatgcgcggcctttcacgggctatatcgcgt

SEQ ID NO: 6554 - DNA, 3296 bp, Homo sapiens
  misc_feature (24)..(24): n is a, c, g, or t
tttgggttggtttctttcctttancaaaatttgtataaaactggaagtgtgtgtgtgtgagcatgggtacccatttgataagagcaaatgcatttgattgtgaagaagggagagttaaattctccattatgttcgtggtgtaaagtttagagctggaatttattataagaatgtaaaaccttaaattattaataaataactattttggctattgaaaaaaaaaagaaaaaattgaggagctgcctcgcgcagggggtgtgcgaggctgagtccaagagatagcaaatcgagtcttaaataatccggggagaaagacgcccgggtagatttgaggtgcagccttggagggagggattagaagccgctagactttttttcctcccctctcagtagcacggagtccgaattaattggatttcattcactggggaggaacaaaaactatctgggcagcttcattgagagagattcattgacactaagagccagcggctgcagctgggtgcagagagaacctccggctttacttctgtctcgtctgccccaaccgctagcctcggcttgggtaaggcgaggcggaattaaaccccgctccgagagcggcagcttcgcgcgcggtgcgctcggcctatgcctgccccgaggggcgtctggtaggcaccccgccctctcccgcagctcgacccccatgatagatacgctcagacccgtgcccttcgcgtcggaaatggcgatcagcaagacggtggcgtggctcaacgagcagctggagctgggcaacgagcggctgctgctgatggactgccggccgcaggagctatacgagtcgtcgcacatcgagtcggccatcaacgtggccatcccgggcatcatgctgcggcgcctgcagaagggtaacctgccggtgcgcgcgctcttcacgcgcggcgaggaccgggaccgcttcacccggcgctgtggcaccgacacagtggtgctctacgacgagagcagcagcgactggaacgagaatacgggcggcgagtcgttgctcgggctgctgctcaagaagctcaaggacgagggctgccgggcgttctacctggaaggtggcttcagtaagttccaagccgagttctccctgcattgcgagaccaatctagacggctcgtgtagcagcagctcgccgccgttgccagtgctggggctcgggggcctgcggatcagctctgactcttcctcggacatcgagtctgaccttgaccgagaccccaatagtgcaacagactcggatggtagtccgctgtccaacagccagccttccttcccagtggagatcttgcccttcctctacttgggctgtgccaaagactccaccaacttggacgtgttggaggaattcggcatcaagtacatcttgaacgtcacccccaatttgccgaatctctttgagaacgcaggagagtttaaatacaagcaaatccccatctcggatcactggagccaaaacctgtcccagtttttccctgaggccatttctttcatagatgaagcccggggcaagaactgtggtgtcttggtacattgcttggctggcattagccgctcagtcactgtgactgtggcttaccttatgcagaagctcaatctgtcgatgaacgatgcctatgacattgtcaaaatgaaaaaatccaacatatcccctaacttcaacttcatgggtcagctgctggacttcgagaggacgctgggactcagcagcccatgtgacaacagggttccagcacagcagctgtattttaccaccccttccaaccagaatgtataccaggtggactctctgcaatctacgtgaaagaccccacacccctccttgctggaatgtgtctggcccttcagcagtttctcttggcagcatcagctgggctgctttctttgtgtgtggccccaggtgtcaaaatgacaccagctgtctgtactagacaaggttaccaagtgcggaattggttaatactaacagagagatttgctccattctctttggaataacaggacatgctgtatagatacaggcagtaggtttgctctgtacccatgtgtacagcctacccatgcagggactgggattcgaggacttccaggcgcatagggtagaaccaaatgatagggtaggagcatgtgttctttagggccttgtaaggctgtttccttttgcatctggaactgactatataattgtcttcaatgaagactaattcaattttgcatatagaggagccaaagagagatttcagctctgtatttgtggtatcagtttggaaaaaaaaatctgatactccatttgattattgtaaatatttgatcttgaatcacttgacagtgtttgtttgaattgtgtttgttttttcctttgatgggcttaaaagaaattatccaaagggagaaagagcagtatgccacttcttaaaacagaacaaaacaaaaaaagaaaattgtgctcttttctaatccaaagggtatatttgcagcatgcttgactttaccaattctgatgacatctttacggacactattatcactaagaccttgttatggcgaagtctttagtctttttcatgtattttcctcatgattttttctctttatgtagtttgactatgccttacctttgtaaatatttttgcttgtgttgtcgcaaaggggataatctgggaaagacaccaaatcatgggctcactttaaaaaaagaaagaataaaaaaaccttcagctgtgctaaacagtatattacctctgtataaaattcttcagggagtgtcacctcaaatgcaatactttgggttggtttctttcctttaaaaaaatttgtataaaactggaagtgtgtgtgtgtgagcatgggtacccatttgataagagaaatgcatttgattgtgaagaagggagagttaaattctccattatgttcgtggtgtaaagtttagagctggaatttattataagaatgtaaaaccttaaattattaataaataactattttggctattgaaaaaaaaaaaaaaaaaaaaaaaaaattgtttggcgacgagctatgggccctaaagaaacgtttataaaacccaccggtgggggcgcggggcccaagaggtaaggagaaaggtcgcaagggggaccaagagaaactcgggacaaaaaaagggcggggattctaacacataaaaaacccgggggaaaacgatgtttttgaaaaatcccgaggggtcggaggacactcaggggtcttagggaggccaggaggcgataattgccgcgtgcggt

SEQ ID NO: 6555 - DNA, 646 bp, Homo sapiens
gttaaagaattctggtgcccctctttaagtcttcaggaagtgtttagaggcttattcacattagttaaaacaggccccccccaccttccccaaggcaacagaaaacataaccattagctctcttcctgttttccttcctcatttcatgcttgcttcggctgctaaactgaatttttgttacttagaatattataaagtgtggatgctttctataatgctattggtctaagtgtgattaaatttcattaaggtgtataagcctctaattattacataactggcacgtctgacttttgctatcatttgaggattctactgtatataagtttcatctaacattggcattaataaccacaggtatattccaactaattgttacttcttgtaattgccagactacttcaagagttctcgtaagttttagattttcagagacccatcttcaatactttgaactcattctggtaaacttccttctacctatgtgcaggtccctgtactccagccaacacaggctcagtaactggaaatgaattggctaaaatggtagcaccattgggtttcttaatggagctttaggagttctttatggaaaaaagcacagaactaaattcctcccaaaacaaacaaacaaaaccacacacac

SEQ ID NO: 6556 - DNA, 4005 bp, Homo sapiens
tcagaaagggcgaaaggacaatgactcccatgtgtatgcagtcatcgaggacaccatggtatatgggcatctgctacaggattccagcggctccttcctgcagccagaggtggacacctaccggccgttccagggcaccatgggggtctgtcctccctccccacccaccatatgctccagggccccaactgcaaagttggccactgaggagccacctcctcgctcccctcctgagtctgagagtgaaccgtacaccttctcccatcccaacaatggggatgtaagcagcaaggacacagacattcccttactgaacactcaggagcccatggagccagcagaataacttgatccattccagacgctttgctgagtttcataaagcagggcactgagacacccgtccgtgttcctaaccagaaatcctaaagaagaggaattatacagaaggaacagcaggaggttttcctggacaccgccaacttcacattgctcagtggactcattctaagggcaagacattgaaaatgatgaattccaatctggatacagtcatgacagctcatgtgctcctcaacttaggctgtgcggttagccagcctgtaatgagaggagagaggcctgagtcacctagcatagggttgcagcaagccctggattcagagtgttaaacagaggcttgccctcttcaggacaacagttccaattccaaggagcctacctgaggtccctactctcactggggtccccaggatgaaaacgacaatgtgcctttttattattatttatttggtggtcctgtgttatttaagagatcaaatgtataaccacctagctcttttcacctgacttagtaataactcatactaactggtttggatgcctgggttgtgacttctactgaccgctagataaacatgtgcctgtcccccaggtggtgggaataatttacaatctgtccaaccagaaaagaatgtgtgtgtttgagcagcattgacacatatctgctttgataagagacttcctgattctctaggtcggttcgtggttatcccattgtggaaattcatcttgaatcccattgtcctatagtcctagcaataagagaaatttcctcaagtttccatgtgcggttctcctagctgcagcaatactttgacatttaaagagaaatttagagaatattctcatcctctaaaaatgtttaaatatataccaaacagtggccccctgcattagttttctgttgccactgcaacccattacttggtagcttaaaaacaacacattagcttatagtcctggggatcagaattccaaaatggatgtccctgaatgaaaatcaaggtgtcagcagagctgtgctccttctgaaggctctagggagaagccggttccttgccatttcaagcttctagaggctggctgcattcccaggctccagtggctggtcaagcttttctcacatggcatcactgtgacactggccctcccacttccctctttgacttacaaagcccaccaggaagatccaggataatctctccatctaaagatccttcatcatcctggaagagccttttgccatgcaagacaacatagccacaggtggggattaggaccaggacatctttggggtgctgttattctgcctaccacaccttcctgccactgactcccacaggagaggctacaaaatgatctggcgcacagggatgttttgtttagcttgcggactctaacacttaaaaaaaaacccagatcagaagatctggccatgctggggctcacattctcacctagcaacaactggctggagctgggcaccagctctgcctttagaaggggtgtccacttcaccaggtcaccacagcccacactacgccctatcgaggagtgtgcacggatgctgaatgtttgggaatgagaggatgagtgagtgaggcttgaaaacacaccacattgaaaatcctgccacagcagcagccgcagccgccaacagcagcgctgttagtgagctaagtaagcactgacttcgtagaaaaccataacatcggccatcttggaaaagagaaaaacaatggagttacttatttaaaaaaaaaaaaaaaaaagttatctcttccctaggagaggctagaaatagcttttctgtcttttggccagtgccgagtggaatgcctggtttgggggaggaggagggactgggttcagctgtggtgctttgttgtaaaaggcagcctggcctttgctactgaggagaaagatggagcctgggtctcaagcccaccttcgctgtacctttgccacatggtactgtatgcttgccagctagaaggagggtcagggattttttacagtctgagaatgagtgtgtgtgagtgaggcggtatccacattctcaacttcaagtcattgcagtttctttttcccagaaaacaaggggttagatgttgcatttcataaaactaaccgaagttctgtctactgatgcagcccaagagatgtaaaaaaaaaaaaaaaaaaaaaaaaaaaaaaaacacacacacagaggaaagacgctctttaggttttgttttgttttttttttttggttttgttttttgttttttttactctagggaaaacactgacgaatggtcagagctcctatcctgatcttttcatcaaggcgcctttcctaataatatggttcaactgtgaatgtagaagtgggggggaggggggagaaaaagaaaactctggcgttagaggatatagaaaaatataagtacaattgttacaaataacgcagacttcaaaaacaaaaaaatcacaacccaaacaaaccaaaatttaaatgatcagaattggcagcacaaagaaaacgccctctcctgacttgtattgtggcagtctgaacgcccccagaaaattgtgccaaagagtttagaaaaataaatatacaataaaagtaaacacatacacacaaaacagcaaacttcaggtaactattttggattgcaaacaggataattaaatgttcaaacaatctgataaaataaccatttggaaactgcttggccttctgttcttttatttgattgactacaatgcggtattggtctcttgctgcacttcaaaagcaaccaacaaaacaaaaacaaaaaaaagtgtgtgtgtgtggaatacacaaacacactaaactaggaagtgtgtggtgatgaaaatgggcacttggaaaaggggttttatttttccactgaacgttgaaggttaataaaatggtgtcaaacgtcctctggtcacacactggaatatacttttttagaagtgtgatgtggtatgattaccattaaaatcagaattaattattttcgcgcttttacacagggaacaggggcatcctgaattttagagcctttcaccaataagaacggatgttggtggagctttgaatcctctttttggttttgcgcccgataaggagtttttgctgacaattatgaaaaatcttgcttcccaaaaaaacaaaaggacctttctaaacctgatttcccggtcctttggaggcactaaccgccggcaacctgatttcccccttctcaaataaccaccacaaacacaaaactggggcttggcgctcatatctctaaacctccaccgcttctaattcccccacctccaatggtccaacaacgtcccactgcataacgaagaaacaaggctacagacgaatgccgcgcacactatggcgatcaaactttctctgacctcaatggcaccccgctatcacagattatgcgcccaattgcgagtgcacaggtcctgaatcccgagggaacgaattggattgaacgaggtgtccgcgaaaaaatgaatgatacgcgcgcgcggttatacacgccgtcgcggagcgcaaacatcctaagttcgcgaccgtatccgcatctccttatgacaagacctatcacgacaaccacgccccgcgattgaacgaagtcaacgcactgcctaagcaaccac

SEQ ID NO: 6557 - DNA, 1563 bp, Homo sapiens
  misc_feature (1410)..(1489): n is a, c, g, or t
gagatttgaaaagtccttggccagggcgcggcgtggcagattcagttgtttgcgggcggccgggagagtagcagtgccttggaccccagctctcctccccctttctctctaaggatggcccagaaggagaactcctacccctggccctacggccgacagacggctccatctggcctgagcaccctgccccagcgagtcctccggaaagagcctgtcaccccatctgcacttgtcctcatgagccgctccaatgtccagcccacagctgcccctggccagaaggtgatggagaatagcagtgggacacccgacatcttaacgcggcacttcacaattgatgactttgagattgggcgtcctctgggcaaaggcaagtttggaaacgtgtacttggctcgggagaagaaaagccatttcatcgtggcgctcaaggtcctcttcaagtcccagatagagaaggagggcgtggagcatcagctgcgcagagagatcgaaatccaggcccacctgcaccatcccaacatcctgcgtctctacaactatttttatgaccggagaaggatctacttgattctagagtatgccccccgcgggatgctctacaaggagctgcagaagagctgcacatttgacgagcagcgaacagccacggtccgggcggatcatggaggagttggcagatgctctaatgtactgccatgggaagaaggtgattcacagagacataaagccagaaaatctgctcttagggctcaagggagagctgaagattgctgacttcggctggtctgtgcatgcgccctccctgaggaggaagacaatgtgtggcaccctggactacctgcccccagagatgattgaggggcgcatgcacaatgagaaggtggatctgtggtgcattggagtgctttgctatgagctgctggtggggaacccaccctttgagagtgcatcacacaacgagacctatcgccgcatcgtcaaggtggacctaaagttccccgcttctgtgcccacgggagcccaggacctcatctccaaactgctcaggcataacccctcggaacggctgcccctggcccaggtctcagcccacccttgggtccgggccaactctcggagggtgctgcctccctctgcccttcaatctgtcgcctgatggtccctgtcattcactcgggtgcgtgtgtttgtatgtctgtgtatgtataggggaaagaagggatccctaactgttcccttatctgttttctacctcctcctttgtttaataaaggctgaagctttttgtaaaaaaaaaaaaaaaaataaaaaaaattcggagaggatctacatagcacgggaggcaggaaaaacgaggggactatgtgagacaggtggggaccaatgtgggcacaattagcgcgtgannnnnnnnnnnnnnnnnnnnnnnnnnnnnnnnnnnnnnnnnnnnnnnnnnnnnnnnnnnnnnnnnnnnnnnnnnnnnnnnaatacgtgagagccgcgcactaaaaatctccggaataacggcccagggtttaacccccgggcgtttaagtaacc

SEQ ID NO: 6558 - DNA, 5173 bp, Homo sapiens
gactgtgcgcagccccggcgctcacagatggagggtcccagtgcctagtgacgcagccccagcgggaagctccagctggccgtgaagaggccgagtcgagagccgggaggcgcgctgggggtgggctgctgcagcctgcgggttgtttatctggagtacggagtgggtgagtggggggagcctggaaaccgccccgtgtgccatttcctcctcttgttttcactccggattctccatgttggacccaaactgaggagcccggagctgccgctgggggatcggggccgggggcacccgggggagccgctgcccgggccgcccgccctttgtacaggccgcctcccttcccggtccggggaggaaacgagaggggggatgtgaacagctgtggaagtcggagtctcgggagccggagcgggcccccgcccaggccccccagcccagcccagcccgcgcgcccgcccgtcctcccgcccagccagcccgggcccgcgggattgttagatggaacacggctccatcatcacccaggcgcggagggaagacgccctggtgctcaccaagcaaggcctggtctccaagtcctctcctaagaagcctcgtggacgtaacatcttcaaggcccttttctgctgttttcgcgcccagcatgttggccagtcaagttcctccactgagctcgctgcgtataaggaggaagcaaacaccattgctaagtcggatctgctccagtgtctccagtaccagttctaccagatcccagggacctgcctgctcccagaggtgacagaggaagatcaaggaaggatctgtgtggtcattgacctcgatgaaacccttgtgcatagctcctttaagccaatcaacaatgctgacttcatagtgcctatagagattgaggggaccactcaccaggtgtatgtgctcaagaggccttatgtggatgagttcctgagacgcatgggggaactctttgaatgtgttctcttcactgccagcctggccaagtatgccgaccctgtgacagacctgctggaccggtgtggggtgttccgggcccgcctattccgtgagtcttgtttgtttcaccagggctgctatgtcaaggacctcagccgcctggggagggacctgagaaagaccctcatcctggacaactcgcctgcttcttacatattccaccccgagaatgcagtgcctgtgcagtcctggtttgatgacatggcagacactgagttgctgaacctgatcccaatctttgaggagctgagcggagcagaggacgtctacaccagccttgggcagctgcgggccccttagcctgccctgcttccaagcgacggccatcccagtaggggactttcccacactgtgcctttacgatcagcgtgacagagtagaagctggagtgcctcaccacacggcccggaaacagcgggaagtaactggaaagagctttaggacagcttagatgccgagtgggcgaatgccagaccaatgatacccagagctacctgccgccaacttgttgagatgtgtgtttgactgtgagagagtgtgtgtttgtgtgtgtgttttgccatgaactgtggccccagtgtatagtgtttcagtgggggagaagctgaaagaccaagactcttcccaagttagcttgtctcctctcctgtcaccctaagagccactgagttgtgtagggatgaagactattgaagactccattgccaaaccatggcctttcctcagtgttgtaaggcctatgccaaggataaaggaagggtatgcctttgggtactccaggcacacacctttctgaaatccttctccagccagctgctgcagacaaaagatcacatttctgggaagatgagaacttgtttccagaccagcatccagtggccatcaggtcttgtggcccaaaggctatgcttgcctccggctgagtgcctgggataggccttttctatgtctccccaaggctggggtgctgagcctgccttcctcaccacctagccatagtctcaaacctgtggggaaggaggttttctccctgcccgggaagaggacagataactgatttccgttcttttgactgtgttttaaaattctctttctaaacacagagtgttgggcctggtttgtttctgacaaagttacagtcctgggcctgtaatgaatgtcggcggcgctggggttgcagggaaaagacaaatcctcaaagcgtggacgtgtgtccccatggcttgtggatcagctaagctcgggatcatttccataagtctgcttttcagggattctctgctggtgctggtgcaaggacttctgttccaaaggctgggaaaaactaagctgtcccagcccctcccatttcttgggcagggctcttttcctgttgtgtcttcccccagggcctgtcctgtaccgagctctgtctgttccagcctacatccttcctgggtgttgcttttcctcttaagggcctcagaactcttgctcttcctggggtgagggggaatgagtgttcttgacatgtgacagcctaatgcgcatgctttctgcctctggtaacaggagtgagtgagcccctcagacctgcactctgggtgtctcctgcttacaaaggttcttaatagtgaatgctttaaaattaaagtcatcacgaaatggaagttttcccagggtggaaaataagaggaagtgctgctgtaattgggagcacaaggggcctcccaaaaaggagccccacctcagcatcactgccttaatcgtggcctccctggggtgggtggggttctctcctccctccctccctcctcctggggtgggagggcgctcctgttcccatctctgtgttccctggaggcaggtatcacaaagcatttgtgaattgctttaggtgcagggacaccacccactcaggactcttccccatcatcccttccattgccacaccctagatccagcctcaggaactaacaagttttgagaaaagcaggtggtagagcagcagcttcgtgctctcagcggtggctggctggcatttttctctagcgttgtggtgccaccttcccttcttgtcccaaggttataaggccttgtctttctctttggaatcataaagtggaacagagtccccagaactcatgtggccatttccgccagcatcactccccggtgcctatggggtcccggtgtacctaaagggagaaggaccccatgtgctagccagaaatatactgtctcttgaaggaaagcaggagctcagactcttagagccagctgtggcttcggacccaaggcctgacctaggctgctatcctaatattgcaggaggggcctctcttccaagccccaccctaagggttagcccttggccaaatcttttgccgtctaggcccagccaggcttttctgactaaataagcaataagaggctctaagctgactgagttgcaaggaccctttccgccctcccttggatctccatgtttttccagatggcggaagagcatgtgccaccccctttcctaacagacttgtccaagtgcttggcgtgggacccatgaccaaagcccaggatggcttggtgggagtgtccctgctgcatctgcatgaagcccctgctttttaggcctcactcccatcagaaccctgcctgcccacctgcaactcccccccaacaatgccattcccacttgccccagagaagctactcggccaaacctagccagggtctgttcttgtggaccagagccagcctagtcattatttgctgtcgggtttccagtttcaccgtgtgttagggtgagggatgattgtaaaatttgctcctcaaaggaatcaggccagactcaattttggagggcaagacagggaggaggccgcttcatcccagactctcttctagggcttcccaccatcagcccctcccacttgagactggtctttgggaggcaataggccaccatgcctggtcagcaccaattcaagccatgccaggaatctgcctacctgccaggttcagttcttttaaggtgcctcttcagggacacagtgtgtctctctgattgggcttctaaatcaaaagcctgatgttcgtgtccctctcatagggggagctttggacacaggaccagtttggaaaagggtcaggtaagggtttccactctgcacattgtagagggaacactctgtaggcccatgggtcccttactagagaggttgagtgaatttgccttcagttaacatgggaccttctgtttagcttcctcttgcttcccaaagattttaagcattttgtaaatgtataaactcacctctggtaacagtggcccagacgctgctttgtgctaaaagcatgggaaatgtaaaggcagtctttctctgggaaatggatgctattctattctgctgcccctacctgttcctgaggcctcatttagaaagaaaatcccctcagaaggctgtctggcacccagtgtcctagccaggccaagtatatgagaaaggtaagtccattttccccttcaggtcctcagtggattacttaaccactgctgtccctcggtccctttttcctaaacgggtttagttctgtcttttttctccttttttctaaatgctggtaaatatttacattcagccagggaagaggaggccagaggtcgggccagctgccccattcttttaacgttgtagggcctgcccatggagcggaccctcctctttgggcctcgtgagcttttttgcttatcatgttccatttcgtgccgctttcccccttcaagatgccatttggagggtaggggatctgcttcccactgtgactgggctatgggattctgactaccttgcttacagattcatggtttgataaatttgttgtattcaaaaacttgaaatgcaggacgccattaagtgtctgtttatatttttggaatatttgtattacttacaattaattaataaaagtgggtttaaaaaacctttccaggaaaaaaaaaaaaaaaaaaaaaaaaaaaaaaaaaaaaaggggggaaaagaattcccgagggccaattggcaccgtttgtgtaaagggccaatggatttataaaggcggggggtaaagtgggaaggtgtttgggaacctgggttggaccaaaggggaaaaagtgggttgggtgtgaaaaaaa

SEQ ID NO: 6559 - DNA, 383 bp, Homo sapiens
  misc_feature (8)..(55): n is a, c, g, or t
caaaagcnnnnnnnnnnnnnnnnnnnnnnnnnnnnnnnnnnnnnnnnnnnnnnnntatttgggagtgtgcatgaggtacctctgagttttaaaaatgaagaaagtaagtggtcatgctttcctgactctttggtagacacagccttttaagacggtgattctgagctgttatggttttgggttttctataatactaaagcttactgccgacatgtaaccaaaagcttgaattaatgaaaaaaaaattacccaaatgcacgttaaaaacctcttacaacatatgtgcacattcatagataacatgtagaactttattttgtgttaaaaagcttgtagaaaagttcaggcagtgcacttaatgaataaaacttggtctttgtaaa

SEQ ID NO: 6560 - DNA, 2226 bp, Homo sapiens
cccacgcgtccgcttacgcgtccgtcggcacgagggtgagacgctgatgggaggatggacgtactggtgtctgagtgctccgcgcggctgctgcagcaggaagaagagattaaatctctgactgctgaaattgaccggttgaaaaactgtggctgtttaggagcttctccaaatttggagcagttacaagaagaaaatttaaaattaaagtatcgactgaatattcttcgaaagagtcttcaggcagaaaggaacaaaccaactaaaaatatgattaacattattagccgcctacaagaggtctttggtcatgcaattaaggctgcatatccagatttggaaaatcctcctctgctagtgacaccaagtcagcaggccaagtttggggactatcagtgtaatagtgctatgggtatttctcagatgctcaaaaccaaggaacagaaagttaatccaagagaaattgctgaaaacattaccaaacacctcccagacaatgaatgtattgaaaaagttgaaattgctggtcctggttttattaatgtccacttaagaaaggattttgtatcagaacaattgaccagtcttctagtgaatggagttcaactacctgctctgggagagaataaaaaggttatagttgacttttcctcccctaatatagctaaagagatgcatgtaggccacctgaggtcaactatcataggagagagtataagccgcctctttgaatttgcagggtatgacgtgctcaggttaaatcatgtaggagactgggggacccagtttggcatgctcatcgctcacctgcaagacaaatttccagattatctaacagtttcacctcctattggggatcttcaggtcttttataaggaatctaagaagaggtttgatactgaggaggaatttaagaagcgagcatatcagtgtgtagttctgctccagggtaaaaacccagatattacaaaagcttggaagcttatctgtgatgtctcccgccaagagttaaataaaatctatgatgcattggacgtctctttaatagagagaggggaatccttctatcaagataggatgaatgatattgtaaaggaatttgaagatagaggatttgtgcaggtggatgatggcagaaagattgtatttgtcccagggtgttccataccattaaccatagtaaaatcagatggaggttatacctatgatacatctgacctggctgctattaaacaaagactatatgaggaaaaagcagatatgattatctatgttggggacaatggacaatctgtgcacttccagacaatatttgctgctgctcaaatgattggttggtatgaccctaaagtaactcgagtcttccatgctggatttggtgtggtgctaggggaagacaagaaaaagtttaaaacacgttcaggtgaaacagtgcgcctcatggatcttctgggagaaggactaaaacgatccatggacaagttgaaggaaaaagaaagagacaaggtcttaactgcagaggaattgaatgctgctcagacatccgttgcatatggctgcatcaaatatgctgacctttcccataaccggttgaatgactacatcttctcctttgacaaaatgctagatgacagaggaaatacagctgcttacttgttgtatgccttcactagaatcaggtctattgcacgtctggccaatattgatgaagaaatgctccaaaaagctgctcgagaaaccaagattcttttggatcatgagaaggaatggaaactaggccggtgcattttacggttccctgagattctgcaaaagattttagatgacttatttctccacactctctgtgattatatatatgagctggcaactgctttcacagagttctatgatagctgctactgtgtggagaaagatagacagactggaaaaatattgaaggtgaacatgtggcgtatgctgctatgtgaagcagtagctgctgtcatggccaaggggtttgatatcctgggaataaaacctgtccaaaggatgtaatccttcataggtttgaacactgtgtgtttttaccaaagtggccattggcactgtttgcttttttacaatcatgtggacacaagcataagtaaagaaaatttgtcaaccaaaaaaaaaaaaaaaaaaaaaagcgggcccgatgtagaatattaaataaaagggggcccaagcttaacggcctaccccaga

SEQ ID NO: 6561 - DNA, 1711 bp, Homo sapiens
gtggaggttgctgctatgagagagaaaaaaaaaaacagccacaatagagattctgccttcaaaggttggcttgccacctgaagcagccactgcccagggggtgcaaagaagagacagcagcgcccagcttggaggtgctaactccagaggccagcatcagcaactgggcacagaaaggagccgcctgggcagggaccatggcacggccacatccctggtggctgtgcgttctggggaccctggtggggctctcagctactccagcccccaagagctgcccagagaggcactactgggctcagggaaagctgtgctgccagatgtgtgagccaggaacattcctcgtgaaggactgtgaccagcatagaaaggctgctcagtgtgatccttgcataccgggggtctccttctctcctgaccaccacacccggccccactgtgagagctgtcggcactgtaactctggtcttctcgttcgcaactgcaccatcactgccaatgctgagtgtgcctgtcgcaatggctggcagtgcagggacaaggagtgcaccgagtgtgatcctcttccaaacccttcgctgaccgctcggtcgtctcaggccctgagcccacaccctcagcccacccacttaccttatgtcagtgagatgctggaggccaggacagctgggcacatgcagactctggctgacttcaggcagctgcctgcccggactctctctacccactggccaccccaaagatccctgtgcagctccgattttattcgcatccttgtgatcttctctggaatgttccttgttttcaccctggccggggccctgttcctccatcaacgaaggaaatatagatcaaacaaaggagaaagtcctgtggagcctgcagagccttgtcgttacagctgccccagggaggaggagggcagcaccatccccatccaggaggattaccgaaaaccggagcctgcctgctccccctgagccagcacctgcggtagctgcactacagccctggcctccacccccaccccgccgaccatccaagggagagtgagacctggcagccacaactgcagtcccatcctcttgtcagggccctttcctgtgtacacgtgacagagtgccttttcgagactggcagggacgaggacaaatatggatgaggtggagagtgggaagcaggagcccagccagctgcgcctgcgctgcaggagggcgggggctctggttgtaaaacacacttcctgctgcgaaagacccacatgctacaagacgggcaaaataaagtgacagatgaccaccctgcaaaaaaaaaaaaaaaaaaaaacggccgcacacgcgcaaagccaaacggggacaaggaaaaggacccgatacagagatggtccgccttggggcacagctacgacttcgggggaagctacaaccgactaacggggccagaaccgacgccaccaaaacagcgggggggcacgtcacgcaaagcaaccaatgagacacaattggcgaaagcgacggcgccagcaaatgggacccagggcgccccaccagaatgtcacgggccctgagagacacaagcatagttgagcgtaacgtgctctccaccgagacgcgactgcgaacaagaacacgacgcaaagagcccaccatcacaccagacccacaagacacaaaagaacagtcggggaccacagaaccgcacgccgcgaacc

SEQ ID NO: 6562 - DNA, 4314 bp, Homo sapiens
aagcacaagctgggacgcaatgtgtgtccctctatccctacattgactttgcgggggtggggatggggtgcggggtgagtgagggaggactgcaagtgacaaacaggattcgtcaaaagagaggtgtattaaagtgccgatcaaatgtaatttaacagctaaactttccctccttggaaaacaggtgattgttgagtatttaacgtgaatcgatgtaaacctgtgtttggtgcttagacagggggcccccgggtagagtggaaccccttaagctaagcgaacaggagcctaacaaagcaaatttttccgtctgccctttccccctcttctcgttggcagggttgatcctcattactgtttgctcaaacgtttagaagtgaatttaggtccctccccccaacttatgattttatagccaataggtgatgaggtttatttgcatatttccagtcacataagcagccttggcgtgaaaacagtgtcagactcgattccccctcttcctcctcctcaagggaaagctgcccacttctagctgccctgccatcccctttaaagggcgacttgctcagcgccaaaccgcggctccagccctctccagcctccggctcagccggctcatcagtcggtccgcgccttgcagctcctccagagggacgcgccccgagatggagagcaaagccctgctcgtgctgactctggccgtgtggctccagagtctgaccgcctcccgcggaggggtggccgccgccgaccaaagaagagattttatcgacatcgaaagtaaatttgccctaaggacccctgaagacacagctgaggacacttgccacctcattcccggagtagcagagtccgtggctacctgtcatttcaatcacagcagcaaaaccttcatggtgatccatggctggacggtaacaggaatgtatgagagttgggtgccaaaacttgtggccgccctgtacaagagagaaccagactccaatgtcattgtggtggactggctgtcacgggctcaggagcattacccagtgtccgcgggctacaccaaactggtgggacaggatgtggcccggtttatcaactggatggaggaggagtttaactaccctctggacaatgtccatctcttgggatacagccttggagcccatgctgctggcattgcaggaagtctgaccaataagaaagtcaacagaattactggcctcgatccagctggacctaactttgagtatgcagaagccccgagtcgtctttctcctgatgatgcagattttgtagacgtcttacacacattcaccagagggtcccctggtcgaagcattggaatccagaaaccagttgggcatgttgacatttacccgaatggaggtacttttcagccaggatgtaacattggagaagctatccgcgtgattgcagagagaggacttggagatgtggaccagctagtgaagtgctcccacgagcgctccattcatctcttcatcgactctctgttgaatgaagaaaatccaagtaaggcctacaggtgcagttccaaggaagcctttgagaaagggctctgcttgagttgtagaaagaaccgctgcaacaatctgggctatgagatcaataaagtcagagccaaaagaagcagcaaaatgtacctgaagactcgttctcagatgccctacaaagtcttccattaccaagtaaagattcatttttctgggactgagagtgaaacccataccaatcaggcctttgagatttctctgtatggcaccgtggccgagagtgagaacatcccattcactctgcctgaagtttccacaaataagacctactccttcctaatttacacagaggtagatattggagaactactcatgttgaagctcaaatggaagagtgattcatactttagctggtcagactggtggagcagtcccggcttcgccattcagaagatcagagtaaaagcaggagagactcagaaaaaggtgatcttctgttctagggagaaagtgtctcatttgcagaaaggaaaggcacctgcggtatttgtgaaatgccatgacaagtctctgaataagaagtcaggctgaaactgggcgaatctacagaacaaagaacggcatgtgaattctgtgaagaatgaagtggaggaagtaacttttacaaaacatacccagtgtttggggtgtttcaaaagtggattttcctgaatattaatcccagccctacccttgttagttattttaggagacagtctcaagcactaaaaagtggctaattcaatttatggggtatagtggccaaatagcacatcctccaacgttaaaagacagtggatcatgaaaagtgctgttttgtcctttgagaaagaaataattgtttgagcgcagagtaaaataaggctccttcatgtggcgtattgggccatagcctataattggttagaacctcctattttaattggaattctggatctttcggactgaggccttctcaaactttactctaagtctccaagaatacagaaaatgcttttccgcggcacgaatcagactcatctacacagcagtatgaatgatgttttagaatgattccctcttgctattggaatgtggtccagacgtcaaccaggaacatgtaacttggagagggacgaagaaagggtctgataaacacagaggttttaaacagtccctaccattggcctgcatcatgacaaagttacaaattcaaggagatataaaatctagatcaattaattcttaataggctttatcgtttattgcttaatccctctctcccccttcttttttgtctcaagattatattataataatgttctctgggtaggtgttgaaaatgagcctgtaatcctcagctgacacataatttgaatggtgcagaaaaaaaaaagataccgtaattttattattagattctccaaatgattttcatcaatttaaaatcattcaatatctgacagttactcttcagttttaggcttaccttggtcatgcttcagttgtacttccagtgcgtctcttttgttcctggctttgacatgaaaagataggtttgagttcaaattttgcattgtgtgagcttctacagattttagacaaggaccgtttttactaagtaaaagggtggagaggttcctggggtggattcctaagcagtgcttgtaaaccatcgcgtgcaatgagccagatggagtaccatgagggttgttatttgttgtttttaacaactaatcaagagtgagtgaacaactatttataaactagatctcctatttttcagaatgctcttctacgtataaatatgaaatgataaagatgtcaaatatctcagaggctatagctgggaacccgactgtgaaagtatgtgatatctgaacacatactagaaagctctgcatgtgtgttgtccttcagcataattcggaagggaaaacagtcgatcaagggatgtattggaacatgtcggagtagaaattgttcctgatgtgccagaacttcgaccctttctctgagagagatgatcgtgcctataaatagtaggaccaatgttgtgattaaaatcatcaggcttggaatgaattctctctaaaaataaaatgatgtatgatttgttgttggcatcccctatattaattcattaaatttctggatttgggttgtgacccagggtgcattaacttaaaagattcactaaagcagcacatagcactgggaactctggctccgaaaaactttgttatatatatcaaggatgttctggctttacattttatttattagctgtaaatacatgtgtggatgtgtaaatggagcttgtacatattggaaaggtcattgtggctatctgcatttataaatgtgtggtgctaactgtatgtgtctttatcagtgatggtctcacagagccaactcactcttatgaaatgggctttaacaaaacaagaaagaaacgtacttaactgtgtgaagaaatggaatcagcttttaataaaattgacaacattttattaccacaaaaaaaaaaaaagaaaaaaaaaaaaaaaaaaaaaaaaaaaaaaaacacagcacagaaaaaaaacgcaaaaaaaaaaaaaaaagacgctacacacccgaggaatgagacacagcacacagacgcagcaggggcagacagcaccacctacaacgagaggaggaccagcgaagaaaacaacaacaaagagcacacccacaaagagagagaggaaatacaacacagaaaagggagaaaacacaacacagagaaaaaaacgatagccagcaaaaa

SEQ ID NO: 6563 - DNA, 2232 bp, Homo sapiens
gcctggccagcgcggactcccggcccggagctgcttctgattaccgcgaggggcccggacgcgagagccgccgcggggcctgccctagaagcggaatgatgaactgtggcttcccccctgcggtgctgaactcgcccgtgtagctgtgattttagagctgccgacaactctaaaactgggctcgcgccccgcccaccccgcggggattggctgcgaaagcggaagaaaaaaagcccaagccccgcgcccgcgcccaccaatggaagcgcccgctcgtcttgatagacgtgccaccttccgccaatggggacgaagggaagctccagcgtgtggccccggcgagtgcggataaaagccgccccgccgggctcgagcggattctgagccgagcccggtgccaagcgcagctagctcagcaggcggcagcggcggcctgagcttcagggcagccagctccctcccggtctcgccttccctcgcggtcagcatgaaagccttcagtcccgtgaggtccgttaggaaaaacagcctgtcggaccacagcctgggcatctcccggagcaaaacccctgtggacgacccgatgagcctgctatacaacatgaacgactgctactccaagctcaaggagctggtgcccagcatcccccagaacaagaaggtgagcaagatggaaatcctgcagcacgtcatcgactacatcttggacctgcagatcgccctggactcgcatcccactattgtcagcctgcatcaccagagacccgggcagaaccaggcgtccaggacgccgctgaccaccctcaacacggatatcagcatcctgtccttgcaggcttctgaattcccttctgagttaatgtcaaatgacagcaaagcactgtgtggctgaataagcggtgttcatgatttcttttattctttgcacaacaacaacaacaacaaattcacggaatcttttaagtgctgaacttatttttcaaccatttcacaaggaggacaagttgaatggacctttttaaaaagaaaaaaaaaatggaaggaaaactaagaatgatcatcttcccagggtgttctcttacttggactgtgatattcgttatttatgaaaaagacttttaaatgccctttctgcagttggaaggttttctttatatactattcccaccatggggagcgaaaacgttaaaatcacaaggaattgcccaatctaagcagactttgccttttttcaaaggtggagcgtgaataccagaaggatccagtattcagtcacttaaatgaagtcttttggtcagaaattacctttttgacacaagcctactgaatgctgtgtatatatttatatataaatatatctatttgagtgaaaccttgtgaactctttaattagagttttcttgtatagtggcagagatgtctatttctgcattcaaaagtgtaatgatgtacttattcatgctaaactttttataaaagtttagttgtaaacttaacccttttatacaaaataaatcaagtgtgtttattgaatggtgattgcctgctttatttcagaggaccagtgctttgatttttattatgctatgttataactgaacccaaataaatacaagttcaaatttatgtagactgtataagattataataaaacatgtctgaagtcaaaaaaaaaaaaaaaaaaaaaaaagaaaaaaaaaaaaaaaaaaaaaaaaaaaaaaaaaaaaaagaaaaaacaaaaaaaaaaacaaagaaataaagaacaagaaaaaaacaaaaaaaaaaaagaacaggagggggcgcggcggccaactagatactaaatcctcgcccacgaggaggccacccataataaccgcccacgcacgtttttttgttagagaaaagagcggcgcaccaaaaaaacgaggaggtaattaaataattcaaccacgcggaggggcgccagatcaaaacaaaacacagccagggtgggaagaaacaacaacgactcgtcgagaccgagcacctcttgaagaaaaacaccacacccacatggcggggcgaggaacaaataacatgcggacacaaccacaccccgacaaaagtaaacacacacccaccagggaacccaacaaacacaaaatagacagcggcgtagaaggggagacacaccaaaaccgacgatctaaagagggcagggaaaaacagaatcgtagctacgacgaatgacctaaaacaaaaaaaaaaacg

SEQ ID NO: 6564 - DNA, 4329 bp, Homo sapiens
  misc_feature (1962)..(2058): n is a, c, g, or t
ggagtcgggttacaccacttgtgtctgagttcacgcagcatgttcctctgtcagggattccgcaaatatctccctgaggtaaaaaaggaaagtgtgctgcgctccagcacccagagcagtgagcccagtcccgagtcccggagagagctccagcaataggggccatgtcgccatagccccagcctctcggtccgcagcctcagcagcgtcccagccggctggcttcatgctgcggtgcagctgcaccatgttcctgggttgagggggcaatcgggcacgctcctccccatgggttgcccatcatgtctaatggatatcgcactctgtcccagcacctcaatgacctgaagaaggagaacttcagcctcaagctgcgcatctacttcctggaggagcgcatgcaacagaagtatgaggccagccgggaggacatctacaagcggaacactgagctgaaggttgaagtggagagcttgaaacgagaactccaggacaagaaacagcatctggataaaccatgggctgatgtggagaatctcaacagtcagaatgaagctgagctccgacgccagtttgaggagcgacagcaggagacggagcatgtttatgagctcttggagaataagatgcagcttctgcaggaggaatccaggctagcaaagaatgaagctgcgcggatggcagctctggtggaagcagagaaggagtgtaacctggagctctcagagaaactgaagggagtcaccaaaaactgggaagatgtaccaggagaccaggtcaagcccgaccaatacactgaggccctggcccagagggacaagatctaaaaaaaataatgctgggaagtcctaaccacatcaagaatgcctcagatcagtgacccaaggaccttccagaatggatgaaatagacccaaagctgaattcacctaattttagggccaaaaacccaaaaaacaaaacaagaccaaaaaaatcttcagatactgggagaacaaatctcaattgctcaattgtatcttatgaaaacaatttttcaaaataaaacaagagatatttaagattcattaagttcttgtcatttcaaattttaagaaaaatattttctaatggaattacatatatttatatgattcttctagttatatccatggtaataaatactcttttcagttggaaataaaacccatttgtgctatattattagggaaaatatctacataaattagtttttaatttaactaaagtctatcttttgaattcataagcataaaattttaaccacttgcaaaatttataacacacttaaggtagtcagatgccttgtcaagtagtttaacaaaagtgattttcacctgtttgttttaataacagtgcatcgattttatgaaaatcaggcatgccctcgggtcctaacaaagtatacgaagctgaatggatctatgccaaatatgccagattttactttctgagtctgattttatacttctgtcctctttcttaccacatggcttccagtatcacttacagactaacccttcaaaaggagaaggctaagttactaacatttggaaggcttatgaaagtgaagcatagttatgagccagcaatgtttttatttagggaatgtgtgcaaaccacacacttaagcaagctctggggaatgagagttggggggaatcaactgttttatttgctaattggtatttcctttaaaagatagagttcttccagattttaactgtgttaatagttactctagaaaaattggagatttgtgtgcatatattttatgttgtaaacagacacatacccagagacactgagagagacagacagacagtaaacagaggagcactaaccacaaacggtttacaaatgacctctgtgctcattcacctgtctgttccccaccttgccttttatagcaactatagcaacagccatgagagtcattgtggannnnnnnnnnnnnnnnnnnnnnnnnnnnnnnnnnnnnnnnnnnnnnnnnnnnnnnnnnnnnnnnnnnnnnnnnnnnnnnnnnnnnnnnnnnnnnnnnaaaaaatgaataaaggcaccgatccagagtattgaagaaggcagagtggagagcctagtaatgagtatctggtaccccagtatcctctcccacagaatctgtacagctctccgtttatgacagtttaaacttaatttaaattatcaaacagacactttcctcaaacatataaatgatgaggcagttcattcaggctgtatgtataaagttgttccagccacctttttctaacggcttctctatatcttttacatggagacaatgagagatttgcttaggacaatttgactgtaatttagaagtaggaaatgggaagtatttgtatcttctttgcctaactcacattagttactcaagtaagcatttcttccgttattgcattttcctgattacaagttttatgttttctctaaaacacatatcaaaagaaatgtcctaagcactatgcagggggaagccatgacatttatccaccactgtcagcaaaaacatgaacttagccctcaacagaatatttcacttcattctagtgtcacctctgcgtcacctgcactggagtcaccacttgcctgttgggtaagaccaggatgcaccgctgaaataaaaaggggtcagacaatacaagaaaagccagtagaaattgccaaatgtatcagaatacacacaggctttcttaggatatggcccaagaggaaggctctagagcccaccctgaaacaggatttttgacttcacagagaaattatttaattttcaataacacaattcaattaaagaaagggaaatacaaggctaaacaaataagaaatgaagacaaaaacccaacctttcaaatctaaagaaaataatctgttttaaagacacagatgaagatcaggaacccaaaacagaagaaaggaaaagcaattaacgctggcatctgataacaacgaaaagtatggagtctggagaatcgctagactctaaaaattataaaggtttagacttggactttgtacactgaagaaaagaaaactgcatgcatttatactgaccaatgtacactattgctgctttttaacttttgtgtatatgtagggtagatttttttttaagtgaaagcaagcttattaagaaagtaaaagaataaaaaggtgacttctccataggcagaaaactagcgtagtttttttattagaaattgttattcaataatagtacatgttacaaataaataccattttaaactgaaaaaattgtagactttcaaatcagttagggtggtcaccctaaaaaagggcatttttttccccttagtctccttgttcatgttgctcacaacaagaaatgggctaatgctatgaataataataacaaacactgccttctgtcaggccctgtgctgaataccgtctgcatatgtataggaaagggttaactcagcaggtcttgtttgcccagactctgtacatttccaagaaaggtctgcctttaggactggtccttggccagctcctggagaatgagctctcagcttttagaaaattctatctgctaagaatagttttgcatgtctcaggtcttgggccacaaaatatcagtttaatcagatggtttatgttaacaagtatgatttatggcaaacatagatctctaatctccatttctctctcatatatctatatttatctatccatatatatgtacctatatatatcaaatataaagatatgtttatagcaattgtatatacgtagagagataatatgtagtatgaagagagacatagatattattcttcattttagaatgttatcttggtatgtttaaaaggaaaaacttaagatgtgttgcaattgcagtatgagtttcaggtatgtacatgttatgtgtgtgtgtgagagacacacacaaacacatttcaaacatgttttatgtttaagctcaatattcaaacacagaaatataacatctattcttaatatgttttatgtaagtacagcagcagcattattaaatactgtatttctatggtgattgaaaattagtaggcagagaatttttgtaatggttcttaataatttttgtaatagtaaatgattactttttgtttagtatagttttataatctatacatgaataaagtggatatttctattcatatagaaatgtgatttactctcatgtacttatctacatgctaaaaccataagttatcaattttagttctgtgccaaggcacttttactgaataaaaataatcagctaattttaaaaaaaaaaaaaaaaaaa

SEQ ID NO: 6565 - DNA, 6901 bp, Homo sapiens
  misc_feature (291)..(310): n is a, c, g, or t
cagggggagcaccgagcaccacggtgtcgtgcgcttcgaggcgcggcgtgggaagaaggctggttcattctgccacccctctgcattaagacacaaggtgctgaccgcagagacctgccatgaaaccacacttgaagcaatggagacaacgaatgcttttcggaatattcgcttgggggctcctctttttgctgattttcatctacttcaccgacagcaaccccgctgagcctgtacccagctccctctccttcctggagaccaggaggctcctgccggtgcaggggaagnnnnnnnnnnnnnnnnnnnncgcacatgagccctccccgcctgggggcctggacgcacgccaggcgctgccccgcgcccacccagccggttcctttcatgcggggcctggagacctgcagaaatgggcccagtcccaagatgggtttgaacataaagagtttttttcatcccaggtggggagaaaatctcaaagtgctttctacccggaggatgacgactacttttttgctgctggtcagccagggtggcacagccacactcaggggacattgggattcccttcccccggggagccaggcccacgggagggggcttttccggctgcacaggtccagaggaggcgggtgaagaagaggcaccggaggcagagaaggagccacgtgttggaggagggcgacgacggcgacaggctgtactcctccatgtccagggccttcctgtaccggctctggaaggggaacgtctcttccaaaatgctgaacccgcgcctgcagaaggcgatgaaggattacctgaccgccaacaagcacggggtgcgcttccgcgggaagcgggaggccgggctgagcagggcacagctgctgtgccagctgcggagccgcgcgcgcgtgcggacgctggacggcaccgaggcgcccttttctgcgctgggctggcggcgcctggtgcccgccgtgcccctgagccagctgcacccccgcggcctgcgcagctgcgctgtcgtcatgtctgcaggcgcaatcctcaactcttccttgggcgaggaaatagattctcatgatgcggttttgagatttaactctgctcctacacgtggttatgagaaagatgttgggaataaaaccaccatacgcatcattaattcgcagattctgaccaaccccagccatcacttcattgacagttcactgtataaagacgtcattttggtggcctgggaccctgccccatattccgcaaatcttaacctgtggtacaaaaaaccggattacaacctgttcactccatatattcagcatcgtcagagaaacccaaatcagccattttacattcttcatcctaaatttatatggcagctctgggatattatccaggagaacactaaagagaagattcaaccaaacccaccatcttctggtttcattggaatcctcatcatgatgtccatgtgcagagaggtgcacgtgtatgaatatatcccatccgtgcggcagacggagctgtgccactaccacgagctgtactacgacgcagcctgcaccctcggggcgtaccacccactactctatgagaagctcctggtgcagcgcctgaacatgggcacgcagggggatttgcatcgcaagggcaaggtggttcttcctggcttccaggcggtgcactgccctgcaccaagtccagtcattccacactcttaaaaagggtttcttgggaatcaatgtgcaataaggtactactgttgtactcaaagtcacaaaagaatacttgaagatagattttagacagtgtagttttgagtctttaaacagtaatttagtggtggtcatgataatccttctctttctaagccattgagtatgtattactgctttgaacatagaaatggtttttttaaaaaaataaggctcaagaaagatgcaaaaccaaggatagctagaaagaaaacacatgtatgaccatgggtatgatacctccagaaatgttaacaacttattcttctgccatgagtacccctcatcagggttggtttcaatgacaggttttggtgatgttcctgaccatatgaagtggtttatgtttagaaacattcaaattgagggacatcatttacagcatcgagtgtgtcagttatacatgcattcatcattaaatatcctaggttttatgacagacattgaaattatcactcagatgtgtttaacagcaaaaaattcccagcacatcctggcaaaggcttttatttccaaccgttgcattcttcatctctgcctcccattgcccactgaatgctttgctttctgtgcatcaagacagagttctaaaaccagaaaacatccatcttgaaaggtccaagaaaaagccaaattccatatagcaccacagaggaggccctttgtttccctgcagtatttcaaccaggaacattagtatcacatccaccaggaggcacatcactggcaagtaacatagaatcacagggctgcaggtgcccctggacactccccggttctggcttttctgccttgtacctcctcacctgcagatctaccctgcagcttttgcatagtcagtgacacacttgacaattggcacagctgtgctggggaagacgggagacaccttgctccttccaaactagaaggaaagattttggagccatcaccctgtgcttctagggatgcacgcctgtctttattatacaggtttcttgcaggtttttatcagccagtgggaactccacagtgatgagcactgaatcttcactaaatcttcctacagacatttaggaatccagtccttgcttttgcagatatgttttatgtcagcagcatgacaaagccatataattaaataatttatgtgaaagcattgcttattaacaaggaaaatatgtagatgcttcagagggaaaggcagctagagggaaattttcatcccaatatgttagctatattcagggttgattttttctttaatctcaactgtcactgatacattgaaaaatttttgctatgaatatagtgaaacagaaacattctgtaataccttaattaaacatgctattatttcaatgtataaccaaaacatatctccatggtacagttaagacttgttgcaatgacaatagcagcttaattaaatgcgttctcccttgcaaaatgtatgaatgtcaggagagtttagtggaaaagttttctttgtttcaggattggtttcttctagactgttctcaggactactttcttgagcaagaatggcttacagagactgaaggcttctgtttggttagtctattcagcagatatggagctggaaaacaagacatctcctatagcttgctataatagtgaaggagaaattggaaagttttaatcacaataatatccaataaaagcccattttgagagttttgttattaagtcaatgagaagggataggtaactttgtcctatatattaacttatgtctaaatagacatggttaagccatgttcctttctaatttcttttcttttcttttttttttttttttttttgagacagtctctcgctctgtcgcccaggctagagtgcagtggtgcgatcttggttcactgccagctctgcctcccacgttcacaccattctcctgcctcagcctcctgagtagctggggactacaggcacctgccaccacgcccagctaattttttgtatttttagtagagacagggtttcaccgtgttagccagggtggtctcgatctcctgaccttgtgatctgcctgcctcggcctcccaaagtgatgggattataggcgtgagccaccaccgcgcccggtcattcctttctaatttcttgaaaaaactttgtcttgtccttatgtttacatgtgtgtaataatttcagcaactctggaatgtgggtgaggtggctgtggtggatgaatattactccctaccctccttggatctttctagatcttccagaccattaaatgcccctgaagctccttttatagttttgcaagtggatttacttgtagacatccttactatccagcataatcccccttggctgacatgagaacttggttagaggagaatttattggggtcagtgtaaatattcaagttcaaaagcctcagaacccaacactttaaagatttttaaatggaattttgtcgtagtcattgtacttttaaaatagtactttcagtttcattgaggttacaagaaagactgaagagtacaaaggaaatttagttacaatttttgcatttattatggccttaaagactcttgggaatcaggctctgttcaacagtcaataaatgtaatacacacattaatatagtactgactgggcgttcttctataaaagtttaagttctttggcttctaagaaaatgttgggcagttacagttaacttgatgactacttctggtattagccaaatgggtcctaagtggcagcattttgccagacattgactaaatccttacatgccacatttactgaattccaataaacatatagttcttctgtggagtagttaacagtaagtggcagctcactgaatttctcccaggttctgtctcttccaaaatcctccatcctctcttatgaagggaagctgataaaaaaaaatcctcttggtgcaagctgaagctgttaaggattccttttttcactctcaggaccaacagacattcttttgtatttcaagataatttcacctgttgttgttgttgttgttgttgttgttgttgttgttgttgttacaaagaaacaaattttgagcagcaatgacaattcaaccatatctagattctccctaccttatttctccagccagtcacaccaggcagacgggtaacctttaacagacctggtgttctcatggaataccgatgctcgtcccagggagctgacctttctcactatgtccttatagagctgctcttacagagaactttgtgctcaggaccaagggatggtcaattaaaagttgcatgtaagcatcaggcttggatgggcaagggagggcttttatacatctttgaacgaccaggtctttccttgtctgcctgaaggcagagcttcgagaaacagcacttcccatgtgtctggtcctcttggtctctcagccagacacttaatcaatcctggactctccagtagtcctcagtcattgtagccatagcatctgcaaaaaaagaaatgctaaaataatcattagcgttttcaaaattaggaaatcaaagtagctgggtcactctcttacatgtgtatgagccagttaattctgctggacagatcatacttacgctgctgattgactcttctgagcagtaacacatctcctgaattaattaggtaggtcccgtttgggtgctttaagtgggatcagtcttagatgagtgccagtatgtgattgaatttcatacgcacaaatgccatgattcaagttctctctccagtttttcttatagatcaacacacagtacatgtggtcagttacttggttgaatttctgcttagctgtggtaagagacagagaaagggagtgaggtgggaccaggggaattatcagaaagacatgagtgaacctattggccaggtagcttccaagtatgttctattgtattgtctgttttgattctgatagtttagaactctttctgatagtttagaactcttacccagtggttacatgactgatcaaggcaactccatctggaaattaattgcttgggtaaaatgtccctgagtttcaacttgtcttttatctctggatattctcttatgagattattatgcatgtttctgtcacatgggcattatttacacacttgataaatgaaaggtatttctctgtccgttcaaggaaataaaatgtaagttcttgttttattaaatgaatgaagccttttggttaaaaaaaaagtaatgtaatatgtttctgttcaaacttgagctaatgacatttaaggaattaaagacattgatctagttcttagtatgaaaagtgtacatgtagatatagttatataattgtgtatatacatatctacacacatggttggttttatattgctttttcatcaatatttttgactgaaacctttacaataaattttattttaattatgtaaccactaatattttgagagaaggaagcaaatgttatatgtccttctgttaaaagaaaaaaaattcagtcctccgccaaccgcttcccacacactcatactctgcacatcttggctacattaaaatggactgacagaattatttaaaaggcactatgaaggtagaacactaccttaatattttatcctagtcagaagcctgatttaacactgaactttgaagggaagcttagctgtagctcatggctttcaaagattagaagaaacatttactggttctatggaaaatagtcttcttgctaggtagattggaaacaaagaaattgcattggtggtgttaaaatctaacatttataacaaatcctgttttattctagatgaaatacttagacaattcttccagtggaaaccagtgaacttttttaacagctttgggaattcttttgtatgataatttttaaaatgaaatgtgtactcttcaaactaattaaagcttgaagttttccaggagtcgcattttaaaagtgtttgtacacattttaacacttggatattttctattttggttttgtatatttttatgtatacacaatgtacagacttttttcttgtaaataaaacatgttttcatttgtctagaaaaaaaaaaaaaaaaataacaaacacaaatatttggggggcgcacagggccccgaaaaagtttctaaacacacctttttgggcccgggccccatggtcactgcacaccggggcccc

SEQ ID NO: 6566 - DNA, 4855 bp, Homo sapiens
  misc_feature (1778)..(1785): n is a, c, g, or t
  misc_feature (1944)..(1968): n is a, c, g, or t
  misc_feature (2583)..(2616): n is a, c, g, or t
  misc_feature (2739)..(2759): n is a, c, g, or t
  misc_feature (3230)..(3254): n is a, c, g, or t
  misc_feature (4073)..(4145): n is a, c, g, or t
  misc_feature (4227)..(4244): n is a, c, g, or t
tggtgctgctgcatgccaaatggcatgcttagacatcattcagattatttcgtatagccgtcttcaccactggcaacttttatggctagaaagaaagaaaacatgccagcagcttaatgctactatttgctttgtgattgtgctgataaagcatttttttcttagctgaagtggcacgaagttacaatatttacaaagataccaagaactggtatctgttactgcatttaatgcggaaatagtttgatatgctggtcttacctttcattttatagaggtggggtctcgccatgttgcacaggctggtcttgaactcctgagctcaggcaaaagaggtttccaggatgcagattaggtcatgcaggcctttaccggcattgatgtggctcatgtttcaggcagacttggggtccttaaggtggcaagtcctttatggagagaaaacttgacattcatattttttgtttttaaatgttttacttttggataggaccatccattaaaccgatatccaaggcttaccacttcatatggagttaaacttggtcagtgttaataaaatcaaaacgtgattctactgtacattgcattattcataatttaattgtttgaaattacattaaataaatcaactaattaaatactaaagttttgttcctttttaaaggaaataaccacaagatttttcccagcccaaattccagcgccaattttaggccaactttggctgttttcttccaaaagtgcttatgtggaattgggatccccagtgtagtgacagacagtcatgactgctgctgagtttgatctgtgaaggtagtgaaatgtggccctgatgtttcttaaccctgatttggtaactaccagccctgacaccatcagtgcttgatgtagcctggaaccccaggcccactgacgcactgggcacggggctctgggtcgaaggctggagccgtcactgttgttcatgtgcatttggagcactgtgggaatagtctggcagctgtgtgctgattaaatgtctttggcaaggcagggggcaggaaaaggccttgtggaaacaaaggcaccaaggatcaccccagcccagtgaaggcagaagaggtcacgtggatcagcctgtgtctttccagcagaatctgattaaagcctgtaatgctgtagggtgaaggttcagggcagatgtcagcataccgcagtggagactttctgcagtgaaactttatcgatccctgaggcagcgctcggatggacgtgacaccagcctggtcttgtgctgtctggacagtgtagctactggggctgcccctggggagctggaggcaagcccagaccactaatttcctctgaaagctgcctacacccatagccgtattggccaggaccagtcccaggggccagaggcggattattgcctccaggagcctggtctgcagcggcgaggtgctcagggaacagggagcttgagagaagtgtttttcttccacaccatccagctctttagcagcaaggcaggccattctgattctccacttctgccatgcacgcttgatgactgtggcagctgcatgcagcctctggatgtgtttccgagttaaccaggaacgaatggctgcctggatgagcatgacggcccgccactgccgctcctgctctcggtgccggtgtcgcctccagccaccctggatgcagcgggcacactgctccagcacccgggcacgcccacattccagaagctccagcatagagtcagtcatgaacaccttggcccacgcgtnnnnnnnngggggctggcatggcctcagccgagtcaccagttatggctgctgcctgagttaggaccggcagagtgtggagaatgtcctggatgagaggttcaagcgtggcttcctcgctgtgtggacaccattctgagggctctgaccaccttagatgcccagtgcnnnnnnnnnnnnnnnnnnnnnnnnnggcagggagccctttggcaggatatgggctgtcggggccagaggatgtgcaaggatgaagccttcttagtaacttgtatcgttctacaaagtttcggtgagagacccggatggggaagccagcagcactgatatggatggtctccacgaggccacaggcctccagctggctcaggacctcctcttggagaaaggtctgcgcctggccctggctgttgggcttgatgcagcgaatgtagtggggcgtggtgctgtgtaggacctgcagaagctgctccagtgaggccttgaacttggacaccacggtcaacacaggggccctgctctggccagggggttcctcctgggtcttctctttggggttagtaggaaacagccccatgagcagggggtcctgggattgctgcaggagcctggtcagctcaggtgggatagggtccttgttcttctccaccaggcctgctgtgtggtaccgcacaggccccgcataatgcaccacaatgaagctgggctcccggctgagcttattgtggcccaggcaggggctgcctgccagggcagtctcaatgcgtgtctggagctgggctgcgctgctgggtcgattgaggcggcattnnnnnnnnnnnnnnnnnnnnnnnnnnnnnnnnnnatggggcttccctcaatgagatccaaacagggctggttgtcctggtagttgatgaatgaccactccaggccctcaactgcgtattcctcctgctgggcccttaggtagtgagccacaaaatgnnnnnnnnnnnnnnnnnnnnngcgtagttgatgcacaactgttccagactgttgtcaggaaatgattcaaatccatacacatccagcaggcctgggaagatggcagagaacccatggggccactgcagggagcagatggggaataggggaccaaggaacccagggtggctgggcccctgccaatgccttatacttggcagcctgggcatcaggctgagtgagcatgacacctgtggtgggcagaacataccttccccaccctccacccaaggtggctcccatctctaccccattcccctgtagagctcagagcaagcaggaaacccaaatgaagtgtgaagacagcccagagcatcaggcccatttttgagtctgaattctctggttcgtgataagcccagcctatgaggaaaccaggtcccagggaacattttctgtgttaaatctagttcggagggcattagtctcactagccaatttggtgcctagaannnnnnnnnnnnnnnnnnnnnnnnncacttgtacctttaagctttatttcctcctataactgactgtcccacctagttacaaccgtgttgacctccctcagtcatgtcccccaagtctttttttgttctcccccctgagatagggtcttgctctgttgaccaggctggagtgcagtggtgtgatcacagctcacagaagcttcaaactcttgggctaaagtgatcctcccacctcggtctcctgagtagctgggactacaggcatgtagcaccatgcctggctaatttctttgaaatggggtcttgctatattgcccaggctggtctccaactcctggcctccagtgatcctcccactttggcctcccaaaatgttgggattacaggtgtgagccacggtgccagcctccaaagtcccttctaatacagctattttccccaacccccactactctcccacaattagagctgggtctctggggaggtaaagggctctttcagacaaggcactgttgagcctgtctggagagttatggactgctcagatgtgggtgcaggagagcagagatctcaccctatgcagagatctcgctctatgctggcaggcagatgcaagaggagacaaaaaagggaaaggaactgcccagagtcacacagtggacccagggctcctgcctctccatccagggctttattgctctttttctggagtgctcccagcacagtgaggccttgctacctatgaaagtggtccacgagtcggtgtctgcacagatgctgctgttgatcactgataccagccagtcaaacaacctgttgggggaagagagtggactctggtaannnnnnnnnnnnnnnnnnnnnnnnnnnnnnnnnnnnnnnnnnnnnnnnnnnnnnnnnnnnnnnnnnnnnnnnntgctacaccctggggggcccttgtattctgagcctgacaggtcaaagaccaaatcctctcctcttgcttccggcctatcacnnnnnnnnnnnnnnnnnnagatgcaggctatgggcatgcatgttgccaggtacacacaaacctggcatgtccttatgggaagactgagcacaggacaagctcagctcctaggctggggagggaatcagtcgagctcagtcacatggctcgagacccagctagtgtcttgggaaggggcagatgggcctgggtgtggtttgtaaataactgagttcattgaacacccctgcaaaactctaccggtggagcccagagctcaaggccccaccataccccctgatgtagttctgcacaagtgggcccccagtcccgaggtcaacaatggcatcctccactctagaaccggccccagcccagagaagatgagactaccacacaagacgctgacacgtacagcactatacaggggtttcttcctcacattttttcttaaagtaattgctctgcaacttttttcccttcagtaaataaactggctctttttgcaacaggggctgtgcaaatgtcctgtggtcagaagctcactctatctgtgttcatcacactttatctgctcatcttggagtgacttgtaggcaaaggctttaaaagcctttgacctcaaattgtgacctgaaattagcttgagg

SEQ ID NO: 6567 - DNA, 4665 bp, Homo sapiens
  misc_feature (417)..(435): n is a, c, g, or t
  misc_feature (4485)..(4485): n is a, c, g, or t
  misc_feature (4506)..(4506): n is a, c, g, or t
  misc_feature (4508)..(4509): n is a, c, g, or t
ctcctgcctcaacctcccaaattgctagttggcccggggccttcagtggcctttgtgtctgggtgagaggaaccctggatggccactctgccctgagtgtgtgggtccccagaagtgctgggttagggggcacggagggccagaaagtcccctttggagcgctggactctctcgctgactcctaccccaccccggcctggggtttcagagaaggggtccaggcaggagtgtcatcttttctcaatggggatgtggcttcagtctctgtccaggaggcacgcggacctccagtggccggctccggaggcttggtgactccagtggcccagccttgaaaagatcttttgaggtcgaggaggtcgagacacccaactccaccccaccccggagggtccagactcccctactccgagccannnnnnnnnnnnnnnnnnngaaattccaggacctgggcgtgaagaactcagaaccctcggcccgccatgtggactccctaagccaacgctcccccaaggcgtccctgcggagggtggagctctcgggccccaaggcggccgagccggtgtcccggcgcactgagctgtccattgacatctcgtccaagcaggtggagaacgccggggccatcggcccgtcccggttcgggctcaagagggccgaggtgttgggccacaagacgccagaaccggcccctcggaggacggagatcaccatcgtcaaaccccaggagtcagcccaccggaggatggagccccctgcctccaaggtccccgaggtgcccactgcccctgccaccgacgcagcccccaagagggtggagatccagatgcccaagcctgctgaggcgcccaccgcccccagcccagcccagaccttggagaattcagagcctgcccctgtgtctcagctgcagagcaggctggagcccaagccccagccccctgtggctgaggctacaccccggagccaggaggccactgaggcggctcccagctgcgttggcgacatggccgacacccccagagatgccgggctcaagcaggcgcctgcatcacggaacgagaaggccccggtggacttcggctacgtggggattgactccatcctggagcagatgcgccggaaggccatgaagcagggcttcgagttcaacatcatggtggtcgggcagagcggcttgggtaaatccaccttaatcaacaccctcttcaaatccaaaatcagccggaagtcggtgcagcccacctcagaggagcgcatccccaagaccatcgagatcaagtccatcacgcacgatattgaggagaaaggcgtccggatgaagctgacagtgattgacacaccagggttcggggaccacatcaacaacgagaactgctggcagcccatcatgaagttcatcaatgaccagtacgagaaatacctgcaggaggaggtcaacatcaaccgcaagaagcgcatcccggacacccgcgtccactgctgcctctacttcatccccgccaccggccactccctcaggcccctggacatcgagtttatgaaacgcctgagcaaggtggtcaacatcgtccctgtcatcgccaaggcggacacactcaccctggaggagagggtccacttcaaacagcggatcaccgcagacctgctgtccaacggcatcgacgtgtacccccagaaggaatttgatgaggactcggaggaccggctggtgaacgagaagttccgggagatgatcccatttgctgtggtgggcagtgaccacgagtaccaggtcaacggcaagaggatccttgggaggaagaccaagtgggtaccatcgaagttgaaaacaaccacacactgtgagttttgccttaccgtgcggggacccttctcattcagggacgcaccatgtgcagaaacattcagaggacttcatccagccagcattcccacttcgaggcgtaccgtgtgaagcgcctcaacgagggcagcagcgccatggccaacggcgtggaggagaaggagccagaagccccggagatgtagacgccaccctgcccacccccgggatcctgcccccaagtcatttccgtcccccccccaggccctcccaccaccccattttattttatatgattttctccatttgtcatcgttccccaccccttcgacatgctgccaggaaacaagggaaggggcctccctccgagtgagtcagtgatgaggccgcggcctccccgaggttgtggggaggctgcactggagccacaggcaggggtgagagcacccactgaattgacatgaccctctgtccccaggcctggctccccgagggctcagaagagcagcttcggtgtgcagatcatccgtccgtgtggggttctcagtgccggaggccttggggtgggggccaggcctcgcacttgcagaggagcccagtgggctgcacgctcccctccatccccatcggccctgtcccctggagtgtgtcagagcccaggggagaatgcagcccaccaggagcacctggaccccctgcccgccacatggtgtggccatcactcagcccctacccctgccctgctcctaagggtagaaaactccagggtcccctgccaccgactgcccagccactccaagccccctggcagctgcccctcctggagcagaaagtgcctttatctcagccatccgcagactgctcggccagatgcggggacaggctggaatgagggaggcgtcttcatctccctgccatccccctctcacgccacccccgcccccaccgggctgcaggtgctgctgatgcgctgggatctgattgaggataaaaaggaaggagagatgacccctaccccctcatcccccagttttgaaaaggtctaagcaagtgagtctggttggagggagctgagggagggagccatggaaggtgccagaaggaaggttggcgggggcacgtgtgggccgtggcttgggctggtcagagtggcgtgagctgcccggcgcctgccctgcccaagtgaccagggaagtgtgtgtgtgtccatgtgtatgcgtgtccgtctgtctgtctagtgtctgggtttggcccaagactgggctgtagttacattaatgcccagccagccacccctgccactcacccctcctggcccaggccttgctgactctctgagctggggaggtgggaggccaggcgagcctgactctgttgatctacccgtgcctgggcccctcccctcagagcccatggtaacgaacccctagaaaggagagaacgggcgtcaggggtgcacagtccacagctgaagagcaaggtttcgtggcagcacggcccggcccctcaccctctgtccccacgaggggacccatgggggctgtctttgcagggcacagatgaccaaagtcccttcctgcttcctgttacctgtcttgctcctggggagaaagaggggcctgatgagactccactcaggtgcacacatcaccaggtgcatctgcaggcaccgggctggctgcttgcagccaggagaaggtcagcgagaaggagtgtatgagtgtgagtgtgtgtgcatggaagttggggcactgggcgtctgactccctccccacccaagagaggaaggacccctcaccacccccactggcgagacagtttactttgccgacttgccatgtttttgccaaaaccaagattttgaaggaaatgagtggccagcgccagggcccaggccatgtggcctgcccagcctcaatgtcacttggcggcggggtggggtgggggtgggcagcagcatcccagccttgagatgcttcactttccttctctgtaaccagactttgaaaaattgttcgtttcatcaggctctgttcctcaatggccttttgctacgtgcctcccgagaaatttgtctttttgtataaatgacaaagtgttgaaaatgtatttcctgaaataaatgtttcaaatgcagaaacccaaaaaaaaaaaaaaaaaacgccccccctttaagtatcccttctaggggcccaaacttacccggtaaataagtatttttttcatctaagtggtcccctatacccaaccccctttttttttccccaccccccccgccccatttttttcccacccccccccttgccctgttgttatttcccgccctcccccccccctttttccccctcccccccgtcttccacatatttctctgtgggatcactaaatatttattgccggcataattaacgcccccgcccccacaactttttctcacagattttccgacaaaacacatcaaacctgatttctgtttattatacatgaaccggtatcactgcgcctcgctatatattatgtactcgctcactacgtcccgccttttgttatatatgcgctaaacacgtcctactcatacctctccgtcggccgctatttctcttcttctacctcatctatctctttatctctttctccactacccacccagactatgtatnttatatcacaccacgccaccncnntcggcgcttgatctactcacacgctattgcgcccccccgacgactataaaacttgccgcccctccctactattgtacgcccgctccggttcactacacctctctccctcgtgtcatacttttatttgttcagccacccccacagttactgttacct

SEQ ID NO: 6568 - DNA, 4103 bp, Homo sapiens
  misc_feature (740)..(747): n is a, c, g, or t
  misc_feature (3742)..(3742): n is a, c, g, or t
ggcacgaggcgatactaaaatgtctgatgatgctggtgacaccttagccactggagacaaagcagaagttactgagatgcctaatagtgattctttacctgaggatgcagaagtgcattgtgattcagctgcagtttcacatgagccaacaccagctgaccccagaggggaggggcatgaaaatgcagctgtgcagggtgcaggggctgccgccattgggccccctgtgcagcctcaggatgccaacgccctggagccccctctcaatggagacgtgactgaggatacacttgctgaatgtattgattccgtcagccttgaggcagaacccagatccgaaatacccctgcaagaacagaattatctggctgtggattcccctccaagtggaggaggatgggcaggctggggatcctggggcaaatctctgctgtcgtcagcatctgccacagtaggtcatggattgacggcagtcaaggaaaaagcaggagccactctacggattcatggtgtaaattctggatcttctgaaggagcccaaccaaatactgaaaacggagtccctgaaataacagatgcagccacagatcagggccctgcagaaagcccacccacttccccttcatcagcctctcggggtatgctgtctgccatcaccaatgtggttcaaaacacaggtaaaagtgtcttaactggaggccttgatgcgttggaattcatcggcaagaaaaccatgaatnnnnnnnncagaaagtgacccggtgcttttaagcggaccaagacgctcatggagagaactgtttccttgtctcagatgttaagggaagctaaggagaaggagaagcagagactggcacagcagctcacgatggagagaaccgcgcactacgggatgctgtttgatgaatatcaaggcttgtcacacctggaagccctggaaattctgtccaatgaaagcgaaagcaaggttcagtcatttttagcatcacttgatggagagaagctggaactcttaaaaaatgacctaatttccattaaagacatctttgcagccaaagaattagagaatgaagaaaatcaagaagaacaaggcttagaagaaaagggagaagaatttgctcgcatgcttacagagcttctctttgaattacatgtggcggccacacctgacaaactcaataaggccatgaagagggctcatgactgggtggaagaggatcaaaccgtggtgtcagtagatgtggcaaaagtgtccgaagaagaaacaaagaaggaagaaaaggaagagaaatctcaagaccctcaagaagacaaaaaggaggaaaagaaaactaagaccatagaggaagtatacatgtcgtccattgaaactcggcggagcttacaatcgcgctatactgagcagcttcataaagtagcagaattaattcttcatggacaagaagaggaaaaaccagctcaggaccaagcaaaagttctaataaaattaactactgcaatgtgcaatgaagtggcctccttatcaaagaagtttacgaattctttaaccactgttgggagcaacaagaaggccgaggtccttaaccccatgatcagtagtgtattgttagagggctgcaacagtacaacgtacatacaggatgccttccagctgctgctgcctgttctgcaggtctcacatatccagaccagttgtttgaaagcacagccgtgacctggccagactccatctagttaaaggagacagctggccgccttgcctcaatatgtaccatttaaggggatgttctctgtgcgcctggccacagacatccatttgaggacactacaagcaattttgcacagacaatattgagaatgcaaatttagagagagttatcatttctctcaatgtgtataattgttttttacaaacaattgtgttttctttatgttaatttaaacttacacagcttatattgaaaatttaatttaatatgaaatttatttacaaatattcctgttcattttcctggttaagcatgctatatttagaaactcatggggagaccttagacttttgtttaatcctttatgtttcaacctttaaatgttccattcttatagtattactttaaatcaattctaaaactgaactttgttttgttacataaatgtcgcaggcaaaaataacactacttatagattttacctattatggtaaaaaataggaacatattgtcattcttttttttttttttttttttttgagacagagtctcactctgtcgccaggctggagtgcgttggcacaatctcggctcactgcaacctccgcctcctgggttcaatcgattctcctgcctcagcctcctgagtagctgggactacaggtgtgtgccaccacgcccagccaattttttttgtatttttagtagagacagggtttcaccatgttggccaggatggtctcgatctcctgacctcgtgatctgcccgcctcagcctcccaaagtgctgggattacaggcttgagccactgcgcccggccggtcattcattcttgcaacaagcatttattgagcacctactgtgtgctcacagtaaagaaacgtgatcttatcccagtagaggtagatattctgaaaaagaataattcttaaactgcttaaaacaggggtccccacccccaggccacagaccagtaccagtccgtggcactggttaggaaccaggccacacagcagggggtgagcggtgggtgagtgagcacagcttcatctgtatttacagctgctccccagagcttgcattactgcctgagctctacctcccgtcaggtcagcagcagcattagagtctcatgggagtgcgaaccctgttgtgaactgcacatgcgagggatctaggttgtgcactccttatgagaatctaatgcctgatgaatctaatgcctcatgatctgaggttgaatagcttcgtgccgaaaccatcccccacccccatcccgctaccccgagtccgtgaaaaattgtcttccgtgaaaccggtccctggtaccagaaaggttggggaccactggcttaaaataccaataaatttttgaaccttaaaaactttgaagaacaaggtaaattggtgttttatttaatgtcctaccctttaatttgttgcattttcctatactctttacactattttatcccaaactatgtatatgaggtgaaaatatatatgaaaagggatactgaagaatatttagtttaaaattaatttcttacgatcacgagcacatggtggcataattacaaagcttggaagtattcaaatagaaaatcaaaggtgtttcaatacagtagaatcccaggactgcattttaaaattgcctcacagatcacactcgctggtggcaaatatcatcatcgttgctaaaggacagaaaatactgatgtgtgttttaactaactggtatattgatccatgggaggctgcacagaagaccctgcggccaggaggggcattgtcagtggctgcttctcctgagctccacgccttcattgcagctgcatgttcgatacaatacacctgcttcacagccccatggacatccctacaggtactgtcatgtgaagccttgcctagtagttctctccagggcaaatgaagctcacagttttgcaaggtggaaacctcttattcacatttgctttgattccccgatggagtagactgcctttgttccttacagggcaaagtaagggtntttaatatcatcctacttcttattagcatttcatttgtctatgtactgtatttcatttgtatgtctcctgaaacatccaaatagagaacataagaacactttatgtacaatctggaaaaaaattacctgagaaatcaattaaagatttttccccttttctgaaaaaaaaaaaaaaaccacaacaatctctgtgcggcgcgcctcgcgcccaggaaaaggtttaaaaccatgcgggggggggccgcgcgccaagaggcggtaggaaacagggcaaaacgtgcctagggaacacccggcaaggcaagcgtgggttccccaaaaaacgcgcggggacggcggcgacaccaagggtcgagaaacg

SEQ ID NO: 6569 - DNA, 447 bp, Homo sapiens
ttttttttaagaaaattcagtaattctccattgaacatctactacatatccaactctgtgctaaggtatgctgtggaaaagtcaaggaagaatgtatgagacacatccctgcactcccaggagtttataatttcggaggagatgcaaacgtggacccattttaatgtaacaaaagatacactgtgttaacagccaaaatggaggcctgtacagagtactggggcaacctggaaatctggttttaggatacactgcattcaaagcaatttgcttttttcttcaacatttcttgagcacctgttatgtgcaaagcaaggagtcaggtgcctttctggaaaacgaaataaacacggcactgtctctgtttacaactgcccatttaacaaacatttcttgaacatctactacatgtgatgcattgagctcaacctttggaattgcagatgg

SEQ ID NO: 6570 - DNA, 3233 bp, Homo sapiens
gaattcgcggggtcacgggcagttgcagccgcggccgagcagccagccgctaagaaagagctcgccgctgccgctcccggagccgccgaggccagcttcgcggcgctgccccgcggcgggagaggaggctgcagaagagcggaggcggccagcgggagcggcggggctcagcgcgcacactcagcggccggggagcctcccgagctctgcgcccgcacgcgccagccgcggctcgcgcctttcttggcctccgggcgcccgacctctcctcccccgcgccggctcgccggggccgcggcggcccaaggagcagcatgaatctgcggctctgcgtgcaggcgctcctgctgctctggctctccttgaccgcggtgtgtggagggtccctgatgccgcttcccgatgggaatgggctggaagacggcaatgtccgccacctggtgcagcccagagggtcaaggaatgggccagggccctggcagggaggtcggaggaaattccgccgccagcggccccgcctctcccataagggacccatgcctttctgaagcaggactgaaggggcccccaagtgcccacccccggcggttatgtctcctccatagattggtctgcttctctggaggcctcacgtccattcagctctcacctcgcacctgctgtagccaccagtgggcccagctcttctcacctgcctgcttcccccagtggcgtgctcctggctgtagtttggatgattcccgttctctcacaagaatccgtccagtccatcttcctggcccctccctggactgactttggagacctagccccagaaagcctcccttcttctccaggtcccctccgccctagtccctgcctgtctcatctaacgccccaaaccttcatttgggccttccttcctcatgtctgccctgagcgcggggtggaagtgctcccttctgtgggctccagcagatcccttgttttcctgtcagttggacccctcacctggcctccagggaagaatgcagagaaaagcaaggagagactctagttaagaggtgctggctgccgggatccagacagggcacattgggggcatggaagtgccagggtggttttcaggagctctggtgaagtgggtggagcatcagcgtttgctcagttaagggagaggtagagaggggcccgtgaagtcctttgtcacttctcttgccttagtgtgcctcccaatactcccttcttcctgcccccacaccccatccccagctagcccaagctccaggtcaggaggggagggtgctgggcctgacatggctatataccctcccaggagtaaaagccaagcaagaggttgtttttgccaagaatcacagaatgttagagctgacaggacccttgaaggtcacttagccttcttaggcaaacgcctgcaaaacagaagcctggagaggggagtgacctgctcagagtcattgcagagccgggatggggaccaggtctcccatctcctactttatgacgccctcttccctcttgatgatgtcttttcaacagcaaatgaagtgccttttcccgaggctggggctgggggtggctgggaggggaagggaagggagaggcaagctggctgtgaactgtcctgttgtggggctggagctgctcccacctccctgacctacccctgctgcaccattcccccagctgggctggaaggttccataactggccagctgcccccataactggcagcattcccagacccagggtactctaataggggcggctcaggcactgagactaccgctcaaccccagggtggttttcaggagtccgaggtagccttcaatcactggactccatggccttcccttcgtgttgaccggaccttccttccagggcttttcctttgggggaggcggagaggggagaagaaggaagggaagggcagaaggaaggagggaagaaaagaaagcaaaggaacagaaggaaggaaagaaagatgggaggaagtgcagcaggaatagcaccctctccccgggaggccctagcttccgtgaggggccatcaccagccattccttggagggggctttctccccttttgcttgagcagggttcccaggagggagaaagagaagacaagagcctgatgcccaactttgtgtgtgtggggacgggggagtcagggccccccaagtcccacaatagccccaatgtttgcctatccacctcccccaagcccctttacctatgctgctctaacgggtggtggtgaactgctgctgctgcttaaaggctcatgcttggagtggggactggtcggtgcccagaaagtctcttctgccactgacgcccccatcagggattgggccttctttcccccttcctttctgtgtctcctgcctcatcggcctgccatccacctcccccaagcccagccccgtggggaaggggagaaagtgggggatggctaagaaagctgggagatagggaacagaagagggtagtgggtgggctaggggggctgccttatttaaagtggttgtttatgattcttatactaatttatacaaagatattaaggccctgttcattaagaaattgttcccttcccctgtgttcaatgtttgtaaagattgttctgtgtaaatatgtctttataataaacagttaaaagctgaaaaaaaaaaaaaaaaaaaggaggtcatgttcaggaggggcattcctttcccctgggggtccatgggtgtcccccatgccccacatattgcacgtgcagggaggtaagtgcctgcatcccaaatcggttctaggtcaactggcctcaaactgatttgccatgagctcacaaaatgaatccctatgcttaatgaccaggtcacataaaatccagcccacttacaggttttctggcatctgtttgggtgtcctaatttttttggcagtgtcatttgaagaatttttttaaaagcagtttatttaagaacatactgattaaatgcaggatcgctactaaaaattgttttgtatccttggtgggtgtcttctgctattttatctacttttgaacactttcaggactttttagccagtttgcctttcttgaaaaatgttatgttttcagcaataaatacatttgataatgactttgtttgtatcattttatgtttcacaaagtagagttgcttgatgaatgagatagcctgaaaaataaaatgcaaagagttcaatataaaaaaaaaaaaaaaa

SEQ ID NO: 6571 - DNA, 955 bp, Homo sapiens
gagggacccgcagctcagctacagcacagatcaggtgaggagcacaccaaggagtgatttttaaaacttactctgttttctctttcccaacaagattatcatttcctttaaaaaaaatagttaacctctaagtatatagatacctatagggacccgcagctcagctacagcacagatcagcaccatgaagcttctcacgggcctggttttctgctccttggtcctgagtgtcagcagccgaagcttcttttcgttccttggcgaggcttttgatggggctcgggacatgtggagagcctactctgacatgagagaagccaattacatcggctcagacaaatacttccatgctcgggggaactatgatgctgccaaaaggggacctgggggtgcctgggccgcagaagtgatcagcaatgccagagagaatatccagagactcacaggccatggtgcggaggactcgctggccgatcaggctgccaataaatggggcaggagtggcagagaccccaatcacttccgacctgctggcctgcctgagaaatactgagcttcctcttcactctgctctcaggagacctggctatgaggccctcggggcagggatacaaagttagtgaggtctatgtccagagaagctgagatatggcatataataggcatctaataaatgcttaagaggtggaaaaaaaaaaaaaaaaaaaaaaaaaaaaaacaaaacaaacataatagggggggagaaaggagaaagagtaaaaacaacacgggaaggagccgcatcacaaacagagaacgcgtgcaaacggcgagtacatgagagaccaccggaccggaaaaaacgacgggaacagcaccacaagaaaaacagcggggggagcgcgcgttggaaaaagacccacaggcataggagaggaacacgaaacgccacaagagcagaaaagggaagaaagcg

SEQ ID NO: 6572 - DNA, 530 bp, Homo sapiens
gacatcgatacgacctttttttttttttttttttttttttttttttttttttttttttcttttttttttggtttggttttgttttgttttgtttattgtggtaaaatacaaaatctaccgtcttacagtgaggtggcgttcagtaccttcaccacgccgtgcagccatcccatctgattccagaacattctcatcacccagaaggcagccctgtccccattatgtcacctagtcacccccaggtccccctccccagtcccggcacccacgaatcctctccctggattctgttggattggtctgtcctggacattttataggaagtggggatcacagcgtacccttctgtgtctgggtgtctctcactgaagcgtgacatcctcaaggtgcatccgcactgtggcctgggtcagagcttcgcacctccttgtggctgagtctcattccagcgcgtgggtgcgtgggtggccgcgccgtgctgatcccctcaccttcactgggtgttcggtgttctccgcctcgggctgtca

SEQ ID NO: 6573 - DNA, 531 bp, Homo sapiens
tttttttttccagacaccacaatgacttagagaatcatttcatctccaagagctgatttcaaattatgtaacagtaaatgaaagcactctgtaactggtaaagcattacaaatgtcgtaatattcacgatttaaatcatatatggatgatgtcataaataattctaaaaagttggtattttcaacataatcacattttttaacaactagatttttgttaagcttttcagcactattccagaaatacttatagaggaaggacaactagtagacaaactgttaccttatttcccaaattcacggttgggaagaagagctacttccactgaatgtaaatgaaacattccacaaaatcacataaatctttcaggacattcccaggtcaatggtcaaagcagattagaattactttccaataaccccaggtttcagccttacttctttgctgagatgacagtttggacaggctggatagaaaacagcaccatgcttgatgtccagtaccttgttttacattcaatagtaacctcac

SEQ ID NO: 6574 - DNA, 2262 bp, Homo sapiens
agcggaacgcgctgtggaaaacatgctgctcgggggacccccccgcagtccccactcggggacgagccccaaggggccctggagcagtacaggccacgtgcagtttggcaagagcccccagacctggcccaggcgcacaagaccccgctctccagagcctgccgcgccttcaggggttcggggctccacttggacgaggcgccgtgactctccgaggcgcgccgggccgacagcgctgtcccgctacgtgggccacctctggatgggccggcggccgccctcccccgaggcccgcggcccagtcccccgcagttcagctgccagtcgggccagaagaagcctcgcctccccggggatctccccaggccccctgaccgcaacgatcggaggggcggtggcggggggcgggcccaggcaggggagggcagaagcacacaaggaagtgtttccgggacagagggtgggcaagatggcggcgcccatggagctgttctgctggtcagggggctgggggctgccgtcagtggacctggacagcctggccgtgctgacctatgccagatttactggtgctccactgaaggtacacaagatcagcaacccctggcagagcccttcaggaactctgcctgcccttcggaccagtcatggagaggtcatctcagttccacacaagatcatcacccaccttcgaaaagagaagtacaatgctgattatgatctgtcagctcggcaaggggcagacaccctggccttcatgtctctcctggaggagaagttgctcccggtgctggtacatactttttggatagacaccaagaactacgtggaagtgacccggaagtggtatgcagaggctatgccctttcccctcaacttcttcctgcctggccgcatgcagcggcagtacatggaacggctacagctgctgactggggagcacaggcctgaggacgaggaagagctggagaaggagctgtaccgagaggctcgggagtgtctgaccctgctctctcagcgcctgggctctcaaaagttcttctttggagatgcccctgcctccttggacgccttcgtcttcagctacttggccctgctgctgcaggcaaagctgcccagtgggaagctgcaggtccacctgcgtgggctgcacaacctctgtgcctattgtacccacattctcagtctctacttcccctgggatggagctgaggtaccaccgcaacgccagacaccagcaggcccagagactgaggaggagccataccggcgccggaaccagatcctatctgtgctggcaggactggcagccatggtgggctacgccttgctcagcggcattgtctccatccagcgggcaacgcctgctcgggccccaggcacccggaccctgggcatggctgaggaggatgaagaggaatgatttgtcctcacgctcccaagactggtttttctactctcatgcattccagaggcccccgtgcctcctcgttgttggtacagccggacacggggtgctgccacccagaataaagccactcacactgaaaaaaaaaaaaaaaaaaaacacaccaagaaaccaaccacccccccccaaaaagcacccccccacaaaacccccgcccaaccgaacagggccctagcgccgagcaccccctacccggcaaaccggaaccccgaaaacccaggcggcccgggggcgcgccccatagaattctcctcccggagggccccccaattacccccgcccccttttttttttgaacgccggggggccctacatgggaaccgcattttcaaaatctgcgcgccgccggccccccttacaatccctcgtggcgggggcgaaccgtccccccacccctggggttatcttgcggagggaaccactcttcctttggtggggcggagatccggtgtcgccgcgcaccgattcgggggaaatacccgacttgccccgcgcccgccgaaaacgtcgcgccggcctaaagctcggcggcacttacctcttccgtcggtctagccgatgactccccccccgattccacctaccccgccggccgccttaacccttgtccttagagcgcccccgcgcccaaatataataccccgcggcgcgaatcccgatgggccgggaactcccgcgcgccgcgtacaggcgcggcgccgcacatgcgcgttgacggccctgctcggcgcgcttggtgtagagaccgcgatctcccccccgccgcgtaccgcgcggttccgcctatacctcac

SEQ ID NO: 6575 - DNA, 2298 bp, Homo sapiens
atccctccctaaacaaacacattctgcttttgggtggccctacccagaacctgcagcaatgtcataacactggacacagtgcggcttggggcagtatcaagccttcattgcatacaaaccttaatctctaagcatagttgttcccaaggtccacacgtgtggaggcgagtactgaaataccacactcacacatctattccatgcgtacctagaaattaccttcaacactaaaaaaggttccttctttcattccctatcctgctaacagcccacattgtaatatttgatttatgaagaagttctaatttatttgtgaactcaggatgttgctttacagcattgctcgtgttctctcatttacttattatgcatcacggttggaaatgctatccacgtgccgtgcatcgaggtggagatttgctggatctgtctgtggctatttttttccatgtttttctcactcaagcaaagtctgttagtggaaacatgggctgggggatggggagaggacagataaagcaagagaatagggattagggtccaatcctcaatgcacagggcttagttcaaaatctaagctgtttctgtagtaagcagccaaatgggaaagatcccttcgttttgaatttgatgagaatgggcttggaaatccacgcccaccggcttgcacggaagaggactcagcctcttcctaatggttcaacattcaattcctgaggaaagtgctgatagtattagttccctacatttccctaagactcccatccaacccctagtgctactgaagagggtttgggaaagcaattggagttccttagcttggatatatatagtacctgtttttttcctctggaaaaaccaaagtactttagtgagtcttacaatcttaaggcattttgtcccctcactgggtcccgagaggcagggaggggctaggccttgagctaggagcaaggacatgggccgccaggcctggttgttactagctgtgcaaccttgggcgagcctcttcgctttgctgggcctcaggttcccgagtggaagactgggggtcagaacagctgcccttctgggagagcatcaagagaaagtggtataagtgatgggaagtgctttgaagaaattaaaggtctgtctaggagctgggggtaatcatttacagatgaagaaactgaagtctagtcattgactggcccgagttcacagagtggttttatagcaaaacagggacttgagtccagcttattggattcttcccatcagatcatattgcaccaggtatgtgtagacatgaacacataccattcctctaaggtgtgtgtacatacacggatgtgtgtgtacaggaggtacctgacatggtgaaaggccataggacagaaaacctgagttctaattccagctttgccagtcgtcccgtccgtgatatattccataggacagaaaacctgagttctaattccagctttgccagtcatcctgtccgtgatatattccataggacagaaaacctgagttctaattccagctttgccagtcgtcccgtccgtgatatattacctaactcctccagaactcagttttctaacctataaaatgaagacattgtgctagatgatctttgtggttccttcaagctctggatctctaattccatgattagtaatgtatgtatgtgtatataaatatgcttatctgtagaaatgggcccatttgaaaagtggagacaaggtctgcccaggtgcatttattgtgccagaaacagcgaattcctaaataagttcataaaatcttgttttacaattcaatggtagtgcttaatgttactgtctgaaatccactgtttaaccagatggaagactggggccattcaaaacattattagttcacaagtgtttgctgttaaaatgcttcaataaaactcatttgttaaagtcagaaattcaactcttctgtacttgggcaggtcccagcagccccttggcaggctagttttgtgcatgggcctttgcaagctatataaacgttaggtgttggcttgattatgataaatatgagcaggctccctggagaacagtccagaaaaaaagagttatagttctcacaaactggtgacatgaatccattaagctgtgtggcattttccagtgtaaagacattgtttgctggctacgatctctgactttttgtggcatatgaggtgtaaaatgttgtcaaaaaagaatctggtgtttaaaaaaaaatcaaactatggtggcattaaatgttcacttttattctaaaaaaaaaaaaaaaaaa

SEQ ID NO: 6576 - DNA, 3377 bp, Homo sapiens
  misc_feature (107)..(107): n is a, c, g, or t
  misc_feature (111)..(111): n is a, c, g, or t
  misc_feature (143)..(143): n is a, c, g, or t
  misc_feature (167)..(167): n is a, c, g, or t
  misc_feature (2842)..(2844): n is a, c, g, or t
acaatattttacccgaggtccaattgggcatactttatttttggttataacaacggaaaattttctttgggttttctcaaaagggtaaaaaaattctttggggtcanaagntttaaggagtggggaggcccccaaaaagcccncgggttttgtgtttttttgaaatntaaggaattgttttttagggtttttcccaaaacacctttttttaaacggggtaatataaccccaagggggggagttcccctttttttttagagggacaaagggggtttcaaagcctttaagggttattatgaaaaaattttgttggaaaaaaatcccttttaatttctaggttgggttaagaaggagaaccaaatttctttcttaaaaatattaattggcagtgtagaaaattaaaaattccattaaggctttttacggtaaaaatttttggaggtgcagttatgcttggttttttaatgggattttctatcaaaaaggaagtttttatttaaaactttagccaaatatatccaaaatcacaaaagattaaagttgtatctacatagccaaaatgaaattgatgtcaaggcaatatccagataactcaagattaaaaaaaaaaaacaaaaaacatttttcttggaaaggcaagaaaaggacataagtagttttctgctactcaaaccaaatccacttttatcatcattccctatattccaaagtttcagtattttagactgaatggtttggagtctaaactatgtgaatgttgatctcaggtgtgccattcattctgtgagtatggacacagactatagaagaaaagcttaattttttaccttaactatacagactggttatcaataacgacctctaacaaatgaaaaacttgctttttagagactcatactataagttaggactgaagtagtcctccaaattcacctagcccatttagctcattttattgccaaggaaactggaacccaaacagattcagcaacttgctgaaggtcacactggtaagactcagcgtaatgcttttctgtacaccatgcttaatcactctgttagtttaccagttggtctacatgtggaaaatctttccacagtgcttcattcaatatgttttttttttccttctgcattttgtctgatcatatctatacgaggtgctaaggatatatgtaggtgagaaactatgattcagtgtcagccaatcaagaagaaattttcctataatttcaaatagattctgtacttttactaagaatgaaaccaatttgaatagtaaatatgaagaatactggttttgtttgccctcttttaaatccatgcactcatgaggttttttttgtttttttgttttttgttttttgtctttttagcaggaagagggggagaatataatgaaatcagaaatgactgctagatttggcttcttcagcttgtcacatgctgtatttagacagtctgaatagcaaacactgagaaatgctaggccagaggatttgggccccaatccttttaaccagcaaatgggacagtccagtgaaacagacagccatgttagtggcttttgatttgattccactgacatacacacagttcgaattcaatgtcatatttattttaacatgccagtgaaaaaggctgctaaacagaaaatgtaataaagtcaataaggctcaagaaaattgcttattttttgtagcaagaaaagcttttttttttggcaaatggttctatagtcatagaacatgaagatacttagaattaatctcccaatatgaaaatgtcccccaaattatcaagttgaaaggcacataccactgccccagcagttcattcaagttgtcgttagcatgtgaaattttagttgtgcttttagcttgttatcaatgcaatatggccttaaaaagtgacatccgtgcatacatataatttcttttaaaatgaccaaccctcttcctcttttctgattttcatttctgaagactaatttttgttagttcttcattttatagaggacctggtccatgatggtcttggaaagatgcacttcacagtttgtgctctattttatctacaaacaaagtttaaattatctttgtgtcctaatacaaaatggggtttcttgaaatatcagtgtgatggtgcttcaatactgtcatttgttggaatgcaaaagtgctggattattatcttttctcactggttgtttaaggcttacttcgcttccagaggagatgattggcaaactgttatccatatggtatctgataaggtggccgacattatcaaatacatgatccttggtcctcaccttgccttcaggatccaccaggagaagatgttttgcttggcctccctgtagtccactcagcacatattggccaggggatgttgcactctctcgaaccaaaaagtccccatcctttaccaagaggctctctgccgccttcctgctcagcttgccatgatagcattcttcgctccacagctgctgcttaatgtgtggcaaagaatgtgagctggcaggctgggctgtggcacccggctgaacagtttctggtgcctttccgcagtgccatgggctccccagtggttgggctgacctttgatttccagcagagccaggtgtactttgaagagcctgtgtagttaatgtagcaggggtcatcaaagagatccactcggcacgtgtgcttcaataatgaggtatctcgctgggactgcacccctcttggatggacattacctattgccctgctttgttctaaacagttctcatatacactgctgcacttggagtttccaggcaaatagcacaacttttcacactgtatgggcnnnagtaagccatttgttccgtggcttgaactttgatccgcatatctgaaacaccacctactggtggctgcttccctggaatttcattgtaatattcatgatcttctctctcctcggcatggctatcaatatgcacctcctcactttcacaagaagtattcaaagaaggatttttcaagtactgtttaaaccggagttcaaaagcctgccctatggtacttatgacgtcttgggccattccattgtggcattccaatatgtgacaggctcgttgattaactggatctttagctacgtaggcaacatagtctgtagtatcaggatcccctccagaggcaaatgaaagtagactgcatatgatgatttgcaataatcgcattgctaatagtggaaagatacctcccaggcgaaaagaaatgggaccaagtatttcttcactataagctcttgcatgcagggtccctagatacgaagttcgaatcgatggaaacgtagctcaaaaggcgacgccaacaccccggagaaaacactccgct

SEQ ID NO: 6577 - DNA, 3280 bp, Homo sapiens
  misc_feature (1601)..(1673): n is a, c, g, or t
tttctgttccagtttgtagcatttttctgcttgtcctttgaagagtctataaatagcattggaaaataattctcatatttaaaggcactgctgggtcctccatcaggtttctcctttcgaggcacatttagggggcggtggtcttcactgctgtccttcctgcctattccagggagccctgtgctgtagctcctctgtgttctcaccactcagggaaaaagcagctgtctgtccttcactcccagccagtgccctgtgcagacccaactcctttcatccacctgaggcagcccctcctgcaactgtcattctccttctctgaacttgctccagtgggcctcaccctccagggaccagatgcctgagacctgaaatttagagccagatgtcaccgctgctccctgtttggccgggagggaacttcctggcatggggacctcatcagatgcaacttcctaatccctcgtgtttcccccagtcctcctacctaggaggctcccctcaacttcagcctattgaagacccagcctctgttctccttccgccttcctggggtacaggtgaggtctgattatttgccctgtttaaacaggcgtgaacacggtgccccaatcaggtgggacattggtccagtggaacttggctattggctgagcggggcacccagcttgaaagtcctgaggttctttttttcactcttcttcacagtctaggtagggcagggctgagatcagaagccggcaatggccgggcattgtggaattaggaaaagcatttgagagggagtcagcaagtctgggtttgagtcacacctccaccatctggtagccttgggatcacaggtgatctagcccagcagttctcaatcagatgattacagcccccccagggggcatttagaggtgggtgaaggtgcttttgtggtcccaataacaggtgtattaccaacactgttacagggaccatggatgctaaatgtcccacccaaaatcccagagcacccacattgagaaacattgaatttgcctcattaaatctatcttttctgtaaaaacaaaatgactccagcttgtgaagcactgtgtatgtaagagattcgtggagttgttgttctacccttggctttcccctccctgcagaggggctgatgggagggcaggcgtgaccttcacccccagcacacaccttcttaccagccctagccactctgctcaggggcatgccatgagtgggctagcgcgccccatccgtcttgctctccacaggagcaatgagcccaccagcccaggtttacttttcctggccccagctttccagcctctccacagcctgttcttccttgctcttagtttctgattgctttccacccttcgtcatgaactcttctacagccagggaggcccttgtgttcccatctctaccccgggagcctctcggcatcaggctccagacttcttcctctgtcatctgcctgctgttgtgatgcctgctgtgcagactccctcaagttaggacagagtgcttcctctgtggagtagggccctccctttcctttctgggcatgctttccctctgagcccacgttgcctccaagtcctttnnnnnnnnnnnnnnnnnnnnnnnnnnnnnnnnnnnnnnnnnnnnnnnnnnnnnnnnnnnnnnnnnnnnnnnnnccggacacagatggcccaagactagcaacggatttctagccctggccccagataatggttcataggcacgccggtctcttcctcaggtcatcattgtcatctacctgtccgtggtgggtgtcctgttgctctacatggccttcctgatgctggtggaccctctgatccgaaagccggatgcatacactgagcaactgcacaatgaggaggagaatgaggatgctcgctctatggcagcagctgctgcatccctcgggggaccccgagcaaacacagtcctggagcgtgtggaaggtgcccagcagcggtggaagctgcaggtgcaggagcagcggaagacagtcttcgatcggcacaagatgctcagctagatgggctggtgtggttgggtcaaggccccaacaccatggctgccagcttccaggctggacaaagcagggggctacttctcccttccctcggttccagtcttccctttaaaagcctgtggcatttttcctccttctccctaactttagaaatgttgtacttggctattttgattagggaagagggatgtggtctctgatctctgttgtcttcttgggtctttggggttgaagggatggggaaggcaggccagaagggaatggagacattcgaggcggcctcaggagtggatgcgatctgtctctcctggctccactcttgccgccttccagctctgagtcttgggaatgttgttacccttggaagataaagctgggtcttcaggaactcagtgtctgggaggaaagcatggcccagcattcagcatgtgttcctttctgcagtggttcttatcaccacctccctcccagccccagcgcctcagccccagccccagctccagccctgaggacagctctgatgggagagctgggccccctgagcccactgggtcttcagggtgcactggaagctggtgttcgctgtcccctgtgcacttctcgcactggggcatggagtgcccatgcatactctgctgccggtcccctcacctgcacttgaggggtctgggcagtccctcctctccccagtgtccacagtcactgagccagacggtcggttggaacatgagactcgaggctgagcgtggatctgaacaccacagcccctgtacttgggttgcctcttgtccctgaacttcgttgtaccagtgcatggagagaaaattttgtcctcttgtcttagagttgtgtgtaaatcaaggaagccatcattaaattgttttatttctctcaaaaaaaaaaaaaaaaaacaaaaaaacaaaaaaacaaaaaaaaaaaaaaaaaaaaaaaggggggggcccgccataagatatttctccgcgaggggcggccgccaattcttctcgccgctcccccctgttgttttgtgtcacgaggggcgccccccctattgggagggcggtctgtataattcacgcccccgagcgcacaggccgcgccgcggttgttaacacccccgcgtcccgcgacgtcggagacacaactggtcgtgccgtcggagcagcctcttctggaggaggcgaccctcctactcccggcgggggcggcgacgccgttcttggggcgcacgtacccctg

SEQ ID NO: 6578 - DNA, 1261 bp, Homo sapiens
  misc_feature (18)..(18): n is a, c, g, or t
  misc_feature (65)..(65): n is a, c, g, or t
  misc_feature (67)..(67): n is a, c, g, or t
  misc_feature (171)..(171): n is a, c, g, or t
  misc_feature (173)..(173): n is a, c, g, or t
  misc_feature (231)..(231): n is a, c, g, or t
tgcttccagggtttggantaggagctgctcccctgagagccatgcaggggtctgcagcccaggcntntggcagcagctctttgcccatctctttggacagtggccaccctgcacaatggggccgacgaggcctagggccctcctacctgcttacaatttggaaaagtgtgncngggtgcgggtgctcacgcctgtaatcccagcactttgggaggccaaggcaggaggatncgctggagcccagtaggtcaagaccagccagggcaacatgatgagaccctgtctctgccaaaaaattttttaaactattagcctggcgtggtagcgcacgcctgtttcccagctttggggaggctgaagtaggaggatcatttatgcttgggaggtcgaggctgcagtgagtcatgattgtatgactgcactccagcctgggtgacagagcgggaccctgtttcaaaaagaaaaaccctgggaaaagtgaagtatggctgtaagtctcatggttcagtcctagcaagaagcgagaattctgagatcctccagaaagtcgagcagcacccacctccaacctcgggccagtgtcttcaggctttactggggacctgcgagctggcctaatgtggtggcctgcaagccaggccatccctgggcgccacagacgagctccgagccaggtcaggcttcggaggccacaagctcagcctcaggcccaggcactgattgtggcagaggggccactacccaaggtctagctaggcccaagacctagttacccagacagtgagaagcccctggaaggcagaaaagttgggagcatggcagacagggaagggaaacattttcagggaaaagacatgtatcacatgtcttcagaagcaagtcaggtttcatgtaaccgagtgtcctcttgcgtgtccaaaagtagcccagggctgtagcacaggcttcacagtgattttgtgttcagccgtgagtcacactacatgcccccgtgaagctgggcattggtgacgtccaggttgtccttgagtaataaaaacgtatgttgcaaaaaaaaaaaaaaaacttgtgggacttttgtggccccgaaagcccttgaagctttcctgatgcctttacccttccttgggttcttggaaggccccggggaccttgtttactaactcggggggtggcccaccccccagaaccttccccgtgggccagggtttttccccggagtggcggcccgtgtgttctttcatagcttgatcacacacgc

SEQ ID NO: 6579 - DNA, 3496 bp, Homo sapiens
  misc_feature (3405)..(3405): n is a, c, g, or t
  misc_feature (3412)..(3412): n is a, c, g, or t
tactagagttgagtgtggatggaaacacagacactgtaaatcaagtgtttcatttacgtgcacaactcctactgaattttagcaattaaaacatgaaaactgaaatattggttaacaaatgaaaatagaatttagagacctgaacttcttttatgatctttaatgattatttgttctaatctttgacttggaaacccaaattattttcagtctaacgtacttgaaatttaactattaaaaaagttggaggaactcaaactttgaagttagggctccctttctccagataaagcacattgcctggtttattgtaaggcacttagaacatgtaaccaaaaacactcaatttaggaataggaatgattgttttacagctaagtgcgctctcagagtcttttgttttacacccctctcaagtttacctttagatatttttcttgttgtttaatattttgtgacagatttggcaacttttaaaaagttgtttgaattgaatagtgcataaaattaatagatgtttttcagaaaatccattattaagagtagaggaatgaggagaaatattcgttctaaagagaatcaaaaccacaatgagagattgtcttacccccgttagaatgacagttaccaaaagacagtaacaaatgctgacgagaatgcagaggcaaaggaacgtttaaacactgttagtgggaatgtagacttgtacaaccgttatggaggagagtatggaggttcctgaacaaactaaaaatagaactaccatatgattcagcagttccactactgggtatatatccaaaagaaaatccatatatggagacatctgcacctgccatgctcgttccagcactattcacagtacccaagattggaatcaacctgtgtctatcagcaaatgaacagataaaatgtggtatatataccccgtggaatactatttggccattaaaaaaacaaaattctgttattctcagcaacatgtatgatcttagaagacattatgttaagtaagccaggcacagaaagataaatactccatgtactgtacttatgtggaaggtaaaaaagatctcatagaagtagagagtggctcatgcctctaatctcggtgctttgggagtctgaggtgggaggatcacttgaggcctggagtttgagaccagcctgagcaacatctctcaaaattaaaaaaaaaaaaaaaagtagccaggcatggtagcacatgcctgtatacctagctacttgggaggctgaggctagggaggatcccttagcccgggagttccagggtgtggtgaactatgattgtgccactgcactccagctggggcaacagggagatactctgtctctttaaaaaacagtggttactagatggaaagataaattctagtgttaccttgcactgtagggtgactaacagtaattttttattttttttgtatggctaattcagtacaaatggaaagtgtttgaggtgatgcatatgcaattatgctggttttttttaatccctatacattgtattggaatttacaatgtaccccataataaaggatagaggaatatttacagtatcatctatttggttaaatgttattcagcagttctggcctgctgcctttttttgtataacctatggcccaagaatggtttctacattttttaatagttgagcaaaaatcaatagaataatattttctaatacataaaattagatgaaatttcagtttcagtgttcataaataaagctttatgagagccatgctcaattgccttgaggctgctttcagcctacaacaaaagaattgagtagttaggactgagaatgtatggtctccaaagtctaaaataattactacatagtcctttttagaaaagtgccttctggattagatgatccttaatgatcatttcaggccaatttctataatgtgcactacacagttgagtgaccacttgcaagatttttaatgtgagcagggatagtagagatgatgaatgtaggtaaggagaggaaatgagaatgaggactttcaggggcaagagatggtggtgtcattttgtgttgtgttcctgagtcaggtaccaacagatttcctctgagtagaatataaatgctaacaaattaaactgtatgttgtatacattcagcccttggtaacaaggaaaatgatagaattgaaatgttcttgtacctcactagaagcagagaaagggtgctggatatttctgtttccgataatgctgcatagatagtgccacttaaatgtagagcaaaattacagtctcctctaagtaattcctccagttaccatgtgtcctagattccgatacctgtccaatacaatttctagaactttttcacctccccatcatgtctgccttctagtgccccaaaattatgtgagatgctagaagttgtttgacctgtgattgttcttgcttccttggtccctacgtacgagtacatagcatgattgggccagaatccgtcttttgagctcttctagtaaagtaagttttgagataatacctaagaccacatggaaatttggttggtctaagtagaggacaagcacatatttaactacctttggcaggggaaaaagtgaagtgggagagcttaccagtgctacctatgtgtaggctgacactctgaaacttcagtctccaggaatctccatatgttggcactattttgttgattatttttctataaggttatatttctttggaagatcagtaaacttgctgttctaacccaaattcagtgtagtcttcagcttctgaataaggaataaaggaatcgaatgtgctttggatgttcttttaacaatttcagaatgttggcatgccctttgagcatctaaacttccctcagcgaattggtatttatttatttatttagagatagaatcttgcactccagcctaggcaacaagagtgaaactccgtctcatctcggctcactgcagcctctgcctcccaggttcaagcgattctcctgcctcagcctcccaagtagcagggactataggcatgtgccaccaccacactccgctaattttttgtatttttagtagagccaggggtttcgtcatgtaagccaagctggtctcaaagctcctgacctcaggtgatccgcccgctttgagcctccaaagtgctgggattacagggcgtgagccaccgtgcccagcatgatatttatgattctaagtgccatttcaaaaatctggttgctgctgttttttgctctggtccactagaggagtaatctttactgtaggggcttattgcatattgtttattgggcctaagtactaagtggggaggcttcccattttctccaggttccttgagttttggaagagcaagttctatgcgttattctattanaaaatantccagttttggttaaacttaatagttccttcccttgaaaaaaggtttttttggaattttttcaatggggggccaaactttaatt

SEQ ID NO: 6580 - DNA, 491 bp, Homo sapiens
taagctcatgagttatcattagtgttagcatattttatgtgtagcccaagacaattcttcttccaacatggtccagggaagccaaaaggctggataaccatggttgagaggatcatcccacagaactgttttatgcaactcaaacaggtaactgcgcaactttgattttaactaaagaggtagaagtcataagcaaagtccacaattctaagatttggttttctgtcctaaacaaattcctactcactcctcacaatgcaaaagtaacattttcccatgatttcatgacaaaacgttacagcatttagaaaagactggacaaataatatgaccttaatgttacaatttgctaggaatgatgcgaaattgaagaaatcaactccaggttgaaaaataattctttcaaccgaagtgagctgcttcaaaatgtgttacttacatctcactgaagtcattaagtaccatgaaagtgttatataacgtcgacgcgg

SEQ ID NO: 6581 - DNA, 672 bp, Homo sapiens
ctttttttttttttcaaatggaaagatactctaagagcaaaaatttctcctgaattttttttttaaaataaggattctattaactttactcagtgggcaaggaaattttccaagagacaaaatcgttgtacctagtattcagaatggagatacacgtggagatgtgtatctagtattcagaatggagatacacagaatggagatttgtaacaaccaacttcacaagttttaaactgacatatttctagttgtctaccactacttgttgctaacagaatcagtgctgttagtacaccagcagtctagcttaaatgctgggagtagattcaaatgatctctctacagctgaatctcattctctatgctgttattaaatattttgtattttgcaacatttttatatatttgcccctggaagactggctcaagctctgtaggtgttatgctaaaatgttttaacagcctcctgccttcatcctctcatccttcgtgatctaccacacaatatactaaacaactatctgctttgtgtgcatttaaattgtcttaaattaatccatcttattgtagttgcttaactagtatagcaagcactttagcactcattcattttttttcacaaagtttcttatattttctgtcgacgcggccaagaatttagtagtagtaggc

SEQ ID NO: 6582 - DNA, 1001 bp, Homo sapiens
gggcccttggctccaggagggacttgggaagcctgggtcggcctgagggagtcccaggcctgccgcagagtcatcccagtccggccagtgttcacaggcttgcacgatctttgggtggtggagtgcaaaggaggcgacctgcaacagaggagtcccggtcaccagcaaccatgacggaccagcaggctgaggccaggtcctacctcagcgaagagatgatcgctgagttcaaggctgcctttgacatgtttgatgctgatggtggtggggacatcagcgtcaaggagttgggcacggtgatgaggatgctgggccagacacccaccaaggaggagctggacgccatcatcgaggaggtggatgaggacggcagcggcaccatcgacttcgaggagttcttggtcatgatggtgcgccagatgaaagaggacgcgaaagggaagagcgaggaggagctggccgagtgcttccgcatcttcgacaggaatgcagacggctacatcgacccggaggagctggctgagattttcagggcctccggggagcacgtgactgacgaggagatcgaatctctgatgaaagacggcgacaagaacaacgacggccgcattgacttcgacgagttcctgaagatgatggagggcgtgcagtaaggagtggacagtcgcctctaccaagatcgcgtgtccctagggtgtgggagactccgccctgccgggtccccaccagggaggcgcggccccttgtgggtctttgtctggaaggaataaaagcaaatgttccaaaaaaaaaaaaaaaaaaaaaaaaaaaaaggcgggggccgggcccagaaaattttaaacacttggggcgcggcgcccaaggaaacaacgggcacgggccagaaccgggcaaggggggttcccaaaaaaccggggcggcggtgaacacggttgggttgtttcgccgcacaccaccgcgcgggggcgaaaaaaacaaaccacaaaaaagaagaaagagcc

SEQ ID NO: 6583 - DNA, 1598 bp, Homo sapiens
gaagaacagcaagacaggcagcctgcctgtgagcgagatctacagcttcatgaaggagcacttcccctacttcaagacggcccccgacgggtggaagaactcggtgcggcacaacctgtctctgaacaagtgcttcgagaaggtggacaagcaacccagcatcccccgaccccttgacactcctccgaggcctgagccgcaatgcctgcccgtgttgagtgagacttctccatcctggatcctggctgcgtgacctcagtgacctgcaccccattttgggacaccttggtgcattaaggaaacaccctggggtgaaagcccttgaattcatcctcatgggaaatggctgagtggatcaaacctcagccgcagcctccgggggacaggcccagggcgggaaatggagccggagaagcttgagcctctctcttggacaggacaagctgaactctgaaatgggagccggtccaggtggccttcagccccacctttccgatagtctgttagaattttattagcgcagattcctgggccatgccgggtaccgtgaccttgtgtaaatttatttatatttattgtggcccatccaccccacttctgcaaacccatcccgaggcctctggaatgggactccttctccctccctacctcccagccatcctaactcctacaggccagagaatgacatctctaactggctcataatcccttggcagcctggggctactttttagaaccagcaagcactgttgatactgtgaaacatcccattttttccgtattagagaccagatatttttctacctgttcatgattcacatctcttcttgcatgtacctaagaggggcggtgccattgtttgggggcttggggggctttcaaaggggaaaatgcgatgggagagggaggaactggaggggggtgcttttgtactgggatttaagacacccctgatggaatgaaagccaactgaaccacgtaaagctcgaaccacgtggcaagtggtggacaaaacttcaacgcatgatatttattggcacttcctcacctccctttgccctgcagctgtttttatgcttctttttctctccttgctaattactgactccccaagtggcaagttccgcagatagctgggttagaagagagacaggggagtgagctagtcaaatgtgaaaaatgctctcccagcaaagctgagacaaaattggagaagctgcagcctcacgcaccatccccctctttccaccagatggatgttgacttggtgtctgggagttcccgaaccctagagccaggatgttctgtttaatcaacagctcagccagctgcctgggagttttggcattaagccccgccttgaagggcgagctttaagtttttcccagttctggaactttctaccgagtatccaccacccttagacacaatcccagtgctacccgtctgacctgcactgctcatctgctttgtgtaacatgacccctgataagatgttgaaactgttattcacaaagactccgtgtttgggcaacatcaagactgtaagtgtagaattgagcaactgtcttctatcaataaaggctgaatggcaaaaa

SEQ ID NO: 6584 - DNA, 6562 bp, Homo sapiens
  misc_feature (1501)..(1549): n is a, c, g, or t
ggggactaggcgagcggaacgagcccgaacagcagggacagacggggccacagccagcacaagatgagtgccacgtcctggtttcctggtgatcattagaggcgctcgtcaccggctccctcgggagctcatcttcgtggggcgtgaggagtgtgagctcatgctacagtcccgcagcgtggacaaagcaagcatgccgtcatcaactacgaccaggacagggacgagcactgggtgaaggacctgggcagcctcaatgggacgtttgtgaatgacatgcgcatcccggaccagaagtacgtcacgctgaagctcaacgatgtcatccgctttggctacgattccaacatgtatgtgctggagcgtgtgcagcaccgagtcccggaggaggcactcaagcatgaaaagtacaccagccagctgcaggtgagcgtgaagggtttggcgcccaagaggagcgaggcactgccggaacacacaccatactgcgaggcctcgaaccccaggccggagaagggggaccggagaccaggaacagaggcagcctcttaccgcacacccctgtatgggcagccctcctggtggggtgaggacgatggtagcacgctgcctgatgcccagcgccagggagagccctacccagagcgccccaagggacccgtgcagcaggacggggagctccacggcttccgcgcccctgctgagcctcagggctgctcgttccggcgggagcccagctacttcgagatccccacgaaggagaccccgcagccgtcgcagccccccgaggtgccggcacacgagatgcccacgaaggatgcagaggcaggtgggggcggagcggcccctgtggtgcagagccacgcctccttcaccatcgagtttgatgactgcagccctggcaagatgaagatcaaggaccatatcaccaagttttccctgcgccagcggcggcccccgggcaaggaggccacacctggcgagatggtgtcggctgagaccaaggtggccgactggctggtgcagaatgacccgagcctgctgcaccgggttggccctggggatgaccgccacagcaccaagagcgacctgcctgtccacacccgcaccctgaagggccacaagcacgaggacggcacgcagagtgactcagaggaccccctggccaaggcggcctcggccgctggggtgcccttggaggccagcggggggcaggtgcggctgcagaggcagatcaagcgggacccccaggagctactacataaccagcaggcctttgtcatcgagttcttcgacgaggacacgccccgaaagaagcgctcccagtccttcacgcacagcccgtccggggaccccaaggccgacaagcgccgtggcccaacgccggccgatagggaccgccccagtgtcccagccccagtccaggcagggggccgcagctcggggccacagagggccggctcgctcaagcgggagaagacagaggaacggctgggcagcnnnnnnnnnnnnnnnnnnnnnnnnnnnnnnnnnnnnnnnnnnnnnnnnngccgctcccgcctggcccaggacttcatggcccagtgtctgcgggagagctccccggccgcccggcccagccccgagaaggttcctccggtgctgcccgctcccctgacaccccatgggaccagccccgtgggccccccgaccccaccgcccgcccccacggacccccagctgaccaaggcacggaaacaggaggaggatgacagcctcagtgacgcagggacatacaccatcgagaccgaggcgcaggacacggaggtggaggaggctcggaagatgatcgaccaggtctttggggtgttggagtcccctgaactctccagggcatcttcggccacctttcgcccagtcatcagaggggacagagatgagtctgatgacgggggcgtggcccagcggatggcgctactgcaggagtttgcctcccggccactgggtgcggccccccaggcggagcaccagggcctcccggtgccgggctcccctgggggtcagaagtgggtgtcccgctgggccagcctggctgacagctactcagacccgggcctcacagaggatggcctgggacgtagaggcggggagccggaggggtccctgcctgtgcgcatgcggcgacggctccctcagctgcccagtgagagggctgacagccctgcgggcccagagagcagcaggaggagtgggcctgggccaccggagctggacagtgagcagcccagccgcctcttcggccaggaggagttggatcctgacagcctcagcgatgccagtgggtcggacgggggccgaggccccgagccaggggtggagccacaggacagcagacgcaggagcccccaggaggggcccacgtggagcaggggtcggcgctcaccaagggcccccggggagccaactcccgcctctttcttcattggggaccagaatggggacgctgtgttatctaggaaactgcttgcggctccaggggatggggagggcctagggcagacagcccagcccagccccccagcacgggatggcgtctatgtcagtgccaatgggagaatggtcatccagctacggcctggacggtccccagaacccgacggccctgccccagcctttctccggcaagagagcttcactaaggagccagccagtggtcccccagcgcccggcaagcccccccacatctccagccacccgcttctacaggacctggccgctacccgggccgcacgcatggacttccactcccaggacacccacctgatcttgaaggagacggagacggccctggcggccctggaggcccgactcctctctaattctgtggatgccgagtgtgaggggggcagcaccccgaggccgccggaggacgccctgtctggggactcggacgtggacacagccagcaccgtcagcctgcgtagtggcaagagcgggcccagccccacaaccccccagcctctgcgggcacagaaggagatgtcgccatccccgccagctgcacaggacccgggaggcaccgccctggtcagtgcccgtgagcagtcctcagagaggcagcatcacccacttggcccgacggacatgggccgtggagagccggtacggcgctcagccataaggcgtggccacaggccccgagggtccctggattggcccagtgaggagcgtggccctgtcctcgcccacctacccagctcagatgtgatggcctccaaccacgaaacccctgaggccaccggggcaggacggctaggttctcgccggaaaccagcggccccaccgccatccccagctgcccgggaggagcagagccgtagctcagccagctcccagaaggggccgcaggccttgacccgctccaacagcctgtccacccctcgccccacacgggcctcccggctgaggcgggcccggctgggggacgcttcagacactgaggctgcggatggtgagcgggggtccctgggcaaccctgagcccgtgggccggccagctgctgagcaggccaagaagctgtcacgcctggacatcctggccatgccccggaagcgggccggctccttcacagggactagtgaccccgaggcagcccctgcccgcaccagcttctctggccgcagtgtggagttgtgctgtgccagccgcaagcccaccatggccgaagcacgggctgtctccaggaaggctgccaacacagccaccaccacgggtccccgccagcccttcagcagggcccgctcgggcagtgcccgatacacctccaccactcagaccccgagggctggcagctccagccgggctcgttcccgggcccccggcccccgggacacggacgacgatgaggaggagcctgacccttatggtttcatcgtgcagacggcagagattgcggagattgccaggctgagccagacgctggtgaaggacgtggccatcctagcccaggagatccacgatgtggctggggacggtgacacactgggctcctcggagcctgcccacagcgcctccctcagcaacatgcccagcacccccgcctcgaccatctctgcccgggaggagctggtgcagcgcatccccgaggccagcctcaacttccagaaggtgccgcccggctcgctgaactctcgggactttgaccagaacatgaacgacagctgtgaggacgccctggccaacaagacgcggcctcggaaccgagaggaggtgatcttcgataacctgatgctgaacccggtgtcccagctgtcgcaggccatccgtgagaacacagagcaccttgccgagaagatgaagatcctctttcagaacacagggagagcttgggaggacctggaagccaggatcaacgccgagaacgaggtgcccatcctgaagacatctaacaaggaaatcagctccatcctgaaggaactgaggcgggtgcagaaacagctggaagttatcaatgccatcgtggaccccagtgggagcctggacctgctcacaggaaacaggagcttggccagctctgcacagccggggctggggaagggccgcgtggctgcccagagcccaccctcacccgcctcagccgaggccctgctgccagccctgcccctgaggaatttcccacagcgggccagctgtgggcctcccagcctcccggaccccaccttcctccctgatgccgagaggttcctgatctaggccccagacctggccaggccagcctccctgtgcgtgtgcgtctctgccttccgtccgccgcacacccgcctgcctggccgcaggtggttctccctgaagacccccacatgtgccatatccctgtgggcgggtgcctcccacgcccttgccccctcgtcagctcccagccagcaccctactcaccctgtccagccccatggccacccccacccctgcctcgccccctacaggcctctgggcccagctcctggccaggctgctgccaaggtcaagccctcaagggcattaccccgcctcctcttcatcactgttatttttgtctttagctttaaaggaaagagttgttggtgccattgcaggtgccccctccaggcctgactggctccgccaggcactaacctgccataaccctttgtgctggcctgcggccaggcagaggaagagaggtcgactgtggggtcatttggtgccaaacatggaggtgggcaggctcacctgttcctgggactgtctgagatggcagggcacttgccctggtggctcccacctgaccccaggccttttataggcaggagccccactgcttccagcctctggtgccaacacagttgccaaacccattgagcttggggctgccccgtggaggcctcctgggtatggaccaggggcttgttgagagctgagccatgcacacaggtgcagacaccccccaactcccatgcacacggctagtccaggcgcctccacgctgcaccgtgaggactgcagggcatgtccccgtgaggggctatgggcctctgtaggtgggcttccaaggtcctgggtgcagccgggtgcatggcagcccttctggcgggggtgagcgcacgaccaaagtcactggaagccgggtttccggaagctcgcagcttggcctgcaccacacgccctccccttttggcttcacgccatcaggcctcaagtgggcatgggggcagggacgggcccaggaactgttgttttctcaggattctttcagctgggaacatggcaggtgagcagagcttggtgcctctgccgtggcccctgctggggcagcccgtgttgccggagcctctaagccaaagagcccgttggccgtggttggtgggggtggacgtgggggtgtcccacctggaccagactggcgtgggtgagctccacaccctgcctggcaatggtatgagagtcggacctggacagggccagctgctgggggagcggcactggggactggaggctggaagcgggtggtgtgtgtcccctgtttacttttagctgagctggggttgggtgtacgggttctgttcctctgagccctgcggcccacctgatgtttacgtgtgtgtgtgagggggggcgggggtggcaggtgtccccccctggtccccgccccaagagcctgctgtctgtatggaggaggtgctagcccggtccaccgggctgctgcccacccctgcatgccccagttgcccaccccgcctgcccctggacatgaagtggtcacgcttcatccacggctccttcccacccctcggcagtggctgtgcaatgttttaagttcacaagttcctgctcctccccacactgagctcctttgttcctccccctccagcctttgcctgggaactggtccttgtttgccgggcttctcggagggttcactgtacattcgttctcaggtggtcttgtggctgtctttcggaaaatggttattttatatgatttgtcatggaatttgttctaataaatcattcttctatcacatggcaaaaaaaaaaaaaaaaaaaaaaaaaaaaaaaaaagaaaaaaa

SEQ ID NO: 6585 - DNA, 2370 bp, Homo sapiens
ggctcttttaaatgaccccaggcgtcgtgtattgaatcctagactcacgtccgtctcgccggcgcccgagccagtccgcgcgcaccgcgtctgcgtccccgaaagccccgcccgcaagggctgccctgcctacctggtctccgacgtgctcgtctggagggcggtgcgaggggccgagccgacgagatgttcttgctgcctcttccggctgcggggcgagtagtcgtccgacgtctggccgtgagacgtttcgggagccggagtctctccaccgcagacatgacgaagggccttgttttaggaatctattccaaagaaaaagaagatgatgtgccacagttcacaagtgcaggagagaattttgataaattgttagctggaaagctgagagagactttgaacatatctggaccacctctgaaggcagggaagactcgaaccttttatggtctgcatcaggacttccccagcgtggtgctagttggcctcggcaaaaaggcagctggaatcgacgaacaggaaaactggcatgaaggcaaagaaaacatcagagctgctgttgcagcggggtgcaggcagattcaagacctggagctctcgtctgtggaggtggatccctgtggagacgctcaggctgctgcggagggagcggtgcttggtctctatgaatacgatgacctaaagcaaaaaaagaagatggctgtgtcggcaaagctctatggaagtggggatcaggaggcctggcagaaaggagtcctgtttgcttctgggcagaacttggcacgccaattgatggagacgccagccaatgagatgacgccaaccagatttgccgaaattattgagaagaatctcaaaagtgctagtagtaaaaccgaggtccatatcagacccaagtcttggattgaggaacaggcaatgggatcattcctcagtgtggccaaaggatctgacgagcccccagtcttcttggaaattcactacaaaggcagccccaatgcaaacgaaccacccctggtgtttgttgggaaaggaacctttgacagtggtggtatctccatcaaggcttctgcaaatattggacctcatgagggctgacatgggaggagctgcaactatatgctcagccatcgtgtctgctgcaaagtttaatttgcccattaatattataggtctggcccctctttgtgaaaatatgcccagcggcaaggccaacaagccgggggatgttgttagagccaaaaacgggaagaccatccaggttgataacactgatgctgaggggaggctcatactggctgatgcgctctgttacgcacacacgtttaacccgaaggtcatcctcaatgccgccaccttaacaggtgccatggatgtagctttgggatcaggtgccactggggtctttaccaattcatcctggctctggaacaaactcttcgaggccagcattgaaacaggggaccgtgtctggaggatgcctctcttcgaacattatacaagacaggttgtagattgccagcttgctgatgttaacaacattggaaaatacagatctgcaggagcatgtacagctgcagcattcctgaaagaattcgtaactcatcctaagtgggcacatttagacatagcaggcgtgatgaccaacaaagatgaagttccctatctacggaaaggcatgactgggaggcccacaaggactctcattgagttcttacttcgtttcagtcaagacaatgcttagttcagatactcaaaaatgtcttcactctgtcttaaattggacagttgaacttaaaaggtttttgaataaatggatgaaaatcttttaacggagacaaaggatggtatttaaaaatgtagaacacaatgaaatttgtatgccttgatttttttttcatttcacacaaagatttataaaggtaaagttaatatcttacttgataaggatttttaagatactctataaatgattaaaatttttagaacttcctaatcacttttcagagtatatgtttttcattgagaagcaaaattgtaactcagatttgtgatgctaggaacatgagcaaactgaaaattactatgcacttgtcagaaacaataaatgcaacttgttgtgctaaaaaaaaaaaaaaaaaaaaaaaaaaaaaaaaaaaaaaaaaaaattggggggccaagttaaggttaccagtttttgggagaagggggccttaaggggcgaatataaggaaggtggcggcgtataaaactcggacgggaaatggtaacttgggattgggaggacctattctggggggagcataggccaaccacgagagaaggtcggataaatttaggtgttgggaacgcatggggaatgaggtttaa

SEQ ID NO: 6586 - DNA, 555 bp, Homo sapiens
taaatgtttcagccttgggtactagattagaatttaacatgaaatagttgtgaaatgggaaagcctagaattgatggcaaacacatatgcataaagttatgatagaaacagccaaaaaaattaattaaagtaagcaaccctgttaccaggaaatcattaacctgggaaaaaaaaaatctaagaaatggtattgcctgaagtaacaaatggtggccaaataaaatcttcacttcttttgttgttttaaactactatattcttaatatccaagaatggcatcatacaaggaaacaagctatcatgcagctggaactacttataaactgtaattccactcattatttttcactgtcctgaactcactaaataaggctacacctgaaatctgcacactgaaggtttgatgttttctctcttccctttcttaggtctctaccttctgggcgctcaggttccttaaataaggggaaaatgaggaatccaaaggctggaagtactttctggacctcctattcaagtgttccccactccggggggtgagggtacggccggggg

SEQ ID NO: 6587 - DNA, 1213 bp, Homo sapiens
ggccggggctggtggtaacgtggggatgggatcgggggcgtcttgggttgctgcgcgcgtcaaccgcgaggcggctgagtgcagggggttttggttgagggtcggtggcgcgtatgtgtatcgttgtgtcgtgttgggcgggtagtttttccgctttgttcgtgacggggcgaggatgggatggtggcctacgtggggggctctgcgcgggttggccgcatggaatgagtggggggggggagcttcgcaatcgcgggtgggtcggtggggggggggtcggcgggcccgggggggctcggcgggttagcgcctttgaaagttcgtttcggcaagcaagccccttcctttgcgggagttttgggggttttcgggcgttgggcaaaaccctccagcgggggattctttggatcccaatagttcccgggaggcaggtggagaaggggagctcctgcgcttgaattcggaataccgccccctgcctctttccctcggagcgggcggcggcgttggcggcttgtgcagcaatggccaagatcaaggctcgagatcttcgcgggaagaagaaggaggagctgctgaaacagctggacgacctgaaggtggagctgtcccagctgcgcgtcgccaaagtgacaggcggtgcggcctccaagctctctaagatccgagtcgtccggaaatccattgcccgtgttctcacagttattaaccagactcagaaagaaaacctcaggaaattctacaagggcaagaagtacaagcccctggacctgcggcctaagaagacacgtgccatgcgccgccggctcaacaagcacgaggagaacctgaagaccaagaagcagcagcggaaggagcggctgtacccgctgcggaagtacgcggtcaaggcctgaggggcgcattgtcaataaagcacagctggctgagaaaaaaaaaaaaaaaaaaaaaaaaaaaaaaaaaaaaaaaaaaaaaaaaaaaaaaaaaaaaaaaaaaaaaagggtggtccccaagagaaagtcattttgaagcgcggggtgggaacgccccccaagagacgttgggtaatggcggaaaaaaattggagaacggggtggtgggggcccccctggtacaattcacacgggggccccccaagatttggaagaaacgagggtttccccccccttatataattttgcccggagggaaacgacccttatagaaatgcccg

SEQ ID NO: 6588 - DNA, 706 bp, Homo sapiens
  misc_feature (30)..(36): n is a, c, g, or t
agaaggctatgtacaaaaagcggcttatannnnnnngcagagctctgcaaggagaggttgtgtcttcggctgggtggcgcttcgttctttccaacatcttcgttctttctcactgaccgagactcagccgtgagagatatgagtgagcatgtgagaacaagatcccaatcctcagaaagaggaaatgaccaagagtcttcccagccagttggatctgtgattgtccaggagcccactgaggaaaaacgtcaagaagaggaaccaccaactgaaaatcagggtatgcacctagtggggagatcgaaaatgaaggagcacctgccgttcaagggcctgacatggaagcttttcaacaggaactggctctgcttaagatagaggatgagcctggagatggtcctgatgtcagggaggggattatgcccacttttgatctcactaaagtgctggaagcaggtgatgcgcaaccataggtttcaagcaagacaaatgaagactgaaaccaagaacgttattcttaatctggaaatttgactgctaacattctcttaataaagttttaagttttctgcaaagaaaaaaaaaaaaaaacctagagcactagtgccccccttggggagccgcggctaaggggcgccaaactttggcccaagtcccaagaaccacccaacaacaacaaacccggtccccaaaggggcaccaaaat

SEQ ID NO: 6589 - DNA, 1462 bp, Homo sapiens; identical to SEQ ID NO: 6383

SEQ ID NO: 6590 - DNA, 5072 bp, Homo sapiens
  misc_feature (4822)..(5071): n is a, c, g, or t
caactataagactttgattattatctgcgcactcttcactttggtcacagtacttttgtggaataagtgttccagtgacaaagcaatccagtttccacggcgttcgagtagtggcttcagagtggatgggtttgaaaaaagagcagcagcatctgagagtaacaactatatgaaccacgtggccaaacaacagtctgaggaagcattccctcaggaacagcagaaagcaccccctgttgttgggggcttcaatagcaatgtgggaagtaaggtgttagggctcaaatatgaagaaattgactgtctcataaatgatgaacacacaattaaagggagacgagaggggaacgaagtctttcttccattcacttgggttgagaaatattttgatgtttatggaaaggtggttcagtatgatggctatgatcggtttgaattctctcatagctattccaaagtctatgcacagagagccccctatcaccccgatggtgtgtttatgtcttttgaaggctacaatgtggaagtccgagacagagtcaagtgcataagtggggttgaaggtgtgccattatctacacaatggggacctcaaggctatttctatccaatccagattgcacagtatggattaagtcattacagcaagaatctaactgagaaacctcctcacatagaggtatatgaaacagcagaagacagagacaaaaacaagcctaatgactggactgtgccaaagggctgctttatggcgaatgtggctgataagtctagattcaccaatgtcaaacagtttattgcaccagaaaccagtgaaggtgtatccttgcaactgggaaacacaaaagattttattatttcatttgacctcaagttcttgacaaatggaagtgtgtccgtggttctagagaccacagaaaagaatcagctcttcactatacattatgtctcaaatgctcagctaattgcttttaaagaaagagatatatactatggcattgggcccagaacttcatggagcacagttaccagggacctggtcactgacctcaggaaaggagtgggtctttcaaacacaaaagctgtcaagccaaccaaaataatgcccaagaaggtggttaggttgattgcaaaaggtaagggattcctcgacaacattaccatctctaccacagcccacatggctgcattttttgctgctagtgattggctagtaaggaaccaggatgagaaaggtggctggccaattatggtgacccgtaagttaggggaagggttcaagtctttagagccaggatggtattctgccatggcccaagggcaagccatttctacattagtcagggcctatctgttaacaaaagaccatatattcctcaattcagctttaagggcaacagccccttataagtttctatctgagcagcatggagttaaagctgtgtttatgaataaacatgactggtatgaagaatatccaaccacacctagctcttttgttttaaatggctttatgtattctttaattgggctgtatgacttaaaagaaactgcaggggaaaaactcggaaaagaagcaaggtccttgtatgagcgtggcatggaatctcttaaagccatgctgcccttgtatgacactggctcaggaaccatctatgacctccgtcacttcatgcttggcatcgctcctaacctggctcgctgggactatcataccacccacatcaatcagttgcagctactcagtaccattgatgagtccccaatcttcaaagaatttgtcaagaggtggaaaagctaccttaaaggcagcagggcaaagcacaactagagctcacaaccaaaactgcacttcagcctctgctgtacacagaaactacaggctctgtctcaggagagcataggcacattttaaaaggttatgtactaggtttttgtggattctatcaaagtgataagtgatccttaaaaccagccttctaaaataattgcattccatgggttgggtatttagaaatgtaggtggcatttagaacacaatgtttaatcaatgggctgaacaaagatgcttcactttgccttgcccatcaccctatacagtttcgcagatagtctagtcactctatgtgagaaagataatggtaagtagttgctactggccaactgtctagcacttacctgaaaacttagtatggagctcttttaaaatgtgattatttatatttatgttgaaagcggactttaaaaaaaataatgtgctgtaacacagtaaatatgtacttgtagcctggatagcagactgtgttcaactttttaaaaagatgtttcctttctatagattaatttcttgggagcaaatgagtatttgttgcatttgttcaatttgttgtatatggtgaatatttaattatggttttcttgaaacgtgtaaattaaaaacacaatcagtgttcaggcttcagttatataatgtaagcacaactaaaatgaaacttgttgactgcacaagaaattacaaaaatgtttctgttttgaaacttgatctacaatcagtaaaagtttgataatcagtatatcccttcccaacccccattgtgacagtttctttttgtcactgtctagaattttgtattttatttcagactataccttggagttttgtatattttgagagagatatttttgggacattattttggaaacttattacaaatctaaatttggaaaggagctagtagctttaaggccaccaccatattttacttttttaggatttttccccctttaaataaaaatattagatcaaatactatatgcaagaaatcatagcaaagtttttttttcctaccaagatcattcttgatcatcagcttcccaaactagtaagtctgtgcatcattgggtgtttttttttaatttaattttaaattatcccagctattagatagaagggatgttactgcacttatgtgtaatcagatctttatttaggtatacatatcctcctataccgcacataaatagatttcagagcccccatacaatgggcagtgtctgctatagggcttcaggcattaaataaaaccgagggttgttgattttgctgtgacagtacactaaatcaatactatatcttatacagtttgaaaatatgataccctacactttcaggggaccgagtctgacaaacacaatacatttatctgtgacctatatcaagtacacatttaggagccaggtaggttacctgcttacacactatattttaattgaattcaaactatcaagcactacttagaaactggaaaacatatatatgttagcatcaaagggggcagaagcaaagaagatacagatctgcactgaagacattagactggccatagaaaagtaagcttgaactcccaattgatgtgaccacctcttcttaattttgttcacagtaaaaacacttttttgagttattaggcttacccctagcttttgacctttgcatttcatatatgttagatgtctcagcaagaatatctggtctcccctaatttttattcccagtgccgatgttcaaaataaactttctccagtctgggaaccttttttacttccccatatttgttattatttagaatggttcatacgtctgctttgtttgcatactggtcttcagattatgagactcgatgataacagtatggtactgcttctgtgacaaatatcgtgccttaacaatgtggctgtccttttccactgaagaaggaaagacgttttgatctagaaatagcgttgtgatttccttgctgttggttttacactgccttccacattgcaacagcaagttgatttcttgtgatcccagaattttctaagaggatgagttgaatctatagcagcattgtcagtacagaccagtggttctcaaactttaaaatgcctcagcatcacttgggagcttattgaaatgcagatcccagagtcagtaaatctgcctgtgaagtatgatagtctgcatttgtaatgagcattcaagtgattctgatgcaggtgagctgggggcatacagggaggaacactgccctggactatccattgcatttttgcctctaaacaactacagaattttctagggttttaaattatgtaaaatgtttacttattctgagcttagagagaatggggagggtatttttaaattttattgttttatttctttaagtttttctttgctttaagattataggtattaggtttgtttttgtttttccacttatcttgagttcactttgatgttaaatctattgctacttcagttgtaaaaccagccaaaagtttctggatgaaggtcaagtttgaccttttaggagttattgtacataaaggcttcatccacgaaccatccagcgcacagaagcaagtgcaaaaatgacacaagcacaactctccagacgtggctccttctcctttctcagtgcagactctcactgaaagctgctattttcatcctccttgtggttgcttttcttgtttctcttccattgtacatgtgggttatataccatatgttaaatatgcaataaagtgtttacaggatgtccttctgaagggtagtcctttgtaaagctgtacagactttgcagtttaagcacaatgtgcacatgttagttttatatacagcaaaacttgattttttgcagatggaaaggtattttgtttctatacaaagtaaatggattgtttgtgcttaatgtaaagccgctttataaaactgtaaaataaagtttttttcttaaaaagaaaaaaaaaaaaaaaaaaaaaaaaaaaaaannnnnnnnnnnnnnnnnnnnnnnnnnnnnnnnnnnnnnnnnnnnnnnnnnnnnnnnnnnnnnnnnnnnnnnnnnnnnnnnnnnnnnnnnnnnnnnnnnnnnnnnnnnnnnnnnnnnnnnnnnnnnnnnnnnnnnnnnnnnnnnnnnnnnnnnnnnnnnnnnnnnnnnnnnnnnnnnnnnnnnnnnnnnnnnnnnnnnnnnnnnnnnnnnnnnnnnnnnnnnnnnnnnnnnnnnnnnnnnnnnnnnnnnnnt

SEQ ID NO: 6591 - DNA, 441 bp, Homo sapiens
ttttttttttggctgttcaagtgatttttaatcaagtaccccacatgactaattcaggtcctccaaaatagtcccagggagccaaaatgaggtaatatgacatgttgtggacttgaagggtggttaaggacacatacagccactgcttcagatgccgctgtgaggcagaaaattcaggaatgcagtagaggaggggaatgtgaacccagaatgcactcagtgtctctccttcagacgcttttttgaccctcggaagcctggtctgctcaggtcaattctgcaacccatctcacaggcataaatcttgacatggtcttcacacccttttcctctggcccctaattacaattctgctatttatttctcaacacagcctacatttcatgtgtttctcgtatgaatgagttgcagtgtgtgctgtggttaagctggtggcacccc

SEQ ID NO: 6592 - DNA, 3456 bp, Homo sapiens
  misc_feature (1199)..(1220): n is a, c, g, or t
  misc_feature (2242)..(2261): n is a, c, g, or t
gaaaaagaagaaacccaggaagactggcagatggacacactgaggaagaccccccacgagtgggaaccccctggaaggaacacaccggccccggcccccaggaagggagcacaatggaggccgctcatgctaaaaccacggaggaatgtttggcctattttggggtgagtgagaccacgggcctcaccccggaccaagttaagcggaatctggagaaatacggcctcaatgagctccctgctgaggaagggaagaccctgtgggagctggtgatagagcagtttgaagacctcctggtgcggattctcctcctggccgcatgcatttccttggtgctggcctggtttgaggaaggtgaagagaccatcactgcctttgttgaaccctttgtcatcctcttgatcctcattgccaatgccatcgtgggggtttggcaggagcggaacgcagagaacgccatcgaggccctgaaggagtatgagccagagatggggaaggtctaccgggctgaccgcaagtcagtgcaaaggatcaaggctcgggacatcgtccctggggacatcgtggaggtggctgtgggggacaaagtccctgcagacatccgaatcctcgccatcaaatccaccacgctgcgggttgaccagtccatcctgacaggcgagtctgtatctgtcatcaaacacacggagcccgttcctgacccccgagctgtcaaccaggacaagaagaacatgcttttctcgggcaccaacattgcagccggcaaggccttgggcatcgtggccaccaccggtgtgggcaccgagattgggaagatccgagaccaaatggctgccacagaacaggacaagacccccttgcagcagaagctggatgagtttggggagcagctctccaaggtcatctccctcatctgtgtggctgtctggcttatcaacattggccacttcaacgaccccgtccatgggggctcctggttccgcggggccatctactactttaagattgccgtggccttggctgtggctgccatccccgaaggtcttcctgcagtcatcaccacctgcctggccctgggtacccgtcggatggcaaagaagaatgccattgtaagaagcttgccctccgtagagaccctgggctgcacctctgtcatctgttccgacaagacaggcaccctcaccaccaaccagatgtcnnnnnnnnnnnnnnnnnnnnnntgacaaggtggatggggacatctgcctcctgaatgagttctccatcaccggctccacttacgctccagagggagaggtcttgaagaatgataagccagtccggccagggcagtatgacgggctggtggagctggccaccatctgtgccctctgcaatgactcctccttggacttcaacgaggccaaaggtgtctatgagaaggtcggcgaggccaccgagacagcactcaccaccctggtggagaagatgaatgtgttcaacacggatgtgagaagcctctcgaaggtggagagagccaacgcctgcaactcggtgatccgccagctaatgaagaaggaattcaccctggagttctcccgagacagaaagtccatgtctgtctattgctccccagccaaatcttcccgggctgctgtgggcaacaagatgtttgtcaagggtgcccctgagggcgtcatcgaccgctgtaactatgtgcgagttggcaccacccgggtgccactgacggggccggtgaaggaaaagatcatggcggtgatcaaggagtggggcactggccgggacaccctgcgctgcttggccctggccacccgggacacccccccgaagcgagaggaaatggtcctggatgactctgccaggttcctggagtatgagacggacctgacattcgtgggtgtagtgggcatgctggaccctccgcgcaaggaggtcacgggctccatccagctgtgccgtgacgccgggatccgggtgatcatgatcactggggacaacaagggcacagccattgccatctgccggcgaattggcatctttggggagaacgaggaggtggccgatcgcgcctacacgggccgagagttcgacgacctgcccctggctgaacagcgggaagcctgccgacgtgcctgctgcttcgcccgtgtggagccctcgcacaagtccaagattgtggagtacctgcagtcctacgatgagatcacagccatgacaggtgatggcgtcaatgacgcccctnnnnnnnnnnnnnnnnnnnntggcattgccatgggatctggcactgccgtggccaagactgcctctgagatggtgctggctgacgacaacttctccaccatcgtagctgctgtggaggagggccgcgccatctacaacaacatgaagcagttcatccgctacctcatttcctccaacgtgggcgaggtggtctgtatcttcctgaccgctgccctggggctgcctgaggccctgatcccggtgcagctgctatgggtgaacttggtgaccgacgggctcccagccacagccctgggcttcaacccaccagacctggacatcatggaccgccccccccggagccccaaggagcccctcatcaagtggctggctcttcttccgctacatggcaatcgggggctatgtgggtgcagccaccgtgggagcagctgcctggtggttcctgtacgctgaggatgggcctcatgtcaactacagccagctgactcacttcatgcagtgcaccgaggacaacacccactttgagggcatagactgtgaggtcttcgaggcccccgagcccatgaccatggccctgtccgtgctggtgaccatcgagatgtgcaatgcactgaacagcctgtccgagaaccagtccctgctgcggatgccaccctgggtgaacatctggctgctgggctccatctgcctctccatgtccctgcacttcctcatcctctatgttgaccccctgccgatgatcttcaagctccgggccctggacctcacccagtggctcatggtcctcaagatctcactgccagtcattgggctcgacgaaatcctcaagttcgttgctcggaactacctagagggataactgttccccctcctccatctctgagcccgtgtcacagatccagaagatgaaagaaggaagtgagcatccttttgctctgtcctccccaccccgatagtgacacatcttcaggcagagctgtggcacagacccccgtcctgtcccccacacccgtgtcatgtgtctgtttataaacatgtccccttccctttccttccccctcggccacccgcctccctctcaaccttgtaaattccccttcccaaccccgaggggcttgcagggacaaggcgaccgactgcgctgagctgcttatttattgaaaataaacgacggaaaagtcaaaaaaaaaaaaaaaaaaaaaaaaaaaaaaaaaa

SEQ ID NO: 6593 - DNA, 1341 bp, Homo sapiens
atgctgtagatagaaaatcctaaggaattctcccaaactattagaactaatagacaaattcataagggttgaatggcaaaagatcaatacacaaaaatcaattacatttccatgcactagggggagacattcctcaattgcttagacatattctgagcctacagcagaggaacctccagtctcagcaccatgaatcaaactgccattctgatttgctgccttatctttctgactctaagtggcattcaaggagtacctctctctagaactgtacgctgtacctgcatcagcattagtaatcaacctgttaatccaaggtctttagaaaaacttgaaattattcctgcaagccaattttgtccacgtgttgagatcattgctacaatgaaaaagaagggtgagaagagatgtctgaatccagaatcgaaggccatcaagaatttactgaaagcagttagcaaggaaaggtctaaaagatctccttaaaaccagaggggagcaaaatcgatgcagtgcttccaaggatggaccacacagaggctgcctctcccatcacttccctacatggagtatatgtcaagccataattgttcttagtttgcagttacactaaaaggtgaccaatgatggtcaccaaatcagctgctactactcctgtaggaaggttaatgttcatcatcctaagctattcagtaataactctaccctggcactataatgtaagctctactgaggtgctatgttcttagtggatgttctgaccctgcttcaaatatttccctcacctttcccatcttccaagggtactaaggaatctttctgctttggggtttatcagaattctcagaatctcaaataactaaaaggtatgcaatcaaatctgctttttaaagaatgctctttacttcatggacttccactgccatcctcccaaggggcccaaattctttcagtggctacctacatacaattccaaacacatacaggaaggtagaaatatctgaaaatgtatgtgtaagtattcttatttaatgaaagactgtacaaagtagaagtcttagatgtatatatttcctatattgttttcagtgtacatggaataacatgtaattaagtactatgtatcaatgagtaacaggaaaattttaaaaatacagatagatatatgctctgcatgttacataagataaatgtgctgaatggttttcaaaataaaaatgaggtactctcctggaaatattaagaaagactatctaaatgttgaaagatcaaaaggttaataaagtaattataactcaaaaaaaaaaaaaaaaaaaaaaaaaaaaaaaaaaaaaaaaaaaa

SEQ ID NO: 6594 - DNA, 997 bp, Homo sapiens
ttttttttttttttttttttttttttttcaagagtagattctttattcatttctcttttttttcttaaaaaaaaaagtattcatttggtataaaaaataaatattttaaatatgacattgaataaataaaaataatctgtcagtatgaaacatccccacagggtacattcatcaaagaggaatttgtcacccaaggccatgtgcttttcagtggaaaggaaggagggaaacctctaaggccgcacggtgggcccacggagctagcacgtgggcgggactgaaggctggatgccgggattgaggtggggaactagagatgactctaaggcaggaacatctgtaccatctgcagggaaatgctacctccccgggtgccagagctccaaccccacacactatgtctactctggagagccggcaaggcagagctggactggctgggtcagggtggaagtgccccaagtcagggacaaggaggacgatggggacgatggggaggagagacaagtaaactagcagtgctttttaaaaaaatgtttaaattaataaataagggcccggagacatctctcttggtaaactctctcttcctccgggcaggcccaggtgtggtcccacaccagcagatagaaaagggaagagaaaccagtcccggctggcagagctgtttcacgcaaaggctctgtgatacagtgatgcttgtgccagcggtgcacgccaaagctggccggagggatctgagggagcactgaggatggtgcatgggccaattccaaggtggtgggaaacaacaaagcaggccaaggtgggcttgcacagactccagtcaaatgaataaggatgggaattcaccgccccggtgatacgactggttcaaactttcttctaccttgggaagtaccccaatacgataagaaagctcattaaggatcactaacactttttagatagtgccacaagagaaccaaagaagaaaaagcggcacactccaatgagt

SEQ ID NO: 6595 - DNA, 1472 bp, Homo sapiens
  misc_feature (216)..(234): n is a, c, g, or t
  misc_feature (246)..(317): n is a, c, g, or t
  misc_feature (1114)..(1140): n is a, c, g, or t
ttcgggcacggcacgaggggcgggcgctgttgagggagtcgggccgcgactgtggtcgtttttataccttcccgcgcggacgccggcgctgccaacggaagggcgggtagggcggtgcgtgattaggttggcgaaggctctgctgccatgaaggtgaagattaagtgctggaacggcgtggccacttggctctgggtggccaacgatgagaactgnnnnnnnnnnnnnnnnnnnatttaacggatnnnnnnnnnnnnnnnnnnnnnnnnnnnnnnnnnnnnnnnnnnnnnnnnnnnnnnnnnnnnnnnnnnnnnnnncctgtcctgggaggcagggcccatccacaggtgcccatcaacacagcttccccaacgcctgggcagcacaccggatccctgatgtctagggaagagtcttctaggtccccagaccccacccctcctgcccttgatcaagagaccagttcactactcagatgcacgtctccttggtgccttgaccattcatgtgacctttttggcatcacagatcaagtgtctgcagatgggcccagccctgactgcaaggtgcccggcgacgactgcccgctggtgtggggccagtgctcccactgcttccacatgcattgcatcctcaagtggctgcacgcacagcaggtgcagcagcactgccccatgtgccgccaggaatggaagttcaaggagtgaggcccgacctggctctcgctggaggggcatcctgagactccttcctcatgctggcgccgatggctgctggggacagcgcccctgagctgcaacaaggtggaaacaagggctggagctgcgtttgttttgccatcactatgttgacacttttatccaataagtgaaaactcattaaactactcaaatcttaaaaaaaaaaaaaaaaaaacaaaaaaaccccgagaggcgctctcttattgccgggggcgcgggaacaacagagagggataagggaactgtggcgccaatgtgggccatataagctgtggttccccttggaacccaagttttcttgtggtccccaagcgggggaaaattctcgcgccgaggtctctccctattatagtggagagctcggtatataaatnnnnnnnnnnnnnnnnnnnnnnnnnnnacccccgctgtgggccctctacaggcggaacacgcttgcgcgcgaccacaacggtcccaaccactacgcacgcgcgcgcaccgaccagccctcgccccgcgcacaatcaacagctgcgcagcagagacagagcgggggccactcccttcacaccgcaacaatatctgacgggaacccacagacaacaagcctctctggcggctcctcacgcgtaccacccgcagctgcctcttctaaatgccaccgatacttgcaccaacccatacatttaaatgtgatacgcctatattcactccaagccacacgtcatcatggactagccactcccccgt

SEQ ID NO: 6596 - DNA, 1379 bp, Homo sapiens
  misc_feature (59)..(76): n is a, c, g, or t
atgcatggaattggtccttctggcagttttacagagtttttggatccgttccagagagnnnnnnnnnnnnnnnnnntctggctctataaaaatcctttggtgcaatcagataacatacctacccgcctcatgtttgcaatttctttcctcacacccctggctgttatttgtgtggtgaaaattatccggcgaacagacaagactgaaattaaggaagccttcttagcggtgtccttggctcttgctttgaatggagtctgcacaaacactattaaattaatagtgggaagatggagtgatgaactcggaaatgcattgcacaggtgaccccgatctggtgtccgagggccgcaaaagcttccccagcatccattcctcctttgccttttcgggccttggcttcacgacgttctacttggcgggcaagctgcactgcttcaccgagagtgggcggggaaagagctggcggctctgtgctgccatcctgcccttgtactgcgccatgatgattgccctgtcccgcatgtgcgactacaagcatcactggcaagattcctttgtgggtggagtcatcggcctcatttttgcatacatttgctacagacagcactatcctcctctggccaacacagcttgccataaaccctacgttagtctgcgagtcccagcctcactgaagaaagaggagaggcccacagctgacagcgcacccagcttgcctctggaggggatcaccgaaggcccggtatgaccagtgtcctgggaggatggacactaagccctgggcacatctgccaccctgacatcataacacaatagaaatggttttctgtagtgtatttttcatcagttgtttctcaaagtcatcgtacttctgcttctgtttcactgatggtgttcctgctactttaaatgtctacttccaacatccttgaatttgcaagtgaaggacaacaatctctgagagacgtgtggaagaggctgtgaaggtggggtttggggagcttggccgattcgtctatctgaaatgtttgctgtaacagccaccttcctatgttttcatggttgtaaaacataataaaacctcccacgtggaagacttggtgttggccacccagcgcaacaagtcatttggagatgcagcaggtttctcagagacccaaagccagctctgtctgtaggtcattccaggtgctgagcttggaagcaaaggctcagaacctttctgagccatcagcttctcatagcccacgtctctaaaatagatttgaactggagtgacagcttgagcatttgccagggctttctgcatgcgagttgatcctggagagcaaataaaattaataacttcatgcacagagcttccacgcgacaccatg

SEQ ID NO: 6597 - DNA, 5631 bp, Homo sapiens
  misc_feature (5577)..(5577): n is a, c, g, or t
gcgatgccgaggtcctacggctgcgagaagacgacagaagggggcgcgcgcgtgtgtttatgtgtctgtgtgcgtgtgtgtgtgtgtctctctctgtgtgtgtgtgagatgaattggagtcatacgactgggtgtttccttccgagtggttttcatcagcaatccattaggaaatcatggaaactttttttttcctggctaaaaggatgaaaactgagtcatccacttttgactgtcatccatggaagagctcttattaaaagcctcagactttcgggacctatgattctttggcacaaccttttggaaaattcttaagcagggatgaagcaaacttgattggagttggggaaaaagaagacagattagtatttttcatgctgacaaaaaatagctgctatgacttttcccgcaacgtggacaggggccaagtgaagctgaactggtcatggtctgtcgcccagtgttcccttgtcgtcggcgattttgcccccgacccttcttggtgggcttagtggtggcaatctgtctcttctaccagactctgaccctccgagggtcgaggaagctcacagccgctgcccctggggctgtcccacacacatccactgaaacccaggcaagcagatgcaagaaaggattctctcaggacaaacagtgcttccttctctctggtaatgcccaggaaaccagaaaggtcaaagaatcaatggagacacactttggcagccatggccgaagggccatactctacaggcctcctttctacagcaaaacagagcttcagctacaccagcacattctgactcaacatggctatacggttgtcatcgctgaagaaaggctcaatgctggcctagggccggggctactagaacaaggtgatctgggctcttgggatctgctcatttgcctgtcttctaagaaagcagaaggaacaccctgtatatccaaggaagtcatgtgccagttaggtttacatcaaaaggcaaacagattaccagaaatacagcagccactttgcagaaaggaaggattatgtcaaatagttagaagattcccagaactgcaacttccagtgagtccctctgtgtgtctggatcagggaatgcaattaaagccgagtacttcgagtcaccttttaaaaacagtgaagccacgtgtgtggaaaccaggggactggagtcgtgaacagctgaatgaaacgacagtccttgctccacatgaaacaatctttcgagccgaagatctatctgtgattcttaaagcgtatgtgttggtgacgtccttaacccctttgcgtgcattcattcattcgactggcacagtttggaatccaccaaagaaaaaacgcttcactgtcaagctgcaaacattttttgagacattcctgagagccagttcacctcaacaggcttttgacattatgaaggaagcaattggcaaactactgctagcggctgaagtattcagtgaaacatctactctgggaccaaagaccttccatagatgcagattctgctttcaacttctaacttttgatattggttatggcagtttcatgtaccctgtagtgctccaggtacacgagcatttaaattttcaagattatgataatatggattttgaggaccaaaatacagaagaattccttttaaatgacactttcaattttctcttccctaatgaatcatcactttccatattttctgagatatttcagagactttataggtcagatgttttcaagggtgaaaactatcaaaaggaactaaatcagtgtctgtccttagaagaaattaactcaattatgactttcataaaggaacttggaagtctgggacaattccaactgctcttcccatctactactcctgggattcagtcactgatgcatgaattttatgatgtggcaaatcctgtgggaaatcctggctcagtcctgacccaatactggtctcttttaaatgtatttgaacaatttcagttcatgaataaaaagacacagccacatccactggaatggaattctttcacagaagataagaacattgaaaaaccacaagtgccatttgatgcaatagaaaataaaaaagctgcagttccacaaattaaaaatgaaaataaagaaatacattgcagtgatgatgaaaacacaccatgtcatatcaagcagatcttcacacatccacatttggaactaaatcctgactttcatccaaagatcaaagattattactgtgaagtcccatttgatgtggtaacagtgacaattggagtggaaactcctaagtgtctgtgcaaggtgcacctgtacgagcaggcagggccaagctttgccagctaccctctgggcttaggaatgaacagaatctcaatatttgttgtggatgaatctccagcacacggtgagactctgatcacgtacaaactcaccatctatagagaagaccgcccaagtctgcccttgtttgaggccttcacagcatgtggttttgtgcaggattgtggtttgctgattcatccagaggaaacctgtgggttacagcctatttcttctgactacattgaagccattttacagtctgaactaaaaagatgtccatctggggacatgaaaggccagtggattgtgccttgccttagttgttcggacaacaggacgtgtgactggagagaaataacctggcagccccacaactgccaatatggtgtcctaactaagcctcaactccagcagtgcctgggaggaaggaagattctgttcattggagattcaaccaacagagggatcatgtactatcttattgaaaggctgaatgaaacgttgcaggaatggcagaaagtacatggcactaaattctatcacaacgtcaatggtgggaagactttgatcagttattcctactatccccagttctggataagcccttcattgagaccaacatttgaaaatgcacttgaacacctcttgcaaagatcacgtcccctagagaatactggccagactgtattggttgttggtggtgttcagtggcttaattccaatcacctgcaaattattcacaaagttttgaagagggaaaatttactcaatatcctagtgatcatcaaaactttgggaattggatttcatctgccagtggatggagtacatttcttaacacagagtgaagtacagaacttatggaaagaaaatttgattattctggatactgcaaaaaaacatggctatgaagtagttgacacattcactataacaatggggcgttacaaagagtttctacaggggaagtgtggatgtcatttccatgaggtagtgaaatcaaagttatccaaagaatataactttattaaaatgaaaagatcaagaaatcatatcatgggaagatatttcagcaatcaaagcaaactacaacaaggcactgtaacaaattttcgatcgccatatcatgtcagaggtccaataaatcaggtttgttctgaaatccttctcagcaggatgtgtgcaaataaaaggactatgtaggctccctgcaggagagctgaatctggagctggagacgagctagtcacccggacaatggtctaggagccaagcgctgcacatcgcacacatttgggatcgaccacacacacttgtgcacaccagcacatgcatgcacaccagtacacacacagttaaataatgataacacttcttacagctttatgaattcaagatgtgaccttgaacaccagtccatttcacagtgaaagatatacctagagaaacgttacttgaagcataattattaaccagaaccactgtgggccaggtatggcattatgataataaagagaaatatagacacttaaaattatgtgaaaaaaaggataatgctctttcatgttgtcttaccatatctataggtacatcaatattgaaaaggagaaaaaccaatgacattccactggcaagtagaagttgtcctttcattctttaccaggagaaaatgtgatgtttatgatggcttaggctttgtgaatctaatgcttatgaaaaacatttcttcctatactttttaaattttattactgaaaggaaaagaacaggaatgttccacaagggaatttgaagagattctgtgagagagatatgaaatattttatagttaaaacaccaatatattcaactttacacttcttgtgtttttcataaacattccctcttgtcttatctgtgtacttcgatgggtaactgcagtctgaattaatgaaatatgtaattttaaagtaagtaacaaaatgtagttcctcatgtattactgtactatgtttcattgatgatattacttaaatcttgtgtttgccattacagccctatgtaacttaaaattacaattatattttatgtaaatattttgcaaaggactatgcattctgaaatgcataggtgctttttcccaccaagcatttgcatatgtccacaaatagtattatgttactagtatctatattttgattttcctgagcaactgtatcaaatccaaatttagattagacaaaaaattattattttaattaaactgtggcatacatataatacatacctaattatagtagtgagaactatttcttttatctctttaggttcaaaatggtgaatttctttattatatgaatgctttgttgtgagataacatcacactgttacaatggattttagaggtttgtcttttttgggtggggtgggaagctgagagggttaattcaatacatggctgaaattaccaaatgtataaatacctcattttcactaccatacaagaaaaaaacacctattttgattgatcagttcttttgtatgaatatccacctcctttaaatactctatttttatatatatttttatatgaagataaacatgaatttatatttaactgtcttaaattatatttacataaatgcaaatatcacttgatataaacaatacaaatctgcatcttacagatgataatttttttagaagaatgatacagaattaactttaaaaataaaacttttctaatatacacttaaatgcaaacatcatttttaaattttcagtgatttttttaatgacataaaacgttaccaatgtgtgcagcctctccatcatgttttaacatactgtatactctatagcagtattacagtcagtatttcatataattttctttagacctaactgttaccatctgactgaggttactctggtatttatctcttcgctgctgaaataataatggattttagaaacaattgtaataatatcattaataaatgtcttactagtaataaaaaaaaaaaaaaaaaaatcttttattttcttttttactgaagatgtacatctatgcaaacagtgaccacttggcagggatattatcatgtggattcaagtattatagcatggttaaacacgattaactatatagttccttctaagcctaatattctttaagtttatgatcagatgaacttcccactgtgccaatgacaaaatgtatgaagataatgtattgtagtgaccaactttttacaaataataataactangaccccttacttaaatgcctaggcaatcactttttaatttgctcccttaacctg

SEQ ID NO: 6598 - DNA, 4260 bp, Homo sapiens
cgcctggcgccccgcccgcgccttaggacccgcggggccgcgcggcgcatcctgcgggcggcggcggcgggcgaggcgcctgcagccgggcgcaagatgatgaagtttcggttccggcggcagggcgccgacccgcagcgcgagaagctcaagcaggagcttttcgccttcaacaagactgtggagcatggcttccccaatcagcccagcgccctggccttcgacccggaacttcgcatcatggccatcggcaccaggtctggggctgtcaagatctatggtgcacctggcgtggagttcacaggcctgcaccgggatgcagccactgtcacacagatgcacttcttgaccggccagggccgcctcctgtccctgcttgatgacagcagtctgcatctctgggagattgtccaccataatggctgtgcccacctggaagaagcactcagtttccagctgcccagccggcccggctttgatggtgccagtgctccgctcagccttacccgagtcacagtggtcctgctggtggctgccggcgacatagcagccctgggcactgagggcagcagtgtcttcttcctggatgttaccaccctgaccctgctcgaggggcagacgcttgccccaggcgaggttctgcgcagcgtgccagacgactaccgctgtgggaaggcactgggccccgtggagtcactccagggacacctgcgggaccccacaaagattctcattggctacagccggggcctgctggtcatctggaaccaggcctcgcagtgtgtgtggcaaccctagacagccgtgggcagcatgccctactgcatggtgtggcgttgcatagcagcactgtggtcagctcacacagcgatggcagctatgctgtctggtctgtggatgccggcagcttcccaacgctgcagcccacggtagccaccacaccttacggcccctttccctgcaaggccattaacaagattctgtggcggaactgtgaatctgggggccactttatcatcttcagcggtggcatgccccgtgccagctatggtgaccgccactgtgtaagtgtgcttcgagccgagacattggtgacgctggacttcacttcccgcatcatcgacttcttcacagtgcacagcacacggcccgaggatgaatttgatgacccccaggccctggctgtgctgctggaagaggagctggtggtgctggacctgcagactcctggctggccagctgtgcctgccccatacctggccccgctgcactcctctgcaatcacttgctcggcccacgtggccagtgtccccgccaagctgtgggcccgcattgtgagcgctggcgagcagcagagcccccagcctgtctccagtgccttgagctggcccatcactgggggccgaaacctggcccaggagccgtcacagcgagggctgctgctgacgggccatgaggacggcaccgtgaggttctgggatgcctcgggtgtggcgctgcggccgctctataagctgagcacagctggcctcttccagacagactgtgagcacgctgacagcctggcccaggctgccgaggacgactggccacccttccgcaaggtgggctgcttcgatccctacagtgacgatccccggcttggcgtgcagaaggttgctctctgcaagtatacagcccagatggtggtggctggcactgcaggccaggtgctggtactggagcttagtgatgtgccggtggagcaggcggtcagcgtggccatcatagacctcctccaggaccgcgagggcttcacatggaagggccacgagcggctgagcccacgcacggggccgctgccctggcctgctggcttccagccccgtgtcctggtgcagtgcctgccgccagctgctgtaaccgctgtcacactccacaccgagtggagcctcgtggcttttggcaccagtcatggctttggcctcttgagccctgtgctggccaggtgcactcttcaccccaatgactccctggccatggagggtccgctctcccgggtgaagtctctcaagaagtcactgcgccagtctttccggcgcattcgcaagagtcgtgtctctggcaagaagcgggctgctaatgccagcagcaagttgcaggaagccaatgcacagctggctgagcaggcctgcccccacgacgtggagatgacgcccgtgcagcgccgcattgagccccgctctgccgatgactccttgtcgggtgtcgtgcgttgcctatactttgccgacacattccttcgagatggggcccaccacgggcccaccatgtgggctggcaccaactcaggctctgtgttcgcctatgcactggaggtgccggcagcagcagtgggtggtgagaagcggcctgagcaagcggtggaggccgtgctgggcaaggaggtgcagctgatgcaccgggcgcctgtggtggccattgccgtgttggacggcgtggccgcccactgcccgagccctacgaggcctcacgggacctggcgcaggcacctgacatgcagggtggtcacgctgtgctcatcgcatctgaggagcagttcaaggtgttcacactgcccaaggtgagcgcgaagaccaagttcaagctgacggcccatgagggctgtcgtgtgcgcaaggtggcactggccacgtttgccagtgtggcctgcgaggactatgctgagacctgcctggcctgcctcaccaacctgggtgacgtccacgtcttctcggtgcctggcctgcggccccaggtgcactattcctgcatccggaaggaggacatcagcggcatcgcttcgtgcgtctttacgcgccatggccagggcttttacctgatatccccatcagaatttgaacgcttctccctaagtgcccggaacatcacagagccgctctgctctctggacattaactggccccgcgatgccacccaggccagttacaggatccgagagtcacccaagctgagccaggctaacgggaccccaagcatcctgctggccccacagagccttgatggaagccctgatccagcccacagcatgggacctgacaccccggagccacccgaggctgcactctcacccatgtccatcgactcagccaccagtgctgacaccacgctggacacgacaggggacgtcacagtggaagatgtgaaggatttcctgggctcctctgaggagtcagagaagaacctgaggaacctggcagaagacgaggcccacgcctgttgcatctgatcaatgaggaaggcagaactatccgctgaggaacctggcagaagacgagctggagtgctggatccctggcacctgcctggccccttaacatagaaccacgcctgctaacctgtaggctccactgggacctgctgtcctgtcccgcctgaccctgggccctggagcagcaccagccccagggtgtgggcctgggacctgggccagaactgagccctcctgcaggcatttggctgccctgggggcccactgcctagggaagaggacaggtgggggcccagcacctgtgccacctccccccctccacacaccatccttccccctcactttgcagagtatttttccttttttttttttttcttttttcttaaagacggagtcttgctctgtcgcccaggctggagtgcagtggccccatctctgctcactgcaaagccccgccttctgggttcccgccattcttctgcctcagcctcccaagtagctgggactacaggcgcccaccaccacgcccagctaattttttctgtatttttagtagagatggggtttttcaccatgttagccaggatggtctcgaccccctgacctcgtgatccacccacctcagcctcccaaagtgctgggattacaggcgtgaccaccatgcccagccctgcaaagagtatttttctagcgcctgggctggacagttgtttctaaaactaaactattttggtacctgcttctgggccagtccccagcctgtcatgagtgtgtgtgtgcgggcatggatgtgactgggagctctgctgggcacccacatctggggcctagtcaggtgtgtgtgtccggcggggggggggggggggggggggtcaagatgagtttccctgtagattgtaccttggggtttttttctgtcgttttgttaaaattagcgccattttaatattaaaaatactgatttttaatattgaaaataaaagcatttaatatctcttaaaaaaaaaaaa

SEQ ID NO: 6599 - DNA, 512 bp, Homo sapiens
ttttcctgagtaacactcttactccagatacatatacaggtcactcaactccttcaatttgtaaatctctggttaaatagaaaggtagcagatcagccctccttgatctctgccaacttaatatttgaacagagatttaaaggaaaaaatattacagaagtgggaatcctcaaaatactttctaaaactagctttgggctgggattataggcataagctactgcacccatctcagaatttgtctatgtttacaatattatcaatgggtagacagctaattgcacagaatataaatgaggagaggtagatttttattaatgtgtacattttccttaattcctgatttactcaggcccaggcttctttgtttctggtcttggatctatgggcctgtgtaaatctttgtcacttagctaaaaggatttcttgaaaatccttgtagttgtttattgagcatttactgtgtactaggcactattgtaggtactagggatacagcagtgaaaaagaaa

SEQ ID NO: 6600 - DNA, 3229 bp, Homo sapiens
ggcaggccgagccagccgtgcgccgcgctccagggcccagggcgccgcacacgcacccacccacccacccagcctcgcagcgccatgggcaagaacaagcagccacgcggccagcagaggcaggggggcccgccggccgcggacgccgctgggcccgacgacatggagccgaagaagggcacgggggcccccaaggagtgcggggaggaggagccccggacctgctgcggctgccggttcccgctgctgctcgccctgctgcagctggccctgggcatcgccgtgaccgtggtgggcttcctcatggcgagcatcagctcctccctgctagtcagggacactccattttgggctgggatcattgtctgcttagtggcctatcttggcttgtttatgctttgtgtctcatatcaggttgacgaacggacatgtattcaattttctatgaaactgttatactttctgctgagtgccctgggcctgacggtctgtgtgctggccgtggcctttgccgcccaccactattcgcagctcacacagtttacctgtgagaccacactcgactcttgccagtgcaaactgccctcctcggagccgctcagcaggacctttgtttaccgggatgtgacggactgtaccagcgtcactggcactttcaaactgttcttactcatccagatgattcttaatttggtctgcggccttgtgtgcttgttggcctgctttgtgatgtggaaacataggtaccaggtcttctatgtgggtgtcaggatatgctccctcacggcttccgaaggcccccagcaaaagatctaacattcttgctcaaagttgcgagagaaagtagcacatggagtagctgaggttaaacaaacaaaaaaaaattttaaacaaagaaaggaaaaaaattgacaataaaagtcactcttctaattgaatatttttatatttttatgaaacaaaagagcatttcttcaggtttctattgtattttttttaacattcttgcagagaaagcaagatccaaattgattttgggatattaaaagttaacagaacactgaacaaggaaagaatggcatagatctatctttacagtctggagttaattcctgttaactcattttatccattccttacataatcttctttcctgttagtccagtttgatggtgtgaatggtgaatttcaggcccagttgctaaattttgtggcatcttcctctagtccttcccacctccagtcatcagccccactctgtcttggagacaggcaggaggtgggggaagagctgaatctctttattttccctggtagagacatcttcaaggcatgaaatagcttaaagagcagagtagaaatggaagaggctttgcaaaaggctagataactaacaacacctgggttggggcggcggcctcttctcttcagctcccttagcttggctccgtaagtggatcacttgccaaatgctttagatgattgcctctcaataattgaaaggtggtggtagttgtattctaaatgatgtagaaggtttaaaaataattacattatgcttctattctatcatctaaaacaaatcattaaaactaatttctagctaattgttaattataattatgctcagaagtctatttaatgagctctgactgtacttacgctgcactgtcggtgttaagagaaattactctcacaagagcagaggcctgaagattctttcttctgaaagccaagcaccacaaggaaaaaaaaattattaatagctcaggttaaaaacacccatttaaacaaaaacaagagcatttgtaataggaagtgtttatacaaacagcacatttgtgatatgttgaaaagcatctctcttggcaaccaatctatgtttgaggaagattgggtaatgctgatgtgttccattcatgaaactgtatttgatacataatcctattattaattcgtatgcttagtcaacctaggaaatcaaaataatgttttgaagttcttatttgagcaatatggccttgacttggagggtagttttagttgttttgtttttaagtgactgtggtttaaagcacaaatgccccaaggtggggagacttctctctgtgattattgttgctattaaattctgaactgtatccatattttaaggaaggagctaaaaatggaaattcatgaaacataaatggtatcaagaactttatcagtatgctttgttgaaagcagaaattaagataataattgagttcaattcgcctctccgcattgcctattgatacactttactaatcatgaaattctaacctaaaaggaaaacattttcctgcttgtcttagaagaaagtggaataattccactgattgtgataatggtttcaatttctacacaatataaatatccagtataaaggaaagcgttaagtcggtaagctagaggattgtaaatatcttttatgtcctctagataaaacacccgattaacagatgttaaaccttttaatgttttgatttgctttaaaaatggccttcctacacattagctccagctaaaaagacacattggagagcttagaggataagtctctggagcagaatttatcacacacaaaagttacaccaacagaataccaagcagaatgatgaggacctgtaaaataccttgtgccctattaaaaaaaaaaaaaaaaaaaaaaaaaaaaaaaaaagaatccattttgatttttggttgagtttcctacacaaagaagaaaataactgagaatctggaatgttgtagtccatcctttaaagagtaagaaagtagcagttaatgctagtaaccgtgaattaggcaccactgaaagcacatcccgaatttctttaacaacaacattttatagtgaacactacaagtttttatatttaaaaattaagactctgtatatccttaaggtgctctatgctttaccagtaattcacagggtatttcaaatggtagaatcattttagcttctgtgcttcctttttctaaataatgcaacttgtaagagttgacattgtaataagctttataatagtataaccgtcaggagatatatatatatatatacacatacacacacacacacacatatatactatacatatataaaatggggatattactattgtatgattaaatcattcttaagtccccaaggaaaaaaaatcataaacaaatagaaagaactaaacaaaaaaaaaaaaaa

SEQ ID NO: 6601 - DNA, 2297 bp, Homo sapiens
agcggagcggaagcgacgaagggacgggacccgggagctggacgagtccgagcgcgtcacctcctcacgctgcggctgtcgcccgtgtcccgccggcccgttccgtgtcgccccgcagtgctgcggccgccgcggcaccatggctgtgtttgtcgtgctcctggcgttggtggcgggtgttttggggaacgagtttagtatattaaaatcaccagggtctgttgttttccgaaatggaaattggcctataccaggagagcggatcccagacgtggctgcattgtccatgggcttctctgtgaaagaagacctttcttggccaggactcgcagtgggtaacctgtttcatcgtcctcgggctaccgtcatggtgatggtgaagggagtgaacaaactggctctacccccaggcagtgtcatttcgtaccctttggagaatgcagttccttttagtcttgacagtgttgcaaattccattcactccttattttctgaggaaactcctgttgttttgcagttggctcccagtgaggaaagagtgtatatggtagggaaggcaaactcagtgtttgaagacctttcagtcaccttgcgccagctccgtaatcgcctgtttcaagaaaactctgttctcagttcactccccctcaattctctgagtaggaacaatgaagttgacctgctctttctttctgaactgcaagtgctacatgatatttcaagcttgctgtctcgtcataagcatctagccaaggatcattctcctgatttatattcactggagctggcaggtttggatgaaattgggaagcgttatggggaagactctgaacaattcagagatgcttctaagatccttgttgacgctctgcaaaagtttgcagatgacatgtacagtctttatggtgggaatgcagtggtagagttagtcactgtcaagtcatttgacacctccctcattaggaagacaaggactatccttgaggcaaaacaagcgaagaacccagcaagtccctataaccttgcatataagtataattttgaatattccgtggttttcaacatggtactttggataatgatcgccttggccttggctgtgattatcacctcttacaatatttggaacatggatcctggatatgatagcatcatttataggatgacaaaccagaagattcgaatggattgaatgttacctgtgccagaattagaaaagggggttggaaattggctgttttgttaaaatatatcttttagtgtgctttaaagtagatagtatactttacatttataaaaaaaaatcaaattttgttctttattttgtgtgtgcctgtgatgtttttctagagtgaattatagtattgacgtgaatcccactgtggtatagattccataatatgcttgaatattatgatatagccatttaataacattgatttcattctgtttaatgaatttggaaatatgcactgaaagaaatgtaaaacatttagaatagctcgtgttatggaaaaaagtgcactgaatttattagacaaacttacgaatgcttaacttctttacacagcataggtgaaaatcatatttgggctattgtatactatgaacaatttgtaaatgtcttaatttgatgtaaataactctgaaacaagagaaaaggtttttaacttagagtagccctaaaatatggatgtgcttatataatcgcttagttttggaactgtatctgagtaacagaggacagctgttttttaaccctcttctgcaagtttgttgacctacatgggctaatatggatactaaaaatactacattgatctaagaagaaactagccttgtggagtatatagatgcttttcattatacacacaaaaatccctgagggacattttgaggcatgaatataaaacatttttatttcagtaacttttccccctgtgtaagttactatggtttgtggtacaacttcattctatagaatattaagtggaagtgggtgaattctactttttatgttggagtggaccaatgtctatcaagagtgacaaataaagttaatgatgattccaaaaaaaaaaaaaaaaaaaaaaaaaaaaaaaagaaacgcgaagggacacagaaagaaacacacaacaacaacactctttgtcgccgcgccggcccaaagaaaattctcaaacagcgtgggcggcgcccgagaatgagagggcaccgtccgaaggcctcggcacaggtggccccaaaagacggggggccgtggcaacacggtgggtatggtaagaggagcaaggcgg

SEQ ID NO: 6602 - DNA, 2742 bp, Homo sapiens
  misc_feature (229)..(229): n is a, c, g, or t
gaggcccaaggataaagttgcgcaaacatatatacttatatgccctatttataagggggccatggaataatagcagtgtttcccttaaacgtagaaaagctattgtaacatctctttccatttattcatatttttttaccaaattggtatttctttaaaggaaaatgaggaatgcacatcagtgattgattgtcaaacctcaccccctgatttcctacttaatctaccnccacctaaccaatcaatcacatccacaaattgttttgtttgtttgttagtcaggcttccaacaaagttcaatatttctaacactctagtgcaataaaaattattattaaatagctaagaggtgtgcatgtgggaaaggtcagtgcatatccctttaggaggggagaatgttgtaatatatcagctatcgagttgtttaaaaaaagtgtattcaatcgtatattgtctatagtatgtgctatgaaatttgcatttatgatatgtaacaggggcaaagccaaattcatgttactctgttcagtcagaaacattttgtggcatacagcattcctgggaagtgctgtactttgtttcgttttggttttagttttgcatttagagtgccttataattgatgcctattttaatagcatttctttttagcttttggttcgtatttccattcactgttcgtatctgttactttctattaaagcattatctgtttaccacatgtacaaaaactctttgaataatatgcattcctagttttcagccaagtcggggatgttagtgattgtaccagcccaaagcacttggataatcagggcccttcttccttttataatcaatcatcaacatcagaaaaagctacttgttttatttatattcccttccaaatccgctctggaacatgcagtaactgcaccaaacttattttagtaacaaatatcattggcaactttggaatatatttgatattccattaggatttttctaaaaggggaaataaactatatatatatatgtatcttacccccaattcttccaacagaatttctataggaagccatggatgatggcataagtttgccacatattacatgattttaaataatcctcaaaatacccaaggaactcttaaagagttttggtatgagtatactactttggtttaattttagcttcatggatgttctgcatggaaggatttttgttttccacattttcccattgctagcagagtgaaatccaagagaccaaacatttgcaagcattgtatttgagcacttttgtaaaaaacaaagaaaaagaaaaaaaagaaaatatatataatactaaaaaaaaagtatctagaaggctacctcagaatgagactctctaacctacatcagaaccagagaagaatgtgcactatgtgggtctgttatcattattttcttttagtctgtatctttttggagatttatccaagtgccagattactcagtgctataattttcttttagttaaacaaagggggtcagacagacattgcatcatccagacatgccttgttggacatgtagaatccgatggagcactgcacaccagaatgattggccaatgagcagcttctctccctgaaacaataactgcccatttggcaaagggaaagatgacaataatcagaagaagaaaatgaatgggatgcataccatagacgaacgaggcggagactattgcgggaatcttactgttcaggagctgttcctagaactaactcccttactgtcattgatgtgcattccactctgtgcttttctgtacaaccattcaagttttaatttcccaggtgaaccatctttatctgccattaccacaagctttcaagtttccagttattttcatcatcataaccagtacggtgctattatttacctatgtacgtgtagttatgtataattttgtaattagttacaatggtaaaaaaaatcaaaatatataaaaagtgatttgtacagaactttattttagctcttttttaaaaatgatttgcatggttagaaaacggcgaggacagccaggggagggaagggcctctagggaactttgcactttctatacctttgtactatgcactgccctattgattctacacccaataatgatattacttgaacccatctgtaagaaactgcttcggaaattcatttgtgtgtatgtaaataacacaacatagaaacaggaagggaaaaaagtctgcagtaatgcacgtattttttttctttcctgtttattttcggttttgctttaagtccttttatttttaattccctttttgtttttctttttgggttttggttccttttgggtttatgggtgccctgatactccagcagagatcagaaggctacagatccattctatccatccgttatgtggctttgccatcccagcttggagtgtctttacaaagataataacagttgtgttctttgctctcgttttggatgcatagactgaaaaattaaaacaaataacttgtaaaatggcttgttaaaaaatacaattacctctaattagtagtacgcgtaaatgttttacagaatgaaaggcgtgctttttattttcttacttcgttacattggtggcgaaagaagtctgtatgaaaatcagttctttgctgacacaagttccatttgttacaaatgaattctaataaaaatgtcagtgttatgcaaaaaaaaaaaaaaaaaaaaaaaaaaaaaaaaa

SEQ ID NO: 6603 - DNA, 3005 bp, Homo sapiens
  misc_feature (188)..(189): n is a, c, g, or t
  misc_feature (278)..(292): n is a, c, g, or t
ggaatttcctcagataccgtcgtagtcttaaccataaactatgccgactagggatcgggtggtgtttttttaatgacccactcggcaccttacgagaaatcaaagtctttgggttctggggggcagtacacaaagcctgtgggggagatctattgaccctatagatatattagcatcagggagacagnnaaatggtttcacccttcagttcagtccccaatccctgcttattatttccctaacagaagaccatcccccttgccactccctggtttttnnnnnnnnnnnnnnntgaagcagctgctgacccagctctagttttcgggaagtcagatgaccttttccctcccgcggctctctacctctcgccgcccctagggaggacaccatgggcccactgatggttcttttttgcctgctgttcctgtacccaggtctggcagactcggctccctcctgccctcagaacgtgaatatctcgggtggcaccttcaccctcagccatggctgggctcctgggagccttctcacctactcctgcccccagggcctgtacccatccccagcatcacggctgtgcaagagcagcggacagtggcagaccccaggagccacccggtctctgtctaaggcggtctgcaaacctgtgcgctgtccagcccctgtctcctttgagaatggcatttataccccacggctggggtcctatcccgtgggtggcaatgtgagcttcgagtgtgaggatggcttcatattgcggggctcgcctgtgcgtcagtgtcgccccaacggcatgtgggatggagaaacagctgtgtgtgataatggggctggccactgccccaacccaggcatttcactgggcgcagtgcggacaggcttccgctttggtcatggggacaaggtccgctatcgctgctcctcgaatcttgtgctcacggggtcttcggagcgggagtgccagggcaacggggtctggagtggaacggagcccatctgccgccaaccctactcttatgactttccctgggacgtggcccctgccctgggcacttccttctcccacatgcttggggccaccaatcccacccagaagacaaaggaaagcctgggccgtaaaatccaaatccagcgctctggtcatctgaacctctacctgctcctggactgttcgcagagtgtgtcggaaaatgactttctcatcttcaaggagagcgcctccctcatggtggacaggatcttcagctttgagatcaatgtgagcgttgccattatcacctttgcctcagagcccaaagtcctcatgtctgtcctgaacgacaactcccgggatatgactgaggtgatcagcagcctggaaaatgccaactataaagatcatgaaaatggaactgggactaacacctatgcggccttaaacagtgtctatctcatgatgaacaaccaaatgcgactcctcggcatggaaacgatggcctggcaggaaatccgacatgccatcatccttctgacagatggaaagtccaatatgggtggctctcccaagacagctgttgaccatatcagagagatcctgaacatcaaccagaagaggaatgactatctggacatctatgccatcggggtgggcaagctggatgtggactggagagaactgaatgagctagggtccaagaaggatggtgagaggcatgccttcattctgcaggacacaaaggctctgcaccaggtctttgaacatatgctggatgtctccaagctcacagacaccatctgcggggtggggaacatgtcagcaaacgcctctgaccaggagaggacaccctggcatgtcactattaagcccaagagccaagagacctgccggggggccctcatctccgaccaatgggtcctgacagcagctcattgcttccgcgatggcaacgaccactccctgtggagggtcaatgtgggagaccccaaatcccagtggggcaaagaattccttattgagaaggcggtgatctccccagggtttgatgtctttgccaaaaagaaccagggaatcctggagttctatggtgatgacatagctctgctgaagctggcccagaaagtaaagatgtccacccatgccaggcccatctgccttccctgcacgatggaggccaatctggctctgcggagacctcaaggcagcacctgtagggaccatgagaatgaactgctgaacaaactagagtgtccctcccattttgtcgccttgaatgggagcaaactgaacattaaccttaagatgggagtggagtggacaagctgtgccgaggttgtctcccaagaaaaaaccatgttccccaacttgacagatgtcagggaggtggtgacagaccagttcctatgcagtgggacccaggaggatgagagtccctgcaagggagaatctgggggagcagttttccttgagcggagattcaggttttttcaggtgggtctggtgagctggggtctttacaacccctgccttggctctgctgacaaaaactcccgcaaaagggcccctcgtagcaaggtcccgccgccacgagactttcacatcaatctcttccgcatgcagccctggctgaggcagcaccttgggggatgtcctgaattttttacccctctagccatggccactgagccctctgctgccctgccagaatctgccgcccctccatcttctacctctgaatggccacccttagaccctgtgatccatcctctctcctagctgagtaaatccgggtctctaggatgccagaggcagcgcacacaagctgggaaatcctcagggctcctaccagcaggactgcctcgctgccccacctcccgctccttggcctgtccccagattccttccctggttgacttgactcatgcttgtttcactttcacatggaatttcccagttatgaaattaataaaaatcaatggtttccacaaaaaaaaaaaaaaaaaaaaaaaaaaaaaaaaaaaaaaaaaaa

SEQ ID NO: 6604 - DNA, 3371 bp, Homo sapiens
ggggagacgtgagctgagggcgcagaggcaggcaggtgagagcgggagctggagcagcagctggggaggcagcgggaggggccttcccggtccccaggctgcggggcaggccagaggccctgggacacacgggcaggcatctctgagggtccccaaggaacatggctgggagccgtgaggtggtggccatggactgcgagatggtggggctggggccccaccgggagagtggcctggctcgttgcagcctcgtgaacgtccacggtgctgtgctgtacgacaagttcatccggcctgagggagagatcaccgattacagaacccgggtcagcggggtcacccctcagcacatggtgggggccacaccatttgccgtggccaggctagaggtccccttcccatcctctccaacggcagctgtgtgaaagcaagctgactggcctgtgtgaccagagcagggcaggctgtccatgtgggaggcggggcgaggaacgcggggctggggcactcacagctgggcgcctgggctgctggaggcctggagtggtcgttcactcttctggctcagtgtggcagtggcaggcgggctctggattcatcccactggcttcaaggcctggctttgccactaactagccgtgtgactgtcccagttatcaaatggtgcttggcaaatcacaccaaaacttaccggttcaaacaatgtcaatacttatttcgctcggccacctgcagtttgggcaggtgctctgcagcaggacaggccgtcagttaaggcaccttgaaggctgggggctggaaccattggaaggtttgctcacccacctgtctggtggctggtgctggcctgccttggacacatcactatctcggtggcttttccccgtggtctttccagcatggtggctttggggtggccagacatttatttatttatttatttattgagacggagtcgtgctcagtcgcccaagctgtagtgcagtggcacgatctcagctcacttgcaatctccctcccaggctcaagcaattctcctgcctcagcctcccgagtaactgggaatagccacggcgcatgggtaatttttgcatttttagtagagacagagtctcaccatgttggccaggctggtctcaaactcctggcctcaggtgatccacctgcctcacctcccaaagtgctgggattacagacgtgagacaccgtgcctggctggtggccggacttcttatagaattgcggtcccagagagaagtcagaagtcatacagcccagcccatatgcaatgggaggggagtttgattccatcttttttaagaagagtgtcaaggaatttgcaaacttgttttaaaatcatcagagtaagcctgggcatgtcactcctctgcatttcagatatttcctttgtaaaactcagttaaatgcagtgctccctcctcactgttagttttctgtggctgccgtaaggaagccatcaacttagtgattcacagcaacacagatgtcttctcttacagttctgtagtttcgaagttcagcgtgggtctcactggtctaaaatcaaagtgtcagtggggctaggttccttctggatgctctggggaagaatccatttcctcgccctttctggcttctagaggctgcctgaataccttaactcacggcccctccctccatcttcaaagccagcaacagcctgtttgcctcatgtggattcactctgacctccacatgtaaggaggcttgtgattatgttgggaccacatgggtaggccaggtgatctccccatttgaaggtcgactgattagcaatctaagttctgcccggaactttaattcctctttgccaggtaatgcattcacagatcctggggactagggtgtggacatctttgggaggtcattattctgcctgccataatagaattgttgggaagattaaacaacataatatacatgacgtatgttgaggcacgcttggcacctgggaaatactcaggatgtactaaccattgctcctacacagttcagctcctgaaggagtccaggtgggcttttggcacagaatgaaactatcaggtgtgaggagggtcctagtccaatctcttcttttcaaagatgatacatttgaagcccagggaggactgataatttgcccaaggtcatacagccagtcaaggagggattgctcccttgccagccccagccccacccagaagatgctgggtcatgtaggggtgggcacatgtcttcctggccagatcctgcagctcctgaaaggcaagctggtggtgggtcatgacctgaagcacgacttccaggcactgaaagaggacatgagcggctacacaatctacgacacgtccactgacaggctgttgtggcgtgaggccaagctggaccactgcaggcgtgtctccctgcgggtgctgagtgagcgcctcctgcacaagagcatccagaacagcctgcttggacacagctcggtggaagatgcgagggcaacgatggagctctatcaaatctcccagagaatccgagcccgccgagggctgccccgcctggctgtgtcagactgaagccccatccagcccgttccgcagggactagaggctttcggctttttgggacagcaactaccttgcttttggaaaatacatttttaatagtaaagtggctctatattttctctacgcaaaaaaaaaaaaaaaaaaaaaaaaaaaaatccaagctgggttaacagtagacaggacccatttctgtgtgatgttaggagggaatgaagtcttatgctggggaggtgggcaagtatcaatttccttaatatcttgaatcctgtgggtccaaaatgtggcttggaaatctaagtagcatgtggcttaattactaatcccaccctttgctgttgcatcccagccctattcctggtgcatttatgcccagagaggtggcattatttcctggggtggcattcagctcctcttgagttggtgccacagcatttgtgggctttgaagcaaaggtacaggaaatgtcaagggtgccaccccggcgaccttgagcaagtcacccctcctatttgtaaaatgaggaaggaaaggttacaaactgtgggagtcagagaagaagaaggttggaaatcctcttttgcctttaggaagctgtttgaacctaagggtgggttactgaaccttctccagtttctccaatctggtaaaagggaaaattctagccaattcccaggggaatttgggaaaaggttgtcttggaaaagcccccagcaccatggccgggcccaaacctaagaaccccaccagggggtccaaaaagaaaatgggtttcttccccgggactggcacgacccactt

SEQ ID NO: 6605 - DNA, 2234 bp, Homo sapiens
  misc_feature (6)..(92): n is a, c, g, or t
  misc_feature (1890)..(1970): n is a, c, g, or t
gggaannnnnnnnnnnnnnnnnnnnnnnnnnnnnnnnnnnnnnnnnnnnnnnnnnnnnnnnnnnnnnnnnnnnnnnnnnnnnnnnnnnnnnnccgcacgttcgtggggaacctggcgctaaaccattcgtagacgacctgccttctgggtcggggtttcgtacgttgttgtttagtttttttttttttttttttaaatagttgacactcaattttattgctaaaaaaaatgtcctctggagtgacagcaggtatttgtcctcagcctctccccagagtccctgggagtgtttctgttattgtggagggaataggggatctggggacagggtgggacgtaccatggggacaggaggtcacagaacacacacacacacacacacacacacacgtgcacacacacatccccccacaactacagccgccaaaataaccagcatggtgttgtaacatccccccagtgggggctagaattccccatggtgacctgtgacctgctccctgagacaggggaggccaggcaggtcacggtggggacgcagcagaacattatttctccatcttgctgttttctagccttgagttggggacatgagtgagaactgggggttttgaggagtaacccttgtgaacacatgtactccagcagccaggcatcccagatctcctgtcctggagggtgctggggcccctggctccccagagtgtgcaggcagacccccagagccctagctcatccatttatccattcctcataatccagtgtccaaagagcacccccagcagggcagggaaggtccctcccggggtttacatgactgattccttctcagaggcgaccgtggcatcccctgcgggcccccgatagtgtttgaggagggggtttccttcctcagtggggactggcagcggatccaggggcagctcactcttcacttgtatcaactcaggctctgtgcttctcgactccgtacggtccacgtaattttggaggagtcctgcccccagagcgtcaccttctacattgaggacggtacaggaccggtcgactagccagtccacagccaggatcaaggagatatggtcgaccgggaggttgactgcttcgaggatgatggccagagtgaggacacctccagcagggatgcccgctgcccccacgctggacgctgtggccgtgaccaggatggtgatgatctttacgaagtccaaggactgctggctgagctgtgcaatgaacactgcggccacgcactggaagagcgcggcaccgtccatgttgacggtggcgccgatgggcaggatgaaacggctgatgtgcttggccacgccattattctcctccacgcacttcatcatcagcggcagcgtggcggaactggaagaggtcccaaaggcagtggccagcggcgtcacgatgccccacaggaagcggtaggggtttttgcgggtgaagaggaagtagatgaggggcagtaccaggagcccatggatggcgtgacccagcaggcagaacagaatgtacttgccaaggcgggcaaagagtaaacccacatcctccatctccacgatcttgccagccaccaggaacatgatgcccacaggggcataccacatgatccaggagaccagaaccatggtggcctcattgaaggagttgaagaagcggataagcagctccccttcaggccccagcttccgcagcgccacaccaaagacgatggcaaacactaccaagcccaggatgttcatcccctccacctcctgccccacgggcaccttcaccctggttccggtgatattcctctcttcataggtggtagagtatgagcgaaaggctgctgacaccaggttggaagggaagatattactcccgagggctggagcctcnnnnnnnnnnnnnnnnnnnnnnnnnnnnnnnnnnnnnnnnnnnnnnnnnnnnnnnnnnnnnnnnnnnnnnnnnnnnnnnnnggcagcgagtggaagctttgggggcccgcctgcacgcaaatacagcccctactcatgcctcagcccggcagggttggaactaggcttgcacccctttgcaggacttggggagtcagcctccttcagccccaagaggctggcgtgctagccctgaggcattgtgggttcggggtgaggaatgctggcctcccacggcaggccagggcaggtcgccccgggcctcagctccaccccatgcagcaaacttaataccctggacagctt

SEQ ID NO: 6606 - DNA, 2883 bp, Homo sapiens
  misc_feature (2516)..(2516): n is a, c, g, or t
  misc_feature (2523)..(2523): n is a, c, g, or t
  misc_feature (2534)..(2536): n is a, c, g, or t
  misc_feature (2538)..(2538): n is a, c, g, or t
  misc_feature (2541)..(2544): n is a, c, g, or t
  misc_feature (2548)..(2551): n is a, c, g, or t
  misc_feature (2553)..(2553): n is a, c, g, or t
  misc_feature (2557)..(2558): n is a, c, g, or t
  misc_feature (2561)..(2563): n is a, c, g, or t
  misc_feature (2565)..(2569): n is a, c, g, or t
  misc_feature (2571)..(2583): n is a, c, g, or t
  misc_feature (2585)..(2585): n is a, c, g, or t
  misc_feature (2587)..(2593): n is a, c, g, or t
  misc_feature (2600)..(2600): n is a, c, g, or t
  misc_feature (2602)..(2602): n is a, c, g, or t
  misc_feature (2604)..(2608): n is a, c, g, or t
  misc_feature (2610)..(2613): n is a, c, g, or t
  misc_feature (2625)..(2625): n is a, c, g, or t
  misc_feature (2641)..(2642): n is a, c, g, or t
  misc_feature (2661)..(2661): n is a, c, g, or t
  misc_feature (2664)..(2674): n is a, c, g, or t
gcggaggctcagtatggcgcttgcaggcacgaggaaacccaaccgcagttgactagcaggggctaccgcgcctttgcttcctggcgcacgcggagcctcctggagcctgccaccatcctgcctactacgtgctgccctgcgcccgcagccatgtgccgcaccctggccgccttccccaccacctgcctggagagagccaaagagttcaagacacgtctggggatctttcttcacaaatcagagctgggctgcgatactgggagtactggcaagttcgagtggggcagtaaacacagcaaagagaatagaaacttctcagaagatgtgctggggtggagagagtcgttcgacctgctgctgagcagtaaaaatggagtggctgccttccacgctttcctgaagacagagttcagtgaggagaacctggagttctggctggcctgtgaggagttcaagaagatccgatcagctaccaagctggcctccagggcacaccagatctttgaggagttcatttgcagtgaggcccctaaagaggtcaacattgaccatgagacccgcgagctgacgaggatgaacctgcagactgccacagccacatgctttgatgcggctcaggggaagacacgtaccctgatggagaaggactcctacccacgcttcctgaagtcgcctgcttaccgggacctggctgcccaagcctcagccgcctctgccactctgtccagctgcagcctggacgagccctcacacacctgagtctccacggcagtgaggaagccagccgggaagagaggttgagtcacccatccccgaggtggctgcccctgtgtgggaggcaggttctgcaaagcaagtgcaagaggacaaaaaaaaaaaaaaaaaaaaaaaaaatgcgctccagcagcctgtttgggaagcagcagtctctccttcagatactgtgggactcatgctggagaggagccgcccacttccaggacctgtgaataagggctaatgatgagggttggtggggctctctgtggggcaaaaaggtggtatgggggttagcactggctctcgttctcaccggagaaggaagtgttctagtgtggtttaggaaacatgtggataaagggaaccatgaaaatgagaggaggaaagacatccagatcagctgttttgcctgttgctcagttgactctgattgcatcctgttttcctaattcccagactgttctgggcacggaagggaccctggatgtggagtcttcccctttggccctcctcactggcctctgggctagcccagagtcccttagcttgtacctcgtaacactcctgtgtgtctgtccagccttgcagtcatgtcaaggccagcaagctgatgtgactcttgccccatgcgagatatttatacctcaaacactggcctgtgagccctttccaagtcagtggagagccctgaaaggaggctcacttgaatccagctcagtgctctgggtggccccctgcaggtggcccctgaccctgcgttgcagcagggtccacctgtgagcaggcccgccctggggcctcttcctggatgtgccctctctgagttctgtgctgtctcttggaggcagggcccaggagaacaaagtgtggaggcctcggggagtggcttttccagctctcatgccccgcagtgtggaacaaggcagaaaaggatcctaggaaataagtctcttggcggtccctgagagtcctgctgaaatccagccagtgttttttgtggtatgagaacaggcaaaaagagatgccccgagatagaaggggagccttgtgtttctttcctgcagacgtgagatgaacactggagtgggcagaggtggcccaggaccatggcacccttagagtgcagaagctggggggagaggctgcttcgaagggcaggactggggataatcagaacctgcctgtcacctcagggcatcactgaacaaacatttcctgatgggaactcctgcggcagagcccaggctggggaagtgaactacccagggcagcccctttgtggcccaggataatcaacactgttctctctgtaccatgagctcctccaggagattatttaagtgtattgtatcattggttttctgtgattgtcataacattgtttttgttattgttggtgctgttgttatttattattgtaatttcagtttgcctctactggagaatctcagcaggggtttcagcctgactgtctccctttctctaccagactctacctctgaatgtgctgggaacctcttggagcctgtcaggaactcctcactgtttaaatatttatttattgtgacaaatggagctggtttcctagatatgaatgatgtttgcaatccccattttcctgtttcagcatgttatattcttataaaataaaagcaaaagtcaaatatgaaaaaaaaaaaaaaaaaaaaaaaaaaaaaaaaaaaaaaaaaaaaaaaaaaaaaaaaaaaaaaaaaaaaaaaaaaaaaaaaaaaaaaaanaaaaaanaaaaaaaaaannnanaannnnaaannnnanaaannaannnannnnnannnnnnnnnnnnnanannnnnnnaaaaaananannnnnannnnaaggggggcgcnaaaaaaaaaaaccccnnggggggggggaaaaaaaanaannnnnnnnnnngtttttgtgtgaagagggggcccccctatttgggcgctcttttattaaagagggggccgggggcgccccttttttaataaccacggggggggggaaaaaaaacagccccctgggggggccttttttggggaaaaaacccccccctctttggggggggggggtaatttatggggccaacccccccccccagaagattttaatgttccgct

SEQ ID NO: 6607 - DNA, 981 bp, Homo sapiens
  misc_feature (508)..(514): n is a, c, g, or t
  misc_feature (522)..(536): n is a, c, g, or t
gtgacacataaataagcagataatatttaaccaatgaaaaagacttctaccttcttataattaaaattacacatgtctaagaggaattgttttatcttttgagtagctttaccgagttgtatttaaattctaagggccatttgctaagcagcatttagcatctactcagggcagttatatagataaactgctggacagaaaaattgtaaaatttagcagcttgattttctgttagcctatgaaatgttattgtcctataaaaataactttaaactgatttaatatttcatatttacattatatgaaaatcaattacattataaaaggaatccctaatgcagaaacaaagatgcaactttcaaaattcttattattcctatttgtatatacacgagagaacccaaccagtgcctgtgtttggggggaaaagtcaacagtgtagttctaaaccttatcccaaacagaaaatgtggttaatgatgtcactttccttgctggtcatcattannnnnnnattaaatnnnnnnnnnnnnnnnaaagagtttacactaaaatcttcagggctttaaataaaaggttaagtccagcttccaaacacaattttccacattagcagctccaatcttcttaaataaagctctgttttcctatatttttatgactgctgagaccccacagggaccaatatttgtattcaaattacatttcatggtttcccattgtttcacaatgagttctaataaatgggatttactataataatccaagtatgacatagccggtatgctttcatgaatgtttttatgtagattttcctcccatgaacatgagtaaataaatctgtttcctgaatggattgtggttgcatttaaagctctgtaataattctaataaatttactctatagaaaactgtgtgtggaaggtatagatcaattggaagtccatgaaaccataactataatcatatattattcagaca

SEQ ID NO: 6608 - DNA, 1320 bp, Homo sapiens
  misc_feature (1288)..(1288): n is a, c, g, or t
tatggatagtaccttttttcttttctctcagcccttaccttttacagttgtacttactggccccttcaaacggttttccgctgtctacgtctagatcgcctggtcgattgctcagctgatttctggtcagaccacaccggactgcacttttctttgactaatcacaggtgcatcgcctcagccaaggagtcttcggggatccgctcccgtgccgtcaccatgcccacgtcctcggcaaactggagaaatcatccgatcggaaaacttcgagggatggctcaaactgctgggggtgtaatttgatgctgaggaagattgctgttggcttcagcgttcaagccagcactggagatcaaacaggagggagacactttctacatcaaaacctccaccacccgtgcgcaccacagagattaacttcaaggttggggaggagtttgaggatgcagactgtggatgggaggccctgctaagagcctggtgaaatgggagagtgagaataaaatggtctgtgagcagaagctcctgaagggagagggccccaagacctcgtggaccagagaactgaccaacgatggggaactgatcctgaccatgacggcggatgacgttgtgtgcaccagggtctacgtccgagagtgagtggccacaggtagaaccgcggccgaagcccaccactggccatgctcaccgccctgcttcactgccccctccgtcccaccccctccttctaggatagcgctccccttaccccagtcacttctgggggtcactgggatgcctcttgcagggtcttgctttctttgacctcttctctcctcccctacaccaacaaagaggaatggctgcaagagcccagatcacccattccgggttcactccccgcctccccaagtcagcagtcctagccccaaaccagcccagagcagggtctctctaaaggggacttgagggcctgagcaggaaagactggccctctagcttctaccctttgtccctgtagcctatacagtttagaatatttatttgttaattttattaaaatgctttaaaaaaataaaaaaaaaaaaaaaaaaaaaaaaaaggtagataagtcacctgagttcaaccttgcctctgaaatgtagtatgggaaagacttgtgtttctgcagcatggaactgagttatacaacaggagaggacagtccttccagtcaccgttctaaccaccaccccttcgtttgctgctgaatccacaagcctcacctccacattcccttctccaagggtccttccttgggtgttcnggttctgggtttccaaggtcacaagggggctt

SEQ ID NO: 6609 - DNA, 2116 bp, Homo sapiens
  misc_feature (1987)..(2115): n is a, c, g, or t
ggaaggtcaatgatagcatctgcctagagtcaaacctccgtgcttctcagacagtgccttttcaccatgagtgggtgcccatttttaggaaacaactttggatatacttttaaaaaactccccgtagaaggcagcgaagaagacaaatcacaaactggtgtgaatagagccagcaaaggaggtcttatctatgggaactacctgcatttggaaaaagttttgaatgcacaagaactgcaaagtgaaacaaaaggaaataaaatccatgatgaacatctttttatcataactcatcaagcttatgaactctggtttaagcaaatcctctgggagttggattctgttcgagagatctttcagaatggccatgtcagagatgaaaggaacatgcttaaggttgtttctcggatgcaccgagtgtcagtgatcctgaaactgctggtgcagcagttttccattctggagacgatgacagccttggacttcaatgacttcagagagtacttatctccagcatcaggcttccagagtttgcaattccgactattagaaaacaagataggtgttcttcagaacatgagagtcccttataacagaagacattatcgtgataacttcaaaggagaagaaaatgaactgctacttaaatctgagcaggaaaagacacttctggaattagtggaggcatggctggaaagaactccaggtttagagccacatggatttaacttctggggaaagcttgaaaaaaatatcaccagaggcctggaagaggaattcataaggattcaggctaaagaagagtctgaagaaaaagaggaacaggtggctgaatttcagaagcaaaaagaggtgctactgtccttatttgatgagaaacgtcatgaacatctccttagtaaaggtgaaagacggctgtcatacagagcacttcagggagcattgatgatatatttttacagggaagagcctaggttccaggtgccttttcagttgctgacttctcttatggacatagattcactgatgaccaaatggagatataaccatgtgtgcatggtgcacagaatgctgggcagcaaagctggcaccggtggttcctcaggctatcactacctgcgatcaactgtgagtgataggtacaaggtatttgtagatttatttaatctttcaacatacctgattccccgacactggataccgaagatgaacccaaccattcacaaatttctatatacagcagaatactgtgatagctcctacttcagcagtgatgaatcagattaaaatcgtctgcaaaatctatgaagaatactggtttcacagcctattttttattttctatggattttcataaatacagtttgaatatatgtatgcatatattgttcagcaccacgatgctctgatttaattctagaaacaatttgattacctcttgtttgtgacaagactaagcattaagatgagaaagaatacatttaaatagtaacattgtacatagggtgttttcctattaaaaatcagtttcccctgagacttaatgtaaccacttaatgtaatcactatctcattgtttcatctttataaacttgtaaacttcatctatttcaaatattttatgcagtacattatattattctgtacaaaggctttcaaacaaaatttttaaaataataaagtattaatctttcaaaaaaaaaaaaaaaaaaaaaaaaaaaaacacaattgttggggcggccggggccatcgaaaaagctcctcaaaaaccatctgtggggcggcgcggccccataggtagcgacctgtgccaacggggtccccaagacatccgggcagacaggtgcgggatcacccaaaaaaaagccggcggcaccgaggctcgaaacaacccaggggtggaggcgaagcaccaacacgagccaggagcgataatgcccgagagagagcagacagcccacacaacacacccaccaacacggcagcnnnnnnnnnnnnnnnnnnnnnnnnnnnnnnnnnnnnnnnnnnnnnnnnnnnnnnnnnnnnnnnnnnnnnnnnnnnnnnnnnnnnnnnnnnnnnnnnnnnnnnnnnnnnnnnnnnnnnnnnnnnnnnnnnc

SEQ ID NO: 6610 - DNA, 948 bp, Homo sapiens
  misc_feature (465)..(465): n is a, c, g, or t
actagttcctagtctccagttttttttttttttttttgtatgtagaatgattataaatttatttttaattatgtaaatacaagttttagaatgaatcatcttcctattcatgtggcattatctgtcattttttaaaaacaagtttaaaagcactttgtatgataatgggacaaaaaaattagaattacaaagtttagattatagggtgacttcttaatatggatacaaaaaattgagacaggttccaaaccaaaataaagaatattgagttacttagtttacttcaacggagcaggtttttttgagggaaggcgatgaaagagtaaatgattaagcatgtgaaaaagtattagaaaattgagcatagaaatgaagaaatattgggaggaaggaaaagatagtacagattcttgttttataaggtgtcaaattatgtgctagcccatatgtattatttaccaatcnccctgggtgtgttacccctatgtatacttttgtttgtttttgtatgtactcatctgaaagccctctatttttaaatagaatttttgatagtgtaaagaagttaaaggatgaacaatggtttggaaagagcaagtttcagaaggtagaaaaaactttacttgtttggaactcaattattttgaacagagctatttactgtctgaccatactttcctatatatgcagtgtagtagtccattttcacactgctataaagaactgccccagactgggtaatttgtaaaggaaagaggttaaattgactcatggttcccatggctggggaggcctcaggaagcttacaatcatggtgtttggcggggaagcaaggactttcttcacaaggtggcgggtgggagaatgaatgcaagaggaactaccaaacacttataaaaccatcagattgcatgagaacagcacgggaaaaccacccccatgattcag

SEQ ID NO: 6611 - DNA, 2987 bp, Homo sapiens
  misc_feature (2566)..(2566): n is a, c, g, or t
tagatctgaaatgtggaaatggtttctcacaatttaaaggaaaaacccactttgcacccatgatcccatcattttggttgagattttagaataaaaaatatagtgttgagatccgtacttttgtaatcagaccaccaagcatgcctgtggcaaggcagagaggaaaggtctggagccagtgtattgcagtttcatgctacctttacctgctaatcataaaaattatgttttcaaaagtagatgatactagccttacacccaaaaacatgttctgaattagatgccccctcacccaatttttattaagctttctaaattccagccacattgctgtacatcaacattggtttcattcaacagacatttttttggcctgaagatacaaggttcagaaagaggccatccctgccctcaaataactttcatactggtgtatgatgaactgaccattaatagtttaagtgcttacaagctatgtttctgttcaaaaaaaaaatagtttggtataataaatgctataaaccaatacacatttctgacttgggggcagagacagactggctgatgttgtatagtttgtagccctggagtaagaagttgacattaatttcggcctatatgtggaaaagacctataacattgggtgaactgagccagctggccatagaacacaagaacatattccaggaaataaatatagctggagggttggaaatgctgttattactgagagagaaaacaggtgagttgggattgagaactcctgattttcatccctggtttagattcttggccaaagtagtggtagagttaatctttgcttgtggaaaagcattacctatgttgcagattcagttgtgttacattattgtgggttctataacaacatattcctcatggacactttaccagagttgctcacacctttttcaatttctcatcccttttggaggaatgaacatgagacttaactgcctttaagcctaaaacggacatgctttccaatgacaagagattttctaaagagaagtcttggagcacatctgttaatacctgagcatctactctgagcagtgcagttttattcaatactggagagagggtgatttcttttttttgagacggagtcttgctctgtctcccaggctggagtgcagtggcgcaatctcggctcactgcaagctccacctcccgggttcacgccattctcctgcctcagcctcccgaggagctgggactacaggcgccggccaccacgcccggctaattttttgtatttttagtagagacggggtttcaccttgttagccaggatggtctcaatctcctgacctcatgatccacccacctcggcctcccagagtgctgggattacaggcgtgagccaccgccgggccgagagggtgatttctaagcagagaattgtatcagttatgtggaaacctttgccagaaatacatataccttgtatattaaatctgagtctcagatttaatcatcgaagcgtagctgggttaagaaacagtctgatcgtaaggatgttgtcgattctgacccatggatgaccacaagaaaaagatatttatttctgcctggataattgagagttgactaactttggaagtcagaattcccaggaattagagtaactgctctggaaagttaaagtgtgaagttttttagatagtttcataaaaacaattctggtttctttttgcttgtgctgactttcttggattttaatctacctcatcttgtctttttagagttacttcaacttgtcactttaacattgtgcttgactttggttgttttctaagatggaatttttcctgttcattgacagcttgttctcttgccttttcattctgatcctcatttcatctaacatcatctcatattgctcctctgtcaagagaaatgttttaaaatagtttaaagtcttgttttatgggaagaaagtgatcctccaatgctatttgtttctgaggtcagtaagagaaggagttaaaacaaggcagtggggaagggaatgaatcctgcactggaggcaaaagctgacaaggaaagagccattaattaagacaatttcaaagtcaactgattgtgatcattaatgtcacaatagatcaaaacctaattatcacagcctaggtaagagccatcagtattaatcggaaaatctaataggaaactattatcaagaaattaggccaaattgaatgcagtgaactttttatcttggcattctctatttttttgtgatgtcccctggcattggcaggtgtgaccctaacagtcgattcaaggccaagtggtcagtttgtcagccttttttaagggatttctttttatttttaggaattccaaacagagttaacctaaactgtcattgccaaaagatcagtcttaaactttcttagcacctgtacctgtttaatgtgatcagctatcagtgaggaaaaaaaaaaaaaaaaataggtcttggaatggttcctgtacctagagtatccatattgaacctttttttttttttttttttgagatggaaacttgctcttgcccnagctggagtgcagtggcgtgatcttggctcactgcaacctccgcctcccgggttcaagcagttctctgcctcagcctcctgagcagctgggaatatagggcgctgccaccatgcccggcttattttttgaatttttaggaaagacagggttccccatcttggccgggctgggcttgaactcctgaccttgggatccgcctgccttcggcactcaaatgcttggaattgaagggggaacccacacccgggcacagtatcctttatacagctcactgcaagcctaattcccctggggctcaaatggatcctcctgccctcaccctcccaaaaggttggaaaataacggggggtgaggcaccacgcccccaaggtttgggttaaccttttaattcccataactcccccccccagaaaaaagggg

SEQ ID NO: 6612 - DNA, 2982 bp, Homo sapiens
  misc_feature (2388)..(2394): n is a, c, g, or t
  misc_feature (2400)..(2400): n is a, c, g, or t
  misc_feature (2408)..(2408): n is a, c, g, or t
gtcacagtacaactgtttacaacgcatctccaaaggacagtcaccttgtgtatccagaaaccccccatccggcggtgacaattagcctcttcaagaactggacacttttgggtgaggtgttccatatcgaactgcataatcattaccatgttgtcatagatactattgtgtatagatttaagtctctcaactatcaaaagtagagcgattttcaggaagaaaaaagtcgtggggactgagttcaggacaccctgaaactatgcgaccagtaatttttttaaggtactttttcctacaagtaaggtatctgaaaagtcaacgttttgagggtggaatcaagacttttcacttctcctggcaaagagcaacaaggctcttgtctcgtgtccttctgtgtgtctctgtcaggatcacagcagctgtgctcttggtctgcttactcctctgtaatccacgtatgcagaagggagttaataaggtgatcaccatctccccagaattcaaaggtctttgcctctataaggtctgcccctatggggccaggaaaatgtaaacctatataaggacttgcaagagagcataaagaaggtagaaaaggtttacttgttgggttttcaagccttcaagttgaatgagtcttagcttttgctgggcagttgttctggacaagtcatcagtttcatgtggagaactcagtgtaagcccaaggctaatgaatgagaggggtcccatggaaacacagctgaaatgaaatgggactttatccatcttctttgagaatggaagagcttttgtgaagcagtacatcattgctcaagataatggttgataagcattagattttatagatctaataaggaaaatattttattatctcaagttaacaaaacatttttttacctctcgagtgcctcataggaccaactattactctttggcttttatttttctttttgtattatttttatatattctttaaccttgctgagctagtattgactgaaatctttagaactttgcctctgggcaatgaagtaatgtttctctaccctaagatatctatttgtataatctctggctgtaatgatcactttggaagatttcctttgcatctctaattatttctttttaatggaataaggcataagggggaataaatatattgtaaccaatgttatgtaaacccatatccatacaggccaggaaagccaaatgaagtcatttccagaattctagtgtgaaaaacctatttttgaaaagtggggagatggctttgtgtagaactgggtgggttttctctgcagactaagtctagccatgagcttccagatcctttagttttatcagccttgtgcttaccccattttcataaatgctactttaacagccagtcttcataagtcatggttcctaggttttcctgtcacctcattgtattcatctgtggtaggatattaacgggctcattcaaccaaatgtaatgtgtgcctcagacctatttagcatggttggggggcatcagcaggacaaaccaacaggtactccgcaagtgtactggcacagcaagcccaccaattattagcagctcttcatcagcctgctgtctactcagacgcttgcctactgaagggacctgtccagagatcttctggaatcccaggttgggaatctctgcagaatgtcgcgacagttgtggcccaactagcttctgagtagaaacaaggaagctaccctgagatatagtcagctgcccacctgccatagtatttgctactgaatgccagccttttaacataccatttcagatttgtccttcaacaaaaatataaattgcaagtcataccatttaagggtcttttacaaatatgtctaaattgtgtgtcatttttaagttccaaaggtctactggactaagtactatcagaccagctgtagaacctgatggcgctgatccggggtggaataaccctcagtactggtgtgtagaagatgaattgtaggcaggttttgctgatcagcagcctaaggattgatgggctctcttttggcctctgatcctgagcactatggaggcagcatcagagaatggggacctgagctacataggttctcaatgttaaaacaactctgttcggagtgacatataagagcaagaaatctacagctggtgtaaaatacctttgccttttctatcccgaaagtaacaaatggcatctgtacatgtaggggtaaaaactcagatgtctactcctccaggccatggacaagaaaaagtacagcagtcagaacagtggaacaagtgatttgcattctcttcttcacgctttcctagatctgccattggtagcgcagccctcgccctccagacataatgcatcgagcccagtnnnnnnncagganctccctgngtgtgtgatgtcatggtgttatatgtgttgagtttaatgttgagctgaagcaagttggtgaccttcctctttgctctttgtaaagaagacaccaatgtttgtcagagaaaaatccccagcagtcgtgttgaagaggcagtgtcatccacctactgtcccctttggaacagttcaactgcagaaaggtcggattgaggttttgtgctttgtcgtttttcttttttaaacaaaacatgacaaccttggcttttccgatatggaacacttttgttgttgtggagttccctcttgctgtatcttctatgcaattccttttctaaaaaaaccccccggcagaggcagagtgccctccggatatctgtccggcgccttgctgagtggtggaggtgagggataccagctccgggtgtgcctcttttctctccctggctgccaatcctgattttccctgcagtccccttggtttgtaaattgcctgcatttattctgtcagccaacatgtacaaaatgtaagaaagaatttttaaacaggtaataaattatatttataagcaaaaaaaaaaaaaaaaaaaaa

SEQ ID NO: 6613 - DNA, 1596 bp, Homo sapiens
gcacgagtgctggaggaggggccggggcggagctaagatgcggaggagggtgacgcactagctctccagttcgcccgttcctggcctgacccccaccaaggcccataccgcagtaggctcctcgggctgcccctcggttgacaatggtctccaggatggtctctaccatgctatctggcctactgttttggctggcatctggatggactccagcatttgcttacagcccccggacccctgaccgggtctcagaagcagatatccagaggctgcttcatggtgttatggagcaattgggcattgccaggccccgagtggaatatccagctcaccaggccatgaatcttgtgggcccccagagcattgaaggtggagctcatgaaggacttcagcatttgggtccttttggcaacatccccaacatcgtggcagagttgactggagacaacattcctaaggactttagtgaggatcaggggtacccagaccctccaaatccctgtcctgttggaaaaacagcagatgatggatgtctagaaaacacccctgacactgcagagttcagtcgagagttccagttgcaccagcatctctttgatccggaacatgactatccaggcttgggcaagtggaacaagaaactcctttacgagaagatgaagggaggagagagacgaaagcggaggagtgtcaatccatatctacaaggacagagactggataatgttgttgcaaagaagtctgtcccccatttttcagatgaggataaggatccagagtaaagagaagatgctagacgaaaacccacattacctgttaggcctcagcatggcttatgtgcacgtgtaaatggagtccctgtgaatgacagcatgtttcttacatagataattatggatacaaagcagctgtatgtagatagtgtattgtcttcacaccgatgattctgctttttgctaaattagaataagagcttttttgtttcttgggtttttaaaatgtgaatctgcaatgatcataaaaattaaaatgtgaatgtcaacaataaaaagcaagactatgaaaggctcagatttcttgcagtttaaaatggtgtctgaggttgtactattttggccaagtctgtagaaagctgtcatttgattttgattatgtagttcatccagcccttgggcattgttatacaccagtaaagaaggctgtactcaagaggaggagctgacacatttcacttggctgcgtcttaataaacatgaatgcaagcattggcaaaaaaaaaaaaaaaaaaaaaaaaaaaaagaacaatttctttgtttaatagaacaacctgatctacatatatgatagtatatgatccaaacaataatgctgtgaacttaatgggtctggtattatccccattttacagatggtagaactgagatgcattcaaacactgagatacgttcaacacaccattgggaatcatcagcaaaatccagcatgaagagtctctacaggataagtagcctagatttttccaacaaataaatgataggagggaaaaatggtggggtactatcatagattttaaaaggcttaagagacatacgagcc

SEQ ID NO: 6614 - DNA, 1734 bp, Homo sapiens
ttttttttttttttttttttttttttttttttaattatactcttttattgaaagaaaaaacaatacaatggactttaaaaagctacatttgttatggttcataaggacagaggtttacacaggttttatatatgtacacactgacaatactatatcacaacatcagaggcaccatttttgccacagaattaggtaatgaataaaacttctccaaattaatctgtttaaaaaatatctaaaatggtacagtatatttgaggattatataaatatgtgagacatatttagatattttttaaaaatagtgtttatatatatgcatcacaatcttctctaattctcaaaatattatggcaccaaaattctgtttgtcaaataaaacacaagatgctgtaatatgtatccaagcaccagcttagcacagtatttaattctcccccaaactgaaagactgctaacaggtacaaactgaactgaatatttcaaacaaccattgaaataatttaggccctcaaattttttttttattagctgattgtttttagagaaaaaagagggagctaaaccatttagattaatgttgctctgtgtgatagaatcaatcctagggctcagagaagaatattcctaggcactggagaaggtgagaggaataagtaagtccattttatgtatactacaggttggagttttgcatgtgatttagttcatagaaaaggttctactgctttaaaataagtttgaaagtatcaatttggaaagtgcttcaaggtaaatcttccttgattatgctaacataatttaagaaatctgtcaaaacagattacaaaagagattacacccagtcaattatatatctaaactgaaggtttaggatgttatctataatagttacacatgatataatcctaagcttttgcatacatttttaaatctagaaagactttgaatggaataatacattagttcaataatatgaccaaataacactaacaaatgataggccaataattaaaggtggagaaataatccttttatatatgaaattgattatttttctatatatttttcttatgacctgtgctaaataaaaataaatgatcacttctgaaagtgagacaattatacctctgttaattaattgtaattctaattgtgtttataaagctaactaaatttaaaaatatattttaccaatacctaattaattcagaaaaaaaaaaagcactttaataagtgcctcagaactggaaaatcatggaaaacattactaggaaagtgggtgccagaatatattaactcttttttcctcttagatacatgttaatattatcaaacattttaggtgctgtcagatgtaggaaacatatgataattctaatattgcacaacaaatttttatggtacagaaatggcttttgctgtaggtcaagtagccattaagaatttgtcttcataaccaccagagggcgccagtgcctgcaatattattagctgtagaagtaatctaaccagtttaggtgatatttgactttggacattgccaagctataaaaagattttaaaaagaaaataactcccaaagaaatatatttacactctgtaacacctaaataatgttggactgttgaattaaaacaacagagttaacttgcctgtttttggtaaagattaatttaacataggattttattgatatttctgaatcaggaatcaaatggataacactaaatt

SEQ ID NO: 6615 - DNA, 1966 bp, Homo sapiens
  misc_feature (1132)..(1148): n is a, c, g, or t
aagcacaggccaccactctgccctggtccacacaagctccggtagcccatggagccctggcctctcctcctgctctttagcctttgctcagctggcctcgtcctgggctccgaacatgagacccgtctggtggcaaagctatttaaagactacagcagcgtggtgcggccagtggaagaccaccgccaggtcgtggaggtcaccgtgggcctgcagctgatacagctcatcaatgtggatgaagtaaatcagatcgtgacaaccaatgtgcgtctgaaacagcaatgggtggattacaacctaaaatggaatccagatgactatggcggtgtgaaaaaaattcacattccttcagaaaagatctggcgcccagaccttgttctctataacaatgcagatggtgactttgctattgtcaagttcaccaaagtgctcctgcagtacactggccacatcacgtggacacctccagccatctttaaaagctactgtgagatcatcgtcacccactttccctttgatgaacagaactgcagcatgaagctgggcacctggacctacgacggctctgtcgtggccatcaacccggaaagcgaccagccagacctgagcaacttcatggagagcggggagtgggtgatcaaggagtcccggggctggaagcactccgtgacctattcctgctgccccgacaccccctacctggacatcacctaccacttcgtcatgcagcgcctgcccctctacttcatcgtcaacgtcatcatcccctgcctgctcttctccttcttaactggcctggtattctacctgcccacagactcaggggagaagatgactctgagcatctctgtcttactgtctttgactgtgttccttctggtcatcgtggagctgatcccctccacgtccagtgctgtgcccttgattggaaaatacatgctgttcaccatggtgttcgtcattgcctccatcatcatcactgtcatcgtcatcaacacacaccaccgctcacccagcacccatgtcatgcccaactgggtgcggaaggtttttatcgacactatcccaaatatcatgtttttctccacaatgaaaagaccatccagagaaaagcaagacaaaaagattnnnnnnnnnnnnnnnnntatctctgacatttctggaaagccagggcctccacccatgggcttccactctcccctgatcaaacaccccgaggtgaaaagtgccatcgagggcatcaagtacatcgcagagaccatgaagtcagaccaggagtctaacaatgcggcggcagagtggaagtacgttgcaatggtgatggaccacatactcctcggagtcttcatgcttgtttgcatcatcggaaccctagccgtgtttgcaggtcgactcattgaattaaatcagcaaggatgagcagaaaatgagctgagcttagctctgccctggaacctaccagagcagagaagggcaggagaggaagatttgtctacttgctccactcgcacttatcaaacgtgttatattccatacttattattgatgataagatttacctttatgtaagtttatggccttgaagtgttttcatattgcttctccctttagttctgctgtctccctgaagagtgaaccctctttagtaaatgaaactaatcactaaaaaaaaagtgttcatttccagtgtctggaagagtttttgccaggataaccgaggttttctgttgcattgtcattgctgttatatttatatatttacttattttgtctaaccacgagaccactagggagttgctgatgttttaaatgaagtgtattctttgcttaagagtcagttttgtacctattaagaaaaccccatttaccagtcctaaagagataaggcatttgatttggggggggaggaagccgtagaaatgaaataaactaaaatgcaaactgcaaaaaaaaaaaaaaaaaa

SEQ ID NO: 6616 - DNA, 776 bp, Homo sapiens
ttttttttttttttttttcatttttttctttttacttgaaaacttgttttaaccatcaaattttggcagttacaaacctgtacactgttgtgtttttttttgttgttgttgtttcttttttttggctgtctttttttttgtttgcttttgtttttttttttcttttcttttctttttttttagaaaaagaacacaagactgaatactgccaccagcaatatatgcaggaacaatccatttccttaagggacaaaatccactctaagtgttagctttcccctttgcataaggtttggtgtgtgatgtgtgtgcaagttgaggtgaatgtgcatgtatatgaagaaatgacatacctcattgtgattctgaaattgcataaaaataaaatacttaataactgggcaaaacacattcttttttacaaatgtcaataaagacaatttttcttgaaaacagagaaagttaaatgaaaacagtaagaaccaaagaaaggttacagtacattttgaaatgagtaaaaaacatcattttcaaatctaaaatccttgtgtgtgtgtgtgtgtgtgtgtagttacctcaaaagtttgcagaccaacagcgtggatgacttacaattatattcgaccccccaaattaaagcatcctgataggcatcaaatatagtatctacaaaagcctggaaaattgaaaccatttatatacaattttataaacatttcaaacaccaaaacatacatcttttacaaaccagcctgtttgcaacaggcagacgtaca

SEQ ID NO: 6617 - DNA, 3740 bp, Homo sapiens
  misc_feature (2501)..(2519): n is a, c, g, or t
tttttttttttttttttaccatttgaccatgttatattttaatttgcagagacaaaaatgacaagcaatttatttacataaaactgtacaaaagcaaattaaattatgcaaagtatttcataaatagttggacgagtgtttaatacatttcgccatgttaagcatagttgcgtgcatagtgactcataataaacgatgataaattgttctctgcttcactatcaacatccaagtagcagaacaatagtcaatgattaacattacaaacagatcgtaccacactgaacgcaagtgctttaaactgtaggaaaagtctgaaagtaaaccctaggtagctgaacaaatgatgcttcctccagatgttatcattataccttcacctaggtcacaactcacaagatttactatattcatgatcatgctcactttttattatttatttatttatttatttatttatttatttttgcttaaggacacattttcttatttctcactgagagcatatacctaagattatttaggtctttagatttctcatgactgtttttggatggctgtttgattcttgacaatttcttctggtctgtgtgttttattctattttcctacaagacagcttcctagggtagtgtttcagtcagacatcctcagtaccatcttagttcctcctcccataaaaataatgcctcccttgttttctgaaactcaggcagcaggccagtcagaaaccatacagaaatgatatctggagattcagaaagagcagtagattttagattgaagctacagacgttttaatacacataaatttatatagttactcattaatttataaatgtgtcctaatgtataatgcatgcaaaattcacttgagagtcttgtgtacagaaaacaaatatggtttatatactgtacaaccaaaatgaaaccatagctgaaagaaacacaacaaaaaagaaataaagaataaaactctaaatcagtattttaccttgccaaatggactgatttcactcctgatagtatctctgtgttacacttacaataaacgctttcatcttctagtcagatttaagcagcccatattaatgccttaactttgctttatgacataacaatatttaagactggtccattatctgagtttgtcagaaggcaaatttttaatatattatttattatgttcagaaaataaacatggacaaatatacaggatcaaaaaagttgggaatagcccatttcccctcattgtccaaacccaacaaccgtttttttaccgtaacaacaggtataaaaggcacagttgcttattttgcattcactcatttattttttttgtttctttttattgattttttttcaaaagcactctatatatggagtggcaccagatttaacctatttaaaataaaagtcatacaaacacaaaatatatttctgtgtcatgccagctcattatataataaacatgttatgacagctaattctactagaattactgtgaatacttacagtacactgaattttattctttcacatccattttagttttaaagagaggttcacgagttaaatgacaatggcatggctatcttgaatggggtgcaaacatcattggggaatgtggatccaattaatccgaaggtccggtgtgacccgtattagttttatagacaagagaagggtttaagatagggtgaaatgagctatcagtggtttcaatgtctcatgaaagaaagaaatgcattaaaaaaaaaaaagtttgtcaaacatccgtgttatgcaattgagtattttctttgtaacgtgcaagaaaaaatgtgtatacatttcataagtatctttagaagtattttgtcttaataggtacttacagattatacaaggcagaactgctttaatgcagtttcctaacaaagtactagaattgcatctttccatagtgtaaataataatcaaacataaacatgttcaattactgatattttagtccaatgttttttgtttcaattacatatctttttgcatcctacctattatacataaactaacatcaaaatgaaaactccatttaagaaagagcataaggaaatgacccccaaattgtaccccaccaaacagagaagcggttttcaaagataagtattttgaagacctatagtgaattatcaacctatattccaggctgtgtcactttatagtctaagaaattctgcaaagcatgaaactacccaaagctacattgtttctacagtttgctagagagccatcaaggctatgccttaaccagcttgcaaacattcagtgataagtttgttctcttcacacctgttattccctattctgtccatggattgtcactttcgtctgaatgtcccagctcaattttcagccgtgttaggttatcctctatagagtgagtagctcaaaatctgcatattctgtttctttttattgcactggaaaaactctgctttcacctttgagatatacattcnnnnnnnnnnnnnnnnnnncaaaactcctttctttcatgttcagtctagatttgtttaaataatgttcaaatcaaattagtgattgagtcaactagggtgtcaccttgtttcaatgttgtgagtctcaaaatatttctatattgcacacgattcaaaattaatgcacttgtggtgcatcaaagtgtgcactgaacaagtaaaaaatgcaattgtaatttaaaatgtggataaaaagagcagcaagcatagcctggattctaaaatgataatcgtggacttaactatcaagactatatgccaatgcatctttcttaacctacccatgatccataaatactattttaaaacatggaatcttccctgataatattacctgaaactaaacttgaacctcaaccaattgcctattataataccaaaaaatatatctcactagttttcattttctgcgctttcaaataaaatccattttaaaagaaggaacattttcctgggcactataaaatgaactagtgtttgattgtttctgtgcatacatgggttcagttgcttttgttgtttaatgtttttccacgtcaagaccaaatcaacttcatgacttccctgatctgccatatgatctttggcctttggatgatacaattgttcaagttagttaataatagtggtcttgttctgaaaaaatatatataatttttagaagtcataactggtgaaattgatacatgtaatcaagactgtgtgtatactgagaatatttggtgaatgtatggaattgaagttgatgctcttgacctgaaaataacaacatatgacaatttaggactgcaatcacccactgagtattgtttttctcttagtctttgttggaatattaaagctttgatattcccaaaatactttttaatacagtccctctttctaaggactgtacctttagagggactctatcactttcaaaggattgcctttgatggtgataaaccattttctgatggtatgtctgaaatacattttatctgtcctgcttatttttgaccagccagatgacactcgaacaaaatcaaagtgactaaaatcatgcttcagcttaagggataatgagggtgtgttgtgttctgctaatcaggcttcgtacagttactgtgaaagaaacttgcaactatcccccttttttttttcttttcttttggttttttttttttgggagaggggggggcaagaaaacgggagtgtggg

SEQ ID NO: 6618 - DNA, 2401 bp, Homo sapiens
  misc_feature (1856)..(1889): n is a, c, g, or t
  misc_feature (2303)..(2358): n is a, c, g, or t
cttgaacctgggaggcggagattgcagtgagccaagatcacatcattgcattccagcctgggcaacaagagcgaaactccatctcaggaaaaaaagaaaaaaaaaaaaagagagagagagagaacagatttaaaggaatttgtgatgttctgacaagacttgactcctgactgagttttatggctgatgagggagaaggaaacgatcaagatgacttaggagtttctttgttattctgagaatcgagcagagaagaaagaatactctgagaatgaaagaggaagacagcattcagagcgggacatagtagttttgaggtacatgggattcggtcagtagttggaaatttggatcatgaattcagaagaaacaccaaggcaagaaagacttttttaaaactttaatttttaaactaattatagcacttttgattaatcaagtcttaacaagcgggactatcacgccattcattgctgcttcccctgtctccacataccagggtgctgtgattacaccaaccatggaccatcccatgtcaatgcagccagccaacatgatgggcccactgacacagcagatgaatcacctttcgttgggcacaacaggaacgattcaatcccaagacaggattatgatactccaccagctgttgtgtcagtatatgactgctgctgctcctatgcaagggacctacattcctcagtacacgcctgtgcctccgacagctgtttctattgaaggtgttgttgctgatacctctccccagacagtggcaccttcatcccaggacaccagtggtcagcagcaacagatagcagtggacacatccaacgaacatgcacctgcatattcttaccaacagtctaaaccataaacaggactgaagaatgtctgtctgaatctttgccttgaatgaagaaacttcattgaacaagaagttggcttccagtttgcacagacgtcaatggaatgcatttttttgttgttgttgttgttttttttttagtgttataccttacccaatgaaagcaaagtttttatgtgctgtgcaaatggtcttcatgtggtctgacaatttatttttgccatcatttttttaattaaagaaaaaatttccagaagaggaaaaaaaaactacaaaaaacaaaacattgaaggttgatattttatgtggaagaacatttgaattgaattcagaatttttctgaaggtgtagatactttttttttttttttaacagaaaacctgatgtcaagaggtgggcaatagaaatggaaacaaattgtcttcctcaataattaagctactttctctttttcccttcttgttttaatctagtgggttttttattttattttttcttagaaatatgtaggtaaggtttatcttgaatcttaattgccttaattttaaggacgtcaaaggctctcgaggcaagctgtcaacgtcttgttgaaaacaaaaatcaagaaagaattgaaatactgtgccggctttcactggcacagaagtttaagactatgagtttttagggtgaagaaaaaactgtacagtttaaatgaaaatgtttttcttcatttgaagaaaatttgttgataaaccatggcaactgcaagaattggaaaaatgctgggacttttcatgaactttgtcttaagtgttgacatgaatcattctaaaaggctaaaacattttacagtaaagttattaaggttggtttaaaaacaactgcattagaaataatgcgtgtttggggggcagaatgcagatttttttaatttacaaagcgtgatcgctagcaaaagcattagtgctttttatctgcagtcttttttatgagctttacaaagtttttnnnnnnnnnnnnnnnnnnnnnnnnnnnnnnnnnnttaagagcattaaaaaaaaaaacttaagtagataggagcttatggtcaaaaagtgcaaaaaaaaaaaacaaaaaaaaagcaatagatagagaaattgttgacaatttctgtagtctttcctagttgtgatcaaattcagcctatggatggcctattttataccaaagatgaagtgacaccctattacagtccagaagatagaggttgttttcgtttcttttctttttaaaaaaaaaaaaatttatttgaccgacatggccggaccagttctttctttgttgtttgtttaaactaccttccactggtgttttacatagtgcataaaaaaaagagggtggggggagttgtctctcttttctttaaatgtgtattcattgatagcagaagcttgtacctgctgtgtttagcagtttnnnnnnnnnnnnnnnnnnnnnnnnnnnnnnnnnnnnnnnnnnnnnnnnnnnnnnnnctgtgagctttttctggtttctcactgcctgccttgaatagtg

SEQ ID NO: 6619 - DNA, 1200 bp, Homo sapiens
tttttttttttggacatttcaggcctccactggcagttgctttcactgtacaaatgtaaagtgtggaaaagggtaaggacctagaaaaagttatacaaaaaatatgtgccattgtcaggtgcaaaacctggcgactactctgaaccaaattaagtataatatccttcaaaataaatgagaatatataaataagctaaaatagaatccacacaggcttcatagaaactttgaaagcattacacattggtaaggccccaggataggaagaaaataacctaacatgttcaaaagggcaaggaaaaacctccctacactgggaagtttgttactaaataaacttttctaaaatggaagcacaataatgatcagctcttggaatttttattgcttaaaggcacgtctagtatacacgaaatactcttttaacattgctggtcttttggaaacattcttagttttaaaacttgaacctttatgcactgagtgcctcagggtgaaaagaaaaacttgactttgcatttcctaagctgtaagtcagcagctttttgtctcattcatacctatagatgtatgtgtacacacacacaaacacacacacacagacacatacacacccctatatccttggttagtttagcttggattaacaaaggtacaatgcccaatggctttcatctgtcttcactggaagagtcactgtaatctgagtctctgcatgggaaacatcaccattagtgttagatgctctcccgacatgcatagctacaaagggttttcttagattataatctatgtgcttgttactctcagaattaatccagcataactaaattttgggccttgaactcctttggtcacttggatctgtgccaactccaaataaaatcacaaccatttcaattattgttcagaacatttgcctcctcccttgctctggtgatacattttctgctgtctcagagctcagaatgtcagtttgtaaagcatgatttaaaactctctcagtatgtcattgtagcagtccatttttatttttactgcaggcaacatgagattccttaggggtgagcctactgcacattcaccaagactaagtggacaatagcactgtgctcacttttccctataacacatctcaattattgtgcagagacttgatccccggccataatgggcactctgcgttgatacactgcttcc

SEQ ID NO: 6620 - DNA, 1018 bp, Homo sapiens
ttttttttttttttttttaattattagtaaaatatgcttgtgtccaatggagaagataaggcatgaacctaaataccataaaactcagaacaaagtacctaacgcaatccccggtgctgagcagaaacttggtaaataatttctgaactactgaaagtggcaactgactgtaccatagatatggtccaccccactcccgccatcgctcctccctggctttggtgatcacacctgagagcatgtcataaacttatctgtttgctcactgcttatttgccccactagagcaaaagtttggtgacagcaggaactttgtcatattctccacactatcccccgaattttgcacagtatctggcaaacggtcggtgcttgtttggtgaataaatgaatgagtgaatgtctagcacaacatgcaacagatgtatgtgctccacaagtttctgctaatttattattgttggaaggggcttaaccaaagaaaaggtaagtgctgtggaaatccaaagaagtatgactgtttccacaaaggggcagggacagcttcgtggaaaagataatgatgaagctgggctttcaaagagggtctgttgtgtacagagaagggaagggcagtgcagagagggaaatctgcaaaaggacaggtttctcaaagaagggtgagcattcagtcttcgaggcagcaaaaactagaagaattgagagataaggtggaaaagaccctggtacagattttgaaggaccttaattaagcaccaagctaagacgtcgagactgtgttccatgcacatcaggaagcaccgagtatttcctgaatccctccaaaagtgggtgcacgcatacagttggcaatgaacaaggattaacccagctcttgttaaatgaacacactagatcaaacgggaagagagagatgatgaatacatctcgcctgtgtgttctcggggttttcggccgaagattgtccgggttaaaaatacaaaatagacacaaagaatgacgctgccccaagccacag

SEQ ID NO: 6621 - DNA, 2960 bp, Homo sapiens
ttggcgggcggaagcggccacaacccggcgatcgaaaagattcttaggaacgccgtaccagccgcgtctctcaggacagcaggcccctgtccttctgtcgggcgccgctcagccgtgccctccgcccctcaggttctttttctaattccaaataaacttgcaagaggactatgaaagattatgatgaacttctcaaatattatgaattacatgaaactattgggacaggtggctttgcaaaggtcaaacttgcctgccatatccttactggagagatggtagctataaaaatcatggataaaaacacactagggagtgatttgccccggatcaaaacggagattgaggccttgaagaacctgagacatcagcatatatgtcaactctaccatgtgctagagacagccaacaaaatattcatggttcttgagtactgccctggaggagagctgtttgactatataatttcccaggatcgcctgtcagaagaggagacccgggttgtcttccgtcagatagtatctgctgttgcttatgtgcacagccagggctatgctcacagggacctcaagccagaaaatttgctgtttgatgaatatcataaattaaagctgattgactttggtctctgtgcaaaacccaagggtaacaaggattaccatctacagacatgctgtgggagtctggcttatgcagcacctgagttaatacaaggcaaatcatatcttggatcagaggcagatgtttggagcatgggcatactgttatatgttcttatgtgtggatttctaccatttgatgatgataatgtaatggctttatacaagaagattatgagaggaaaatatgatgttcccaagtggctctctcccagtagcattctgcttcttcaacaaatgctgcaggtggacccaaagaaacggatttctatgaaaaatctattgaaccatccctggatcatgcaagattacaactatcctgttgagtggcaaagcaagaatccttttattcacctcgatgatgattgcgtaacagaactttctgtacatcacagaaacaacaggcaaacaatggaggatttaatttcactgtggcagtatgatcacctcacggctacctatcttctgcttctagccaagaaggctcggggaaaaccagttcgtttaaggctttcttctttctcctgtggacaagccagtgctaccccattcacagacatcaagtcaaataattggagtctggaagatgtgaccgcaagtgataaaaattatgtggcgggattaatagactatgattggtgtgaagatgatttatcaacaggtgctgctactccccgaacatcacagtttaccaagtactggacagaatcaaatggggtggaatctaaatcattaactccagccttatgcagaacacctgcaaataaattaaagaacaaagaaaatgtatatactcctaagtctgctgtaaagaatgaagagtactttatgtttcctgagccaaagactccagttaataagaaccagcataagagagaaatactcactacgccaaatcgttacactacaccctcaaaagctagaaaccagtgcctgaaagaaactccaattaaaataccagtaaattcaacaggaacagacaagttaatgacaggtgtcattagccctgagaggcggtgccgctcagtggaattggatctcaaccaagcacatatggaggagactccaaaaagaaagggagccaaagtgtttgggagccttgaaagggggttggataaggttatcactgtgctcaccaggagcaaaaggaagggttctgccagagacgggcccagaagactaaagcttcactataatgtgactacaactagattagtgaatccagatcaactgttgaatgaaataatgtctattcttccaaagaagcatgttgactttgtacaaaagggttatacactgaagtgtcaaacacagtcagattttgggaaagtgacaatgcaatttgaattagaagtgtgccagcttcaaaaacccgatgtggtgggtatcaggaggcagcggcttaagggcgatgcctgggtttacaaaagattagtggaagacatcctatctagctgcaaggtataattgatggattcttccatcctgccggatgagtgtgggtgtgatacagcctacataaagactgttatgatcgctttgattttaaagttcattggaactaccaacttgtttctaaagagctatcttaagaccaatatctctttgtttttaaacaaaagatattattttgtgtatgaatctaaatcaagcccatctgtcattatgttactgtcttttttaatcatgtggttttgtatattaataattgttgactttcttagattcacttccatatgtgaatgtaagctcttaactatgtctctttgtaatgtgtaatttctttctgaaataaaaccatttgtgaatataaaaaaaaaaaaaaaaaaaaaaaaaaaaaaaaaaaaaaaaaaaaaaaaaaaaaaaaaaaaaaacatccaaacaaccgcacgaacaagcacacacaccaccccaccgcgcacacacctcctccaccctcgcacacgcacccccaaacgaaagtaacacaaaacgcaccaacgccggcgagcagcatacacgcgaaaacatagcacgaccgagtgcggcagacagtcataagaggacgaggtgccacacaaagcatccagaatacaccgggccgaacacaacaaacaagagcaaggcaagaggtagcggacgagacgagtaggaagggccagacagtcagacagcgcaacgccgcggagggaggagacacaacatcagagtcaagaggagtacaagttgatgggtggggacacgtcgacaacgagcaggggcgggcgaaaccaaggcgggccaagagagtcctacccaacagagaggtagagagacggtgaa

SEQ ID NO: 6622 - DNA, 1767 bp, Homo sapiens
  misc_feature (1290)..(1290): n is a, c, g, or t
  misc_feature (1297)..(1300): n is a, c, g, or t
  misc_feature (1309)..(1309): n is a, c, g, or t
  misc_feature (1314)..(1315): n is a, c, g, or t
  misc_feature (1321)..(1321): n is a, c, g, or t
  misc_feature (1324)..(1325): n is a, c, g, or t
  misc_feature (1331)..(1331): n is a, c, g, or t
  misc_feature (1339)..(1339): n is a, c, g, or t
  misc_feature (1353)..(1353): n is a, c, g, or t
  misc_feature (1360)..(1360): n is a, c, g, or t
  misc_feature (1362)..(1362): n is a, c, g, or t
  misc_feature (1368)..(1368): n is a, c, g, or t
  misc_feature (1371)..(1373): n is a, c, g, or t
  misc_feature (1376)..(1376): n is a, c, g, or t
  misc_feature (1379)..(1381): n is a, c, g, or t
  misc_feature (1392)..(1393): n is a, c, g, or t
  misc_feature (1397)..(1397): n is a, c, g, or t
  misc_feature (1405)..(1405): n is a, c, g, or t
  misc_feature (1407)..(1407): n is a, c, g, or t
  misc_feature (1415)..(1416): n is a, c, g, or t
  misc_feature (1420)..(1420): n is a, c, g, or t
  misc_feature (1422)..(1422): n is a, c, g, or t
  misc_feature (1424)..(1424): n is a, c, g, or t
  misc_feature (1442)..(1443): n is a, c, g, or t
  misc_feature (1445)..(1445): n is a, c, g, or t
  misc_feature (1454)..(1454): n is a, c, g, or t
  misc_feature (1456)..(1456): n is a, c, g, or t
  misc_feature (1458)..(1458): n is a, c, g, or t
  misc_feature (1469)..(1469): n is a, c, g, or t
  misc_feature (1471)..(1471): n is a, c, g, or t
  misc_feature (1481)..(1481): n is a, c, g, or t
  misc_feature (1484)..(1484): n is a, c, g, or t
  misc_feature (1491)..(1492): n is a, c, g, or t
  misc_feature (1497)..(1498): n is a, c, g, or t
  misc_feature (1509)..(1509): n is a, c, g, or t
  misc_feature (1513)..(1513): n is a, c, g, or t
  misc_feature (1516)..(1517): n is a, c, g, or t
  misc_feature (1524)..(1524): n is a, c, g, or t
  misc_feature (1529)..(1530): n is a, c, g, or t
  misc_feature (1533)..(1534): n is a, c, g, or t
  misc_feature (1536)..(1536): n is a, c, g, or t
  misc_feature (1543)..(1543): n is a, c, g, or t
  misc_feature (1551)..(1551): n is a, c, g, or t
  misc_feature (1560)..(1560): n is a, c, g, or t
  misc_feature (1567)..(1567): n is a, c, g, or t
  misc_feature (1572)..(1572): n is a, c, g, or t
  misc_feature (1575)..(1577): n is a, c, g, or t
  misc_feature (1591)..(1591): n is a, c, g, or t
  misc_feature (1596)..(1598): n is a, c, g, or t
  misc_feature (1605)..(1605): n is a, c, g, or t
  misc_feature (1609)..(1609): n is a, c, g, or t
  misc_feature (1613)..(1613): n is a, c, g, or t
  misc_feature (1615)..(1615): n is a, c, g, or t
  misc_feature (1622)..(1622): n is a, c, g, or t
  misc_feature (1636)..(1637): n is a, c, g, or t
  misc_feature (1644)..(1644): n is a, c, g, or t
  misc_feature (1654)..(1654): n is a, c, g, or t
  misc_feature (1660)..(1660): n is a, c, g, or t
  misc_feature (1677)..(1678): n is a, c, g, or t
  misc_feature (1681)..(1681): n is a, c, g, or t
  misc_feature (1687)..(1687): n is a, c, g, or t
  misc_feature (1694)..(1694): n is a, c, g, or t
  misc_feature (1696)..(1696): n is a, c, g, or t
  misc_feature (1698)..(1700): n is a, c, g, or t
  misc_feature (1714)..(1714): n is a, c, g, or t
  misc_feature (1720)..(1720): n is a, c, g, or t
  misc_feature (1727)..(1728): n is a, c, g, or t
  misc_feature (1744)..(1744): n is a, c, g, or t
  misc_feature (1747)..(1747): n is a, c, g, or t
  misc_feature (1749)..(1749): n is a, c, g, or t
  misc_feature (1751)..(1752): n is a, c, g, or t
  misc_feature (1757)..(1757): n is a, c, g, or t
cattggtcccaggcagcagttagcccgccgcccgcctgtgtgtccccagagccatggagagagccagtctgatccagaaggccaagctggcagagcaggccgaacgctatgaggacatggcagccttcatgaaaggcgccgtggagaagggcgaggagctctcctgcgaagagcgaaacctgctctcagtagcctataagaacgtggtgggcggccagagggctgcctggagggtgctgtccagtattgagcagaaaagcaacgaggagggctcggaggagaaggggcccgaggtgcgtgagtaccgggtcttctacctgaagatgaagggtgactactaccgctacctggccgaggtggccaccggtgacgacaagaagcgcatcattgactcagcccggtcagcctaccaggaggccatggacatcagcaagaaggagatgccgcccaccaaccccatccgcctgggcctggccctgaacttttccgtcttccactacgagatcgccaacagccccgaggaggccatctctctggccaagaccactttcgacgaggccatggctgatctgcacaccctcagcgaggactcctacaaagacagcaccctcatcatgcagctgctgcgagacaacctgacactgtggacggccgacaacgccggggaagaggggggcgaggctccccaggagccccagagctgagtgttgcccgccaccgccccgccctgccccctccagtcccccaccctgccgagaggactagtatggggtgggaggccccacccttctcccctaggcgctgttcttgctccaaagggctccgtggagagggactggcagagctgaggccacctggggctggggatcccactcttcttgcagctgttgagcgcacctaaccactggtcatgcccccacccctgctctccgcacccgcttcctcccgaccccaggaccaggctacttctcccctcctcttgcctccctcctgcccctgctgcctctgatcgtaggaattgaggagtgtcccgccttgtggctgagaactggacagtggcaggggctggagatgggtgtgtgtgtgtgtgtgtgtgtgtgtgtgtgtgtgcgcgcgcgccagtgcaagaccgagattgagggaaagcatgtctgctgggtgtgaccatgtttcctctcaataaagttcccctgtgacactcaaaaaaaaaaaaaaaaaaaaaaaaaaaaaaaaaaaaaaaaaaaaaaaaaaaaaaaaaaaaaaaaaaaaaaaaaaaaaaaaaaaaaaaanaaaaaannnnggggggggncccgnnccccanttnncccttnggggggtngttttacatttcantggccgngnttttanaannngtngtnnntgggaaaaccnngggnttaccccncntaaatccnnttanangnaaatcccccttttgcccnntnggtgtattncngnagggggccccnancttttggccnttnccaaaannttgcnncctttatttgngggntgnnaattttntaagnnaannantttttanaaaatttngggtaaaanttttttnaaaancgnnnttttttatcccaanggccnnnttttggnaaancccntntatattncaatgttttccccnntgggttnggtttttccncctttnaacaaagggcccctttnnaanccgggngtcctcncngnnnaagggggaaaaccntttttnggggggnnccccattggggacccntcncngnnataantttttggggt

SEQ ID NO: 6623 - DNA, 1672 bp, Homo sapiens
agcggagcgcggtgagttggggggggggggcacttggcttcaaagctggctcttggaaattgagcggagacgagcggcttgttgtagctgccgctgcggccgccgcggaataataagccgggatctaccatacccattgactaactatggaagattataccaaaatagagaaaattggagaaggtacctatggagttgtgtataagggtagacacaaaactacaggtcaagtggtagccatgaaaaaaatcagactagaaagtgaagaggaaggggttcctagtactgcaattcgggaaatttctctattaaaggaacttcgtcatccaaatatagtcagtcttcaggatgtgcttatgcaggattccaggttatatctcatctttgagtttctttccatggatctgaagaaatacttggattctatccctcctggtcagtacatggattcttcacttgttaagagttatttataccaaatcctacaggggattgtgttttgtcactctagaagagttcttcacagagacttaaaacctcaaaatctcttgattgatgacaaaggaacaattaaactggctgattttggccttgccagagcttttggaatacctatcagagtatatacacatgaggtagtaacactctggtacagatctccagaagtattgctggggtcagctcgttactcaactccagttgacatttggagtataggcaccatatttgctgaactagcaactaagaaaccacttttccatggggattcagaaattgatcaactcttcaggattttcagagctttgggcactcccaataatgaagtgtggccagaagtggaatctttacaggactataagaatacatttcccaaatggaaaccaggaagcctagcatcccatgtcaaaaacttggatgaaaatggcttggatttgctctcgaaaatgttaatctatgatccagccaaacgaatttctggcaaaatggcactgaatcatccatattttaatgatttggacaatcagattaagaagatgtagctttctgacaaaaagtttccatatgttatgtcaacagatagttgtgtttttattgttaactcttgtctatttttgtcttatatatatttctttgttatcaaacttcagctgtacttcgtcttctaatttcaaaaatataacttaaaaatgtaaatattctatatgaatttaaatataattctgtaaatgtgaaaaaaaaaaaaaaaaaaaaatatttgttactataataaaactataatattgatgtcaggaatcaggacaacaaatttgagttggcttaaatccatctcagtccttatgggagttttattttcctgtagttggactactaaaattaggaaaatgctagttcagtttcgtaatgcttgaagtattttatgctctggatgtttaatgtctcatcagttctgccatgttgttactattcacctggtaagaataaaattttctacggattatttggcctaagttagcttcgagggggaacttcgtttggaagggctcacttacgggttcgctaagctacggagacccttggcgttcaaacaggggcgcgggaactaactaacttgggcggctgcgataccggacacagggctgaccgtccgttttaaaacggcgccggtgtatgt

SEQ ID NO: 6624 - DNA, 4672 bp, Homo sapiens
gcggcgcgcacactgctcgctgggccgcggctcccgggtgtcccaggcccggccggtgcgcagagcatggcgggtgcgggcccgaagcggcgcgcgctagcggcgccggcggccgaggagaaggaagaggcgcgggagaagatgctggccgccaagagcgcggacggctcggcgccggcaggcgagggcgagggcgtgaccctgcagcggaacatcacgctgctcaacggcgtggccatcatcgtggggaccattatcggctcgggcatcttcgtgacgcccacgggcgtgctcaaggaggcaggctcgccggggctggcgctggtggtgtgggccgcgtgcggcgtcttctccatcgtgggcgcgctctgctacgcggagctcggcaccaccatctccaaatcgggcggcgactacgcctacatgctggaggtctacggctcgctgcccgccttcctcaagctctggatcgagctgctcatcatccggccttcatcgcagtacatcgtggccctggtcttcgccacctacctgctcaagccgctcttccccacctgcccggtgcccgaggaggcagccaagctcgtggcctgcctctgcgtgctgctgctcacggccgtgaactgctacagcgtgaaggccgccacccgggtccaggatgcctttgccgccgccaagctcctggccctggccctgatcatcctgctgggcttcgtccagatcgggaagggtgatgtgtccaatctagatcccaacttctcatttgaaggcaccaaactggatgtggggaacattgtgctggcattatacagcggcctctttgcctatggaggatggaattacttgaatttcgtcacagaggaaatgatcaacccctacagaaacctgcccctggccatcatcatctccctgcccatcgtgacgctggtgtacgtgctgaccaacctggcctacttcaccaccctgtccaccgagcagatgctgtcgtccgaggccgtggccgtggacttcgggaactatcacctgggcgtcatgtcctggatcatccccgtcttcgtgggcctgtcctgcttcggctccgtcaatgggtccctgttcacatcctccaggctcttcttcgtggggtcccgggaaggccacctgccctccatcctctccatgatccacccacagctcctcacccccgtgccgtccctcgtgttcacgtgtgtgatgacgctgctctacgccttctccaaggacatcttctccgtcatcaacttcttcagcttcttcaactggctctgcgtggccctggccatcatcggcatgatctggctgcgccacagaaagcctgagcttgagcggcccatcaaggtgaacctggccctgcctgtgttcttcatcctggcctgcctcttcctgatcgccgtctccttctggaagacacccgtggagtgtggcatcggcttcaccatcatcctcagcgggctgcccgtctacttcttcggggtctggtggaaaaacaagcccaagtggctcctccagggcatcttctccacgaccgtcctgtgtcagaagctcatgcaggtggtcccccaggagacatagccaggaggccgagtggctgccggaggagcatgcgcagaggccagttaaagtagatcacctcctcgaacccactccggttccccgcaacccacagctcagctgcccatcccagtccctcgccgtccctcccaggtcgggcagtggaggctgctgtgaaaactctggtacgaatctcatccctcaactgagggccagggacccaggtgtgcctgtgctcctgcccaggagcagcttttggtctccttgggccctttttcccttccctcctttgtttacttatatatatattttttttaaacttaaattttgggtcaacttgacaccactaagatgattttttaaggagctgggggaaggcaggagccttcctttctcctgccccaagggcccagaccctgggcaaacagagctactgagacttggaacctcattgctacgacagacttgcactgaagccggacagctgcccagacacatgggcttgtgacattcgtgaaaaccaaccctgtgggcttatgtctctgccttagggtttgcagagtggaaactcagccgtagggtggcactgggagggggtgggggatctgggcaaggtgggtgattcctcccaggaggtgcttgaggccccgatggactcctgaccataatcctagccccgagacaccatcctgagccagggaacagccccagggttggggggtgccggcatctcccctagctcaccaggcctggcctctgggcagtgtggcctcttggctatttctgtgtccagttttggaggctgagttctggttcatgcagacaaagccctgtccttcagtcttctagaaacagagacaagaaaggcagacacaccgcggccaggcacccatgtgggcgcccaccctgggctccacacagcagtgtcccctgccccagaggtcgcagctaccctcagcctccaatgcattggcctctgtaccgcccggcagccccttctggccggtgctgggttcccactcccggcctaggcacctccccgctctccctgtcacgctcatgtcctgtcctggtcctgatgcccgttgtctaggagacagagccaagcactgctcacgtctctgccgcctgcgtttggaggcccctgggctctcacccagtccccacccgcctgcacagagggtactagggcaccccttgtttctgttgttcccgtgaatttttttcgctatgggaggcagccgaggcctggcaatgcgcgcccacgtttccgtgagcccgcgctgcctccatggcagcagccaaggacccccagaacaagaagacccccccgcaggatccctcctgagctcggggggctctgccttctcaggccccgggcttcccttctccccagccagaggtggagccaagtggtccagcgtcactccagtgctcagctgtggctggaggagctggcctgtggcacagccctgagtgtcccaagccgggagccaacgaagccggacacggcttcactgaccagcggctgctcaagccgcaagctctcagcaagtgcccagtggagcctgccgcccccacctgggcaccgggaccccctcaccatccagtgggcccggagaaacctgatgaacagtttggggactcaggaccagatgtccgtctctcttgcttgaggaatgaagacctttattcacccctgccccgttgcttcccgctgcacatggacagacttcacagcgtctgctcataggacctgcatccttcctggggacgaattccactcgtccaagggacagcccacggtctggaggccgaggaccaccagcaggcaggtggactgactgtgttgggcaagacctcttccctctgggcctgttctcttggctgcaaataaggacagcagctggtgccccacctgcctggtgcattgctgtgtgaatccaggaggcagtggacatcgtaggcagccacggccccgggtccaggagaagtgctccctggaggcacgcaccactgcttcccactggggccggcggggcccacgcacgacgtcagcctcttaccttcccgcctcggctaggggtcctcgggatgccgttctgttccaacctcctgctctgggaggtggacatgcctcaaggatacagggagccggcggcctctcgacggcacgcacttgcctgttggctgctgcggctgtgggcgagcatgggggctgccagcgtctgttgtggaaagtagctgctagtgaaatggctggggccgctggggtccgtcttcacactgcgcaggtctcttctgggcgtctgagctggggtgggagctcctccgcagaaggttggtggggggtccagtctgtgatccttggtgctgtgtgccccactccagcctggggaccccacttcagaaggtaggggccgtgtcccgcggtgctgactgaggcctgcttccccctccccctcctgctgtgctggaattccacagggaccagggccaccgcaggggactgtctcagaagacttgatttttccgtccctttttctccacactccactgacaaacgtccccagcggtttccacttgtgggcttcaggtgttttcaagcacaacccaccacaacaagcaagtgcattttcagtcgttgtgcttttttgttttgtgctaacgtcttactaatttaaagatgctgtcggcaccatgtttatttatttccagtggtcatgctcagccttgctgctctgcgtggcgcaggtgccatgcctgctccctgtctgtgtcccagccacgcagggccatccactgtgacgtcggccgaccaggctggacaccctctgccgagtaatgacgtgtgtggctgggaccttctttattctgtgttaatggctaacctgttacactgggctgggttgggtagggtgttctggcttttttgtggggtttttatttttaaagaaacactcaatcatcctaaaaaaaaaaaaaaaaaaaaaaaaaaaaaaaaaaaaaaaaaaaaaaaaaaaaaaaaaaaaaaaaaaaaaaaaaaaaaaaaaaaaaaaaaaaaaaaaaaaaaaaaaaaaaaaaaaaaaaaaaaaaaaaaaaa

SEQ ID NO: 6625 - DNA, 4735 bp, Homo sapiens
  misc_feature (2)..(319): n is a, c, g, or t
annnnnnnnnnnnnnnnnnnnnnnnnnnnnnnnnnnnnnnnnnnnnnnnnnnnnnnnnnnnnnnnnnnnnnnnnnnnnnnnnnnnnnnnnnnnnnnnnnnnnnnnnnnnnnnnnnnnnnnnnnnnnnnnnnnnnnnnnnnnnnnnnnnnnnnnnnnnnnnnnnnnnnnnnnnnnnnnnnnnnnnnnnnnnnnnnnnnnnnnnnnnnnnnnnnnnnnnnnnnnnnnnnnnnnnnnnnnnnnnnnnnnnnnnnnnnnnnnnnnnnnnnnnnnnnnnnnnnnnnnnnnnnnnnnnnnnnnnnnnnnnnnnnnnnnnnnnnnnccgcgtttttttttttttttttttactcttttggtgatggttgcttttttttttttttttttccccaggaagcaccaactaataagcttctctatgccaaggatatcccaacctacaaagaagaagtaaaatcttattacaaagcaatcagggatttgcctccattgtcatcctcagaaatggaagaatttttaactcaggaatctaaggtatcattagaaagcagaaataagcttatatttggttactttacgtcatttcagaatctctcaacaagtctttcttttagaaacatgaaaatgaatttaatgaagaagtggccttgacagaaatttacaaatacatcgtaaaatattttgatgaggtaagattttaaataacattgtttttaacctttgaatcaggcacaaggatgtggttatagcattctgtcagtttcagaacagctctggcatcccaaaaggccagaaagggaagccaggaagcctgtctgagatgggggatcctggcactgagccagaccctgtacatggctgccccccttacagttttatcatgctgcccacatttggaccagcctgaatttacatttgagttcatggggcctacagccaccctgactcaagttaactttgatgagtaagtagtggccctattaaatggggtcagcttatgcttgattgtaatttgctaaaaatgaaagctaagcttgttaaattgcctagattctgtattcaatcgttatatgaaattatgacatatttctaacttaagcgactatttcaataaaccattctcctttatgattaattctccttaatctgggtttttttctttggaaattcaaacagacacattcatcagatgctttgtttccaaacaaatgttaactcccccttccctgattcccccccaatcatgctgggacaggctatccatgtcaatggtgagaatagctcaccaattccatttgctacttgaagatgaagtgaagctctaaggtagggtatgaggcaatgagttcttaaacttgataaggatccctcgttccaggggtcaggggagagaagggaagcacgaggagggactacactgcccagatgggagggaagggaaggatctgtctctgaccaggatgtccctgcctgctgcatttaaggagaaatacttgcctgcatgttggctgcccaggaatgcttgctgtgcttggaatggctgtgacataatgcataaagcagggcctaggaagcctggccccatatttgtaagcaaatagttggtatttcttgcgagcttctattttaagccaaggtattgttgatcctgtgataaggacttagcaaaacaacttgcaaagtgagtatgtaaatgatggaagaaaatgttggcatctgtttcatacagattttaccactcacagcatcaggtatgcaaaaaacagaattgtaacgctaaaaccacaatatctaaaataactgttctaattgtcaacagattctaaataaactagaaagagaacgagggctggaagaagctcagaaacaactcttgcatgtaaaagtcttatttgatgaaaagaagaaatgcaagtggatgtaagcactctggggcctggcttaatctggcaaagttcttcagacgacttgggagcaaaatggctgcttgagctactctgtgtcgttaatttgttgtttgcacataggttccactttgggcactgtctttttaagagaccaaggcacatgcacagcttttagaaagcataccaacccttgtgcctgtgtgtataccgtgggaacccttctgtaaatagagttgaagtggttgttgcaaacagcctccttgtttacagagaatacaaggccagtaagcgaatgtcagtattgtaactacagtctccacttaagcacaatgatataagtggttttgtttgaaaactacagctatgtagcacttgtgctacactgcacctctgcattgtaaagggatactgccagtgctcaaaacaaaatgtgaaatgagtcatttggaaacaaggtgggggtgttagggcaacctcgaggatttgcagcattgaaactttccccagtagttcttggaaaagctgaccgcagaatttggtagtgtacacttagcatttgtgagtgtgtgtgtgtgtttaaaccaaaaactaacagtgttgcaacattgttgaaagggctcgtgtttttcagtggtcatcaactgcactccatcaaactcacctccatttcaccaaggagctctaaagtaaggagagtgggctttatttaaatgaacagcattttaaccagatactttgtcctaatgtatgttccttttcttcatctgttttttcatactaaatgtatttgatagtggacatgttggatattatacaaaaaaatcattaattcatttctgttccaaaacctttgatcagaacgatctgtggaagagtaactccatttctatatgagtgagtgtctccttgctttagatttctggtgaaccctgtggttatgaatacttgtgtgtgatttaaaaaaaaaaagatacattttacatttcatcgaattgctgttcacactggagtattatatataaatatatatatttgaggcccaaggcctgaaaaatattagtatacaacttggtatcttagtcttactatgtactttttgaaagtattcctcgcaggagaaagaatttaaaatacccattttattcatgcctttctttttaaagaattctctatccagttatactgtagtctttttagtgctgattttttaattcctgaatttttgctgctcatgaccagttttaataccactgtgttttccttctattaaaccagaagaagtaaacagcataattggcaactcttgagcttttcttgtggcaggcaccttttacccttggtgctccaaatcccccatctaggaaagaaaattttttcaagtcaaataacattgatcacatattccttgaaatcatttaccaacactgtatggagcattaggatttaaatatgaatttgtcttaaaggcaattcctttttgcttctgtattatctggaaaagcatgagagaggtgacacctcaacaaactgatcagagaaaataagcagttactaccctgataggcaccttcccaatcctgttgcttttgaccattgtctgtccaacggacacacctcaaacaaacaaaactaccaaatagatgacagatcagaataaaggtgagaggtctggtccccattgaaggctgctacagtcttcaaagaggtgaaggagttcataagagaacaacagtaggaaagttgagagccaagggtaggagagttgcccaaaagacttcccctactactttagggtactgaaaactcaaaggatcagctacagctttatctaagtatttactaaatgctacatgagggtgtccctgtccagctttctggcacatgagtcctgtgtggagagttacctcctcttccagggactgtgctgttgggaactttgggcaagtcacttacctctttgtgcctcaatttctgtataatatttctaagctacctcactgaggtggtatgaagattcactaatgtatgtagcgtgtttgtcaatcctccagtgaaaagcactatctagatcacattttggatcacattagccaaatgcagtaaatggccaaattagatgtgtgctgaagacaatcagtcactgggtctatattaaacagcaaccagagcaacaaatggcaaacaatttctattttcaagtttctttgcatatttttttggtgcaaaaccatttataaacttttttttctaacactagtgtctacagcagcattcaaaaaaattctgttaccttttctgtattaggatttaaagtctatttcttattgtatacctgattgaagctgttcttggagatgaatgttttaaatgtctatatccaaaaaataaacattttgatgtaaaaaaaaaaaaaaaaaaaaaaaaaggagtttcctcacacacgacgcaacaacaccggaaccacaaccacagaacacggacagaacagaatgtggcattgaagacgcactcagtcgagacaaagccaagacggcaagagaccagagaggaagacaacgaacggaaaaaggggcagaacagaagagagcgcagcgcaacaggccagagccccagaagagacgcagctgagaacacgacaaaaatcctagtagccgcaacacacacaaccgaggggaagcgagacagaaaaaagaccagcacagacaaacaacagaaaagacacgagaagaagaaagaaacacaccacgaggcagggacgagaccaaacaagagatagagggaacgaggaacgagaggagcaggagagcaactagcgagagaccagcgccgcaatg

SEQ ID NO: 6626 - DNA, 1977 bp, Homo sapiens
  misc_feature (1658)..(1658): n is a, c, g, or t
  misc_feature (1711)..(1714): n is a, c, g, or t
  misc_feature (1722)..(1722): n is a, c, g, or t
  misc_feature (1762)..(1762): n is a, c, g, or t
  misc_feature (1764)..(1766): n is a, c, g, or t
  misc_feature (1795)..(1795): n is a, c, g, or t
  misc_feature (1800)..(1803): n is a, c, g, or t
  misc_feature (1962)..(1962): n is a, c, g, or t
tggcgtcagagccgtcgtggctcgttccattctcggcggtggtacctgctcccggtggccctgaggacgtgtgggccaggggcggccccgaaattaggaagcggagggggagcaggagtaatggagttcaaagaggaactagcggcaaacaatctcaacggggaaaatgcccaacaagaaaacgaaggaggggagcaggcccccacgcagaatgaagaagaatcccgccatttgggagggggtgaaggccagaagcctggaggaaatatcaggcgggggcgagttaggcgacttgtccctaattttcgatgggccatacctaataggcatattgagcacaatgaagcgagagatgatgtagaaaggtttgtagggcagatgatggaaatcaagagaaagactagggaacagcagatgaggcactatatgcgcttccaaactcctgaacctgacaaccattatgacttttgcctcataccttgaatcctaaaagttttcgctgaggttaatgtgaacactgctttacaagcttgtatttttgtgatttactttttctgtaagccttttggggtttacacttaccagtttctaatggaaattagaattctaattgaatattgttttgtctcagcctaaaagttacggtcagcatggcaattcacctattttaggaaaaatactcttttcataatatgaaatgcataaagcagttcaaaaagcagtctgtattccatcatcttcctttttcattccagtccttatttttgtaagtattacttttcctcctccggctacctggactcaaaatctcagttgtctttgacagtttttttcttgtccctgaccaaaaaagaatgatcatacccagaattcaatgtttgatattttaagaatgtatgttctagtgtttttcagagtgagtctaccatctgtataaaaacaccttgggggcaggcaggggcatttaaaaatgtaggacctatcgtccagactcacagagtggggctccagaatctccatttttaacaaactctcttaagtaattctgatgtgtaccaaaatcagtgccattggtgtgtgtgtacgtaactatatacatatgtgtgtgtgtgtatatatataatgtgtcataaccgtaaacaataaacaatatcaagataaaaaaaaaattgatgggcaagtaattaaaaaagaaaagtatgagaccttaaaataagactgatgattataggagtggtagggacagtggcaaagttattcactgtgcaaagcaaaacatgcctgaaggtcacagcctgaggaactcagaattcatcacccctgtcagcagtttcacatccaggatctcattttattcttagaacaacctataaaatctgtattgttatcccacttttacagatgaggtcactggggcttagagatgttaagtaccaaggctaactcctgctgatatcttggggggtggggggaatccaggcctgggccattttctattggaccttatcatctggagatgcagaatatttgacttttgtaacttgatgacaagctgaggatggtaaaagagactcagaagaattgggggctgttttttctatacactggtttttctacatctcaagaacactttaattttaagaatattgaggggatanaaaaaggaaaccctcctagtgttgttcaaaggttaaggaattgcccacctctnnnnaaaaaaanaaaaaaaaacaacaaccacaaaaaccaaaacaacacacancnnnccacaaacaaacccaccaaaaaaaaaaanccccnnnnggggggcgccccaaaagaaaatccccccgggggggcccaagtttttcgcgcaccatttttttgtgtaaaaagggcgccccctatatggggggccgccttttataatgggggccctgggcccgcctttttacaacccccgggggaggggaaaaacgttcncattctggggaaaca

SEQ ID NO: 6627 - DNA, 1131 bp, Homo sapiens
  misc_feature (6)..(7): n is a, c, g, or t
  misc_feature (9)..(9): n is a, c, g, or t
  misc_feature (12)..(12): n is a, c, g, or t
  misc_feature (23)..(25): n is a, c, g, or t
  misc_feature (27)..(27): n is a, c, g, or t
  misc_feature (34)..(36): n is a, c, g, or t
  misc_feature (38)..(38): n is a, c, g, or t
  misc_feature (40)..(40): n is a, c, g, or t
  misc_feature (45)..(46): n is a, c, g, or t
  misc_feature (55)..(56): n is a, c, g, or t
  misc_feature (61)..(62): n is a, c, g, or t
  misc_feature (64)..(64): n is a, c, g, or t
  misc_feature (66)..(66): n is a, c, g, or t
  misc_feature (70)..(71): n is a, c, g, or t
  misc_feature (79)..(79): n is a, c, g, or t
  misc_feature (87)..(87): n is a, c, g, or t
  misc_feature (93)..(94): n is a, c, g, or t
  misc_feature (103)..(103): n is a, c, g, or t
  misc_feature (106)..(109): n is a, c, g, or t
  misc_feature (111)..(111): n is a, c, g, or t
  misc_feature (124)..(124): n is a, c, g, or t
  misc_feature (126)..(126): n is a, c, g, or t
  misc_feature (141)..(141): n is a, c, g, or t
  misc_feature (146)..(146): n is a, c, g, or t
  misc_feature (148)..(148): n is a, c, g, or t
  misc_feature (161)..(161): n is a, c, g, or t
  misc_feature (166)..(167): n is a, c, g, or t
  misc_feature (170)..(171): n is a, c, g, or t
  misc_feature (176)..(177): n is a, c, g, or t
  misc_feature (190)..(191): n is a, c, g, or t
  misc_feature (195)..(195): n is a, c, g, or t
  misc_feature (200)..(201): n is a, c, g, or t
  misc_feature (204)..(205): n is a, c, g, or t
  misc_feature (215)..(217): n is a, c, g, or t
  misc_feature (228)..(228): n is a, c, g, or t
  misc_feature (230)..(230): n is a, c, g, or t
  misc_feature (232)..(235): n is a, c, g, or t
  misc_feature (237)..(237): n is a, c, g, or t
  misc_feature (249)..(249): n is a, c, g, or t
  misc_feature (255)..(256): n is a, c, g, or t
  misc_feature (272)..(275): n is a, c, g, or t
  misc_feature (283)..(284): n is a, c, g, or t
  misc_feature (286)..(289): n is a, c, g, or t
  misc_feature (297)..(304): n is a, c, g, or t
  misc_feature (306)..(320): n is a, c, g, or t
  misc_feature (322)..(331): n is a, c, g, or t
  misc_feature (333)..(340): n is a, c, g, or t
  misc_feature (342)..(391): n is a, c, g, or t
  misc_feature (393)..(417): n is a, c, g, or t
  misc_feature (422)..(431): n is a, c, g, or t
  misc_feature (434)..(441): n is a, c, g, or t
  misc_feature (445)..(446): n is a, c, g, or t
  misc_feature (448)..(449): n is a, c, g, or t
  misc_feature (457)..(479): n is a, c, g, or t
  misc_feature (481)..(489): n is a, c, g, or t
  misc_feature (494)..(499): n is a, c, g, or t
  misc_feature (502)..(502): n is a, c, g, or t
  misc_feature (504)..(504): n is a, c, g, or t
  misc_feature (509)..(519): n is a, c, g, or t
  misc_feature (521)..(521): n is a, c, g, or t
  misc_feature (527)..(536): n is a, c, g, or t
  misc_feature (538)..(541): n is a, c, g, or t
  misc_feature (543)..(544): n is a, c, g, or t
  misc_feature (546)..(546): n is a, c, g, or t
  misc_feature (548)..(558): n is a, c, g, or t
  misc_feature (560)..(560): n is a, c, g, or t
  misc_feature (562)..(562): n is a, c, g, or t
  misc_feature (564)..(564): n is a, c, g, or t
  misc_feature (566)..(571): n is a, c, g, or t
  misc_feature (573)..(573): n is a, c, g, or t
  misc_feature (578)..(582): n is a, c, g, or t
  misc_feature (584)..(589): n is a, c, g, or t
  misc_feature (598)..(598): n is a, c, g, or t
  misc_feature (601)..(602): n is a, c, g, or t
  misc_feature (610)..(613): n is a, c, g, or t
  misc_feature (615)..(617): n is a, c, g, or t
  misc_feature (620)..(626): n is a, c, g, or t
  misc_feature (628)..(636): n is a, c, g, or t
  misc_feature (638)..(650): n is a, c, g, or t
cccccnncnccnccccccccccnnncnccccccnnncncnccccnnccccccccnnccccnncncncccnncccccccncccccccncccccnnccccccccnccnnnncnccccccccccccncnccccccccccccccnccccncnccccccccccccnccccnnccnnccccnnccccccccccccnncccnccccnnccnncccccccccnnnccccccccccncncnnnncncccccccccccncccccnncccccccccccccccnnnncccccccnncnnnncccccccnnnnnnnncnnnnnnnnnnnnnnncnnnnnnnnnncnnnnnnnncnnnnnnnnnnnnnnnnnnnnnnnnnnnnnnnnnnnnnnnnnnnnnnnnnngnnnnnnnnnnnnnnnnnnnnnnnnnaaaannnnnnnnnnccnnnnnnnntttnncnncccccccnnnnnnnnnnnnnnnnnnnnnnncnnnnnnnnnccccnnnnnnccncnccccnnnnnnnnnnncnggggcnnnnnnnnnncnnnncnncncnnnnnnnnnnncncncncnnnnnncnccccnnnnncnnnnnnggccccccnccnncccccccnnnncnnnccnnnnnnncnnnnnnnnncnnnnnnnnnnnnntttgcccgtgtaggccaatgcacctcccccaccccccaccctcccatgtccacagtgggtcgtgtgttcctggacagagaaacagtccacactggggcctgcgggacacatatagcagcatattttgctcttaaccccacccacctttttaatcacactagattttaagatcaatccctttttgaaacaactcacggagaaaaccagaacataaatggcctcctgccagctccggcgtctctctgtggtctgccttagtgggccaagtccaaatgcagagaaggcctttcccttccgcgcctgccccatcgggctcgctgacgaggaagcgctgtccctgtgatgaggttctctctcagagagtcttggaaaagagaccacttgctcttgtttaaaataaatttggacgtgatttttccatgcagcatctggtgtgaataaaacagcagttgactgataaaaaaaaaaaaaaaaaaaaaaa

SEQ ID NO: 6628 - DNA, 4970 bp, Homo sapiens
  misc_feature (1798)..(1813): n is a, c, g, or t
  misc_feature (3767)..(3781): n is a, c, g, or t
gacggcgccagcagccagcccgaggacgcgagcggcaggtgtgcacagaggttctccactttgttttctgaactcgcggtcaggatggttttctctgtcaggcagtgtggccatgttggcagaactgaagaagttttactgacgttcaagatattccttgtcatcatttgtcttcatgtcgttctggtaacatccctggaagaagatactgataattccagtttgtcaccaccacctgctaaattatctgttgtcagttttgccccctcctccaatgaggttgaaacaacaagcctcaatgatgttactttaagcttactcccttcaaacgaaacagaaaaaactaaaatcactatagtaaaaaccttcaatgcttcaggcgtcaaaccccagagaaatatctgcaatttgtcatctatttgcaatgactcagcattttttagaggtgagatcatgtttcaatatgataaagaaagcactgttccccagaatcaacatataacgaatggcaccttaactggagtcctgtctctaagtgaattaaaacgctcagagctcaacaaaaccctgcaaaccctaagtgagacttactttataatgtgtgctacagcagaggcccaaagcacattaaattgtacattcacaataaaactgaataatacaatgaatgcatgtgctgcaatagccgctttggaaagagtaaagattcgaccaatggaacactgctgctgttctgtcaggataccctgcccttcctccccagaagagttgggaaagcttcagtgtgacctgcaggatcccattgtctgtcttgctgaccatccacgtggcccaccattttcttccagccaatccatcccagtggtgcctcgggccactgtgctttcccaggtccccaaagctacctcttttgctgagcctccagattattcacctgtgacccacaatgttccctctccaataggggagattcaacccctttcaccccagccttcagctcccatagcttccagccctgccattgacatgcccccacagtctgaaacgatctcttcccctatgccccaaacccatgtctccggcaccccacctcctgtgaaagcctcattttcctctcccaccgtgtctgcccctgcgaatgtcaacactaccagcgcacctcctgtccagacagacatcgtcaacaccagcagtatttctgatcttgcagaaccaagtgttgcagatggagaaggctctgtccttgggcagcctggagcctaacctcgcaggagaaatgatcaaccaagtcagcagactccttcattccccgcctgacatgctggcccctctggctcaaagattgctgaaagtagtggatgacattggcctacagctgaacttttcaaacacgactataagtctaacctccccttctttggctctggctgtgatcagagtgaatgccagtagtttcaacacaactacctttgtggcccaagaccctgcaaatcttcaggtttctctggaaacccaagctcctgagaacagtattggcacaattactcttccttcatcgctgatgaataatttaccagctcatgacatggagctagcttccagggttcagttcaatttttttgaaacacctgctttgtttcaggatccttccctggagaacctctctctgatcagctacgtcatatcatcgagtgttgcaaacctgaccgtcaggaacttgacaagaaacgtgacagtcacattaaagcacatcaacccgagccaggatgagttaacagtgagatgtgtattttgggannnnnnnnnnnnnnnnggcagaggaggctggtcagacaatggctgctctgtcaaagacaggagattgaatgaaaccatctgtacctgtagccatctaacaagcttcggcgttctgctggacctatctaggacatctgtgctgcctgctcaaatgatggctctgacgttcattacatatattggttgtgggctttcatcaatttttctgtcagtgactcttgtaacctacatagcttttgaaaagatccggagggattacccttccaaaatcctcatccagctgtgtgctgctctgcttctgctgaacctggtcttcctcctggactcgtggattgctctgtataagatgcaaggcctctgcatctcagtggctgtatttcttcattattttctcttggtctcattcacatggatgggcctagaagcattccatatgtacctggcccttgtcaaagtatttaatacttacatccgaaaatacatccttaaattctgcattgtcggttggggggtaccagctgtggttgtgaccatcatcctgactatatccccagataactatgggcttggatcctatgggaaattccccaatggttcaccggatgacttctgctggatcaacaacaatgcagtattctacattacggtggtgggatatttctgtgtgatatttttgctgaacgtcagcatgttcattgtggtcctggttcagctctgtcgaattaaaaagaagaagcaactgggagcccagcgaaaaaccagtattcaagacctcaggagtatcgctggccttacatttttactgggaataacttggggctttgccttctttgcctggggaccagttaacgtgaccttcatgtatctgtttgccatctttaataccttacaaggatttttcatattcatcttttactgtgtggccaaagaaaatgtcaggaagcaatggaggcggtatctttgttgtggaaagttacggctggctgaaaattctgactggagtaaaactgctactaatggtttaaagaagcagactgtaaaccaaggagtgtccagctcttcaaattccttacagtcaagcagtaactccactaactccaccacactgctagtgaataatgattgctcagtacacgcaagcgggaatggaaatgcttctacagagaggaatggggtctcttttagtgttcagaatggagatgtgtgccttcacgatttcactggaaaacagcacatgtttaacgagaaggaagattcctgcaatgggaaaggccgtatggctctcagaaggacttcaaagcggggaagcttacactttattgagcaaatgtgattcctttcttctaaaatcaaagcatgatgcttgacagtgtgaaatgtccaattttaccttttacacaatgtgagatgtatgaaaatcaactcattttattctcggcaacatctggagaagcataagctaattaagggcgatgattattattacaagaagaaaccaagacattacaccatggtttttagacatttctgatttggtttcttatctttcattttataagaaggttggttttaaacaatacactaagaatgactcctataaagaaaacaaaaaaaggtagtgaactttcagctaccttttaaagaggctaagttatctttgataacatcatataaagcaactgttgacttcagcctgttggtgagtttagttgtgcatgcctttgttgtatataagctaaattctagtgacccatgtgtcaaaaatcttacttctacatttttttgtatttattttctactgtgtaaatgtattcctttgtagaatcatggttgttttgtctcacgtgataattcagaaaatccttgctcgttccgcaaatcctaaagctccttttggagatgatataggatgtgaaatacagaaacctcagtgaaatcaagaaataatgatcccagccagactgagaaannnnnnnnnnnnnnngccacagttagctcatacagtgcctttgagcaagttaggaaaagatgcccccactgggcagacacagccctatgggtcatggtttgacaaacagagtgagagaccatattttagccccactcaccctcttgggtgcacgacctgtacagccaaacacagcatccaatatgaatacccatcccctgaccgcatccccagtagtcagattatagaatctgcaccaagatgtttagctttataccttggccacagagagggatgaactgtcatccagaccatgtgtcaggaaaattgtgaacgtagatgaggtacatacactgccgcttctcaaatccccagagcctttaggaacaggagagtagactaggattccttctcttaaaaaggtacatatatatggaaaaaaatcatattgccgttctttaaaaggcaactgcatggtacattgttgattgttatgactggtacactctggcccagccagagctataattgttttttaaatgtgtcttgaagaatgcacagtgacaaggggagtagctattgggaacagggaactgtcctacactgctattgttgctacatgtatcgagccttgattgctcctagttatatacagggtctatcttgcttcctacctacatctgcttggagctgtgggctcacgtagatccttattaggaacatttcaaaccccttttagttaagtctttcactaaggttctcttgcatatatttcaagtgaatgttggatctcagactaaccatagtaataatacacatttctgtgagtgctgacttgtctttgcaatatttcttttctgatttatttaattttcttgtatttatatgttaaaatcaaaaatgttaaaatcaatgaaataaatttgcagttaagatctttaaaaaaaataattttcacaaagaaaaaacatctgcagtctctttccctggtggcctggcatggaagtggtgtaggacatgctgattaagacaaacacaattggctgggcatggtggctcacacctgtaatcccagcactttgggaggctgacgcaggtggattgcttgagtgcaggagttggagaccagcccgggcagcacagggagacccctgtctctacaaaaaatacaaaaattagctgggcatggtggcacgcccacctgtaattccagctacccgggagg

SEQ ID NO: 6629 - DNA, 1459 bp, Homo sapiens
ctgcgcttgagcggggggacaaccgttgctgggtgtcccagggcctgaggcaggacggtactccgctgacaccttccctttcggccttgaggttcccagcctggtggccccaggacgttccggtcgcatggcagagtgctacggacgacgcctatgaagcccttagtccttctagttgcgcttttgctatggccttcgtctgtgccggcttatccgagcataactgtgacacctgatgaagagcaaaacttgaatcattatatacaagttttagagaacctagtacgaagtgttccctctggggagccaggtcgtgagaaaaaatctaactctccaaaacatgtttattctatagcatcaaagggatcaaaatttaaggagctagttacacatggagacgcttcaactgagaatgatgttttaaccaatcctatcagtgaagaaactacaactttccctacaggaggcttcacaccggaaataggaaagaaaaaacacacggaaagtaccccattctggtcgatcaaaccaaacaatgtttccattgttttgcatgcagaggaaccttatattgaaaatgaagagccagagccagagccggagccagctgcaaaacaaactgaggcaccaagaatgttgccagttgttactgaatcatctacaagtccatatgttacctcatacaagtcacctgtcaccactttagataagagcactggcattgggatctctacagaatcagaagatgttcctcagctctcaggtgaaactgcgatagaaaaacccgaagagtttggaaagcacccagagagttggaataatgatgacattttgaaaaaaattttagatattaattcacaagtgcaacaggcacttcttagtgacaccagcaacccagcatatagagaagatattgaagcctctaaagatcacctaaaacgaagccttgctctagcagcagcagcagaacataaattaaaaacaatgtataagtcccagttattgccagtaggacgaacaagtaataaaattgatgacatcgaaactgttattaacatgctgtgtaattctagatctaaactctatgaatatttagatattaaatgtgttccaccagagatgagagaaaaagctgctacagtattcaatacattaaaaaatatgtgtagatcaaggagagtcacagccttattaaaagtttattaaacaataatataaaaattttaaacctacttgatattccataacaaagctgatttaagcaaactgcattttttcacaggagaaataatcatattcgtaatttcaaaagttgtataaaaatattttctattgtagttcaaatgtgccaacatctttatgtgtcatgtgttatgaacaattttcatatgcactaaaaacctaatttaaaataaaattttggttcagtaaaaaaaaaaaaaaaaaaaaaaaaaaaaaa

SEQ ID NO: 6630 - DNA, 3031 bp, Homo sapiens
  misc_feature (1909)..(1926): n is a, c, g, or t
gtcaggcactgccctcgaggtcagatggggtggggctggatactggccatgaggattttttcaagagctgggttaatagtgagacgggcggacaccagatggctcgggctaagaagtaagtgggcggtgggaagctagaagccgtggtgtagacctactttgagaggttgggctgttcagacagggagaaagttcacagtttgaggaggtagataggtcaaaggaagagggtttgcttgtttttgagattggggcatcctgaacgttctcccaggccaagtgagaagaaaccagaagaggaacatgtcacccaaatgtgctgaaacagcccagcagctgcgctgcctcacagaaaatgtgcagaggcccctctgtcccaccatgcctgcctggggacggccttcactcgggctactcagggtttccccagcctgccaacccaagggtggcaggagctgtgggtgctcccagccccttctcaaggttggtctgtgggtagaaatgtgggctgcctcggggcgtcacagctacaaatgcataccagccctcagaaccacattcctgctccccagccctttcctccgcacccccatgcagaagcgcggccgccagctcacaaaggatagggagggatattgctcttggcatttgatgggaagcatctgctgcatcccattggggtgttgcccaggatggattggaaaagagttggcaggaaggctgagctctgtgctcacaacctggcttggtggtggccgaggagcttggcaggagcagagtgcaggacctgggaactgggggttggtgcatgtgtgcacgcacgtgtgtgtgtgtgtgcgtgcgtgctgggtgggtagggaggaagctgtgaaaccacatcccctcctctctgctgctgtgttgctgtgtgtttcagcagcacgtgggtgtcaccacacttcctagcaggtgtcaacctccaagactgttctgggctcttctcccagttggctgagttggaggtgggagtcccaactgtcccctgtggcttccagagtgggaccttgctgtgggataggctggccaatggtgctccctcccctgtgacccttctgttgggtgggtcacgaggaaggactgtgggtgttgcccacagacaggtggacatgtggcaaggacaccttgggaccttctttctgacgccccttgaagggggcactttctcagctttgagatgagtctctgtggatgtgggaagttcactatctcaagagcagcagccttggaaaatccaacacagaaccccgagtaggggcgggaaggggtcctgtcccgctcactggctgcctggcagagttctgcaaggaagcgcctgtgttgctgtgggcggaggaatggactgagggctacattcgcttcctgttgccgctgtaactgcttatcacaaactcagtggcttaaagcaacagaggctccttcctttacagtgctaagggtcagaagccgatcagtctcaccggactaaagtcaaggtgttggcagaatccattcctgcctcttccagctttgggtgggaggctctgctggagttccttggcttgcggctgcatccctccagcctctgcctccatcctcctacagcctcctccttctctgcagtcagatctccctctgccttcctcttttttttttttgagacggagtcacccaggctggagtgcagtggcacaatcttggctcactgcagcctccgcctcctgggttcaagcgattctcctgcctcagcttcccgagtagctgggattacaggcatgtgctactacacctggctaatttttgtatttttagtagagacagggttttgccatgttggccaggctggtcttgaactcctgacctcaggtgatctgcctgcctcagcctcccaaannnnnnnnnnnnnnnnnntgagccatcacacctggcctgcctccctcttaaaggacgcttgtgatttggggcccacctgggtaatctcttcatctcaacatcttcagttacatctacagagtccctgttgccacatgaggtaacacagtttgggaagggagagttattcagcctaccctaggggcctgtggtgtatctcagggcccttctgattttaagatataaagcaagaaaacaaactggctcaaggggaaaaaaggacacgttgaattctgttgctttaaatgtatatttttttattgtgctaaaatgcacagaacataaaatttgccattagtaacactgagtacattcacagtgtcgtgcaaccatcagcactgtctagcgccagaactttttcatcaccccaaagggaaaccccgtatccatgaaggactcactccccattcgccctctccagcccttggcagccaccagaatgctttctgtctccataaattcatttttaataagtgcaattctgtgtgactttaaaataaataaacatgagcacgatgagttgcttattggaaggatatccatgcggggaggccggcgtgtggagtgcgtaggcctccggacgggcaggagttgaaggggcgtggatgtgccgccctctcctccccttgctctttccttggggtcactgcctgagtatccctctttgcaaatggccccaaataatgtctcagcccccacgtctgcatcgcctcctagcttcaggaccctccaccaaaaaacattccaagcttcagactcactcctgggaaaattccaatggcctcactctcccttttgagccagccagatcccatggcctgtggcgggctgcctttgagtcctgagcacctgtgagctagggaagcaggacaggcacacccagggaaggggaagagtcgtcgtcagtcacagtaattgatatctttggaatcgtctaagagatacttagcgtgtgcctaaaacattcatttctttttttgtttgttttttgagacgaagtctcgctctgtcgcccaggctggagtgcagtggcgtgatctcagctcaccgcaacctcctcctcccgggttcaagcgattctcct

SEQ ID NO: 6631 - DNA, 788 bp, Homo sapiens
tctgaacaattacattatttaatatttatggaaaagttaaattaaaagaaatacacataacagtgtcatggctagcctttgacattctcttaaaaaattaaagcacaacatactgaacaattacattattctaatgtaaggaagtgtgtgaagagcacaaagtcagaaatggccccagtggcactaagggttcatctggttgtagatgggcttgtacttgagtcctggcttgtctgaggatcagttccaacagttagtgattgaaactggacaccctgatggacttcattaaacctgcatctctgcatttctccagggcattttcacagtgtaagttcaggctgctctcatcttccacgctggtcagagccactcagctcaactcttggttaaacatcagaatggccaaggttccttcctcatgtccctgtacacgccaccaaaatgatgcagaatttttgcttcttagttcagctaaatcccggttcttgtcagggaatcacttaacacagccttttgacagttggttagagtaggttcaaaacacgtttttgtgcaaattggatggtttagaacaacaaaagaggattgtattctcttccagttctggagacttgagtcaaaaatccagttgtttatagggccatgctccccatgaaagctctcgggaagatggttcccttgcctttgactagcttttggtggctcccagtagcagttggcatgccttggcttatagttgaatcacttcaatctctgccttcatggttacatggctttctcccgct

SEQ ID NO: 6632 - DNA, 2827 bp, Homo sapiens
aggtgatgcagcgaccctgcacctgcgacttcctgcacgggccgcgcacgcagcgccgcgctgccgcgcagatcgcgcaggcactgctgggcgccgaggagcgcaaagtggaaatcgccttctaccggaaagatgggagctgcttcctatgtctggtggatgtggtgcccgtgaagaacgaggatggggctgtcatcatgttcatcctcaatttcgaggtggtgatggagaaggacatggtggtggacgtggacctgacgcccgcggcacccagcagcgagtcgctggccctggacgaagtgacagccatggacaaccacgtggcagggctcgggcccgcggaggagcggcgtgcgctggtgggtcccggctctccgccccgcagcgcgcccggccagctcccatcgccccgggcgcacagcctcaaccccgacgcctcgggctccagctgcagcctggcccggacgcgctcccgagaaagctgcgccagcgtgcgccgcgcctcgtcggccgacgacatcgaggccatgcgcgccggggtgctgcccccgccaccgcgccacgccagcaccggggccatgcacccactgcgcagcggcttgctcaactccacctcggactccgacctcgtgcgctaccgcaccattagcaagattccccaaatcaccctcaactttgtggacctcaagggcgaccccttcttggcttcgcccaccagtgaccgtgagatcatagcacctaagataaaggagcgaacccacaatgtcactgagaaggtcacccaggtcctgtccctgggcgccgacgtgctgcctgagtacaagctgcaggcaccgcgcatccaccgctggaccatcctgcattacagccccttcaaggccgtgtgggactggctcatcctgctgctggtcatctacacggctgtcttcacaccctactcggctgccttcctgctgaaggagacggaagaaggcccgcctgctaccgagtgtggctacgcctgccagccgctggctgtggtggacctcatcgtggacatcatgttcattgtggacatcctcatcaacttccgcaccacctacgtcaatgccaacgaggaggtggtcagccaccccggccgcatcgccgtccactacttcaagggctggttcctcatcgacatggtggccgccatccccttcgacctgctcatcttcggctctggctctgaggagctgatcgggctgctgaagactgcgcggctgctgcggctggtgcgcgtggcgcggaagctggatcgctactcagagtacggcgcggccgtgctgttcttgctcatgtgcacctttgcgctcatcgcgcactggctagcctgcatctggtacgccatcggcaacatggagcagccacacatggactcacgcatcggctggctgcacaacctgggcgaccagataggcaaaccctacaacagcagcggcctgggcggcccctccatcaaggacaagtatgtgacggcgctctacttcaccttcagcagcctcaccagtgtgggcttcggcaacgtctctcccaacaccaactcagagaagatcttctccatctgcgtcatgctcattggctccctcatgtatgctagcatcttcggcaacgtgtcggccatcatccagcggctgtactcgggcacagcccgctaccacacacagatgctgcgggtgcgggagttcatccgcttccaccagatccccaatcccctgcgccagcgcctcgaggagtacttccagcacgcctggtcctacaccaacggcatcgacatgaacgcggtgctgaagggcttccctgagtgcctgcaggctgacatctgcctgcacctgaaccgctcactgctgcagcactgcaaacccttccgaggggccaccaagggctgccttcgggccctggccatgaagttcaagaccacacatgcaccgccaggggacacactggtgcatgctggggacctgctcaccgccctgtacttcatctcccggggctccatcgagatcctgcggggcgacgtcgtcgtggccatcctgggtatggggtggggggcgggcactggactggaaatgccctctgcagcctcaagaggtgcgagccttctgaatatgcagtcactggggctgtggacctgggactgcctgcagggtcactgggctcctttaattcacctaaactcaggccctccaagcggggccatggagaggagccccacgtggggtgaggctgctgaactctggggttcccacattctccttcccttcaggatccgccacaaacagacactttttgcttccttaaagtaggatcaaatctagatcctctagcctgggcagtagaggaagaaatgctagcctggaagctcggcatttggtttcactaagggccatgtggttccctgcagcctcatgcctggccccttgacacatccaaagcaaagggagtcctgccccctccccccacttcctttctaccctgcctgtgcacagtgggtgggttggtgtgtctggacactgaggacttcctccccctttgcctgtccttccctcggccctgtgtgcctcagggcagatatagcaagctctttcgaccatagttgatggtaggacattttagactttgtttctcagctctgtacaaacacaaatacacacccccacaaaactaaaatcaaagtttcactacataacactgggccttactgcatgtggttcattctagcatttctgttctgtgctgtgctaagctatactactgtatgttctttcagtaaaaaaaaaaaaaaaaaaaaaaaaaaaaaagctcgtgc

SEQ ID NO: 6633 - DNA, 3719 bp, Homo sapiens
  misc_feature (506)..(520): n is a, c, g, or t
  misc_feature (859)..(899): n is a, c, g, or t
  misc_feature (3187)..(3206): n is a, c, g, or t
  misc_feature (3634)..(3634): n is a, c, g, or t
aactccaggaatttgtggcggagagggcaaataactgcggctctcccggcgccccgatgctcgcaccatgtcgaggcgcaagcaggcgaaaccccagcacatcaactcggaggaggaccagggcgagcagcagccgcagcagcagaccccggagtttgcagatgcggccccagcggcgcccgcggcgggggagctgggtgctccagtgaaccacccagggaatgacgaggtggcgagtgaggatgaagccacagtaaagcggcttcgtcgggaggagacgcacgtctgtgagaaatgctgtgcggagttcttcagcatctctgagttcctggaacataagaaaaattgcactaaaaatccacctgtcctcatcatgaatgacagcgaggggcctgtgccttcagaagacttctccggagctgtactgagccaccagcccaccagtcccggcagtaaggactgtcacagggagaatggcggcagctcagaggacatgaaggagaagnnnnnnnnnnnnnnngtggtgtacctaaagacagagacagccctgccccaccccccaggacataagctatttagccaaaggcaaagtggccaacactaacgtgaccttgcaggcactacggggcaccaaggtggcggtgaatcagcggagcgcggatgcactccctgcccccgtgcctggtgccaacagcatcccgtgggtcctcgagcagatcttgtgtctgcagcagcagcagctacagcagatccagctcaccgagcagatccgcatccaggtgaacatgtgggcctcccacgccctccactcaagcggggcaggggccgacactctgaagaccttgggcagccacatgtnnnnnnnnnnnnnnnnnnnnnnnnnnnnnnnnnnnnnnnnngctggaagccaaggtctgtctctggatgccttgaaacaagccaagctacctcacgccaacatcccttctgccaccagctccctgtccccagggctggcacccttcactctgaagccggatgggacccgggtgctcccgaacgtcatgtcccgcctcccgagcgctttgcttcctcaggccccgggctcggtgctcttccagagccctttctccactgtggcgctagacacatccaagaaagggaaggggaagccaccgaacatctccgcggtggatgtcaaacccaaagacgaggcggccctctacaagcacaagtgtaagtactgtagcaaggtttttgggactgatagctccttgcagatccacctccgctcccacactggagagagacccttcgtgtgctctgtctgtggtcatcgcttcaccaccaagggcaacctcaaggtgcactttcaccgacatccccaggtgaaggcaaacccccagctgtttgccgagttccaggacaaagtggcggccggcaatggcatcccctatgcactctctgtacctgaccccatagatgaaccgagtctttctttagacagcaaacctgtccttgtaaccacctctgtagggctacctcagaatctttcttcggggactaatcccaaggacctcacgggtggctccttgcccggtgacctgcagcctgggccttctccagaaagtgagggtggacccacactccctggggtgggaccaaactataattccccaagggctggtggcttccaagggagtgggacccctgagccagggtcagagaccctgaaattgcagcagttggtggagaacattgacaaggccaccactgatcccaacgaatgtctcatttgccaccgagtcttaagctgtcagagctccctcaagatgcattatcgcacccacaccggggagagaccgttccagtgtaagatctgtggccgagccttttctaccaaaggtaacctgaagacacaccttggggttcaccgaaccaacacatccattaagacgcagcattcgtgccccatctgccagaagaagttcactaatgccgtgatgctgcagcaacatattcggatgcacatgggcggtcagattcccaacacgcccctgccagagaatccctgtgactttacgggttctgagccaatgaccgtgggtgagaacggcagcaccggcgctatctgccatgatgatgtcatcgaaagcatcgatgtagaggaagtcagctcccaggaggctcccagcagctcctccaaggtccccacgcctcttcccagcatccactcggcatcacccacgctagggtttgccatgatggcttccttagatgccccagggaaagtgggtcctgccccttttaacctgcagcgccagggcagcagagaaaacggttccgtggagagcgatggcttgaccaacgactcatcctcgctgatgggagaccaggagtatcagagccgaagcccagatatcctggaaaccacatccttccaggcactctccccggccaatagtcaagccgaaagcatcaagtcaaagtctcccgatgctgggagcaaagcagagagctccgagaacagccgcactgagatggaaggtcggagcagtctcccttccacgtttatccgagccccgccgacctatgtcaaggttgaagttcctggcacatttgtgggaccctcgacattgtccccagggatgacccctttgttagcagcccagccacgccgacaggccaagcaacatggctgcacacggtgtgggaagaacttctcgtctgctagcgctcttcagatccacgagcggactcacactggagagaagccttttgtgtgcaacatttgtgggcgagcttttaccaccaaaggcaacttaaaggttcactacatgacacacggggcgaacaataactcagcccgccgtggaaggaagttggccatcgagaacaccatggctctgttaggtacggacggaaaaagagtctcagaaatctttcccaaggaaatcctggccccttcagtgaatgtggaccctgttgtgtggaaccagtacaccagcatgctcaatggcggtctggccgtgaagaccaatgagatctctgtgatccagagtgggggggttcctaccctcccggtttccttgggggccacctccgttgtgaataacgccactgtctccaagatggatggctcccagtcgggtatcagtgcagatgtggaaaaaccaagtgctactgacggcgttcccaaacaccagtnnnnnnnnnnnnnnnnnnnnaacaagattgcggtcagctaagggagaacttgcgtggaaggagcaatgcagacacagtgaaatctctagaatctgctttgttttgtaagaactcatctcctcctgttttctttttcttactgatatgcaaatgatgtttactacgttggttgtgaccacaacctcaggcaagtgctacaatcacgattgttgctatgctgctttgcaaaaagttgaaaaaataaaacaaaaggggcgggccgcctccaaaatataccccttaaaggggtcccaacctttacgcgaccccccgtttttctttgcacaaaagggggccccctattagtggcgccgcccctcattaaccccccgcccttgtggcccgcccctcttgattatacctcctgcgagctgggggtaacacctcgatcagtccttcgcgcatatanttttctcgctccgcacaattgttctcccctcccgccgagtcgccgcgagcgcagcttgtgtgccggcgtatcccctccacctccc

SEQ ID NO: 6634 - DNA, 2244 bp, Homo sapiens
acatgcttccattgcttgattcctcgaaaagggcggggactctgggcagcggttgtggagtgccgcgggtccacagtgctgcactgagcagagaggaaggggcgtcccgggatatttggaggataaaggtgtgggcaagggtgatgaccacacctgccggctccggcagcggcttcggctccgtgtcctggtggggcctgtccccggcgctggacctgcaggctgaaagggatgctacggtggacgctctgccaaccaccatggtgccccagccagctgtcatcttgccaggtcctcctgtggacccagactcccaggccgatacagtgcacagcaaccccgagctagatgtgctgcttctgggctctgtggatggacggcacctgctgcggaccctgtcccgagcgaagttctggcctcgcaggaggttcaacttctttgtgctggagaataatctggaagctgtggcccgacacatgctgatcttcagcctagccctggaggaaccggagaagatggggctgcaagagcgaagcgagaccttcctggaagtgtgggggaacgcgctgctgcgcccgccagtggccgccttcgtgcgtgcccaggccgacctgctggcgcacctggtccccgagcccgaccgcctggaggaacagctgccctggctcagcctccgcgccctcaagttccgcgagcgggatgccctggaggccgtattccgcttctgggctggcggcgagaaagggccccaggcgttccccatgagccgcctctgggactcgcgcctgcgccactacctgggctcccgctacgacgcccggcgcggtgtcagcgactgggacctgcgcatgaagctgcatgaccgcggggctcaagtcattcacccccaggagttccgacgctggcgggacacaggcgtcgcctttgagctcagggactccagcgcctatcatgtgcccaaccggaccctggcgtccggtcgcctcctgagctaccgtggggagcgcgtggcagcgcgcgggtactggggggacatcgccacggggcccttcgtggccttcggcatcgaagcggacgacgagagcctcctgcggacgagcaacggccagccagtcaagacggccggggagatcactcaacacaacgtgacggagctgctccgcgacgtggccgcctgggggcgcgcgagagccaccgggggggacctggaggagcagcagcacgcggagggaagcccggagccagggactccagccccgaccccggaatctttcaccgtccacttcctgccgctcaattctgctcagactctccaccacaagagctgctacaacggccgattccagctcctctatgtggcctgtggtatggtccatcttctcatccctgagcttggggcctgtgtggcacccggagggaacttgattgtggaattagcccggtacctggtggacgtgcggcaggagcagctgcagggattcaacacccgggtcagggagctagctcaggcagctggatttgctccacagaccggggccaggccttcagagaccttcgcacgtttctgcaagtcccaggaatcagctctgggcaacactgtcccagctgtggaacccggaactccgccccttgacatcctggcccagcctcttgaagccagcaacccagcccttgagggcctgacccagcctctgcagggtgggaccccacactgtgagccctgccagctgccctctgagtctccaggttcactctcagaggttctggctcagcctcagggggccttggctccgcccaactgtgagtcagactccaaaactggagtctgacccaacccctagacaccccttatctccaacttccaaagtcaggttggaagatgagaacccgctgataccattctaagtccgctgctagagtcctcaattttattctaatcattcccactcagtacccgccacccccaccccgggagtgttggtagactttcaaattccatttctgagattctatggtctattcctagaattctagattgttctctcagaattccaaattccacttctgaggctctaagcccagcctaggatctgacactgagtctcaggcccttgactttggcccccttgttcccaggcaccctgtggctgactaggggctggggtgtctcctcaccagggcctggtcagcacccagatggttcaagtaaagcaagttgtgtccaccaaaaaaaaaaaaaaaaaa

SEQ ID NO: 6635 - DNA, 5195 bp, Homo sapiens
ttccagacactgtgtatgaatttgcagtccgtatttcacagggtgcaagagatggcaaatggagtacgtcagtcttccaaagaacaccagaatcttgccctaacacagtcctgaaaacttgaacgtctggccagtcaatggcaaaacctaccagttgtcgctgcatcttgggatgcgcctaccagagactgaggggcaagtgaacagaataccattctttcataacgccccggatctcaaaaacattgggagccaagtccctcaactatcctggagacactacttctgccctgggaggatggtctggcagcctggggaaacgctatcttttcaaaatccgggccacaaacaggagaggcctgtggacctcactccaaagccttcattgtcgctatgccaacaaccagtaaggcggatgttcagcagaacacggaggacaatgggaaacccgaaaaacctgagccttcctcaccttctcccagagctccagcttcctcccaacacccctctgtgcctgcttctccccaagggagaaatgccaaggaccttcttcttgacttgaagaacaaaatattggctaatggtggggcgccccgaaaaccccagcttcgcgccaagaaggcagaggagctggatcttcagtcgacagaaatcactggggaggaggagctgggttcccgggaggactcgcccatgtcaccctcagacacccaagaccagaaacggaccctgaggccgccaagtagacacggccactcggtggttgctcccggcaggactgcagtgagggcccggatgccagcgctgccccgaagggaaggcgtagataagcctggcttttccctggccacgcagccccgcccaggggcgcccccctcggcttcggcctctcctgcccaccacgcgtccacccagggcacctctcatcgtccttccctgcctgccagcttgaatgacaacgacttggtggactcagacgaagatgagcgcgctgtgggctccctccaccccaagggcgccttcgcccagccccggccagccctgtcccccagccgccagtccccgtccagcgttctccgcgacagaagctctgtgcaccccggcgcaaagccagcctcgccggcgcggaggaccccccattcaggggccgcagaggaagattccagtgcctcagccccaccctcaagactttctccaccccatgggggatcatctcggctgctgcccacccagccacacctgagctctccactttccaagggcgggaaggatggtgaggacgccccagccaccaactccaatgcgccatcacggtccaccatgtcctcctccgtctcttctcatctctcgtccaggacgcaggtctctgagggagcggaggcttctgatggtgaaagccacggtgacggcgatagggaagacggcggaaggcaggcggaggccacggcccagacgctgcgggcccggcctgcctctggacacttccatttgctcagacacaaaccctttgctgccaacgggaggtctccaagcaggttcagcattgggcggggacctcggctgcagccctccagctccccacagtcgactgtgccctcccgagcccaccccagggttccctctcactctgattcccaccctaagcttagctcaggtatccatggagacgaggaggatgagaagccgcttcctgccaccgttgtcaatgaccacgtgccttcctcctccaggcagcccatctcccggggctgggaggacttaaggagaagcccgcagagaggggccagcctgcatcggaaggaacccatcccagagaaccccaaatccacaggggcagatacacatcctcagggcaagtactcctccctggcctccaaggctcaggatgttcaacagagcacagacgcggacacggagggtcattctcccaaagcacagccagggtccacagaccgccacgcgtcccctgctcgtcctcccgcagcacggtcacagcagcatcccagtgttcccagaaggatgacacccggccgggccccagaacagcagccccctcctcccgtcgccacgtcccagcaccacccgggaccccagagcagagacgcgggtcggtcaccttcccagcccaggctctcactgacccaggccgggcggccccgccccacgtcgcagggccgctcccactcctcctcggacccttacacggcgagctccagagggatgctccccacggccctccagaaccaggacgaggatgcccagggcagctacgacgacgacagcacagaagtcgaggcccaggatgtgcgggcccccgcgcacgccgcgcgcgccaaggaggcagctgcgtcccttcccaagcaccagcaggggcggcaaagacgccgatgggagcctcgccaaggaagagagggagcctgccatcgcgcttgcccctcgcggagggagcctggctcctgtgaagcgacctctccccccacctccaggcagctcccccagggcctcccacgtcccttcccgaccgccgcctcgcagcgctgccaccgtgagccccgtcgcgggcacccacccctggccgcggtacaccacgcgcgccccgcctggccacttctccaccaccccgatgctgtccttgcgccagaggatgatgcatgccagattccgtaaccctctctcccgacagcctgccagaccctcttacagacaaggttataatggcagaccaaatgtagaagggaaagtccttcctggtagtaatggaaaaccgaatggacagagaattatcaatggccctcaaggaacaaagtgggttgtggaccttgatcgtgggttagtattgaatgcagaaggaaggtacctccaagattcacatggaaatcctcttcggattaaactaggaggagatggtcgaaccattgtagatctggaagggacccccgtggtgagtcctgacggcctcccactctttgggcaggggcgacatggcacacctctggccaatgcccaagataagccaattttgagtcttggaggaaagccgctggtgggcttggaggtcatcaaaaaaaccacccatccccctaccactaccatgcagcccaccactactacgacgcccctgcctaccactacaaccccgaggcccaccactgccaccacccgccgcacgaccaccaggcgtccaacaaccacagtccgaaccactacgcggacaaccaccaccaccacccccaaacccaccactcccatccccacctgtccccctgggaccttggaacggcacgacgatgatggcaacctgataatgagctccaatgggatcccagagtgctacgctgaagaagatgagttctcaggcttggagactgacacggcagtacctacggaagaggcctacgttatatatgatgaagattatgaatttgagacgtcaaggccaccaaccaccactgagccttcgaccactgctaccacaccgagggtgatcccagaggaaggcgccatcagttcctttcctgaagaagaatttgatctggctggaaggaaacgatttgttgattgaaagacacaaacacatggatccatcaaggagagctgggggtgtgtttctgagcttggcatcaaggctgatggagcctccgtccagcaggaagagaccgaatgctccttacgtgacgtacctaaataaagacccatcagccccgtgctctctgactgatgcactggatcacttccaagtggacagcctagatgaaatcatccccaatgacctgaagaagagtgatctgcctccccagcatgctccccgcaacatcaccgtggtggccgtggaaggttgccactcatttgtcattgtggactgggacaaagccaccccaggagatgtggtcacaggttacttggtttacagtgcatcctatgaagacttcatcaggaacaagtggtccactcaagcttcatcagtaactcacttgcccattgagaacctaaagcccaacacgaggtattattttaaagtgcaagcacaaaatcctcatggctacggacctatcagcccttcggtctcatttgtcaccgaatcagataatcctctgcttgttgtgaggcccccaggcggtgagcctatctggatcccattcgctttcaaacatgatcccagctacacggactgccatggacggcaatatgtgaagcgcacgtggtatcgaaagttcgtgggagttgttctttgtaattcactgaggtataaaatctacctcagtgacaacctgaaagatacattctacagcattggagacagctggggaagaggtgaagaccattgccaatttgtggattcacaccttgatggaagaacagggcctcagtcctatgtagaagccctccctactattcaaggctactatcgccagtatcgtcaggagcctgtcaggtttgggaacatcggcttcggaaccccctactactatgtgggctggtacgagtgtggggtctccatccctggaaagtggtaatcacaggaccgtcatgctgcaagcttgccctgcccagccccaccaactaagtcgcactaggggctgtgagcaaagacagccagcatgctcagccccgctgccctaggtgccaggaaggtcacagatggacactggccattctggtcatctcagtctggaactcagtcccacttcttggcctggacaatgaacaggattcagttttgctgttaactttgcttctctacttttttttgtttgtttgtaatagcacatcccagagacatcagaaaccagcaactgattcagtgtgatttccagactttttaggcatgaaattcggacacttcagtatttccaggaatagcatatgcacgctgttcttgcttcatggaatgctacatgctttctgtttttctcattttggatttctccaaaactaactgaatttaagcttcaggtccctttgtatgcagtagaaaggaattattaaaaacaccaccaaagaaaataaatatatcctacttgaaatttactctatggacttacccactgctagaataaatgtatcaaatcttatttgtaaattctcaattttgatatatatatgtatatatgcatatacatatccacacttgtctgcaagaatattgattaaaattgctaaatttgtacttgttcaccagaaaaaaaaaaaaaaaa

SEQ ID NO: 6636 - DNA, 1987 bp, Homo sapiens
  misc_feature (1219)..(1222): n is a, c, g, or t
gctcagcaaggggtccgtccttctctgtcactgtctcttttgcctgttgtaattctgtctgcctctctgggactctgcctgtctcactctttctgtctgtgcctctcctcactcttgttctttctgcctgaatcacagccctcagtttttctgtcctcatgcatttgtctttgtggctctttccgtctttctgcccttgacaccatcccctctcccagtgcttcccctctgcttccagatcgcttcatgacttaggcagggaaacagaggtcagggcctccttccaggcttccctctgcatcttactgagtatgcaggtcggaagagcctcgggtcctgcctccgcgggtggcctagagccaaaggaaggcggagcccgtcggggcgggattggcccttagggccacctcataaagcctggggcgaggggcacaacggccttgggaaggagccctgctggggccgtccagtcccccagacctcacaggctcagtcgcggatctgcagtgtcatgcctgggagccctcggcccgcgccaagctgggtgctgttgctgcggctgctggcgttgctgcggcccccggggctgggtgaggcatgcagctgcgccccggcgcaccctcagcagcacatctgccactcggcacttgtgattcgggccaaaatctccagtgagaaggtagttccggccagtgcagaccctgctgacactgaaaaaatgctccggtatgaaatcaaacagataaagatgttcaaagggtttgagaaagtcaaggatgttcagtatatctatacgccttttgactcttccctctgtggtgtgaaactagaagccaacagccagaagcagtatctcttgactggtcaggtcctcagtgatggaaaagtcttcatccatctgtgcaactacatcgagccctgggaggacctgtccttggtgcagagggaaagtctgaatcatcactaccatctgaactgtggctgccaaatcaccacctgctacacagtaccctgtaccatctcggcccctaacgagtgcctctggacagactggctgttggaacgaaagctctatggttaccaggctcagcattatgtctgtatgaagcatgttgacggcacctgcagctggtaccggggccacctgcctctcaggaaggagtttgttgacatcgttcagccctagtagggaccagtgaccatcacatcccttcaagannnntgaagatcaagccaagttctccttccctgcagagctttggccattaccacctgacctcttgctgccagctaataagaagtgccaagtggacagtctggccactgtcaaggcagggaaggggccatgacttttctgccctgccctcagcctgttgcccctgcctcccaaaccccattagtctagccttgtagctgttactgcaagtgtttcttctggcttagtctgttttctaaagccaggactattccctttcctccccaggaatatgtgttttcctttgtcttaatcgatctggtaggggagaaatggcgaatgtcatacacatgagatggtatatccttgcgatgtacagtatcagaaggtggtttgacagcatcataaacaggctgactggcaggaatgaaaaaaaaaaaaaaaaaaaaaaaaaaaaaaaaaaaaaaaaaaaaaaaaaaaaaaaacacagacagaaaggagaacaaaccaccgaacaaaccacaacacaaaaccaaagaaccaaacacaaagaaaacaaccaaaacagacgcgacatgcagacataacaacacaaacagaacgagaagcgacgcaaccaatagacgcaacacacaaacaaatgggacacacaaggaagcacgaaataaaactcaaagagacaaagacgaacacacgacaccaccggggcaacaccacaaagcccctagcagcccgcatgacaaaaccatccagccaaaaacccgaaagagagaccgagcacacgggaagcca

SEQ ID NO: 6637 - DNA, 1971 bp, Homo sapiens
ggcggcgccggtgagtccgcgtgtggaagtctgtgaggcgcagaggtggggcaggccgtctggctagctaggcggctgggagcgttttcgtggcggggaacggaggttgaattgccctgcctgggctcatagggaaggaggatgtgaaggagcttgtgaaggcagaggaagattattgaataataaaatacagttttgaaaaaaatggatgaagaacctgaaagaactaagcgatgggaaggaggctatgaaagaacatgggagattcttaaagaagatgaatctggatcacttaaagctacaatagaagacattctattcaaggcaaagagaaaaagagtatttgagcaccatggacaagttcgacttggaatgatgcgccacctttatgtggtagtagatggatcaagaacaatggaagaccaagatttaaagcctaatagactgacgtgtactttaaagttgttggaatactttgtagaggaatattttgatcaaaatcctattagtcagattggaataattgtaactaagagtaaaagagctgaaaaattgactgaactttcaggaaacccaagaaaacatataacgtctttgaagaaagctgtggatatgacctgccatggagagccatctctttataattccctaagcatagctatgcagactctaaaacacatgcctggacatacaagtcgagaagtactaatcatctttagcagccttacaacttgcgatccatctaatatttatgatctaatcaagaccctaaaggcagctaaaattagagtatctgttattggattgtctgcagaagttcgcgtttgcactgtacttgctcgtgaaactggtggcacgtaccatgttattttagatgaaagccattacaaagagttgctcacacatcatgttagtcctcctcctgctagctcaagttctgaatgctcacttattcgtatgggatttcctcagcacaccattgcttctttatctgaccaggatgcaaaaccctctttcagcatggcgcatttggatggcaatactgagccagggcttacattaggaggctatttctgcccacagtgtcgggcaaagtactgtgagctacctgttgaatgtaaaatctgtggtcttactttggtgtctgctccccacttggcacggtcttaccatcatttgtttcctttggatgcttttcaagaaattcccctagaagaatataatggagaaagattttgttatggatgtcagggggaattgaaagaccaacatgtttatgtttgtgctgtgtgccaaaatgttttctgtgtggactgtgatgtttttgttcatgattctctacactgttgccctggctgtattcataagattccagctccttcaggtgtttgattccagcatgtagtatacattgtatgtgttaaaaagaaatttgcaactgtgaataaaaggacttctttagaagaagcttcatttaaaacatgaaaggataatctgacttaagaaactttttgctaagaaaaggtaatattttattaaattttaaatttgtgttgtcacagaaatacctgaaattcagtagtacttcattcaattaattttgttttctattattttgagttatactgttttcaaagtcattatgcagtatgtataaacttataagaattaaattgatgtgataattttatgtttttataattaaatatagaatctttatgatttatgttaattcattaatttagtgtaagaagaaagttaagtctgaatgtaaattcagtgtaagatgaaaatttatcaatacttatggaaattaggctgggcgctgtggctcacgcctgtaatcccagcactttgggaggctgaggtgggcggatcacttgaggtcaggagttcgagaccagccgggccagcatggtggaaaccccgttcactactaaaaatacaaggattattagccgggcctggtgg

SEQ ID NO: 6638 - DNA, 1234 bp, Homo sapiens; identical to SEQ ID NO: 6116

SEQ ID NO: 6639 - DNA, 2162 bp, Homo sapiens
  misc_feature (40)..(40): n is a, c, g, or t
ggatccagcagatgctgcctgacaagttgattcccagccntggtgaaatactactactcttggaagaagacccgcagccgaactagtgtgatggacagacaggcccggcggctggggggccgcaaggacaaagaagacagtgatgagctcgaagagggtcgaggaggcgtgagtgagggagagcccggtccagggcgtgcattcaggggccgagagggtagaggctgccagtgaaaggagaggccctgggaaaaaggaggtccaggtgtctcagtaccgccaccatcccttgcgaacccggcgtcgcccacccaagggcatgtacctgagccctgagggcctcacggcagtgtcaggaagcccggaccttgccaacctcacgctccgaggtcttgactctcagctcatctccctcaagcgccaggtacagagcatgaagcagacgaacagcagcctgcgccaagccctggagggcggtattgatccactacgccccccggaggccaacaccaagttcaactcccgctggaccacagatgagcagcttttggctgttcaagccatccgtaggtatggcaaagactttggggctattgcagaggtgattgggaacaagactctgacccaggtgaagactttctttgtgagctaccggcgccgcttcaatctggaggaggtgctgcaggaatgggaggctgagcaggatggggcccctggagccccagtccccatggaggaggctaggagaggggctccattgccagccccagccctagaggaagatgatgaggtccagactacatcggtctccacgtccgtgccccgatcagtgccccctgcgccaccaccccctccacctcccacctcgctgtcccagccacccccgctgctgaggccacctttgcccacggctcccactctgctccgacagccacccccactgcagcagggccgcttcctccagccccggctggcccccaaccagcccccaccgcctctcatccgccccgctctggctgccccccgccacagcgcccgccctggccctcagcccccacccaccctgattggagcccctctggagcccccagcaccctcactctgagccctgacgtcctccaccaaccacgggctccaggacccctttgctggccatccccaggcatctctggtgtcactgaggacagaagggactagggctctggcggggtctttgtaagaccagagtttcggacagcccagccccgccctttgggttctgcatgtgttcctggcagctgggcctgtctcctggggccatggccgggctcaggggcctttgagctggcctgagggcactttcgcttcctggccggtactggaatggctgtgtcctagtctgctggggcttggcctctgggtcctgccctttgtgtgtccggggtagtgaccttagcgtggagtggggagagggcagttgggtgtgctggctgttctcattcctctttcccttcttttagcaataagtctggggtgaggtggggagggaggctgcagggggggaggtgggcagaggggccttacagcagcagaggctggaagagaagctctgtcttcaggggccagctgggaaatgctaaggagctgagggtgcccaccaagcccaccttccagaaacttggagaaatgggggttgggaacttatgcagacatggatttatttttcaacattttttaaaaattaaaaaaaataaaatttaaaaaaaaaaaaaaaaaaaaaaaaaaaaaaaaaaaaagagggggggggggcaaaaaatatccccggagggggccccaatttacgcggttacccagtttttttgttaaaaaggggcccccataaaggggggggaataaaaaaaagccaggcacgggggccccgtggtttaaccaacggttctgccggtggaacaacccgtgttagctggggagctgcttctgagagggaccctctattcctcggcgcgggcggcccctatcttgcggcaacaaccctcttataagaaaatttagaagacctaagggcaaattattcacacttctgacgctggcttcccctggtgtctacccacacgctgataatggctgcgcgctagaaaacatcgggctaaccagagcacgacttttttgaaccactttatcag

SEQ ID NO: 6640 - DNA, 3006 bp, Homo sapiens
cctgtagtcccagctacatgggaggctgaggcaggagaagggcgtgaacccgggaagcggagcttgcagtgagccgagatggcgccactgcactccagcctgggcgacagagcgagactctgtctcaaaaaaaaaaagaactatttctcctctttcatcattttgcatctgattccccatatatcttcttctcatctcccaaccaggtatgatgcccaggcaggacccctgctggctatgtgggtggtggggggtgtgggacagggtgggtgcaagatgtcaggcggagaagagacaagagaaactcactgcagagctggaaaagcttcagacagagcttgactggagacgggctgaaggccaggctgagtggagagcagcccaaaaatatgcagtggatgtgacgctggacccggcctcggcgcaccccagcctggaggtgtcggaggatggcaagagcgtgtcttcccgcggggcgccgccaggcccggcgcctggccacccgcagcggttctcggagcagacgtgcgcgctgagcctggagcggttctccgccggccgccactactgggaggtgcacgtgggccgccgcagccgctggttcctgggcgcctgcctggccgcggtgccgcgcgcggggcctgcgcgcctgagccctgcggccggctactgggtgctggggctgtggaacggctgcgagtacttcgtcctggccccgcaccgcgtcgcgctcaccctgcgcgtgcccccgcggcgcctgggcgtcttcctggactacgaggccggagagctgtccttcttcaacgtgtccgacggctcccacatcttcaccttccacgacaccttctcgggcgcgctctgtgcgtacttcaggcccagggcccacgacggcggcgaacatccggatcccctgaccatctgcccgctgccggttagagggacgggcgtccccgaagagaacgacagtgacacctggctacagccctatgagcccgcggatcccgccctggactggtggtgaggcgccctcgtggccgcgggactggccccgggggggccccctggatcccaggccagcgctttgctctcctgctccgtctgaagggagcaggtgcaccagccaaaatgtcagcgagggggacaaagagagggacctttgcctacgtagatgtgtatgtgtagtgcgattttcttcaaggaaaggagacaagtccaaagctcgtttgtggattgtgggactgagcgaaggagtacaaatatatccacgtcgctcagagctggggtgctcacggtgggtggtgggaaagaagccagcatggaagaaagaagggagaaaactttggtgactgccttagagggatcagttaatttgtatagttttatattttttgtatatgtttgctagctctaaaaaggtcgagatgcaataacacttcgtaagcaacgagttcacctaagtaaggctcagatcctagttttaaaaaccatttcccattaaaatgaagttggaggaacagctgcttctggagccggggcaaaaatttcaaggtgagcctggagcattgtgtgtggtgaagtaaaataaaggctcaaaacgtgacggcaacccggcaaaagggtagggagccaggccgaaggggcctcactgaccaattgtgggacaatttgaacatcaggatgaataatgacaggagagattataacacactgaataaaaacataatccatgagttcatgctgatactcaaatttctttttaaaaaggagaaacaggaaggtttcttttggaggtgaaatctaattattggtgagagtcttggagaacaggctgtttccagtctcaaagcagtaaccttatacactacttataagtttgaaaggggaaaggttacctttacaatggagacatctaccagatcatccaagtgattaaatttaacatcatcaatgatgggaccaaggacattattagtttgacaactggggaaagaagtgttcttcaccccctacccccaagacattctctctgtcggccaggctggagtgcagcctcaacctcctgggcccaagtgatcctcccacctcagcacacaacaccatgcccagctaattttaagtgcgttatagagacgggggtctcactttgttacccaggctggtctcaaactcctgcgctcaagcaatcctcccacctgggcctcccaaaatgctgggtgtacaggcatgagccgctgtgcccggcttcattttcagagtgagacatttgtactgtggctatgtaggagaacattcttgttcttagcaaacatactgaagtttttagatattaattaccacagtgtctgccactgaatttccagtgactaagtggaaaaatataaaacatatgaatataaagaaagaaagagacaagtcaaatgtagcaaaatgacaacacttggtgactctaggtgactggtcgacagatgttcattgtactatcaatgtggctttgctgtgggtttgaaattttgcaaactaagagttgggtggcggggagaaggatacaccaaaaaactaagtgattatctttggatgggaaaatgtttggtaattgcattcttaaaatgtcttctttgtattttttaatgttcaataatgtatatgtatcagttctgtaataaaggggaaaacactttttttaaataaaaaaaaaaaaaaaaaaaaaaaaaaaaaaaaaaaaaaaggggctcgtgccgaattcggcacgagaggcgacaaacctaccgagcctggtgatagctggttgtccaagatagaatcttaggtcaactttaaatttgcccacagaaccctctaaattcccttgtaaatttaactgttagtccaaagaggaacagctctttggacactaggaaaaaaccttgtagagagagttaaaaatttaacacccataggtggcctaaaagcagccaccaattaagaaagcgttaaaggtaacacccactacctatacctattgaagaa

SEQ ID NO: 6641 - DNA, 5980 bp, Homo sapiens
  misc_feature (982)..(1084): n is a, c, g, or t
  misc_feature (2259)..(2287): n is a, c, g, or t
  misc_feature (3693)..(3709): n is a, c, g, or t
  misc_feature (5566)..(5573): n is a, c, g, or t
  misc_feature (5575)..(5580): n is a, c, g, or t
  misc_feature (5582)..(5584): n is a, c, g, or t
  misc_feature (5586)..(5591): n is a, c, g, or t
  misc_feature (5593)..(5593): n is a, c, g, or t
  misc_feature (5596)..(5598): n is a, c, g, or t
  misc_feature (5607)..(5607): n is a, c, g, or t
  misc_feature (5618)..(5618): n is a, c, g, or t
gacctttatttgttacttttgagctacagtgacaagaaagatcacctaactgtggaagaactggctcagtttttgaaggtggagcaaaagatgaataatgtgacaacggactattgtcttgacatcataaagaagtttgaagtttcagaagaaaataaggtgaaaaatgttcttggcatagaaggcttcacgaacttcatgcgtagtcctgcctgtgacatatttaacccattgcaccatgaagtgtaccaagacatggatcagcccctctgcaactactacattgcttcctctcacaatacatacctgactggagaccagctcctttctcagtccaaagtggatatgtatgcacgggtgctgcaagagggctgtcgctgtgtggaagttgactgttgggatggcccagatggagagccagtagtacatcatggttacactctcacttcaaaaattctcttcagagatgttgtggagaccatcaacaagcatgcctttgtgaagaatgagtttcctgttatattgtctatcgagaatcactgcagtatccagcagcaaaggaagattgctcagtacctgaaaggaatattcggagacaaactggacctgtcatctgttgatacaggggagtgcaagcagcttccaagccctcaaagtttgaaaggcaaaattctagtgaagggtaagaagttgccttatcaccttggggatgatgcagaggaaggggaagtttccgatgaggacagtgcagatgaaattgaagacgagtgcaaattcaagctccattatagtaatgggaccactgagcatcaggtggaatctttcataaggaaaaaactggagtcactgttaaaagaatctcaaattcgagataaagaagatcctgatagtttcacagtgcgggcactactgaaggccacgcatgaaggcttaaatgcacacctgaagcagagtccagatgtaaaggaaagtggaaagaaannnnnnnnnnnnnnnnnnnnnnnnnnnnnnnnnnnnnnnnnnnnnnnnnnnnnnnnnnnnnnnnnnnnnnnnnnnnnnnnnnnnnnnnnnnnnnnnnnnnnnngtactggcaaggagggtggccagctgtacagattgggtcgccgaaggaaaaccatgaagctctgccgagaactctctgatttggttgtgtacacaaactccgtggccgctcaggacattgtggatgacggaaccacaggaaatgtgttatcattcagtgaaacaagagcacatcaggttgttcagcaaaaatcagagcagttcatgatttataatcaaaagcaactcacgaggatttacccctctgcctaccgcattgattccagtaacttcaaccctctcccctactggaacgcaggctgccagctagtggcactgaattatcaatctgaaggacgaatgatgcagttaaaccgagccaaattcaaggcaaatggcaattgtggctatgtcctcaaaccccagcaaatgtgcaaaggtactttcaaccctttctctggtgaccctcttcctgccaaccccaaaaagcagctcatcctgaaagttatcagtggacagcaactccccaaacctccagactccatgtttggagatcgaggcgagatcattgacccttttgttgaagttgaaattattggattgccagtagattgttgtaaagatcaaacccgtgtggtagatgacaatggatttaaccctgtgtgggaagaaacactgacatttacagtacacatgccagaaatagctttggttcggttccttgtgtgggatcacgatcccattggacgagactttgttggacaaagaactgtgaccttcagcagcttagtgcctggctaccggcatgtctatttggaaggactgacagaagcatccatatttgtacacataaccatcaatgaaatctatggaaagtggagccctttaatactcaaccccagttatactatattgcactttctaggagctacaaagaacagacaactccagggtctgaagggactgttcaataagaatcctaggcacagttcttcagaaaacaattcccattatgtacggaagcgatccattggagatagaattctgcgacgcacagctagcgccccagccaaaggcaggaaaaagagcaaaatgggcttccaagaaatggtggagataaaggattctgtgtccgaggccacaagagatcaagatggcgtgctgaggaggaccacacgcagtttgcaagcacgcccnnnnnnnnnnnnnnnnnnnnnnnnnnnnntgggagctttgtcgctgcctgtatctgaaacagcaaaagacattgaaggaaaagaaaactctctagtacaaatctgaataggaaacaacttaagcagaagataaagatggcagaagaaaagggaaagcaagtataaaagatccacattttctaaatttcaacaaaaagttatcatcctcctccagtgctctgctccacaaagataccagccaaggggacaccattgtatctactgcccacatgtcagtcacaggagaacagctgggcatgtcaagtcctaggggtgggagaaccacatcaaatgccacaagcaattgccaggaaaacccctgtcccagcaagtctctctccccaaagcagcatttggctcccgatcctgtagttaaccccacacaagatctgcatggtgtgaaaatcaaggaaaagggtaatcctgaggactttgtggaagggaaaagcatcttgtcaggaagcgtcctttctcatagcaacctagaaattaagaacctggaaggtaataggggtaagggccgagctgcaacatccttttctttgtcagacgtctccatgctctgttctgacatacctgacctacattcaactgcaattctgcaggagagtgtaatttcccatcttattgacaatgtcactttaacaaatgagaatgagccgggcagttccatctcagccctgattggccagtttgatgagaccaacaatcaggctctcacagttgtttctcatcttcataataccagtgtgatgtcaggccattgtcccttgcctagcctgggcctaaaaatgcccatcaagcatggtttttgcaagggaaaatccaagtcttccttcctgtgctcatctccggagctgatagcactctcgagttctgagaccaccaaacatgcaacgaacacagtttatgaaactacctgcactcccatctctaaaaccaaaccagatgatgacctttctagtaaggccaagacagcggccttagaaagcaacctgcctggatcccctaatacttctcgtggctggttaccaaaaagtcctaccaagggagaagactgggaaacactgaagagctgcagccctgcctcttcccctgatttgaccctggaggatgtaatagctgatcccactctctgtttcaattctggggagagcagccttgtggaaattgatggagaatcagaaaatctttctctaacaacctgtgaatataggagagagggcacaagtcaacttgcttctcctttaaaactcaagtacaatcagggtgtggtagaacactttcaaagaggtttgagaaacggctactgtaaagagaccctccgcccttctgtccctgaaatattcaacaatattcaagatgtcaaaactcaaagtatttcttatctagcctnnnnnnnnnnnnnnnnngtgcataatcatttctcagattcagatgcaaaaatgttccagacctgtgtgccccagcaatctagtgctcaagatatgcatgtccctgtacccaagcagttggcacatcttcctttgcctgctctgaaactgcctagtccttgcaaatccaaaagtctgggggacttaacatcagaggacattgcctgcaattttgagagcaagtaccagtgtattagtaagagttttgttacaactggcattagagacaagaagggcgtgactgtgaagacaaagtcgttagagcctatagatgccctgaccgagcagcttcggaagcttgtgtcctttgaccaggaagacaactgccaagtgctatattcaaagcaggatgccaatcagctcccccgggcactggtcaggaagttgtcatccagaagtcagagcagagtgcgcaatattgctagtcgtgccaaggagaaacaggaagccaacaagcagaaagttccaaaccccagcaatggggcaggagtggttcttagaaacaaaccctcagcacccacccctgcagtgaatcgccactccaccggctcctacatcgcaggctacctgaagaacacgaaagggggtggccttgaaggccggggcatcccagagggggcatgcacggctcttcactatggccacgttgaccagttttgttcagataattctgttttgcagactgagccaagcagtgatgataaaccagaaatttattttcttttgagactgtgaattatttaaaactgcattcttaaggttttcaaggtattctgtagaatgtcagagttttcagtaaataagttccttggctttggaatgattttcaaatgtatttttaaacttgtatttgggtctccctttgacttcatgtgttctccctgttaatgcgtttgtatatagatttggtgacatttcccatgtacctattatgatctttctcccttgagttgttgtaaactgtatcagtatgaaatatgtgcatgccctagatgtgaaactcctcagcagctcgggttataatgtgtgtgtgtttcaccaagatgtcctttactgtgtcctcagattgcagtcacaaatgtagtcatttttactctctaactgttgagttgattaagagactttgcaaacgacaaagggatgaattccttactttaatctgttatcatttttcctatgtttccctctttgttcagaagcccagatgcatttttataactcagttttaaaaactttaaaatagttaccttgccttttaggatgttcttatcccacccataatgagagttgaaaggggatggatagctgctccccatgcccttcccactttttggaataggccgtgagggtgtgaggaagaaggctgtcttttgtacataaggacaaaattgtttgttttacataaattttgttacatatttttgctaatggctttgtatgtaacaagaagcgagttgccaaactacctgttgtacttttgaattttctgattgaattacagactgcgaacaacggctttcagaatgagggacttccatcagactctaatgataatagtagcacaaattgaaaacttccccaaagctttcacagaatattttctcataataaaatccaagtgaacagataattagaagaaacccttttccttcagggaaccaagcaactctattttagtactgacatgcattattttcactgtgaattcacttttttattgcatgttcagatgtccctctttgttttttttttttgtaacattaactgcaatgatgttcttcctggaattcatgaaaatataattaaaacacatttttaaacaaaaaaaaaaaaaannnnnnnnannnnnnannnannnnnnanaannnaaaaaaaanaaaaaaaaaangggggggggccgcttaaaaatccccccggggggcccaagtttaaccggcccccctttttttttgaaaaaggggccccctaaaggggggcggatataaaactgaggggggggcgggcggttttaaaaccccggggaggggaaaaactggcacttggggaaatttttggagaagaacccttttttccggggggggggaacaaattgggggaaaacacccccccagaaatttaaagccctcagggaaaaaaaaaatatttttaggggggaatagagggtggaaaaaaaaacgcaaatgtgtgggggtgttaaaaaaatttttctcttcgcgggcgggtgatttttttgagaaaatatatccccct

SEQ ID NO: 6642 - DNA, 3592 bp, Homo sapiens
  misc_feature (2262)..(2263): n is a, c, g, or t
  misc_feature (2742)..(2744): n is a, c, g, or t
  misc_feature (2769)..(2841): n is a, c, g, or t
gccgccccgccccgagaccgggcccgggggcgcggggcggcgggatgcggcgcccggggcggcgatgaccgcggagcgcacgccgcgggcccggccctgaccccgccgcccgcccgcggccgcgaccccaggtccggacaggccgagatgacgccgagccccctgttgctgctcctgctgccgccgctgctgctgggggccttcccaccggccgccgccgcccgaggccccccaaagatggcggacaaggtggtcccacggcaggtggcccggctgggccgcactgtgcggctgcagtgcccagtggagggggacccgccgccgctgaccatgtggaccaaggatggccgcaccatccacagcggctggagccgcttccgcgtgctgccgcaggggctgaaggtgaagcaggtggagcgggaggatgccggcgtgtacgtgtgcaaggccaccaacggcttcggcagcctgagcgtcaactacaccctcgtcgtgctggatgacattagcccagggaaggagagcctggggcccgacagctcctctgggggtcaagaggaccccgccagccagcagtgggcacgaccgcgcttcacacagccctccaagatgaggcgccgggtgatcgcacggcccgtgggtagctccgtgcggctcaagtgcgtggccagcgggcaccctcggcccgacatcacgtggatgaaggacgaccaggccttgacgcgcccagaggccgctgagcccaggaagaagaagtggacactgagcctgaagaacctgcggccggaggacagcggcaaatacacctgccgcgtgtcgaaccgcgcgggcgccatcaacgccacctacaaggtggatgtgatccagcggacccgttccaagcccgtgctcacaggcacgcaccccgtgaacacgacggtggacttcggggggaccacgtccttccagtgcaaggtgcgcagcgacgtgaagccggtgatccagtggctgaagcgcgtggagtacggcgccgagggccgccacaactccaccatcgatgtgggcggccagaagtttgtggtgctgcccacgggtgacgtgtggtcgcggcccgacggctcctacctcaataagctgctcatcacccgtgcccgccaggacgatgcgggcatgtacatctgccttggcgccaacaccatgggctacagcttccgcagcgccttcctcaccgtgctgccagacccaaaaccgccagggccacctgtggcctcctcgtcctcggccactagcctgccgtggcccgtggtcatcggcatcccagccggcgctgtcttcatcctgggcaccctgctcctgtggctttgccaggcccagaagaagccgtgcacccccgcgcctgcccctcccctgcctgggcaccgcccgccggggacggcccgcgaccgcagcggagacaaggaccttccctcgttggccgccctcagcgctggccctggtgtggggctgtgtgaggagcatgggtctccggcagccccccagcacttactgggcccaggcccagttgctggccctaagttgtaccccaaactctacacagacatccacacacacacacacacacactctcacacacactcacacgtggagggcaaggtccaccagcacatccactatcagtgctagacggcaccgtatctgcagtgggcacgggggggccggccagacaggcagactgggaggatggaggacggagctgcagacgaaggcaggggacccatggcgaggaggaatggccagcaccccaggcagtctgtgtgtgaggcatagcccctggacacacacacacagacacacacactacctggatgcatgtatgcacacacatgcgcgcacacgtgctccctgaaggcacacgtacgcacacgcacatgcacagatatgccgcctgggcacacagataagctgcccaaatgcacgcacacgcacagagacatgccagaacatacaaggacatgctgcctgaacatacacacgcacacccatgcgcagatgtgctgcctggacacacacacacacacggatatgctgtctggacgcacacacgtgcagatatggtatccggacacacacgtgcacagatatgctgcctggacacacagataatgctgccttgacacacacatgcacggatattgcctggacacacacacacacacacgcgtgcacagatatgctgtctggacacgcacacacatgcagatatgctggctgggcacacacttnncagacacacgtgcacaggcgcagatttgctgggcggacacacgcagatatgctgtctagtcacacacacacgcagacatgctgtccggacacacacacgcatgcacagatatgctgtccggacacacacacgcacgcagatatgctgcctggacacacacacagataatgctgcctcaacactcacacacgtgcagatattgcctggacacacacatgtgcacagatatgctgtctggacatgcacacacgtgcagatatgctgtccggatacagcaccgcaccgcaccacatgcagatatgctgcctgggcacacacttccggacacacatgcacacacaggtgcagatatgctgcctggacacacacacagataatgctgcctcaacactcacacacgtgcagatattgcctggacacacacatgtgcacagatatgctgtctggacatgcacacacgtgcagatatgctgtccggnnncacacgcacgcacacatgcagatannnnnnnnnnnnnnnnnnnnnnnnnnnnnnnnnnnnnnnnnnnnnnnnnnnnnnnnnnnnnnnnnnnnnnnnntgacgtgcttttgggagggtgtgccgtgaagcctgcagtacgtgtgccgtgaggctcatagttgatgagggactttccctgctccaccgtcactcccccaactctgcccgcctctgtccccgcctcagtccccgcctccatccccgcctctgtcccctggccttggcggctatttttgccacctgccttgggtgcccaggagtcccctactgctgtgggctggggttgggggcacagcagccccaagcctgagaggctggagcccatggctagtggctcatccccactgcattctccccctgacacagagaaggggccttggtatttatatttaagaaatgaagataatattaataatgatggaaggaagactgggttgcagggactgtggtctctcctggggcccgggacccgcctggtctttcagccatgctgatgaccacaccccgtccaggccagacaccaccccccaccccactgtcgtggtggccccagatctctgtaattttatgtagagtttgagctgaagccccgtatatttaatttattttgttaaacatgaaagtgcaaaaaaaaaaaaaaaaaaaaaaaaaaaaaaaagacaaaaatccggggggcaagatgcgcaccctttctgacagggccaagagggtaaagcacaggcgcgttaacgcgggaaagcgcgggttgggaccctctgggggtgggcaccacataccgagaaagttgtcgccgcgggtgacaacaaaac

SEQ ID NO: 6643 - DNA, 1507 bp, Homo sapiens
  misc_feature (77)..(128): n is a, c, g, or t
tggctgatcagagcgcgtagggcttcgccggggccgggagctgggcgcggtcctgctcagcccagctcaccgcgcgnnnnnnnnnnnnnnnnnnnnnnnnnnnnnnnnnnnnnnnnnnnnnnnnnnnncctttctctgagtcctgcctccttctgcggaagggagctcaaaagaactttgttgttttgccttttactctggggtgaaagcggcaggaggtatgtgagatggtgaaatgatttgcttctgccatgctggggtcacgggtggatcgccctaaactctcggtggccccctcagtagttttggaagaggaccaagtccttgtctctccagcagtggacctggaagaaggatgccggctcagggacttcactgagaaaataatgaatgtcaaaggaaaagtaattctgtcaatgctggttgtctcaactgtgatcattgtgttttgggaatttatcaacagcacagaaggctctttcttgtggatatatcactcaaaaaacccagaagttgatgacagcagtgctcagaagggctggtggtttctgagctggtttaacaatgggatccacaattatcaacaaggggaagaagacatagacaaagaaaaaggaagagaggagaccaaaggaaggaaaatgacacaacagagcttcggctatgggactggtttaatccaaacttgaaggaatccgaataactaaactggactctggttttctgactcagtccttctagaagacctggactgagagatcatgcggttaaggagtgtgtaacaggcggaccacctgttgggactgcgagattctcaaggggaaggactgggtctcatttctcccatctcagcgcttagcaggatgacctggtatagagcagggaactgggaaatgtgggtcaggggatcagacactccagttgggtcttttatataaattaaatggcaaaaggctccatacccttctccttctttcctaccctccactttatctgcaaaatgggaatgatgataacacccacttcatagaatggtcatgaagatcaaatgagagaataaaagtcaagcacttagcctctggtgcacaataagtattaaataagtatacctattcctccttttccttttttaaaaataatattaccaaatgtccagcttatacacatttacaagacttagctagtgggctatgttagagctactaaaagatctttgacaagctaaaactaagatgcaatgaatgaggtgtaacgaacaagagagttttaagttcagaaatggttacagaagtataagacagctgtgtgggtgttttttggtttttggtttctggtttacaatctcgtcattcaacaaagatgggagttttatagaactaaaagcaccatgtaagctactaaaaacaacaacaaaaaaggctcatcatttctcagtctgaattgacaaaaatgccaatgcaaataaaaatgattactttttattttaaaaaaaaaaaaaaaaaaaaaa

SEQ ID NO: 6644 - DNA, 4771 bp, Homo sapiens
  misc_feature (2884)..(2911): n is a, c, g, or t
gttttctgcccttctttgctttggtggcttccttgtggttcctcagtggtgcctgcaacccctggttcacctccttccaggttctggctccttccagccatggctctcagagtccttctgttaacagccttgaccttatgtcatgggttcaacttggacactgaaaacgcaatgaccttccaagagaacgcaaggggcttcgggcagagcgtggtccagcttcagggatccagggtggtggttggagccccccaggagatagtggctgccaaccaaaggggcagcctctaccagtgcgactacagcacaggctcatgcgagcccatccgcctgcaggtccccgtggaggccgtgaacatgtccctgggcctgtccctggcagccaccaccagcccccctcagctgctggcctgtggtcccaccgtgcaccagacttgcagtgagaacacgtatgtgaaagggctctgcttcctgtttggatccaacctacggcagcagccccagaagttcccagaggccctccgagggtgtcctcaagaggatagtgacattgccttcttgattgatggctctggtagcatcatcccacatgactttcggcggatgaaggagtttgtctcaactgtgatggagcaattaaaaaagtccaaaaccttgttctctttgatgcagtactctgaagaattccggattcactttaccttcaaagagttccagaacaaccctaacccaagatcactggtgaagccaataacgcagctgcttgggcggacacacacggccacgggcatccgcaaagtggtacgagagctgtttaacatcaccaacggagcccgaaagaatgcctttaagatcctagttgtcatcacggatggagaaaagtttggcgatcccttgggatatgaggatgtcatccctgaggcagacagagagggagtcattcgctacgtcattggggtgggagatgccttccgcagtgagaaatcccgccaagagcttaataccatcgcatccaagccgcctcgtgatcacgtgttccaggtgaataactttgaggctctgaagaccattcagaaccagcttcgggagaagatctttgcgatcgagggtactcagacaggaagtagcagctcctttgagcatgagatgtctcaggaaggcttcagcgctgccatcacctctaatggccccttgctgagcactgtggggagctatgactgggctggtggagtctttctatatacatcaaaggagaaaagcaccttcatcaacatgaccagagtggattcagacatgaatgatgcttacttgggttatgctgccgccatcatcttacggaaccgggtgcaaagcctggttctgggggcacctcgatatcagcacatcggcctggtagcgatgttcaggcagaacactggcatgtgggagtccaacgctaatgtcaagggcacccagatcggcgcctacttcggggcctccctctgctccgtggacgtggacagcaacggcagcaccgacctggtcctcatcggggccccccattactacgagcagacccgagggggccaggtgtccgtgtgccccttgcccagggggcagagggctcggtggcagtgtgatgctgttctctacggggagcagggccaaccctggggccgctttggggcagccctaacagtgctgggggacgtaaatggggacaagctgacggacgtggccattggggccccaggagaggaggacaaccggggtgctgtttacctgtttcacggaacctcaggatctggcatcagcccctcccatagccagcggatagcaggctccaagctctctcccaggctccagtatttcggtcagtcactgagtgggggccaggacctcacaatggatggactggtagacctgactgtaggagcccaggggcacgtgctgctgctcaggtcccagccagtactgagagtcaaggcaatcatggagttcaatcccagggaagtggcaaggaatgtatttgagtgtaatgatcaggtggtgaaaggcaaggaagccggagaggtcagagtctgcctccatgtccagaagagcacacgggatcggctaagagaaggacagatccagagtgttgtgacttatgacctggctctggactccggccgcccacattcccgcgccgtcttcaatgagacaaagaacagcacacgcagacagacacaggtcttggggctgacccagacttgtgagaccctgaaactacagttgccgaattgcatcgaggacccagtgagccccattgtgctgcgcctgaacttctctctggtgggaacgccattgtctgctttcgggaacctccggccagtgctggcggaggatgctcagagactcttcacagccttgtttccctttgagaagaattgtggcaatgacaacatctgccaggatgacctcagcatcaccttcagtttcatgagcctggactgcctcgtggtgggtgggccccgggagttcaacgtgacagtgactgtgagaaatgatggtgaggactcctacaggacacaggtcaccttcttcttcccgcttgacctgtcctaccggaaggtgtccacactccagaaccagcgctcacagcgatcctggcgcctggcctgtgagtctgcctcctccaccgaagtgtctggggccttgaagagcaccagctgcagcataaaccaccccatcttcccggaaaactcagaggtcacctttaatatcacgtttgatgtagactctaaggcttcccttggaaacaaactgctcctcaaggccaatgtgaccagtgagaacaacatgcccagaaccaacaaaaccgaattccaactggagctgccggtgaaatatgctgtctacatgnnnnnnnnnnnnnnnnnnnnnnnnnnnnctaaatatctcaacttcacggcctcagagaataccagtcgggtcatgcagcatcaatatcaggtcagcaacctggggcagaggagcctccccatcagcctggtgttcttggtgcccgtccggctgaaccagactgtcatatgggaccgcccccaggtcaccttctccgagaacctctcgagtacgtgccacaccaaggagcgcttgccctctcactccgactttctggctgagcttcggaaggcccccgtggtgaactgctccatcgctgtctgccagagaatccagtgtgacatcccgttctttggcatccaggaggaatttaatgctaccctcaaaggcaacctctcgtttgacatggtacatcaagacctcgcataaccacctcctgatcgtgagcacagctgagatcttgtttaacgattccgtgttcaccctgctgccgggacagggggcgtttgtgaggtcccagacggagaccaaagtggagccgttcgaggtccccaaccccctgccgctcatcgtgggcagctctgtcgggggactgctgctcctggccctcatcaccgccgcgctgtacaagctcggcttcttcaagcggcaatacaaggacatgatgagtgaagggggtcccccgggggccgaaccccagtagcggctccttcccgacagagctgcctctcggtggccagcaggactctgcccagaccacacgtagcccccaggctgctggacacgtcggacagcgaagtatccccgacaggacgggcttgggcttccatttgtgtgtgtgcaagtgtgtatgtgcgtgtgtgcgagtgtgtgcaagtgtctgtgtgcaagtgtgtgcacgtgtgcgtgtgcgtgcatgtgcactcgcacgcccatgtgtgagtgtgtgcaagtatgtgagtgtgtccagtgtgtgtgcgtgtgtccatgtgtgtgcagtgtgtgcatgtgtgcgagtgtgtgcatgtgtgtgctcaggggctgtggctcacgtgtgtgactcagagtgtctctggcgtgtgggtaggtgacggcagcgtagcctctccggcagaagggaactgcctgggctcccttgtgcgtgggtgaagccgctgctgggttttcctccgggagaggggacggtcaatcctgtgggtgaagacagagggaaacacagcagcttctctccactgaaagaagtgggacttcccgtcgcctgcgagcctgcggcctgctggagcctgcgcagcttggatggagactccatgagaagccgtgggtggaaccaggagcctcctccacaccagcgctgatgcccaataaagatgcccactgaggaatcatgaagcttcctttctggattcatttattatttcaatgtgactttaattttttggatggataagcctgtctatggtacaaaaatcacaaggcattcaagtgtacagtgaaaagtctccctttccagatattcaagtcacctccttaaaggtagtcaagattgtgttttgaggtttccttcagacagattccaggcgatgtgcaagtgtatgcacgtgtgcacacaccacacacatacacacacacaagcttttttacacaaatggtagcatactttatattggtctgtatcttgctttttttcaccaatatttctcagacatcggttcatattaagacataaattactttttcattcttttataccgctgcatagtattccattgtgtgagtgtaccataatgtatttaaccagtcttcttttgatatactattttcatctcttgttattgcatctgctgagttaataaatcaaatatatgtcaaaaaaaaaaaaaaaaaaaaaaaaaaaaaaaaaaaaaaaaat

SEQ ID NO: 6645 - DNA, 689 bp, Homo sapiens
  misc_feature (208)..(232): n is a, c, g, or t
gggggaacaatttatctgcacgaataccccgtgctaccagaatggctgtcttagtacttcgcctgacagttgtcctgggactgcttgtcttattcctgacctgctatgcagacgacaaaccagacaagccagacgacaagccagacgactcgggcaaagacccaaagccagacttccccaaattcctaagcctcctgggcacagagannnnnnnnnnnnnnnnnnnnnnnnncctccgctccatgtccaggagcacgtaagcactgagaaaaacgttgctttttgtccaattctctgttgataatgaccacacaatgacctcatggcattaaaatacatgagaaacaaaaaaaaaaaaaaaaaaaaaaaaaaaaaaaaaaaaaaaaaaaaaaaaaaaaaaaaaaaaaaaaaaaaaaaaagggggggggggggcggacccaaagaagaatacaaaacaaacccaggggggcagacgaggcgacaccccacaagaagagaagaaagaagcacggccacatagagtgtgtctcacagaaagacaccgggcgggcaaacaacagcgaggggggggttccccccaaaaaaaaagcgcgcgcgggggaacacaacgagctacgcatcacaaccccccgaggggtgtgcgagacacacagggggcaccaagacagcgacgcccagggcgcatatta

SEQ ID NO: 6646 - DNA, 481 bp, Homo sapiens
ttttttaggagtggtggtggtggtgtggtggtgattaggtacagtgctttcaatgcagtcttgcagacagaaaaaaaatctttctcaaagcttacaaacatttcccccctactatttccacccttcctcaggccacatgaatttgtgtcacccagataataaagaagcagcatgtatgctcttaattaccagtcaaatataaatcaatactaccctaaattaatggctttctgcaagtctacattaagctgaggtctacatgttggcaaatcagggttttgacttttttttttaaggaaagtttccaaccagttcctttccccctctttattaccagttaatttccaggggtttgtttttgcctttttgttgttgttgttgtttttgttgttgagatggagtctctccctgttgcccagtggagtgcagtggcacaatctcagctcattgcaacctctgcctcccaggttcaagtgattca

SEQ ID NO: 6647 - DNA, 3740 bp, Homo sapiens; identical to SEQ ID NO: 6617
  misc_feature (2501)..(2519): n is a, c, g, or t

SEQ ID NO: 6648 - DNA, 4467 bp, Homo sapiens
  misc_feature (139)..(154): n is a, c, g, or t
  misc_feature (1079)..(1103): n is a, c, g, or t
  misc_feature (3052)..(3126): n is a, c, g, or t
  misc_feature (3614)..(3635): n is a, c, g, or t
aagccaggctgacctttatgctcccagaatcatcagccttttcattggaaaccatggaaggacggttctgggaaaataatgaaaatcataccacaccatagagacaaccagaagccctgctcagatgacagagttctcnnnnnnnnnnnnnnnntgcccccgcttccgctggagaatggaaattggcaaagagagacggaaaagctccaatttgcgcctttgctattttaggagaggttgaaattacgagccaaagtggagtgatgcgctaagcggagtgacctccgtactccaagaaaagagaaaacccaggttctctgcttgtgaagtggctcgagctcttaggcgtgaggcattattatataaattcaagctcgctcgtgatccttagtaccctgagttgcctgaaggggggaatggcactgcctgcgtgtgcagtccgggagttcgagccgccgcggcaaccggagcgaggagcgcccgtccgcaccacctgtccccgccggcattccagagtagaggccgaattggcagcgagccggcccgggtcggtcgccgcctcagttcgcgcgggccctcctaggggtgtgtctcacggattccacactcggccgctcctggacaagccccgaaaggcgtcttcttccctggcgggagccgcgtgcgccccgcttttcgcgctgctgtcccggggccgccgcaggcggatgcacgtcctcaggcgacgctgggacctgggctccctctgccgggccctgctcactcggggcctggccgccctgggccactcgctgaagcacgtgctcggtgcgatcttctccaagattttcggccccatggccagcgtcgggaacatggatgagaaatccaacaagctgctgctagctttggtgatgctcttcctatttgccgtgatcgtcctccaatacgtgtgccccggcacagaatgccagctcctccgcctgcaggcgttcagctccccggtgccgggcccgtaccgctcggaggatgagagctccgccaggttcgtgccccgctacaatttcacccgcggcgacctcctgcgcaaggtagacttnnnnnnnnnnnnnnnnnnnnnnnnngtgttcctgcacatccagaagaccgggggcaccactttcggccgccacttggtgcgtaacatccagctggagcagccgtgcgagtgccgcgtgggtcagaagaaatgcacttgccaccggccgggtaagcgggaaacctggctcttctccaggttctccacgggctggagctgcgggttgcacgccgactggaccgagctcaccagctgtgtgccctccgtggtggacggcaagcgcgacgccaggctgagaccgtccaggaacttccactacatcaccatcctccgagacccagtgtcccggtacttgagtgagtggaggcatgtccagagaggggcaacatggaaagcatccctgcatgtctgcgatggaaggcctccaacctccgaagagctgcccagctgctacactggcgatgactggtctggctgccccctcaaagagtttatggactgtccctacaatctagccaacaaccgccaggtgcgcatgctctccgacctgaccctggtaggctgctacaacctctctgtcatgcctgaaaagcaaagaaacaaggtccttctggaaagtgccaagtcaaatctgaagcacatggcgttcttcggcctcactgagtttcagcggaagacccaatatctgtttgagaaaaccttcaacatgaactttatttcgccatttacccagtataataccactagggcctctagtgtagagatcaatgaggaaattcaaaagcgtattgagggactgaattttctggatatggagttgtacagctatgccaaagacctttttttgcagaggtatcagtttatgaggcagaaagagcatcaggaggccaggcgaaagcgtcaggaacaacgcaaatttctgaagggaaggctccttcagacccatttccagagccagggtcagggccagagccagaatccgaatcagaatcagagtcagaacccaaatccgaatgccaatcagaacctgactcagaatctgatgcagaatctgactcagaatttgagccagaaggagaaccgggaaagcccgaagcagaactcaggcaaggagcagaatgataacaccagcaatggcaccaacgactacataggcagtgtagagaaatggcgttaaatggctcaaaaaggcctgtacatacttctcccaaagcgccactgaaaagatggcatagcttaaaagatgaaagtgtccaaacacatcctgcttccttcattggggaagttttaaaaaaaagtttagatgttgcctttacagttgcctttcaattcagtgttatactgtgtgtaggtaaaacaaatctcaatatggaattaaattgtctttttggggttggactaaatatgaaatccgaaagccaaaccagactcaccagaaattgctgtttagatattttaagaagttcttaaattagttatggagacaaagtgaaaacataaaatgtgaccatttaacttatggctaagaaatggactttaaattattcatgatacactgttaaaacccaatcttggaatcaaatattttttccaggggtgagaataagtataaacataaagcaactaaaatgaaacataaaaccttttattttcttctgattttaacaaggaatctatttaaatagaataacaactgatggtgaatcttaccgagctgtagaaaataaaaaattcctctccaaacatgggtagttttatgtcaaaatattggcttttcaagaacaggactcatatcttgatatttaagagatgtttaaaattttaaactttttctaccttctactgtttaaaggttttacacagggtgtatctcacattaaacaaaacacctttttttcaaaatgaaataccaatgtaaagatctaatttccaggcgctttcagggcactgtaatttcaacaatactggaatcattttggcgctgcttctcattcnnnnnnnnnnnnnnnnnnnnnnnnnnnnnnnnnnnnnnnnnnnnnnnnnnnnnnnnnnnnnnnnnnnnnnnnnnngtgttgctgaagttattgtggtatataatcctggattaaagtcaggactttctttctatagaattattttatcaatatttgtgtagtgaggtcctaatcaagaaacttgaacaggataatgtgtctaaaaatattgctgaagttattcttgatcagatagaatttaacctaaaatgtgaactcttacttactttttgtacatctctattgtaatgtttccagttgggccaactatttctagccctttagttctttttcatgttgacagatttgtagacaattacaaaagccaaaaaaggataaaataagcattaggaaggctagccagttattcaatagcaccttgataatgtgggcaaacccttctacaaagtttttgttttgaaaagagcaaaagtaaaaagtgttctgtagtgaggttacatatcaggaacatatgagttgagcagagtaatttggtagtgtaagtcgatgcaaaaatacttctnnnnnnnnnnnnnnnnnnnnnncaagataaaaagaagtatgtaacccactgtgctgtcaagcatcatgattccgggcagttttcattttactgtggattttgctatacttatgcaaggacttacactaacctcctggctgtaaatcaaacaaggtgactgaaagtggcatttatgttttcacaagggacatgcttagaagtgtgaccataaagtcacatcttgtacaatctgctcatgtgtttcatctgtagtaatatagccacaaactggacaagaagctgggtatttgggtttaaaatagattttcttgactctgagcttgtatcagtatttctagcttttgttttgtctgacagtattgcagtcttgaaaatcctgagagctaaaaaactgaaaggaatttttccacaccttgaagtcacagtgttttagagtaaaactattttgtgtacaattgtgtttttaaaatagttagtagatcactatggtatttcaattttctttagttttaattgaaaatgtttgcttttaaaactgataggtattgttggaaagcaggatgaagcctgagccagtggaaaagcttgttacagaaaaaacattttgtgttattgctgtggtgtgcatgatttgcaaagattaagtgcattttctctgtctatactgattattgtatatagaggatgttataaatatacatatacatttttgccattatgtaaatcccatgatttcaactgtaaacatctgtccattggtgtagctttacaaaccattcactgattttgtgtaatttaacaatagatatgaaataaagtttaaattacagaaaaaaaaaaaaaaaaaaaaaaaa

SEQ ID NO: 6649 - DNA, 3426 bp, Homo sapiens
  misc_feature (1306)..(1322): n is a, c, g, or t
gtaggaatcgcagcgccaacggttgcaaggcccaagaagccatcctgggaaggaaaatgcattggggaaccctgtgcggattcttgtggctttggccctatcttttctatgtccaagctgtgcccatccaaaaagtccaagatgacaccaaaaccctcatcaagacaattgtcaccaggatcaatgacatttcacacacgcagtcagtctcctccaaacagaaagtcaccggtttggacttcattcctgggctccaccccatcctgaccttatccaagatggaccagacactggcagtctaccaacagatcctcaccagtatgccttccagaaacgtgatccaaatatccaacgacctggagaacctccgggatcttcttcacgtgctggccttctctaagagctgccacttgccctgggccagtggcctggagaccttggacagcctgggggtattctgggaagtttcaggctactccacagaggtggtggccctgagcaggctgcaggggtctctgcaggacatgctgtggcagctggacctcagccctgggtgctgaggccttgaaggtcactcttcctgcaaggactacgttaagggaaggaactctggcttccaggtatctccaggattgaagagcattgcatggacaccccttatccaggactctgtcaatttccctgactcctctaagccactcttccaaaggcataagaccctaagcctccttttgcttgaaaccaaagatatatacacaggatcctattctcaccaggaagggggtccacccagcaaagagtgggctgcatctgggattcccaccaaggtcttcagccatcaacaagagttgtcttgtcccctcttgacccatctccccctcactgaatgcctcaatgtgaccaggggtgatttcagagagggcagaggggtaggcagagcctttggatgaccagaacaaggttccctctgagaattccaaggagttccatgaagaccacatccacacacgcaggaactcccagcaacacaagctggaagcacatgtttatttattctgcattttattctggatggatttgaagcaaagcaccagcttctccaggctctttggggtcagccagggccaggggtctccctggagtgcagtttccaatcccatagatgggtctggctgagctgaacccattttgagtgactcgagggttgggttcatctgagcaagagctggcaaaggtggctctccagttagttctctcgtaactggtttcatttctactgtgactgatgttacatcacagtgtttgnnnnnnnnnnnnnnnnngtggatctccaaggaccaggttattttaaaaagatttgttttgtcaagtgtcatatgtaggtgtctgcacccaggggtggggaatgtttgggcagaagggagaaggatctagaatgtgttttctgaataacatttgtgtggtgggttctttggaaggagtgagatcattttcttatcttctgcaattgcttaggatgtttttcatgaaaatagctctttcaggggggttgtgaggcctggccaggcaccccctggagagaagtttctggccctggctgaccccaaagagcctggagaagctgatgctttgcttcaaatccatccagaataaaacgcaaagggctgaaagccatttgttggggcagtggtaagctctggctttctccgactgctagggagtggtctttcctatcatggagtgacggtcccacactggtgactgcgatcttcagagcaggggtccttggtgtgaccctctgaatgggtccagggttgatcacactctgggtttattacatggcagtgttcctatttggggcttgcatgccaaattgtagttcttgtctgattggctcacccaagcaaggccaaaattaccaaaaatcttggggggtttttactccagtggtgaagaaaactcctttagcaggtggtcctgagacctgacaagcactgctaggcgagtgccaggactccccaggccaggccaccaggatgcccttcccactggaggtcacattcaggaagatgaaagaggaggtttggggtctgccaccatcctgctgctgtgtttttgctatcacacagtgggtggtggatctgtccaaggaaacttgaatcaaagcagttaactttaagactgagcacctgcttcatgctcagccctgactggtgctataggctggagaagctcacccaataaacattaagattgaggcctgccctcagggatcttgcgttcccagtggtcaaaccgcactcacccatgtgccaaggtggggtatttaccacagcagctgaacagccaaatgcatggtgcagttgacagcaggtgggaaatggtatgagctgaggggggccgtgcccaggggcccacagggaaccctgcttgcactttgtaacatgtttacttttcagggcatcttagcttctattatagccacatccctttgaaacaagataactgagaatttaaaaataagaaaatacataagaccataacagccaacaggtggcaggaccaggactatagcccaggtcctctgatacccagagcattacgtgagccaggtaatgagggactggaaccagggagaccgagcgctttctggaaaagaggagtttcgaggtagagtttgaaggaggtgagggatgtgaattgcctgcagagagaagcctgttttgttggaaggtttggtgtgtggagatgcagaggtaaaagtgtgagcagtgagttacagcgagaggcagagaaagaagagacaggagggcaagggccatgctgaagggaccttgaagggtaaagaagtttgatattaaaggagttaagagtagcaagttctagagaagaggctggtgctgtggccagggtgagagctgctctggaaaatgtgacccagatcctcacaaccacctaatcaggctgaggtgtcttaagccttttgctcacaaaacctggcacaatggctaattcccagagtgtgaaacttcctaagtataaatggttgtctgtttttgtaacttaaaaaaaaaaaaaaaagtttggccgggtgcggtggctcacgcctgtaatcccagcactttgggaggccaaggtggggggatcacaaggtcactagatggcgagcatcctggccaacatggtgaaaccccgtctctactaaaaacacaaaagttagctgagcgtggtggcgggcgcctgtagtcccagccactcgggaggctgagacaggagaatcgcttaaacctgggaggcggagagtacagtgagccaagatcgcgccactgcactccggcctgatgacagagcgagattccgtcttaaaaaaaaaaaaaaaaaaagtttgtttttaaaaaaatctaaataaaataactttgccccctg

SEQ ID NO: 6650 - DNA, 2159 bp, Homo sapiens
  misc_feature (10)..(13): n is a, c, g, or t
  misc_feature (2020)..(2021): n is a, c, g, or t
gatcccgagnnnngcggcgcctactactactgattttgaggcctcttgacgagcaagcctggaggatgatggagaatcgtgtgatcagtgtgctaaatctctctgcctgtttggactttgtaattatttttttagcagtaattaaagaaaaaagtcctctgtgaggaatattctctattttaaatatttttagtatgtactgtgtatgattcattaccattttgaggggatttatacatatttttagataaaattaaatgctcttatttttccaacagctaaactactcttagttgaacagtgtgccctagcttttcttgcaaccagagtatttttgtacagatttgctttctcttacaaaaagaaaaaaaaaatcctgttgtattaacatttaaaaacagaattgtgttatgtgatcagttttgggggttaactttgcttaattcctcaggctttgcgatttaaggaggagctgccttaaaaaaaaataaaggccttattttgcaattatgggagtaaacaatagtctagagaagcatttggtaagctttatcgtatatatattttttaaagaagagaaaaacaccttgagccttaaaacggtgctgctgggaaacatttgcactcttttagtgcatttcctcctgcctttgcttgttcactgcagtcttaagaaagaggtaaaaggcaagcaaaggagatgaaatctgttctgggaatgtttcagcagccaataagtgcccgagcacactgcccccggttgcctgcctgggccccatgtggaaggcagatgcctgctcgctctgtcacctgtgcctctcagaacaccagcagttaaccttcaagacattccacttgctaaaattatttattttgtaaggagaggttttaattaaaacaaaaaaaaattcttttttttttttttttccaattttaccttctttaaaataggttgttggagctttcctcaaagggtatggtcatctgttgttaaattatgttcttaactgtaaccagtttttttttatttatctctttaatctttttttattattaaaagcaagtttctttgtattcctcaccctagatttgtataaatgcctttttgtccatcccttttttctttgttgtttttgttgaaaacaaactggaaacttgtttctttttttgtataaatgagagattgcaaatgtagtgtatcactgagtcatttgcagtgttttctgccacagacctttgggctgccttatattgtgtgtgtgtgtgggtgtgtgtgtgttttgacacaaaaacaatgcaagcatgtgtcatccatatttctctacatcttctcttggagtgagggaggctacctggaggggatcagccccctgacagaccttaatcttaattactgctgtggctagagagtttgaggattgctttttaaaaaagacagcaaacttttttttttatttaaaaaaagatatattaacagttttagaagtcagtagaataaaatcttaaagcactcataatatggcatccttcaatttctgtataaaagcagatctttttaaaaagatacttctgtaacttaagaaacctggcatttaaatcatattttgtctttaggtaaaagctttggtttgtgttcgtgttttgtttgtttcacttgtttccctcccagccccaaaccttttgttctctccgtgaaacttacctttccctttttctttctcttttttttttttgtatattattgtttacaataaatatacattgcattaaaaagaaaaaaaaaaaaaaaaaaaaaaaaaaaaaaaccgtgtcctccgcccgctttgtgtcctcgtcctcctcgggggcctacggcggcggctacggcggcgtcctgaccgcgtccgacgggctgctggcgggcaacgagaagctaaccatgcagaacctcaacgaccgcctggcctcctacctggacaaggtgcgcgccctggaggcggccaacggcgagctagaggtgaagatccgcgactggtaccannaagcaggggcctgggccctcccgcgactacagccactactacacgaccatccaggacctgcgggacaagattcttggtgcccacattgagaactccaggatttgtcctgcagatcggacaatgccccgtctggctgca

SEQ ID NO: 6651 - DNA, 1471 bp, Homo sapiens
  misc_feature (596)..(681): n is a, c, g, or t
gcggccgcccgcccggcccctgcgcctccgcccggccggccgcggggagggggcatgagccggcgcccgccggcccccgagctgcgggccggcctagagccccgcgcggcgccccgcggagccaagccgtcgccgccgccgccgccaaaccgcgggcgcacgagtgggccgcggatgcagcggccgggggagccggcggccgcgcgcttcggcgcccccgagggctgccggaccaccggccgcagcctatcgcagcttcatgattgaggagatcctcacggagccacccgggcccaagggcgccgcgcccgcagccgccgctgccgcggcgggcgagctgctgaagttcggcgtgcaggcgctgctggcggcgcggcccttccacagccacctggccgtgctgaaggccgagcaggcggcggtgttcaagttcccactggcgccgctgggctgttcagggctgagctctgcgttgctggcggcagggcccgggctgcccggcgccgcgggtgcgccacacctgccgctcgagttgcagctccgcgggaagctggaggcggcaggccctggggagccaggcaccaaagccaagaagnnnnnnnnnnnnnnnnnnnnnnnnnnnnnnnnnnnnnnnnnnnnnnnnnnnnnnnnnnnnnnnnnnnnnnnnnnnnnnnnnnnnnnggacaggatagatcttgctgagtccctgggcctgagccagttgcaggtgaagacgtggtaccagaatcggaggatgaagtggaagaaaatagtgctgcagggcggcggcctggagtctcccaccaagcccaaggggcggcccaagaagaactcaattccaacgagcgagcagcttactgagcaggagcgcgccaaggatgcagagaaaccggcggaggtgccgggcgagcccagcgacaggagccgcgaggactgagggcggtatacggtgcggggcctgggatgcccgcgccacccgcagccccctcactcggcggaaacccgcgagccggcccttccgcgtccaagaagtttacttcctaagcctttttattatgatctgacagggaacaatgggccaacgaggaaggacacagacccaaaagccagacccaggtcccagcgcgcttctgggctctaacctgggagactcgcatccagcccggcggaagctacagtctctaccctgagctccgtggcgcagagcgctccacgcgtattcacgccccgctcctcgcctgcacccccaccccgtctggggcctgccctcccggccggggagcctccaggcacacacccgcttctggacgtcggggacccagcggttgggctcaggccacaacggcctgagattgccccggggcaacccgtcggctatgcctggaggccgggtccccgatgtcgctggggcccctaccccctgttgcgaagacggtgactttttttccaataaaatattttatgacacaaa

SEQ ID NO: 6652 - DNA, 411 bp, Homo sapiens
ttttattttttttgttatacgtctatttattaatgaaaaagtatcaccaacatccatttaaaaataagcaaaagacattaataaacattcttccaaagaggatatacaggtggcaactagatacaagatgttcaaatgttcaataccataaaataccagaaaaatgcaataaaatcacagacagatgctattatacagctattaaaacaactaaaattaaaaagactaaccataccaagtatggcaagaatgtagagaaataagaaggttcacatactgttgatgagaatgcaaatggtacagttaggttatagtctggccttgtctttaaaagtgacgcattcacgtacactgtactactgacacaggagaaataaagcatttctgcatattaagagttatatgcctatg

SEQ ID NO: 6653 - DNA, 5544 bp, Homo sapiens
  misc_feature (224)..(257): n is a, c, g, or t
  misc_feature (315)..(339): n is a, c, g, or t
ggactttagaagccgttgctgccctctctgtcacctgaagcggggccctctcccatcccacccttgccccgcctccctgcccccaccgggccggccctgcccgccgccggaccctggcatgtcaagacctggtccgcgcctgcctgcccagcccgcggaaccccggcggccccgcgagctaggatgaggggccaggccgccgccccgggccccgtctggatccnnnnnnnnnnnnnnnnnnnnnnnnnnnnnnnnnnacgccgcgcgcgggcggccgccggagcagacgcggggcccgggcccgagccgtgcgcnnnnnnnnnnnnnnnnnnnnnnnnnggctacttctccgcggccgccgtgttcccggccaacgcctcgcgctgctcctggacgctacgcaacccggacccgcggcgctacactctctacatgaaggtggccaaggcgcccgtgccctgcagcggccccggccgcgtgcgcacctaccagttcgactccttcctcgagtccacgcgcacctacctgggcgtggagagcttcgacgaggtgctgcggctctgcgacccctccgcacccctggccttcctgcaggccagcaagcagttcctgcagatgcggcgccagcagccgccccagcacgacgggctccggccccgggccgggccgccgggccccaccgacgacttctccgtggagtacctggtggtggggaaccgcaaccccagccgtgccgcctgccagatgctgtgccgctggctggacgcgtgtctggccggtagtcgcagctcgcacccctgcgggatcatgcagaccccctgcgcctgcctgggcggcgaggcgggcggccctgccgcgggacccctggccccccgcggggatgtctgcttgagagatgcggtggctggtggccctgaaaactgcctcaccagcctgacccaggaccggggcgggcacggcgccacaggcggctggaagctgtggtccctgtggggcgaatgcacgcgggactgcgggggaggcctccagacgcggacgcgcacctgcctgcccgcgccgggcgtggagggcggcggctgcgagggggtgctggaggagggtcgccagtgcaaccgcgaggcctgcggccccgctgggcgcaccagctcccggagccagtccctgcggtccacagatgcccggcggcgcgaggagctgggggacgagctgcagcagtttgggttcccagccccccagaccggtgacccagcagccgaggagtggtccccgtggagcgtgtgctccagcacctgcggcgagggctggcagacccgcacgcgcttctgcgtgtcctcctcctacagcacgcagtgcagcggacccctgcgcgagcagcggctgtgcaacaactctgccgtgtgcccagtgcatggtgcctgggatgagtggtcgccctggagcctctgctccagcacctgtggccgtggctttcgggatcgcacgcgcacctgcaggcccccccagtttgggggcaacccctgtgagggccctgagaagcaaaccaagttctgcaacattgccctgtgccctggccgggcagtggatggaaactggaatgagtggtcgagctggagcgcctgctccgccagctgctcccagggccgacagcagcgcacgcgtgaatgcaacgggccttcctacgggggtgcggagtgccagggccactgggtggagacccgagactgcttcctgcagcagtgcccagtggatggcaagtggcaggcctgggcgtcatggggcagttgcagcgtcacgtgtggggctggcagccagcgacgggagcgtgtctgctctgggcccttcttcgggggagcagcctgccagggcccccaggatgagtaccggcagtgcggcacccagcggtgtcccgagccccatgagatctgtgatgaggacaactttggtgctgtgatctggaaggagaccccagcgggagaggtggctgctgtccggtgtccccgcaacgccacaggactcatcctgcgacggtgtgagctggacgaggaaggcatcgcctactgggagccccccacctacatccgctgtgtttccattgactacagaaacatccagatgatgacccgggagcacctggccaaggctcagcgagggctgcctggggagggggtctcggaggtcatccagacactggtggagatctctcaggacgggaccagctacagtggggacctgctgtccaccatcgatgtcctgaggaacatgacagagattttccggagagcgtactacagccccacccctggggacgtacagaactttgtccagatccttagcaacctgttggcagaggagaatcgggacaagtgggaggaggcccagctggcgggccccaacgccaaggagctgttccggctggtggaggactttgtggacgtcatcggcttccgcatgaaggacctgagggatgcataccaggtgacagacaacctggttctcagcatccataagctcccagccagcggagccactgacatcagcttccccatgaagggctggcgggccacgggtgactgggccaaggtgccagaggacagggtcactgtgtccaagagtgtcttctccacggggctgacagaggccgatgaagcatccgtgtttgtggtgggcaccgtgctctacaggaacctgggcagcttcctggccctgcagaggaacacgaccgtcctgaattctaaggtgatctccgtgactgtgaaacccccgcctcgctccctgcgcacacccttggagatcgagtttgcccacatgtataatggcaccaccaaccagacctgtatcctgtgggatgagacggatgtaccctcctcctccgcccccccgcagctcgggccctggtcgtggcgcggctgccgcacggtgcccctcgacgccctccggacgcgctgcctctgtgaccggctctccaccttcgccatcttagcccagctcagcgccgacgcgaacatggagaaggcgactctgccgtcggtgacgctcatcgtgggctgtggcgtgtcctctctcaccctgctcatgctggtcatcatctacgtgtccgtgtggaggtacattcgctcagagcgttctgtcatcctcatcaacttctgcctgtccatcatctcctccaatgccctcatcctcatcgggcagacccagacccgcaacaaggtgatgtgcacgctggtggccgccttcctgcacttcttcttcctgtcctccttctgctgggtgctcaccgaggcctggcagtcctacatggccgtgacgggccacctccggaaccgcctcatccgcaagcgcttcctctgcctgggctgggggctccctgcactggttgtggccatttctgtgggattcaccaaggccaaagggtacagcaccatgaactactgctggctctccctggaggggggactgctctatgccttcgtgggacctgccgctgccgttgtgctggtgaacatggtcattgggatcctggtgttcaacaagctcgtgtccaaagacggcatcacggacaagaagctgaaggagcgggcaggggcctccctgtggagctcctgcgtggtgctgccgctgctggcgctgacctggatgtcggctgtgctcgccgtcaccgaccgccgctccgccctcttccagatcctcttcgctgtcttcgactcgctggagggcttcgtcatcgtcatggtgcactgtatcctccgtagagaggtccaggacgctgtgaaatgccgtgtggttgaccggcaggaggagggcaacggggactcagggggctccttccagaacggccacgcccagctcatgaccgacttcgagaaggacgtggatctggcctgtagatcagtgctgaacaaggacatcgcggcctgccgcactgccaccatcacgggcacactgaagcggccgtctctgcccgaggaggagaagctgaagctggcccatgccaaggggccgcccaccaatttcaacagcctgccggccaacgtgtccaagctgcacctgcacggctcaccccgctatcccggcgggcccctgcccgacttccccaaccactcactgaccctcaagagggacaaggcgcccaagtcctccttcgtcggtgacggggacatcttcaagaagctggactcggagctgagccgggcccaggagaaggctctggacacgagctacgtgatcctgcccacggccacggccacgctgcggcccaagcccaaggaggagcccaagtacagcatccacattgaccagatgccgcagacccgcctcatccacctcagcacggcccccgaggccagcctccccgcccgcagcccgccctcccgccagccccccagcggcgggccccccgaggcaccccctgcccagcccccaccgcctccgcccccaccgccaccacctccccagcagcccctgcccccaccgcccaatctggagccggcaccccccagcctgggggatcccggggagcctgccgcccatccgggacccagcacggggcccagcaccaagaacgagaatgtcgccaccttgtctgtgagctccctggagcggcggaagtcgcggtatgcagaactggactttgagaagatcatgcacacccggaagcggcaccaagacatgttccaggacctgaaccggaagctgcagcacgcagcggagaaggacaaggaggtgctggggccggacagcaagccggaaaagcagcagacgcccaacaagaggccctgggagagcctccggaaagcccacgggacgcccacgtgggtgaagaaggagctggagccgctgcagccgtcgccgctggagcttcgcagcgtggagtgggagaggtcgggcgccacgatcccgctggtgggccaggacatcatcgacctccagaccgaggtctgagcgggtgggcggcggccacgcactgggccacggaggagggatgctgctccgcccgctcctgccgcagacgggcacagacacgctcgcgggcagcgggccaggcccgcaccccggcctcagggcgctcagacggcggccaggcacagggcccgcagtgctgggaccagagccagatgcaggacaggaggcggcccggccagcgggcacagggcaccagaggccgaaggtgcctcagactccgccctcctcgggccgaggcccagcgggcagatgggcggacggctgtggaccgtggacaggcccagcgcggccagcgtcccagggtacccgcctgagctcctgctgcggaggagctgcctgcttggcccggccggcctggcaccgttttttaaacacccccatccctcgggaagcagccagctccccacaccttccagggccctaggcccctcctagacccaggtggagggcacagccctccgaccctcatggcccccaggggcaggactgagtcccctccaggaagaagcaggggggaatctattttttctctccttttcttttcttcaataaaaagaattaaaaacccaaaaaaaaaaaaaaaaa

SEQ ID NO: 6654 - DNA, 4842 bp, Homo sapiens
tgcaaagcacctgtgtagcttgcggaagtcagttcagactccagcccgctccagcccggcccgacccgaccgcacccggcgcctgccctcgctcggcgtccccggccagccatgggcccttggagccgcagcctctcggcgctgctgctgctgctgcaggtctcctcttggctctgccaggagccggagccctgccaccctggctttgacgccgagagctacacgttcacggtgccccggcgccacctggagagaggccgcgtcctgggcagagtgaattttgaagattgcaccggtcgacaaaggacagcctatttttccctcgacacccgattcaaagtgggcacagatggtgtgattacagtcaaaaggcctctacggtttcataacccacagatccatttcttggtctacgcctgggactccacctacagaaagttttccaccaaagtcacgctgaatacagtggggcaccaccaccgccccccgccccatcaggcctccgtttctggaatccaagcagaattgctcacatttcccaactcctctcctggcctcagaagacagaagagagactgggttattcctcccatcagctgcccagaaaatgaaaaaggcccatttcctaaaaacctggttcagatcaaatccaacaaagacaaagaaggcaaggttttctacagcatcactggccaaggagctgacacaccccctgttggtgtctttattattgaaagagaaacaggatggctgaaggtgacagagcctctggatagagaacgcattgccacatacactctcttctctcacgctgtgtcatccaacgggaatgcagttgaggatccaatggagattttgatcacggtaaccgatcagaatgacaacaagcccgaattcacccaggaggtctttaaggggtctgtcatggaaggtgctcttccaggaacctctgtgatggaggtcacagccacagacgcggacgatgatgtgaacacctacaatgccgccatcgcttacaccatcctcagccaagatcctgagctccctgacaaaaatatgttcaccattaacaggaacacaggagtcatcagtgtggtcaccactgggctggaccgagagagtttccctacgtataccctggtggttcaagctgctgaccttcaaggtgaggggttaagcacaacagcaacagctgtgatcacagtcactgacaccaacgataatcctccgatcttcaatcccaccacgtacaagggtcaggtgcctgagaacgaggctaacgtcgtaatcaccacactgaaagtgactgatgctgatgcccccaataccccagcgtgggaggctgtatacaccatattgaatgatgatggtggacaatttgtcgtcaccacaaatccagtgaacaacgatggcattttgaaaacagcaaagggcttggattttgaggccaagcagcagtacattctacacgtagcagtgacgaatgtggtaccttttgaggtctctctcaccacctccacagccaccgtcaccgtggatgtgctggatgtgaatgaagcccccatctttgtgcctcctgaaaagagagtggaagtgtccgaggactttggcgtgggccaggaaatcacatcctacactgcccaggagccagacacatttatggaacagaaaataacatatcggatttggagagacactgccaagctggctggagattaaccggacactggtgccatttccactcgggctgagctggacagggaggattttgagcacgtgaagaacagcacgtacacagccctaatcatagctacagacaatggttctccagttgctactggaacagggacacttctgctgatcctgtctgatgtgaatgacaacgcccccataccagaacctcgaactatattcttctgtgagaggaatccaaagcctcaggtcataaacatcattgatgcagaccttcctcccaatacatctcccttcacagcagaactaacacacggggcgagtgccaactggaccattcagtacaacgacccaacccaagaatctatcattttgaagccaaagatggccttagaggtgggtgactacaaaatcaatctcaagctcatggataaccagaataaagaccaagtgaccaccttagaggtcagcgtgtgtgactgtgaaggggccgccggcgtctgtaggaaggcacagcctgtcgaagcaggattgcaaattcctgccattctggggattcttggaggaattcttgctttgctaattctgattctgctgctcttgctgtttcttcggaggagagcggtggtcaaagagcccttactgcccccagaggatgacacccgggacaacgtttattactatgatgaagaaggaggcggagaagaggaccaggactttgacttgagccagctgcacaggggcctggacgctcggcctgaagtgactcgtaacgacgttgcaccaaccctcatgagtgtcccccggtatcttccccgccctgccaatcccgatgaaattggaaattttattgatgaaaatctgaaagcggctgatactgaccccacagccccgccttatgattctctgctcgtgtttgactatgaaggaagcggttccgaagctgctagtctgagctccctgaactcctcagagtcagacaaagaccaggactatgactacttgaacgaatggggcaatcgcttcaagaagctggctgacatgtacggaggcggcgaggacgactaggggactcgagagaggcgggccccagacccatgtgctgggaaatgcagaaatcacgttgctggtggtttttcagctcccttcccttgagatgagtttctggggaaaaaaaagagactggttagtgatgcagttagtatagctttatactctctccactttatagctctaataagtttgtgttagaaaagtttcgacttatttcttaaagcttttttttttttcccatcactctttacatggtggtgatgtccaaaagatacccaaattttaatattccagaagaacaactttagcatcagaaggttcacccagcaccttgcagattttcttaaggaattttgtctcacttttaaaaagaaggggagaagtcagctactctagttctgttgttttgtgtatataattttttaaaaaaaatttgtgtgcttctgctcattactacactggtgtgtccctctgcctttttttttttttttaagacagggtctcattctatcggccaggctggagtgcagtggtgcaatcacagctcactgcagccttgtcctcccaggctcaagctatccttgcacctcagcctcccaagtagctgggaccacaggcatgcaccactacgcatgactaattttttaaatatttgagacggggtctccctgtgttacccaggctggtctcaaactcctgggctcaagtgatcctcccatcttggcctcccagagtattgggattacagacatgagccactgcacctgcccagctccccaactccctgccattttttaagagacagtttcgctccatcgcccaggcctgggatgcagtgatgtgatcatagctcactgtaacctcaaactctggggctcaagcagttctcccaccagcctcctttttatttttttgtacagatggggtcttgctatgttgcccaagctggtcttaaactcctggcctcaagcaatccttctgccttggccccccaaagtgctgggattgtgggcatgagctgctgtgcccagcctccatgttttaatatcaactctcactcctgaattcagttgctttgcccaagataggagttctctgatgcagaaattattgggctcttttagggtaagaagtttgtgtctttgtctggccacatcttgactaggtattgtctactctgaagacctttaatggcttccctctttcatctcctgagtatgtaacttgcaatgggcagctatccagtgacttgttctgagtaagtgtgttcattaatgtttatttagctctgaagcaagagtgatatactccaggacttagaatagtgcctaaagtgctgcagccaaagacagagcggaactatgaaaagtgggcttggagatggcaggagagcttgtcattgagcctggcaatttagcaaactgatgctgaggatgattgaggtgggtctacctcatctctgaaaattctggaaggaatggaggagtctcaacatgtgtttctgacacaagatccgtggtttgtactcaaagcccagaatccccaagtgcctgcttttgatgatgtctacagaaaatgctggctgagctgaacacatttgcccaattccaggtgtgcacagaaaaccgagaatattcaaaattccaaatttttttcttaggagcaagaagaaaatgtggccctaaagggggttagttgaggggtagggggtagtgaggatcttgatttggatctctttttatttaaatgtgaatttcaacttttgacaatcaaagaaaagacttttgttgaaatagctttactgtttctcaagtgttttggagaaaaaaatcaaccctgcaatcactttttggaattgtcttgatttttcggcagttcaagctatatcgaatatagttctgtgtagagaatgtcactgtagttttgagtgtatacatgtgtgggtgctgataattgtgtattttctttgggggtggaaaaggaaaacaattcaagctgagaaaagtattctcaaagatgcatttttataaattttattaaacaattttgttaaaccataaaaaaaaaaaaaaaaaaaaaaaatatgcggccgcaagc

SEQ ID NO: 6655 - DNA, 3593 bp, Homo sapiens
agcggtcgagaggcggggaggagaggaggaaaaatgcgctgatgtgagggcgggcgggcgggcgggagggagggacgtggaggagccggggaggggctccttagaagaatacgcttctgtcgctcgcctgctcgcttttcgctcggcattgcggccagccagccgggcactcggggggcacgcgcggccaccgctagagctctgcccccagcccacccgccagcaggtctggggtggggacccaggtgggggctcctgcagccactgcccggtgcggaccgcacggagcgacccactcctcccagcaccgaggaagaagcaacggagccctcagcaggcgaccggcctccccgcccctgaccacccgcttcccggctgcctttgtggccgcagcttctcgccgccgagccgagggccggcgggggcgcggcgcgcacggacgagcgatgcccagctcgctgttcgcagacctggagcgcaacggcagcggcggcggcggcggcggcagcagcggagggggagagaccctggatgaccaaagagccctgcagctcgcgctcgaccagctctccctgctggggctggacagtgacgagggcgcctctctgtacgacagcgagccgcgcaagaagagcgtgaacatgaccgagtgcgtgccagtacccagttctgagcatgtcgccgagatcgtggggcggcaagggttgtaaaatcaacagcgctgcgggcgatagaccaatacttacatcaagaccccagttcgcgggggaggagcctgtctttgttgtgacgggcaggaaggaggatgtggccatggctcggagggagatcatctctgctgccgagcacttctccatgatccgcgcctcccggaataagaacacggcactcaacggcgcggtgcctgggccgcccaacctgcccgggcagaccaccatccaagtgcgggtaccctaccgcgtggtggggctcgtggtggggcccaaaggcgccacaatcaagcgcatccagcagcagacgcacacgtacatcgtgacgcccagccgggataaggagccggtgttcgaggtgaccggcatgccagagaacgtggatcgcgctcgagaggagattgaggcgcacattgctctgcgtaccggcggcatcattgagctcacagacgagaacgacttccacgccaacggcaccgatgtgggcttcgatctgcatcatgggtccggcgggtccggcccaggcagcctctggagcaagcccacccccagcatcacgcccacccccggccgcaagcctttctctagctaccgcaacgacagctccagctcgcttggcagtgcttccacagactcttatttcggcggcgggaccagcagcagcgcagcggctacccagcgcctggcggactacagcccccctagccccgccctgagctttgcgcacaacggaaacaataacaataacggcaatgggtacacctacacagcggggggagaagcctcagtgccatcccccgacggctgccccgagctgcagcccacttttgacccggctcccgctcccccacctggggcaccacttatctgggcccagttcgagcggtccccgggaggcggacctgcagctccggtatcttcttcctgctcttcttctgcatcttcgtctgcttcttcctcctccgtggtcttccccgggggtggcgccagtgcgccctccaacgccaacctggggctattggtgcaccgccggctgcaccctggcaccagctgcccgcgcctgtctccacccttgcacatggccccgggggcgggagagcaccacctggctcgccgggtgcgcagcgacccgggtggaggaggcctggcctacgccgcttatgccaacgggctgggggcacagctgcctggcttgcagccgtcggacacgtcgggctcctcctcttcgtccagctcctcctccagctcttcatcctcttcctccgggcttcggcgtaaaggcagccgcgactgctccgtgtgcttcgagagcgaagtgattgccgcgctggtgccctgtggccacaacctcttctgcatggagtgcgccaatcgcatctgtgagaagagcgagcccgagtgcccggtctgccacaccgcggtcactcaggccatccgcatcttttcttaaaggcagcgggcgctgctagtgcgcaccgtgctgggggaagggggaacccctccccatcctctttccccagcgctcgcctgcctccctgggtgccccccctctcccttctccttcccggccccaccaacactctgagatccgagaggagcttggaaagctgtagtatccgctcatttttaaaatttaatttttaagtaaaggaatttgccaggatatctgcatcaagagtactgtagcctgggaaacctgaacacctgaaatgcatgctctataaataataggaacggcgacattctagtaatgatagtttttacactgtacttaataggaagcttccaaaagaagaaaaccccacaagttttccattttcttaaagtaggaaaaaatgaacagtaataattatgatgaagatgatagtagtgctatgggatgtgtggactgtttagtgtgttcccctttgtgggtgggttcctatgatacttattatagaacacagtggatcctttttgaatgttcgtggaagggccaggagttcctgtgaaaccaggatactgcagctttattaaagttaaagaaactgtaacatatctcttatatattaaaaacgtttaaaagttttaaagagaaattgcattaatacagattgaagtattttattcttttttgacttgaaaaattatatttcatattgcaaagatgtttacaagtattttaatttaagttcagtgaacttttttgtagctgggttaaatctttttattttagtatggccttatggcaaagaacactgtattattttaataatcacacaattgtgacggaattacaaccataaaatgtgtaatgttttgaacagtattctgttgggatggagattttataggttcagacaaatcttctagatctgcttcacccagcatattttctattcagtgatataaagcatattttattctatattattacaaaaacggaaatgtataaacatgtcaaaaagaactgttgatgctttctaacatttgtataaatagaattcagtgcaagttacaaaaattctgttgcaccactctagttttagtatttctattttaatacatttgtttaccacttgtttatgtatatgtaggtgatgttacttgagcttaaatgtactttactgagcaaagtttaaaaaacaaagtatattttattttatgataaagggcctttaacctcatggtcaaatactaatattatatttgctgagacaagatttgaaattgtatcaagagttttatttttctgacatttaaagttctacataataaaggtaaaacttaagtaatggtgctacttcattttttaagtatttctatataaataaaatattgaagaaaaagggaaaaaaataccccgggccgtagtcgccattgcaaggccaaagaattaaaggc

SEQ ID NO: 6656 - DNA, 1450 bp, Homo sapiens
gagaaatttatatgtattgtgtgtgtgtgtgtgtgtgtgcgcgcgcgcgcgcgcgtgtgtactcgtgcgtgtgcctgtgtgtgcctgggagtgacctcacagctgccggaacataaagactcacaggtccgcctcccaggctcaaagctggctctgcaggggacatgagaggcacaccgaagacccacctcctggccttctccctcctctgcctcctctcaaaggtgcgtacccagctgtgcccgacaccatgtacctgcccctggccacctccccgatgcccgctgggagtacccctggtgctggatggctgtggctgctgccgggtatgtgcacggcggctgggggagccctgcgaccaactccacgtctgcgacgccagccagggcctggtctgccagcccggggcaggacccggtggccggggggccctgtgcctcttggcagaggacgacagcagctgtgaggtgaacggccgcctgtatcgggaaggggagaccttccagccccactgcagcatccgctgccgctgcgaggacggcggcttcacctgcgtgccgctgtgcagcgaggatgtgcggctgcccagctgggactgcccccaccccaggagggtcgaggtcctgggcaagtgctgccctgagtgggtgtgcggccaaggagggggactggggacccagccccttccagcccaaggaccccagttttctggccttgtctcttccctgccccctggtgtcccctgcccagaatggagcacggcctggggaccctgctcgaccacctgtgggctgggcatggccacccgggtgtccaaccagaaccgcttctgccgactggagacccagcgccgcctgtgcctgtccaggccctgcccaccctccaggggtcgcagtccacaaaacagtgccttctagagccgggctgggaatggggacacggtgtccaccatccccagctggtggccctgtgcctgggccctgggctgatggaagatggtccgtgcccaggcccttggctgcaggcaacactttagcttgggtccaccatgcagaacaccaatattaacacgctgcctggtctgtctggatcccgaggtatggcagaggtgcaagacctagtcccctttcctctaactcactgcctaggaggctggccaaggtgtccagggtcctctagcccactccctgcctacacacacagcctatatcaaacatgcacacgggcgagctttctctccgacttcccctgggcaagagatgggacaagcagtcccttaatattgaggctgcagcaggtgctgggctggactggccatttttctgggggtaggatgaagagaaggcacacagagattctggatctcctgctgccttttctggagtttgtaaaattgttcctgaatacaagcctatgcgtgaaaaaaaaaaaaaaaaaaaaaaaaaaaaaa

SEQ ID NO: 6657 - DNA, 3325 bp, Homo sapiens
cccacgcgtccgctgggcccagctcccccgagaggtggtcggatcctctgggctgctcggtcgatgcctgtgccactgacgtccaggcatgaggtggttcctgccctggacgctggcagcagtgacagcagcagccgccagcaccgtcctggccacggccctctctccagcccctacgaccatggactttactccagctccactggaggacacctcctcacgcccccaattctgcaagtggccatgtgagtgcccgccatccccaccccgctgcccgctgggggtcagcctcatcacagatggctgtgagtgctgtaagatgtgcgctcagcagcttggggacaactgcacggaggctgccatctgtgacccccaccggggcctctactgtgactacagcggggaccgcccgaggtacgcaataggagtgtgtgcacaggtggtcggtgtgggctgcgtcctggatggggtgcgctacaacaacggccagtccttccagcctaactgcaagtacaactgcacgtgcatcgacggcgcggtgggctgcacaccactgtgcctccgagtgcgccccccgcgtctctggtgcccccacccgcggcgcgtgagcatacctggccactgctgtgagcagtgggtatgtgaggacgacgccaagaggccacgcaagaccgcaccccgtgacacaggagccttcgatgctgtgggtgaggtggaggcatggcacaggaactgcatagcctacacaagcccctggagcccttgctccaccagctgcggcctgggggtctccactcggatctccaatgttaacgcccagtgctggcctgagcaagagagccgcctctgcaacttgcggccatgcgatgtggacatccatacactcattaaggcagggaagaagtgtctggctgtgtaccagccagaggcatccatgaacttcacacttgcgggctgcatcagcacacgctcctatcaacccaagtactgtggagtttgcatggacaataggtgctgcatcccctacaagtctaagactatcgacgtgtccttccagtgtcctgatgggcttggcttctcccgccaggtcctatggattaatgcctgcttctgtaacctgagctgtaggaatcccaatgacatctttgctgacttggaatcctaccctgacttctcagaaattgccaactaggcaggcacaaatcttgggtcttggggactaacccaatgcctgtgaagcagtcagcccttatggccaataacttttcaccaatgagccttagttaccctgatctggacccttggcctccatttctgtctctaaccattcaaatgacgcctgatggtgctgctcaggcccatgctatgagttttctccttgatatcattcagcatctactctaaagaaaaatgcctgtctctagctgttctggactacacccaagcctgatccagcctttccaagtcactagaagtcctgctggatcttgcctaaatcccaagaaatggaatcaggtagacttttaatatcactaatttcttctttagatgccaaaccacaagactctttgggtccattcagatgaatagatggaatttggaacaatagaataatctattatttggagcctgccaagaggtactgtaatgggtaattctgacgtcagcgcaccaaaactatcctgattccaaatatgtatgcacctcaaggtcatcaaacatttgccaagtgagttgaatagttgcttaattttgatttttaatggaaagttgtatccattaacctgggcattgttgaggttaagtttctcttcacccctacactgtgaagggtacagattaggtttgtcccagtcagaaataaaatttgataaacattcctgttgatgggaaaagcccccagttaatactccagagacagggaaaggtcagcccatttcagaaggaccaattgactctcacactgaatcagctgctgactggcagggctttgggcagttggccaggctcttccttgaatcttctcccttgtcctgcttggggttcataggaattggtaaggcctctggactggcctgtctggcccctgagagtggtgccctggaacactcctctactcttacagagccttgagagacccagctgcagaccatgccagacccactgaaatgaccaagacaggttcaggtaggggtgtgggtcaaaccaagaagtgggtgcccttggtagcagcctggggtgacctctagagctggaggctgtgggactccaggggcccccgtgttcaggacacatctattgcagagactcatttcacagcctttcgttctgctgaccaaatggccagttttctggtaggaagatggaggtttaccggttgtttagaaacagaaatagacttaataaaggtttaaagctgaagaggttgaagctaaaaggaaaaggttgttgttaatgaatatcaggctattatttattgtattaggaaaatataatatttactgttagaattcttttatttagggccttttctgtgccagacattgctctcagtgctttgcatgtattagctcactgaatcttcacgacaatgttgagaagttcccattattatttctgttcttacaaatgtgaaacggaagctcatagaggtgagaaaactcaaccagagtcacccagttggtgactgggaaagttaggattcagatcgaaattggactgtctttataacccatattttccccctgtttttagagcttccaaatgtgtcagaataggaaaacattgcaataaatggcttgattttttaaaaaaaaaaaaaaaaaaaaaaatctttctagctccttttcaaaagacgagaatatctgattttctgataatttaggtgcttaagcatccaaaatacatgggacacacaaaaatccaggaatcccctgtagcttattccctctttcccatcggaaccagctctcatcacacatttaaaagatgattctgtttacccaatgctgcatattgaatgttgtgtagttattcacagggaattctgtgcagtgtgcagagagattcctaaacgggaaaaggactgggaatacatcctccttactgtgacctccccaaaacctagtccagtgcaaggtatacagtggtgctcattaaatacttgatgaatacaggaagctgtgcatgtgttcctacttttattcgaagctctcttcttccaaagctacatgaaaatagaattttaacagtcaaaattttatattaagtgccttagcaaaagagacatttaatattttcaaagaaatgcatatgtatgtataca

SEQ ID NO: 6658 - DNA, 2001 bp, Homo sapiens
acacaatcgggcttcctagccgctggcggacccgatggggcgtcctgcgagggttcggcgagggttctgccaggatagtagcattgcgcccaaggagtgagaggcacccggggctactggagccagaccctcaacccgccctagtgggaggcgaagaacaacgaaagcctcgtattcccatttctctaatggctaatgacattaaagtatcatttgtggaaaagattatctgtcctgcattaaactgcttttggactttcgtctaaaatcagttggaccggtttttgttggcaaagttttgcctgaagcttattccaacagatgccaagcggacctcgcgccgctctgcgttgggccagcccctcacagctggtttcttaccacgtattgcgcaagcggaatctatgcctgttacccacactccctgcgcccccgcaccccgctcctgtgcgcaagtcggaatataaaaccgcggaggagtgagctcttggggtgtccagttggttgccgcggcagtctctccgagcagcgcatttgtcttctaggctgcttggttcgtgcctccgagaaaggggtctcctgctgccagctaagtgtgggagaacttgtgcacgtatctcccctccgaatcccaacgatgggtaacgccagctttggctccaaggaacagaagctgctgaagcggttgcggcttctgcccgccctgcttatcctccgcgccttcaagccccacaggaagatcagagattaccgcgtcgtggtagtcggcaccgctggtgtggggaaaagtacgctgctgcacaagtgggcgagcggcaacttccgtcatgagtacctgccgaccattgaaaatacctactgccagttgctgggctgcagccacggtgtgctttccctgcacatcaccgacagcaagagtggcgacggcaaccgcgctctgcagcgccacgttatagcccggggccacgccttcgtcctggtctactcagtcaccaagaaggaaaccctggaagagctgaaggccttctatgagctgatctgcaagatcaaaggtaacaacctgcataagttccccatcgtgctggtgggcaataaaagtgatgacacccaccgggaggtggccctgaatgatggtgccacctgtgcgatggagtggaattgcgccttcatggagatttcagccaagaccgatgtgaatgtgcaggagctgttccacatgctgctgaattacaagaaaaagcccaccaccggcctccaggagcccgagaagaaatcccagatgcccaacaccactgagaagctgcttgacaagtgcataatcatgtgagccctgggccttaagagccagctcttcctatcctgtagcgtgtagaaaacgtggactcatttcactatgttacatgtacatggttgattttgtgctgttgtttggactgtaacatccatgttgtcaatacgtataccttgtaagtggataacttttctttttcccaggccagagaattcaaattgttaaaacattggcatttgaagaggagaacaaaatgtagcatgatgtatttaaagtaaggcctttagtaatgaatgtaatgagagaaaatgttttgaaaagaacaaaacatcaaaatgaatagaaagaaaaattggaaggcgtccttttggtaacccgattattgtgtattacctttaaatatttcacatcctgtaagtgcttaatcatatcttttaattgtgtatttaagaaaagtgttttcacaacaaaagcttttgataaattgctgcgtgacatatactaaataaaaaaatgaatatgttgatcattaggggtgtgggagcagagaaaattgtgaaagtgactctcactaaagatgttagtagtttctcatgtcatttaaaaatgtttgagtattctgcatagcagtttgtaaaagtgtaacagcttattgacttaataaagcttttcctgcatgcaaaaaaaaaaaaaaaaaaaaaaaaaaaaaa

SEQ ID NO: 6659 - DNA, 2103 bp, Homo sapiens
gtacgggtatttgaatcctggaacaaggctacagcgtcgaagatccccagcgctgcgggctcggagagcagtcctaacggcgcctcgtacgctagtgtcctcccttttcagtccgcgtccctccctgggccgggctggcactcttgccttccccgtccctcatggcgctgctccgacgcccgacggtgtccagtgatttggagaatattgacacaggagttaattctaaagttaagagtcatgtgactattaggcgaactgttttagaagaaattggaaatagagttacaaccagagcagcacaagtagctaagaaagctcagaacaccaaagttccagttcaacccaccaaaacaacaaatgtcaacaaacaactgaaacctactgcttctgtcaaaccagtacagatggaaaagttggctccaaagggtccttctcccacacctgaggatgtctccatgaaggaagagaatctctgccaagctttttctgatgccttgctctgcaaaatcgaggacattgataacgaagattgggagaaccctcagctctgcagtgactacgttaaggatatctatcagtatctcaggcagctggaggttttgcagtccataaacccacatttcttagatggaagagatataaatggacgcatgcgtgccatcctagtggattggctggtacaagtccactccaagtttaggcttctgcaggagactctgtacatgtgcgttggcattatggatcgatttttacaggttcagccagtttcccggaagaagcttcaattagttgggattactgctctgctcttggcttccaagtatgaggagatgttttctccaaatattgaagactttgtttacatcacagacaatgcttataccagttcccaaatccgagaaatggaaactctaattttgaaagaattgaaatttgagttgggtcgacccttgccactacacttcttaaggcgagcatcaaaagccggggaggttgatgttgaacagcacactttagccaagtatttgatggagctgactctcatcgactatgatatggtgcattatcatccttctaaggtagcagcagctgcttcctgcttgtctcagaaggttctaggacaaggaaaatggaacttaaagcagcagtattacacaggatacacagagaatgaagtattggaagtcatgcagcacatggccaagaatgtggtgaaagtaaatgaaaacttaactaaattcatcgccatcaagaataagtatgcaagcagcaaactcctgaagatcagcatgatccctcagctgaactcaaaagccgtcaaagaccttgcctccccactgataggaaggtcctaggctgccgtggcccctggggatgtgtgcttcattgtgccctttttcttattggtttagaactcttgattttgtacatagtcctctggtctatctcatgaaacctcttctcagaccagttttctaaacatatattgaggaaaaataaagcgattggtttttcttaaggtaaaaaaaaaaaaaaaaaaaaaaaaaaaaaaaaaaaaaaaaaaaaacaaaaacaaaaaaaaaaaaacaacagaataacaaagaacaacagcaaacagacaacaccataacacaaataacaataaacaacaaaactacagaaacccaagaaaaaactgagaaaatagactaaagaaagaaacaaaagaagagaagagccaaacgaaaaggaggagagggcggcggcgtcaaccacacaagacacacgcgcgcgggcacgccgcaaaggataccaaaccggcaccaaaagaagcaaaagggaagagagagaagaaaactccacagacgaagaacagaacagtaaacaaaaatagggaggagacgcaaacagacaacgaccacaacaacaacaagcagcgccacgagaaggaacacacacacacccgaggcacaactacaaaagacaggcgaaaagaaacataatgagtgagagcaaaagacacaaagaaggacagacagacgaacaaacaaagaaaaaaaggacaaacgaagaagaagaaacaaaaccaagaaaaggaaagcaaggaagcaggaaaaagag

SEQ ID NO: 6660 - DNA, 1077 bp, Homo sapiens
ggggcagggcgcagaggaagaggagaagggcagccaggagggggaccaggaagtccagggacatggggtcccagtggagacaccagaggcgcaggaggagccgtgctcaggggtccttgagggggctgtggtggccggtgagggccaaggggagctggaagggtctctcttgttagcccagggaagcccagggaccagtgggtccccccgaaagcccctgtgcttgcagcagtgtccaccccagtgtctaacagtcctcccgggctgccagccctgactgtcgggcccccaagtggtcacctccccgtgtatgaaaaggccttcagccctgactgcttcctgacactccctccttggcctccctgtggtgccaatcccagcatgtgctgattctacagcaggcagaaatgctggtccccggtgccccggaggaatcttaccaaagtgctgggattacaggcgtgagccaccgtgcccggcccaaactactttttaaaacagctacagggtaaaatcctgcagcacccactctggaaaatactgctcttaattttcctgaaggtggccccctgtttctagttggtccaggattagggatgtggggtatagggcatttaaatcctctcaagcgctctccaagcacccccggcctgggggtgagtttctcatcccgctactgcttgctgggatcagggtgaatgaatggaactcttcctgtttggcctccaaagcagcctagaagctgaggggctgtgtttgaggggacctccaccctggggaagtccgaggggctggggaagggtttctgacgcccagcctggagcaggggggccctggccaccccctgttgctcacacattgtctggcagcctgtgtccacaatattcgtcagtcctcgacagggagcctgggctccgtcctgctttagggaggctctggcaggaggtcctctcccccatccctccatctggggctcccccaacctctgcacagctctccaggtgctgagatataatgcaccagcacaataaacctttattccggcaaaaaaaaaaaaaaaaaaaaaaaaaaaaaaaa

SEQ ID NO: 6661 - DNA, 3452 bp, Homo sapiens
ggcacgaggggccagagtccggagcagccgccgcccgaccgcgccgagctcagttcgctgtccgcgccggctcccaccccggcccgaccccgacccggcccggtcaggccccatactcagtagccacgatggaggtgatgaacctgatggagcagcctatcaaggtgactgagtggcagcagacatacacctacgactcgggtatccactcgggcgccaacacctgcgtgccctccgtcagcagcaagggcatcatggaggaggatgaggcctgcgggcgccagtacacgctcaagaaaaccaccacttacacccagggggtgccccccagccaaggtgacctggagtaccagatgtccacaacagccagggccaaacgggtgcgggaggccatgtgccctggtgtgtcaggcgaggacagctcgcttctgctggccacccaggtggaggggcaggccaccaacctgcagcgactggccgagccgtcccagctgctcaagtcggccattgtgcatctcatcaactaccaggacgatgccgagctggccactcgcgccctgcccgagctcaccaaactgctcaacgacgaggacccggtggtggtgaccaaggcggccatgattgtgaaccagctgtcgaagaaggaggcgtcgcggcgggccctgatgggctcgccccagctggtggccgctgtcgtgcgtaccatgcagaataccagcgacctggacacagcccgctgcaccaccagcatcctgcacaacctctcccaccaccgggaggggctgctcgccatcttcaagtcgggtggcatccctgctctggtccgcatgctcagctcccctgtggagtcggtcctgttctatgccatcaccacgctgcacaacctgctcctgtaccaggagggcgccaagatggccgtgcgcctggccgacgggctgcaaaagatggtgcccctgctcaacaagaacaaccccaagttcctggccatcaccaccgactgcctgcagctcctggcctacggcaaccaggagagcaagctgatcatcctggccaatggtgggccccaggccctcgtgcagatcatgcgtaactacagttatgaaaagctgctctggaccaccagtcgtgtgctcaaggtgctatccgtgtgtcccagcaataagcctgccattgtggaggctggtgggatgcaggccctgggcaagcacctgaccagcaacagcccccgcctggtgcagaactgcctgtggaccctgcgcaacctctcagatgtggccaccaagcaggagggcctggagagtgtgctgaagattctggtgaatcagctgagtgtggatgacgtcaacgtcctcacctgtgccacgggcacactctccaacctgacatgcaacaacagcaagaacaagacgctggtgacacagaacagcggtgtggaggctctcatccatgccatcctgcgtgctggtgacaaggacgacatcacggagcctgccgtctgcgctctgcgccacctcactagccgccaccctgaggccgagatggcccagaactctgtgcgtctcaactatggcatcccagccatcgtgaagctgctcaaccagcccaaccagtggccactggtcaaggcaaccatcggcttgatcaggaatctggccctgtgcccagccaaccatgccccgctgcaggaggcagcggtcatcccccgcctcgtccaactgctggtgaaggcccaccaggatgcccagcgccacgtagctgcaggcacacagcagccctacacggatggtgtgaggatggaggagattgtggagggctgcaccggagcactgcacatcctcgcccgggaccccatgaaccgcatggagatcttccggctcaacaccattcccctgtttgtgcagctcctgtactcgtcggtggagaacatccagcgcgtggctgccggggtgctgtgtgagctggcccaggacaaggaggcggccgacgccattgatgcagagggggcctcggccccactcatggagttgctgcactcccgcaacgagggcactgccacctacgctgctgccgtcctgttccgcatctccgaggacaagaacccagactaccggaagcgcgtgtccgtggagctcaccaactccctcttcaagcatgacccggctgcctgggaggctgcccagagcatgattcccatcaatgagccctatggagatgacttggatgccacctaccgccccatgtactccagcgatgtgccccttgacccgctggagatgcacatggacatggatggagactaccccatcgacacctacagcgacggcctcaggcccccgtaccccactgcagaccacatgctggcctaggcggcctggccccagtgcggttcctcatctgagaggctctccgtgcaggcgatggggcaagacagaaaagtgcctgagctggggaagccggggtgtaacttcctgctgcaccctgcgcctccagaggtcctccgtagggtctttcttgggatagtgttctgctcctgcttttctgtcctgggcatgggtccagggcctgacaccccctccccgcccctgtggccctggccactaaagcttcagactcaagtacccattctgttttcccccagcaacgcccctccaaacctccagcctccctgtctccagctgcctgggcccggaagggctttggttccttctctgggtctgattttctcactgaactccaccgaccaactgccctaagcccccagggcctccagggcccaggttcgagacccaaacccccaaaatccaaaacttctcttgaaaagttcagggaccgtccaggggagatggggaggagatatggagtgagtcacctgctccagaagatgccagcttctctctccagggtgcttagttggctttgcccacccctcactccccagggagctctggggacagcttcctcacacccctgtcccacccacacagctgccctagctgaccccgagaagtgctcttggctgacccctctggtgtgtggtgaggggctttctcttccccttcctgtttcagacccccccatttcccgcacatggtgtggggggctgggggaggtccaagcagagtgttttattattatcgctttatgtttttggttattggtttttttgtatagaccaaagcaaagaaaataaaaataacacagaaaaaaaaaaaaaaaaaaaaaaaaaagagggccctacgcccggcggggcgaacaccgggcaatcgatggccatgggctacggggtcccgaccagttttggccacgtgcgcactgccggcgcccaaaggagcggctaatcgagacaggtccctgtgcagacacgcgaaccgcacaacgccccccacagcaaacaccaataccaccgcgaacgcgcttcacacgacctactaacacaaacaaccccccgacaa

SEQ ID NO: 6662 - DNA, 1192 bp, Homo sapiens
  misc_feature (992)..(1020): n is a, c, g, or t
tcgacccacgcgtccgcggacgcgtgggcagatatcttttttttttttttttttagtatttattgatcattcttgggtgtttctcggagagggggatgtggcagggtcataggataatagtggagagaaggtcagcagataaacacgtgaacaaagttctctggttttcctaggcagaggtccctgcagccttcccacggtgtttgtgtccctgggtacttgagattagggagtggtgatgactcttaacgagcagcagaatcaggcccagctcccaattccctctccccagtcttctccaggtgtcccctcccacgagcgcacaggaaaaggaccacatggcctggcgagccctacacccactgctactgctgctgctgctgttcccaggctctcaggcacaatccaaggctcaggtacttcaaagtgtggcagggcagacgctaaccgtgagatgccagtacccgcccacgggcagtctctacgagaagaaaggctggtgtaaggaggcttcagcacttgtgtgcatcaggttagtcaccagctccaagcccaggacgatggcttggacctctcgattcacaatctgggacgaccctgatgctggcttcttcactgtcaccatgactgatctgagagaggaagactcaggacattactggtgtagaatctaccgcccttctgacaactctgtctctaagtccgtcagattctatctggtggtatctccagcctctgcctccacacagaccccctggactccccgcgacctggtctcttcacagacccagacccagagctgtgtgcctcccactgcaggagccagacaagcccctgagtctccatctaccatccctgtcccttcacagccacagaactccacgctccgccctggccctgcagcccccattgccctggtgcctgtgttctgtggactcctcgtagccaagagcctggtgctgtcagccctgctcgtctggtggggggacatnnnnnnnnnnnnnnnnnnnnnnnnnnnnngcctggatacccaaaaagccacctgccaccttcaacaggtcacggaccttccctggacctcagtttcctcacctgtagagagagaaatattatatcacactgttgcaaggactaagataagcgatgatgatgatgaacacactttgtgaataataaaattatctgaatgttt

SEQ ID NO: 6663 - DNA, 2491 bp, Homo sapiens
  misc_feature (2485)..(2485): n is a, c, g, or t
  misc_feature (2490)..(2490): n is a, c, g, or t
agttggtccgagctgccgaaaggtctggtcgcagagacaggaacgtgtaatcctcagcgtgctccagcccacagcttcgctctactgctcggcagggcagctggcctctgggcaccggcggcccctctgcctcgcggaaaagcctgatgaagtcctccgatattgatcaggatttattcacagacagttactgcaaggtgtgcagtgcacagctgatctccgaatcgcagcgtgtggcccactacgagagtcgaaaacatgcaagcaaagtccgactgtattacatgcttcaccccagggatggagggtgtcctgccaagaggctccggtcagaaaatggaagtgatgccgacatggtggataagaacaagtgctgcacactctgcaacatgtcattcacttcagcggtggtggccgattcccattatcaaggcaaaatccacgccaagaggttaaaactcttgctaggagagaagaccccattaaagaccacagcaacacccctgagcccacttaagcccccacggatggacactgctccggtggtcgcatctccctatcaaagaagagattcagacagatactgtgggctctgtgcagcctggtttaataaccctctgatggcccagcaacattatgatggcaagaaacacaaaaagaatgcggcaagagttgctttgttagaacaactggggacaaccctggatatgggggaactgagaggtctgaggcgcaattacagatgtaccatctgcagtgtctccctaaactcaatagaacagtatcatgcccatctgaaaggatctaaacaccagaccaacctgaagaataagtagtgaaagcatcaatcaagacataagaacaaaacattagcatttctctgccgtggagaattgcttatcaaccaccagaggaggcttctttcttgaacaataaacatttcttataaggattcacagattcacatacgactgatcttgatttttggaaatgaatgaggtttcttttttctttttcctttttttaattttggggtaagttatgatatttggatggatttttaaattctttcctgataacatatttagcacatgttctaaattataatcctatagcaaacagttggagcattattcaaactgaaagtggaaaaatttaaatttccaatttattctagatttcctcagagcataattattctgttaaatcctcaatgagtgtgatgtaaaccacctctatccagaaatatacattcttttctcatcatgttggacacagttgagggtgacatgcacagaactggaacagatcactattagtggaaaataccaaatggacaaataaataccagtcgttttctccgttctccaagcacaggagccaggtttaccatctgaacaatgaagacgaagggagtaaataaaggaagaattctcatcttttttcctgatcattcaaagaacagtttctcaaggttaagccaagtcctccttgcaagttgccaaataatagcttaggaaaagaattagtctgcctgcatgatgatcttcttaggcaaaaacgtcttcacagcccttgaccttggtgaatttttttccccaaaagcatccaaaagaagaattataaaccccagaacgagatggaaataaacaagtattttttttttatgatgtttggcctgaactgtgggctttaattgggggatactgatcgtttggaaagaagtgagaaaattctgaagaaatggcggccttgggctaggcggggtcccctatttcttctgtttctcactgaagtcctactgctgagccaagactcagtcactctggaaagagcatgaccgataaagaaaacagttcctttctgatggggagcgtctgagtgcagatcatgaggctctttctctaggtttaattcttttccatggtgaccggacttggtgtcttgtagcctggttacgaagtgggacgttgagcttctactgacgatgccctgcatggaccagctgggatctggctggggctgccctgtgtccctaacgaccataggcaatccatcttcttgtgtcagcaatttctggacacccactgttttccaccaagagctgaggtggcaacaactcagtgagcaataaacaaaatgacacagaaatgcacagtgttgttatgaaggagcctgtttacctgtgttcaaaatctggcaccattcccttgagcagggcccgctcaggagggaccaggtctgccagtttctgtgcctgcagagagacgaagccccacgagccacaccctactctacaagaggaaagggggttggatgggaagaatctattttgctgttttggaaagcacacagccgacctacaaacctcctgtgatggtgtttcttcggatgtgtaaaataaggctttatttgtcaattccgctgtaaaataagcattgtccgagtaaaaacagcagcaacaacaaaaaaaaaaaaaaagggngaaanc

SEQ ID NO: 6664 - DNA, 1436 bp, Homo sapiens
cttcgctctcgctcggctccctctctagctgaccttccctttcgaattcggcacgaggcgcccggcccctggccccagcaccctgtccgctgccgcctcagagccgggaaaagcagccggagcccccgccgcccctgccgcagcgcgggcggtcagcgcgcagcccggcacccgcagcctgcagcctgcagcccgcagcccgcagcccggagccagatcgcgggctcagaccgaacccgactcgaccgccgcccccagccaggcgccatgctgccgcttctgctgggcctgctgggcccagcggcctgctgggccctgggcccgacccccggcccgggatcctctgagctgcgctcggccttctcggcggcacgcaccacccccctggagggcacgtcggagatggcggtgaccttcgacaaggtgtacgtgaacatcgggggcgacttcgatgtggccaccggccagtttcgctgccgcgtgcccggcgcctacttcttctccttcacggctggcaaggccccgcacaagagcctgtcggtgatgctggtgcgaaaccgcgacgaggtgcaggcgctggccttcgacgagcagcggcggccaggcgcgcggcgcgcagccagccagagcgccatgctgcagctcgactacggcgacacagtgtggctgcggctgcatggcgccccgcactacgcgctaggcgcgcccggcgccaccttcagcggctacctagtctacgccgacgccgacgctgacgcgcctgcgcgcgggccgcccgcgccccccgagccgcgctcggccttctcggcggcgcgcacgcgcagcttggtgggctcggacgctggccccgggccgcggcaccaaccactcgccttcgacaccgagttcgtcaacattggcggcgacttcgacgcggcggccggcgtgttccgctgccgtctgcccggcgcctacttcttctccttcacgctgggcaagctgccgcgtaagacgctgtcggttaagctgatgaagaaccgcgacgaggtgcaggccatgatttacgacgacggcgcgtcgcggcgccgcgagatgcagagccagagcgtgatgctggccctgcggcgcggcgacgccgtctggctgctcagccacgaccacgacggctacggcgcctacagcaaccacggcaagtacatcaccttctccggcttcctggtgtaccccgacctcgcccccgccgccccgccgggcctcggggcctcggagctactgtgagccccgggccagagaagagcccgggagggccaggggcgtgcatgccaggccgggcccgaggctcgaaagtcccgcgcgagcgccacggcctccgggcgcgcctggactctgccaataaagcggaaagcgggcacgcgcagcgcccggcagcccaggcaaaaaaaaaaaaaaaaaaaaaa

SEQ ID NO: 6665 - DNA, 740 bp, Homo sapiens
tcccgtcctacatacgtgttgtcagaaaaaaaataaggaaaaaggaaaaaaacacctttttaaagagacgctgaaccttctccactaatccgtccttatccctcaggattgccatcactgattggggttggctttgggtatggaaagaacatagaacttggagtcggaggacctgattgtatctcagcttaggcacctagcagatgtatgacctaggataagtcattaacctctctggtttttttagatgtgatcggggttggaaggcaggtagcaatatctaccttactgtatcattttgaagactaactaggataacaatgtgaatccttgtcagttggcaagtatcaatggaaacttagccaacataagctcactccttttggatatcccaatgtgtgaaaaggccctttagcacctgagaaatcagaatgcctgggacatacatgtttggtgaacgaatgaaggagagatggtgacagaatttactaagacccagatgtgttcttgttttctaactttatccaggaaaataaacagcaaaagatttagcaaatcttatcatttcttagtgggttataaccatgagctattaattttgacacaaaaaaaaacttacctcctccctttatttcagcttgtgaggatatgtcactaattgacttcattaatttgattcaaactgtgcactagaagtgggatagaaacacatgaagtataccggaaagaaattatactcg

SEQ ID NO: 6666 - DNA, 6881 bp, Homo sapiens
  misc_feature (3813)..(3828): n is a, c, g, or t
  misc_feature (6328)..(6328): n is a, c, g, or t
  misc_feature (6337)..(6338): n is a, c, g, or t
  misc_feature (6343)..(6343): n is a, c, g, or t
  misc_feature (6355)..(6355): n is a, c, g, or t
  misc_feature (6367)..(6367): n is a, c, g, or t
  misc_feature (6383)..(6385): n is a, c, g, or t
  misc_feature (6393)..(6393): n is a, c, g, or t
  misc_feature (6396)..(6396): n is a, c, g, or t
cgcgcgtccgcccagggggctccggaagctgccccggcccgcggcctcctccctcgctcccgcttcccctttctcgctcaccgccgccctccttccccagctccctcgccgtccgcccgccccacagccagcggctccgcgccccctgcagccacgatgcccgcggcccggccgcccgccgcgggactccgcgggatctcgctgttcctcgctctgctcctggggagcccggcggcagcgctggagcgagatgctcttcccgagggagatgctagccctttgggtccttacctcctgccctcaggagccccggagagaggcagtcctggcaaagagcaccctgaagagagagtggtaacagcgccccccagttcctcacagtcggcggaagtgctgggcgagctggtgctggatgggaccgcaccctctgcacatcacgacatcccagccctgtcaccgctgcttccagaggaggcccgccccaagcacgccttgccccccaagaagaaactgccttcgctcaagcaggtgaactctgccaggaagcagctgaggcccaaggccacctccgcagccactgtccaaagggcagggtcccagccagcgtcccagggcctagatctcctctcctcctccacggagaagcctggcccaccgggggacccggaccccatcgtggcctccgaggaggcatcagaagtgcccctttggctggatcgaaaggagagtgcggtccctacaacacccgcacccctgcaaatctcccccttcacttcgcagccctatgtggcccacacactcccccagaggccagaacccggggagcctgggcctgacatggcccaggaggccccccaggaggacaccagccccatggccctgatggacaaaggtgagaatgagctgactgggtcagcctcagaggagagccaggagaccactacctccaccattatcaccaccacggtcatcaccaccgagcaagcaccagctctctgcagtgtgagcttctccaatcctgaggggtacattgactccagcgactacccactgctgcccctcaacaactttctggagtgcacatacaacgtgacagtctacactggctatggggtggagctccaggtgaagagtgtgaacctgtccgatggggaactgctctccatccgcggggtggacggccctaccctgaccgtcctggccaaccagacactcctggtggaggggcaggtaatccgaagccccaccaacaccatctccgtctacttccggaccttccaggacgacggccttgggaccttccagcttcactaccaggccttcatgctgagctgcaactttccccgccggcctgactctggggatgtcacggtgatggacctgcactcaggtggggtggcccactttcactgccacctgggctatgagctccagggcgctaagatgctgacatgcatcaatgcctccaagccgcactggagcagccaggagcccatctgctcagctccttgtggaggggcagtgcacaatgccaccatcggccgcgtcctctccccaagttaccctgaaaacaccaatgggagccaattctgcatctggacgattgaagctccagagggccagaagctgcacctgcactttgagaggctgttgctgcatgacaaggacaggatgacggttcacagcgggcagaccaacaagtcagctcttctctacgactcccttcaaaccgagagtgtcccttttgagggcctgctgagcgaaggcaacaccatccgcatcgagttcacgtccgaccaggcccgggcggcctccaccttcaacatccgatttgaagcgtttgagaaaggccactgctatgagccctacatccagaatgggaacttcactacatccgacccgacctataacattgggactatagtggagttcacctgcgaccccggccactccctggagcagggcccggccatcatcgaatgcatcaatgtgcgggacccatactggaatgacacagagcccctgtgcagagccatgtgtggtggggagctctctgctgtggctggggtggtattgtccccaaactggcccgagccctacgtggaaggtgaagattgtatctggaagatccacgtgggagaagagaaacggatcttcttagatatccagttcctgaatctgagcaacagtgacatcttgaccatctacgatggcgacgaggtcatgccccacatcttggggcagtaccttgggaacagtggcccccagaaactgtactcctccacgccagacttaaccatccagttccattcggaccctgctggcctcatctttggaaagggccagggatttatcatgaactacatagaggtatcaaggaatgactcctgctcggatttacccgagatccagaatggctggaaaaccacttctcacacggagttggtgcggggagccagaatcacctaccagtgtgaccccggctatgacatcgtggggagtgacaccctcacctgccagtgggacctcagctggagcagcgaccccccattttgtgagaaaacggaggagtccctggcatgtgacaacccagggctgcctgaaaatggataccaaatcctgtacaagcgactctacctgccaggagagtccctcaccttcatgtgctacgaaggctttgagctcatgggtgaagtgaccatccgctgcatcctgggacagccatcccactggaacgggcccctgcccgtgtgtaaagtagcagaagcggcagcagagacgtcgctggaaggggggaacatggccctggctatcttcatcccggtcctcatcatctccttactgctgggaggagcctacatttacatcacaagatgtcgctactattccaacctccgcctgcctctgatgtactcccacccctacagccagatcaccgtggaaaccgagtttgacaaccccatttacgagacaggggaaaccagagagtatgaggtttctatctaaagagagctacacttgagaaggggacttgtgaactcaaccacaatctcctcgagacattcatccagagaccatgtggcacttgattgaaaccccagaatgtcgactgtcttttgtttagactctttatcaaaggtttactgttttcttccctgtatttattatatttaaaagtgaaataggtgtgggtttggatgtttcgcggcctcagccaaattcatgttacagcctcaattctgaaggcaggtggaagacttgcaaaatggcaaaccgcggcagcaaaaacacaaaacagcagatggagtttctcccatcagcaatgccatgctaaggctgcattgaattgcatgcatctttgggaaccatgcccatgatgttttcagtacaaatctaagtcccaagattaggttggaaagggtatttcttgttggcttagtttgggttggaatttagcatgggtacttaaacccatttggagagctgtgctcctaaacaaattctgtgtcctctcttcccattttgccagcttctgaaaggtttttccacagcccctccctctcacggttcttctgaaggtagcaaaggtgttatataaacattgtcttttaccactctggcctcgctggacagtgacaaaacaagaaaacgttttctttctagaaaggtgataaacgaccaaaggcaatttttcagagacaaatgagagatttgagagttccaatgaagaattgggtgagggggatcattgggtaagggaattgggttaaaatgttcttttctttgacactctttcaatgatgaaagagcgtnnnnnnnnnnnnnnnngtgccagaattgatcaccatgttcagcaagccactctcaagctgtggtaataaacacacaggcttgggaggcaccagcggccccactcatacagtgacaaggatttgtgatgggaaaaaggaggtgccatgtttggaaatgcaggggtgagctctggtttctcctggggttctggaatatctcagccctcaaaatagaggagactcaagtgcactgattctctaaaaggtgtcatcttcagaatacttgccatcaagtatttcagggggcgggagggtcccatgagaagaaactatttttctattctccaaagctgtctggatgttggagggtggtgtgaatgctgactgaggaggtgcagagaacaggggcaggggattttaaatcacagcagaccatccagtggaatcctgtatcatctgatctgaacatcaatgaagacagagagaggaatttcattcagaaaggattccatagccccacatctagtcacacgggcattcctcttattttatcagggtctgttttcccccaacccagtgaaaccggtgagtgtgtaactcttgggaagattcttttctaaatacaggtataaagagaaggtggagggtgcgggtgcatggaagaaatactatgtgtgaagcagattcaccttcctgggaccggtgacatggtggtgacagtcaatggcttggacagacagacgggctcagtggcatttggaaccctctttggtgccctcccattctctctggaattgtttcaagtctgctggttttcaaacaagaaaagacctttctggccatagggagaatagcagggagtctatgttttggtggttacattggaaacatcttaagcaagagagggaaagttgattttaggcacacatgtaccctccttgacagcaggaactcagacttcaatcttgggggtctaagaccagaatattttccttctgccagaaaagaatcttgcacatatactcctgaggcatgagtgtgtggtccatggcaagaaatagctaaaggctgctttccaggacccaaagccccatttaatgcaagaaccagagaagtgttctaggccattagtggacaatgtcatgtttggagaaagataacaacacaaataatgtaacctttccttaaaaggcagaactcaatccattttatttgatgcttattctaaccctaaccctgggtcacctggaatgaagaactctatgaataatatttgattttacaacgtgttatggttatgtgaaaactaaacatttgccttttataaagactgacaaaatataaatctttattctaaccctatccccaaaactagccaggccacaccccagatgttcttattgactattgggaagatagaaaaggcgttgtgttttttgtttttttgttgttgttgtcattgttgtttttttcagaagaccagtgtctcagttctgtcttagtagtaccacacccgtaaccgtgttttaaaagtttgttttagcctagagacagatcatacgagttcaacaatgtacagtgtgattgaaaagacaggttggtgtctatttttctttttaaaatatctgaatgtgtatttgtaatacgtaaaggtaaaaaaaaatagtgccaaaaatgtgcaaggcatctcattacagctcatgtacgtctgtttttataagatcaatattaaaacccattgggattaaatatttttgaataggatacactcttgagaaactcgagaatggactgagccttcctacaagccactctttgtttttaaaacagtggggaaatacgtttacagagattgtgagcttcagagaatgcatgtgatggtgtgtattacatgctaattcatataagctgtatctgtcagctaccaccctgtgctttaaaaatgcacacactcaaccctctttagcttggagctcagctttttgcttttttttttttttttgtagaattatttagctaacataagtattctgattgctacctgatggccattcttacttagtttcatagatgtgctttaactatgatcctttgaagctcaccccttggagagcctacagaacctcaggctgatagctttgaagactgccaaacagcccagaaggaagcaaagcatctgcataatcaggagggttgtataacaagtagtgatttggcaaatatgtgggtagctttaggctgaggcacgggcctcaggcaaaaatgcccttcgagtgaatccgaagggcatgatcttcctatgtccttgactaggcatgacgagtcatttgaggtcagatattatttgagttgttcagcacccccaaaggtaggcattctcctgggaaattttcatttccattttatcgccaaacaaaataaaaagcaaaacaaactttctaagctagaataatgaaattaagtcattttccactttgtatatattgatgctaataaaacagatgaaaaagaaaaaaaaaaaaaaaaaaaaaaaaaanaaaaaaaannaaaanaaaaaaaaaaanaaaaaaaaaaanaaaaaaaaaaaaaaannnaaaaaaanaanaaaaaggggggccccccttaaaaaaatcccctcccgggggggcccaattttacccggtacccctttttttttggtaaaaaggggcgccccataaagggggggccttttttaaaaacctggggccccgcgggccccccttttttaacaacaccccggggggcggggaaaaaaatgcgcaacctggggagaattttttgggaaagaaacccctccacttttggggggggggacataatatggggcacaccctcccctccaccgaaatattaaaagccccctagggggaaatacaaaaaatttttttaaagggggaataaggggggaaaaaaacaacccgaccattggttttgcgcggctttaaaaaatttttctctttctcggcggatattgtttttataaaaaatattttacccaccgggggggcgggggggtctccccatggggtggggggttttttaagaaacccacaccgcccagggtgcttt

SEQ ID NO: 6667 - DNA, 505 bp, Homo sapiens
gtaattataaacacaatttataattttatttagcagctttgattttatatatatagtttcttgattcctaatattaacaaaattgcatgttatttatcctccaaaatgtatataatagattcagagtaacaatattaacatatattattattctatattaatactatttgtaaattaattttatttttaattttttatttatttttaatttagtttcatactttagggcatatccactaaaaatgcatagacaagtgactgtgttttaaaaatacttgaagtaattctcctctgtgtgtttaggacaccaacacaattagtttcatttatttcatttagcttttgctttggatatatagttacgcacctcataacattgtttcagtcaataatggaccacaatgaaccacgtatgcaccagtggttccataaggttgtaatggagctggacaatttctatcacctagtgacactgtaactgcagtgacatcatagctgtcttaat

SEQ ID NO: 6668 - DNA, 2171 bp, Homo sapiens
ctgaagagccggtgcagagcgggcggcggcggcggcggcagcggaggcggcggctccagccggcgcggcgcgaggctcggcggtgggatccggcgggcggtgctagctccgcgctccctgcctcgctcgctgccgggggcggtcggaaggcgcggcgcgaagcccgggtggcccgagggcgcgatggctgctcctgtcccgtgggcctgctgtgctgtgcttgccgccgccgccgcagttgtctacgcccagagacacagtccacaggaggcaccccatgtgcagtacgagcgcctgggctctgacgtgacactgccatgtgggacagcaaactgggatgctgcggtgacgtggcgggtaaatgggacagacctggcccctgacctgctcaacggctctcagctggtgctccatggcctggaactgggccacagtggcctctacgcctgcttccaccgtgactcctggcacctgcgccaccaagtcctgctgcatgtgggcttgccgccgcgggagcctgtgctcagctgccgctccaacacttaccccaagggcttctactgcagctggcatctgcccacccccacctacattcccaacaccttcaatgtgactgtgctgcatggctccaaaattatggtctgtgagaaggacccagccctcaagaaccgctgccacattcgctacatgcacctgttctccaccatcaagtacaaggtctccataagtgtcagcaatgccctgggccacaatgccacagctatcacctttgacgagttcaccattgtgaagcctgatcctccagaaaatgtggtagcccggccagtgcccagcaaccctcgccggctggaggtgacgtggcagaccccctcgacctggcctgaccctgagtcttttcctctcaagttctttctgcgctaccgacccctcatcctggaccagtggcagcatgtggagctgtccgacggcacagcacacaccatcacagatgcctacgccgggaaggagtacattatccaggtggcagccaaggacaatgagattgggacatggagtgactggagcgtagccgcccacgctacgccctggactgaggaaccgcgacacctcaccacggaggcccaggctgcggagaccacgaccagcaccaccagctccctggcacccccacctaccacgaagatctgtgaccctggggagctgggcagcggcgggggaccctcggcacccttcttggtcagcgtccccatcactctggccctggctgccgctgccgccactgccagcagtctcttgatctgagcccggcaccccatgaggacatgcagagcacctgcagaggagcaggaggccggagctgagcctgcagaccccggtttctattttgcacacgggcaggaggaccttttgcattctcttcagacacaatttgtggagaccccggcgggcccgggcctgccgccccccagccctgccgcaccaagctggccctccttcctccctcaggggaggtgggccatgcagctaacccacccaccaaagaccccctcaccctggccccttgggctggaccctccaatgccagcgactcccaggagcccttgggggacgtgaggggagcctctcacatccgatttctcctcctgccccagcctcctgtctatcccagggtctctgttgccaccatcagattataagctcctgatgctgggggggcccagccatccccctccccccagcacccacaattttcagtcccctcccctctgccctgttttgtatacccctcccctgaccctgctcctatcccacagtatttaatgccctgtcagtcccttctagtctgactcaatggtaacttgctgtatttgaattttttatagatgtatatacagggtggggggagtgggcggttctcattaaacgtcaccatttcatgaaaaaaaaaaaaaaaaaagggccccgcgcgccgcggggcaaaagggccgcccgcgttaaacaatcccccccgggcgccataacctccccggaaaccgggggtgccttaagaagcccgcgcccctcgaggcccgtccatctcctcccgcatcccgggggggggggaaacaaagccgggagtgcccgggcaaacctgggggtgtgtcgcgcaacttgcccaacggggggcgggg

SEQ ID NO: 6669 - DNA, 518 bp, Homo sapiens
tttaactcctgttttttaaatcattcattgaaaaaacatttatttctctttaactgacattttgttgcagtcatgggaagaatagacattatgtgtgttccatgaactataacttattctctttgatgtacttcatttttttttctatctagaacatgggttggcaaactttttctataaagggcctgataataaatatttcaggctttgagggtcacatggtctctgtagcacctactcaattctgccattatagtacagaagctgccacagacaatacgtcaacaaataagagtggctgtgtgccaataaaactttatttccaaaaacagatgttgggctggacttggcccacgagctgtactttgctgactccactatagaggatgaggaaaagacaaaaatacaggctcagcctggcatttaactctggaaactagggtggtacattccctgccttgctttatgaactttggcacatcaattgatctctctgggactcagtttacttaggatta

SEQ ID NO: 6670 - DNA, 1011 bp, Homo sapiens
cggcgtggcccgtcgtgtctgttttcccgtcctttttccgggccgcgtttgttttctttttttttttttttttttttttttttttttttttttttggttttttttttttttttttttttttttagagaaaaatacatacaatttattcattacatggggacaaaatttccataactctggaaggtcaagttacatcatcaaagttgtttatttaaaagtagaagtatgtgttggcaatcgtttccatatcagtcagaaaaattaggccggtttcacaatatggagtgtcctttctggtcaacagtattgcttcaggagagatagcatttcacagatctttcctgtaacttctagaaaagtcatccagccagatttaggttcaaacttctttacaaagccattttcccagcctccgttttgccttatccattctcctgtgttattcattatgaactccgcaacaaaatatgaaatctccttataggtatccacatccggggcaatttgctgtcgtagaagtttcttgatgagaataccttcaaatgcaaatatggttacaattcttccccagttaatgatgccgtcttcaaactccttttccatcacttggttgaatagtgttctggcagtgtctacggacacaacattaacattgtccaagcatgacttcagattcttttccacttctttttggactgagaacgcaacattttgtagcactctggacgttttgcttggacctgatccaggttgtggtatctgtaggacgcactgcagatagtcctgagccagcctgtaaatatatccaaattcacagtctgtcatcttctgcctggtggagagcaaagtcttgagctggctcaccttgaagctgttgaggcaatgtgctgagaatgctcactgagcttgactgagttatgacacatgatgatacatggaggctggtggaatttctgtttgcatcactttataatatccttcctccctagtcactttcgtgcgtaggctgaa

SEQ ID NO: 6671 - DNA, 538 bp, Homo sapiens
tttcagaattaccttgagttccaagagattctgggatggtggtttgaaattttccatctctttggttccccctttagtttctcccttgttgaaccagagcagttatgggattattctgtcctgccaatactgaagcagaggttgacgtggtaccaaaaaaaagttgtgtagttgcctgcttctttgtagatgaattccatccactggtgtcaactcttacaattaaactttactgatggttctttttcctttcttagttttttcttattgcagtcataactcttttcttataatttccccttacagttttccactttttttggggcatttctcttcatagggactagataagccctcacatttggagatttacattgggataattaattttttcacctaagacagctgacttagtttcaaaactgagaggtacaagggctgggagacagagatggtgatgaggaaaaatgaaaatcatgattctaccaatgccatcttgttcttgtcctctcataatgaataggcatctcaccagaac

SEQ ID NO: 6672 - DNA, 2620 bp, Homo sapiens
  misc_feature (5)..(59): n is a, c, g, or t
  misc_feature (1794)..(1794): n is a, c, g, or t
  misc_feature (1945)..(1945): n is a, c, g, or t
ctggnnnnnnnnnnnnnnnnnnnnnnnnnnnnnnnnnnnnnnnnnnnnnnnnnnnnnnngggcgcacccgtcccgttcgtccccggacgttgctctctaccccgggaacgtcgagacttgagcgcccgaactgagccaccttcgcggaccccgagagcggcggcgcgactcaccgcggaggcgcccggacgcgtcaagcccagcccaataggaagcacctgatccacactctttctagccccagggatgctcaggaaagcagcctttctttagggctgtcatctgttctggggatctgttgctgtttcttgggcccacagaatacactccacacctcgggactccataatattggacaaggctggaaggcccatttggctcctgcagcctcttatgcaggtgaggacagacccaaggtccaggcaatgctggcctttggaacacagaacctggctcactgactcccactccagttgtcttttccctctgcctctggagcaaccctctctcctccagagcaacccctgtccctccttcctacctctctctagggctgcacccccagctcaccttagacctggcccttcctacctgttgcccctactgtcttgtcccatcccagtggtcaggagggagagtactggccaaaggcccagctccacctgtgacttaggggagtgccaggcatcacccagaggtcccggccctcgggggcctggcaggctctgctgtgggggaagcagagttagaactggggctgcttctcctgtcccccagcctggctgggcctcccccacctccctttctgcctgccctcttacaactccagcagggggcgggcaggggaaagaaaaggagggacaagttggatggggtccatttggtgtccaggaacaacttggagagagggcggggaggggacaggcagcagggccctggcagagccaggggagggctggcctttggatggccttctgatcccaagcccatcctcctggggcagtcttcccttgaaagggagggtttggtgaaccctggtgcggacccccccgccggacctcactgccccagtgcggggcgtggtaggcgggtttgcaatgggtacagcctctctctccattccagtagagcagctcccagggcccagagaggctgtcactgagacttccctctggggtggggtgggttctggtggccctgtgttcccctgcaggaggacctcctgaggcttcgggcaggagctggtgcacacctggaggagagtgctggtgaatggcaggtgtgtgcctcagtgtccttgctgccagggtgtcagccctgcttcaccactggccgtttgtctctgtcccctccactggcctcttgaagcacagagaccctccgggtactttccttcctctgggcttccactcatgctattccctgctccctttttctacctggagacccccattcctcctcctcctctgctgccctcacctccacctgggccctcccagctcccgggagatggctgaaccccactccccacccgctagtcatcctcttcagcggtcctcccagagctgtcctcagcatggcagcctccacagcccctgggtgtcacccccggtttcgtgtctgcctcggactccagacctgcccctcccaggctggcccagatggatcctctacagtgactaacccaaaccagcaccaggcagggacccaataaacctttgtgaatggagtaaatgagtgcggtgtgtacttactgaaaactccttgtttggggagaaactcagggtatttcantctgtccttttgcgcacctgcagcagtgagctggggcggcatgttggcagccagggctgagcacggtgggtcaggacctgccgctgtgagcagacaacacttcctgggaagtccccttggggcgtggtgtctggtgaatgcacccatcacntggtcactgggccaatccgtttccctttatgggctaaacaggtcttcccacgggtacctgggccctcccacggaggtatttacccttctcatttactttaagaatgaattcttctatccaaacacttggctaggttgatcatggggacaccctgcaggggatggggtgggagatggctgagggacccagagctctggtctgagcggtgtcctcaacatggcagacctccatccctctgggagtttgaggcaggcacaggggaggtggcgggactctggggtgactgggcaggctgggatcccagccaggacagcttgtcagggccccagggcctggatctagcagaggtgtttggcagcatttgggggttggagaaagtctggggctcccggccaaggagaggagaaggcctaggaggcagtgccctggctacttgctgtgtgaccctgtgcatctctggccccttcctcaggtctcgtctgcatcaggagtgggttgggtggtgactttccagtgccttccccatgggtcattctgcacgccagaaggtcctaggaagttctaggagacgctattctggccctacctgctgttctgcggctgctgagagccccacttgaggacgaagcaagaggaaggatatacttcccataaggggacaaagtacagccgcag

SEQ ID NO: 6673 - DNA, 876 bp, Homo sapiens
ggctcactgcaacctccacctcccaggttcaagatattctcctgcactcaagcctgggcaaaagagccagactctgtttcaaaaaaaaaagaaaaaaagaaaagaaagaaatggtagtactgattctgtacttgaaggatgtttaatgtagcatggtgttgtaatagagaagaaatgatgaaattgttgaatttgaagagttgggacaacgatcagctatcccactttttttctcactttcagatcagtttttggataatcatatggtagttaaaataataagtgtacacatatacacacaggcatacataaatcggctttaaaatatttgactcagttactcagatgtttgggtttgggagtctgattcagcatcatttcctcttcaccttgcatgaatacatgaaatcataatatcgttcatgttgttacctttttatattgaaaactaaagtgtatacaaccattgggatacacactttcaaaatgaataattttcacaaatgtttttatgacattttggaaagatcttgggtgcctaatcacatatttcttaagaacctaaataaatttgcatttagaaactgttttgccacgagacacacacagacaaaaacaaaaactggcgggccatcggccacaaaagattaacaatggggcggccggccaagaaagaaatggctcagcgtccgagaaccggcgccaaggggctcccccaaacaaccggggccgagggtcaacaccaggcctcgctcatgcaacaggcacgcctacacccggcgcggcgacagcgaccaaacacaaaagcagcagcaagcgaagcacagcgcacccaacaacgaccgagcgcacacgcactagagccgacacacacca

SEQ ID NO: 6674 - DNA, 4372 bp, Homo sapiens
  misc_feature (1045)..(1060): n is a, c, g, or t
  misc_feature (1660)..(1674): n is a, c, g, or t
agcgcggcgcgagcggtcggcggcggcggaggcagtgtctcccggtcgcgcgtggaggtcggtcgctcagagctgctgggcgcagtttctccgcctgctgcttcggcgcggctgtatcggcgagcgagcgagttcccgcgagttctcggtggcgctcccccttcctttcagtctccacggactggcccctcgtccttctacttgaccgctcccgtcttccgccgccttctggcgctttccgttgggccgattcccgcccgcttcctcctgcttcccatcgaagctctagaaatgaatgtttccatctcttcagagatgaaccagattatgatgcatcattatcacagaagaaattcgtgtctatagcttttaaggacttgattacatcattttcaagcctgatagttttggaatcaccattagagcttaagacacacctgccttcatttcaaccacctgtcttcataccctgacgaagtgcaccttttaacactcctttgtccttggattacttaagagttcccagaaatacatttgccaccaacagagtagccaaatttataaggaaaaatgattcccaatggatatttgatgtttgaggatgaaaattttattgagtcttctgttgccaaattaaatgccctgaggaaaagtggccagttctgtgatgttcgacttcaggtctgtggccatgaaatgttagcacacagagcagtgctagcttgctgcagtccctatttatttgaaatctttaatagtgatagtgatcctcatggaatttctcacgttaaatttgatgatctcaatccagaagctgttgaagtcttgttgaattatgcctacactgctcagttgaaagcagataaggaattggtaaaagatgtttattctgcagcaaaaaagctgaagatggatcgagtaaagcaggtttgtggtgattatttactgtctagaatggatgttaccagctgcatctcttaccgaaattttgcaagttgtatgggagactcccgtttgttgaataaggttgatgcttatattcagnnnnnnnnnnnnnnnnatttctgaagaggaggagtttcttaagcttccaaggctaaagttggaggtaatgcttgaagataatgtttgcttgcccagcaatggcaaattatatacaaaggtaatcaactgggtgcagcgtagcatctgggagaatggagacagtctggaagagctgatggaagaggtttattaacaaaactaggatacccaagactgaagaaacaagaagaaacctcaagtgtattgacacgtaaagaagcagcagtcctgccccagttctcctaagaaagatccgctgtgggcagagaacgatgatgatttaatggttcaaaccttgtactactcagctgatcacaagctgcttgatgggaacctactagatggacaggctgaggtgtttggcagtgatgatgaccacattcagtttgtgcagaaaaagccaccacgtgagaatggccataagcagataagtagcagttcaactggatgtctctcttctccaaatgctacagtacaaagccctaagcatgagtggaaaatcgttgcttcagaaaagacttcaaataacacttacttgtgcctggctgtgctggatggtatattctgtgtcattttnnnnnnnnnnnnnnncagcccacagagctcaccaacaagtactccaaaactaagtaagagtttaagctttgagatgcaacaagatgagctaatcgaaaagcccatgtctcctatgcagtacgcacgatctggtctgggaacagcagagatgaatggcaaactcatagctgcaggtggctataacagagaggaatgtcttcgaacagtcgaatgctataatccacatacagatcactggtcctttcttgctcccatgagaacaccaagagcccgatttcaaatggctgtactcatgggccagctctatgtggtaggtggatcaaatggccactcagatgacctgagttgtggagagatgtatgattcaaacatagatgactggattcctgttccagaattgagaactaaccgttgtaatgagtgtgtgctctgaatggaaagttatacatcgttggtggctctgatccatatggtcaaagaggactgaaaaattgtgatgtatttgatcctgtaacaaagttgtggacaagctgtgcccctcttaacattcggagacaccagtctgcagtctgtgagcttggtggttatttgtacataatcggaggtgcagaatcttggaattgtctgaacacagtagaacgatacaatcctgaaaataatacctggactttaattgcacccatgaatgtggctaggcgaggagctggagtggctgttcttaatggaaaactgtttgtatgtggtggctttgatggttctcatgccatcagttgtgtggaaatgtatggtccaactagaaatgaatggaagatgatgggaaatatgacttcaccaaggagcaatgctgggattgcaactgtagggaacaccatttatgcagtgggaggattcgatggcaatgaatttctgaatacggtggaagtctataaccttgagtcaaatgaatggagcccctatacaaagattttccagttttaacaaatttaagaccctctcaaactaacaggcttagtgatgtaattatggttagcagaggtacacttgtgaataaagagggtgggtgggtatagatgttgctaacagcaacacaaagcttttgcatattgcatactattaaacatgctgtacatactttttgggtttatttggaaaggaatgcaaagatgaaggtctgttttgtgtacttttaagactttggttattttactttttggaaaagaataaaccaagaattgattgggcacatcatttcaagaagtcccctctcctccacatttgttttgccaatttgcacattaaatgactcttccctcaaatgtgtactatggggtaaaaggggtagggtttaaagatgtagacagttgggttttttaagggccctttttcaataactggaacactctataacaaaggatacttatttaaatagatgacattgactatttttgtttttattaaaaggaagcttacatgcctaccaatatttaatcttttatgattgcctttttataactttttatattctcagcagagtgctttaccaattgaagtaaaatgtggcaggctggagttattgaagcagagtggcagtcttcagtttgcagagtaggggtctgtcttttaaactctgagtgcaaacttcagagttcttgccttggctgcagtttttttccttcaagaatgcagtactaacatttatttgagtggagttactgaacagtaacatagctgtgatttttggtatttgaaacactggttttaaatattttgacttgttgagggtatgttttatatagcaagacattatatagcagtaaaaaatggtgttttatcttctatataattcctgtttttattattaacaaaacagtcctaaatagcagccctcaattgtgaaaaaatttactttaaactacattaggttgtgaatgcaggttttatcagaactatgtttttgttcagtttatctgttcatatggataaatattggttgggatgacttggtgtctaatgtgtagtgctacacacctaacttatggggccaaaatagcatgtcctaatgcttgctgctgatttaaacacattaaaggtactttgcaggaaatccttgcaccatgggattaatatccaattgctgcttgtacactcattcattactaaaagttttgagaaatttttttttccagtaatgagcttaagaaatttgtggaaaataactcacctggcatcttacatctgaaataaggaatgatataaggtttttttttctcacagaagatgaagcacacaggaacctaatgggccaactgggatgaggtgactattctgagatgactattcagtggctaacttgggttaggaagaaaataattaggtattttctccaaatgttcactggtactctgccactttatttctctcatctgttacacaaagaaccaccaggaaagcaaatcagtttggttggtaactctgtaattcctaactatcactggtttggttctggactaaaactacattgacagattgaatttgcctaatatgatgactgtttttaatatggatctgtatgtgttctattcagcacaaggaaataaaattttagttgaggattcagcactaaaaaaaaaaaaaaaaaaaaaaaaaaaaaaaaaaaaaaaaaaaaaaaaaaaaaaaaaaaaaaaaagtaggagtcgaccggaaattcggcccg

SEQ ID NO: 6675 - DNA, 320 bp, Homo sapiens
catttcggaaggagcagtaccccagataatcttttattcaacaaatataaattggcattttattcaattacaaaagattgctagtgtagttggaaacctttacaataaatgtttggggactctcaaagccagtgagggtatgatctatcagttacaacatcagaatatatactctattttagcttgataagatttatatgctgaaatgtaaacactcctggatttaaaaaatgtatatatgattgatagatttcttggctctgatagcattagaggatttgttttattttgttttgactgtagtctccgctataagtagg

SEQ ID NO: 6676 - DNA, 983 bp, Homo sapiens
gtcagatagtcttcattttttttttttttttatttatattctccctttattaaataagaggtagcatactctattaactattctacaccttgtttttttcacttaacaatatatcctaaagatcattttatgaaagtatacaaatttcctacccctgttggagctgcttagtattccacggggtgaatgcactgtagtaggttcaaccactcctgagttggtggacatctgagtcgtttccagtctttaactattataggcaatgcttcggtgaacatgtcttttcatgtttgtgccattgtatctttagttttgtatcagttagcttttgctatgtatagcacactgcctcagaacttaatggcataaagctacaatcattcattagctcaagattctgtaggtcagcaattttggcagagctcagtgctgtccttctgttgttctcactcatgtgactgaagtcagctggcaactcagctggagctggatagtctaagacagactcatccatgtgtctggtgtacgcaggctgtgagccaaggtttctcaagtgacctctcatcctccagcaggctagctagtgatcatttatatggtctcatggcagtctcagggctccaagcacttcaagagagagcaagctcaatgcccaagcacttttcaatcttctgtggccatcaagtttgctattgtcattttgatcatgcaggacacatggacaagcccactgtcagtagaaaagaagaggactaaccaaagacgtgcaaacatatttccctgcttccatggaatgggtataccaccgtctatttgcaaatcatctaccatggagagacattcctaaacgtgggcgatatggtttggatatttgtctcctcgaagtctcatgttgaaatatgatccccgctgttggagacggggcctagggggaggtgtttgggtctaggtagtggatccctcgtgaatggtttggcactttc

SEQ ID NO: 6677 - DNA, 3914 bp, Homo sapiens
  misc_feature (330)..(369): n is a, c, g, or t
ggcacgagggggctgaagacaacttggattgcgaggctagggcttggggagtcgtgcatcccgttccgggcctccgcagcccaacatgggccccgggttccaaagtttgcgaagttgggcgccgaggggccggggcgcgcggagcgtccgggggggcccgggcccggattctctgggcgcacaggtcgcctgagccgcctccgcggccgccgaggtcgtgcgtgtggccggggggctccgaggagcaggcgggggcgccggggcttttgctgagttggcggggttggccatggccgctgcccgcccagcgcgggggccggagctcccgcnnnnnnnnnnnnnnnnnnnnnnnnnnnnnnnnnnnnnnnnggacccgggccggggggcggcctcgagcgggaacgcgaccgggcctgggcctcggagcgcgggcgggagcgcgaggaggagcgcggcggtgactggccctccgccgccgctgagccactgcggccgggctgccccctgcgagccgctgcgctacaacgtgtgcctgggctcggtgctgccctacggggccacctccacactgctggccggagactcggactcccaggaggaagcgcacggcaagctcgtgctctggtcgggcctccggaatgccccccgctgctgggcagtgatccagcccctgctgtgtgccgtatacatgcccaagtgtgagaatgaccgggtggagctgcccagccgtaccctctgccaggccacccgaggcccctgtgccatcgtggagagggagcggggctggcctgacttcctgcgctgcactcctgaccgcttccctgaaggctgcacgaatgaggtgcagaacatcaagttcaacagttcaggccagtgcgaagtgcccttggttcggacagacaaccctaagagctgtacgaggacctgatgggtgcggcatccagttgccagaaccctgctcttcacagaggttgagcaccaaggacattgcacagctacatcgcggccttcggggccgtcacgggcctctgcacgctcttcaccctggccacattcgtggctgactggcggaactcgaatcgctaccctgctgttattctcttctacgtcaatgcgtgcttctttgtgggcagcattggctggctggcccagttcatggatggtgcccgccgagagatcgtctgccgtgcagatggcaccatgaggcttggggagcccacctccaatgagactctgtcctgcgtcatcatctttgtcatcgtgtactacgccctgatggctggtgtggtttggtttgtggtcctcacctatgcctggcacacttccttcaaagccctgggcaccacctaccagcctctctcgggcaagacctcctacttccacctgctcacctggtcactcccctttgtcctcactgtggcaatccttgctgtggcgcaggtggatggggactctgtgagtggcatttgttttgtgggctacaagaactaccgataccgtgcgggcttcgtgctggccccaatcggcctggtgctcatcgtgggaggctacttcctcatccgaggagtcatgactctgttctccatcaagagcaaccaccccgggctgctgagtgagaaggctgccagcaagatcaacgagaccatgctgcgcctgggcatttttggcttcctggcctttggctttgtgctcattaccttcagctgccacttctacgacttcttcaaccaggctgagtgggagcgcagcttccgggactatgtgctatgtcaggccaatgtgaccatcgggctgcccaccaagcagcccatccctgactgtgagatcaagaatcgcccgagccttctggtggagaagatcaacctgtttgccatgtttggaactggcatcgccatgagcacctgggtctggaccaaggccacgctgctcatctggaggcgtacctggtgcaggttgactgggcagagtgacgatgagccaaagcggatcaagaagagcaagatgattgccaaggccttctctaagcggcacgagctcctgcagaacccaggccaggagctgtccttcagcatgcacactgtgtcccacgacgggcccgtggcgggcttggcctttgacctcaatgagccctcagctgatgtctcctctgcctgggcccagcatgtcaccaagatggtggctcggagaggagccatactgccccaggatatttctgtcacccctgtggcaactccagtgcccccagaggaacaagccaacctgtggctggttgaggcagagatctccccagagctgcagaagcgcctgggccggaagaagaagaggaggaagaggaagaaggaggtgtgcccgctggcgccgccccctgagcttcacccccctgcccctgcccccagtaccattcctcgactgcctcagctgccccggcagaaatgcctggtggctgcaggtgcctggggagctggggactcttgccgacagggagcgtggaccctggtctccaacccattctgcccagagcccagtccccctcaggatccatttctgcccagtgcaccggcccccgtggcatgggctcatggccgccgacagggcctggggcctattcactcccgcaccaacctgatggacacagaactcatggatgcagactcggacttctgagcctgcagagcaggacctgggacaggaaagagaggaaccaataccttcaaggctcttcttcctcaccgagcatgcttccctaggatcccgtcttccagagaacctgtgggctgactgccctccgaagagagttctggatgtctggctcaaagcagcaggactgtgggaaagagcctaacatctccatggggaggcctcaccccagggacagggccctggagctcagggtccttgtttctgccctgccagctgcagcctggttggcagcatctgctccatcggggcagggggtatgcagagcttgtggtggggcaggaacggtggaggcagaggtgacagttcccagagtgggctttggtggccagggaggcagcctagcctatgtctggcagatgagggctggctgccgttttctgggctgatgggtgccctttcctggcagtctcagtccaaaagtgttgactgtgtcattagtcctttgtctaagtagggccagggcaccgtattcctctcccaggtgtttgtggggctggaaggacctgctcccacaggggccatgtcctctcttaataggtggcactaccccaaacccatcttttgttctcctatatcctccttctcctgttccatttcagttcagtttcagcggtgccaacctctttgcgtttcctttttgttgatgaggacccagagctgctgcacacactcacctctaaccccctcccctcgctgctgggccccatctccacaggagagactggttcggctctagggcctcagtctggagtgggataggagcagtgagtgacaaagcctctgaaagatgcatcatctcttcctcacacccatttagtgggggatgggtcctctagacttgaggggctaccctgggaagctgccgtagcttcagccaggcaagaaagcttccttcaacctgcatagccggtgggtgaggagattcccaccttccatagcctccaaacatgttcccaaggccccactttcaagaatcagacagcaggaagccatagatgctggctgggttccaggttatggggagaagaaatacagtcaataaaaggtttttgtataaaaaaaaaaaaaaaaaaaaaaaaaaaaaaaaaaaaatggccgaatttaaccttgggcgggccaggggaaggaggccggaggcgaaggggcccaaccggccggccaagggggcgcagcgccaaccgcggggaaggcaaggaagagaggacaacgagaca

SEQ ID NO: 6678 - DNA, 584 bp, Homo sapiens
  misc_feature (3)..(77): n is a, c, g, or t
  misc_feature (403)..(413): n is a, c, g, or t
tannnnnnnnnnnnnnnnnnnnnnnnnnnnnnnnnnnnnnnnnnnnnnnnnnnnnnnnnnnnnnnnnnnnnnnnnnngtcgactttttttttttttttctggagagaaactgcttatgaccaaaattgttcattggttattgcttaatttagaataatactaaaagtacttcagggaaccttctgtattaaaaaaagtatatttctcactactctctgtctatggctgattttaatattgttagaactctgtttctccaattgttacagaggagtgagagagagaacatttataccaaagggttatatttaatcgtccttcatactctgaaagtccaagattattcaaaatgtggtgcaacagataacagcatcgactagaaacaccattaacacaggttcannnnnnnnnnncaacacttactagcactggaacttggggaaaattaaacactcttagcctcccatctgtaccatgagataatcatcaactttcatggttatttagaggattgagatgagatatatgaagcactctgcataggacctgaacaagtccatcaatcactggccatggataatgct

SEQ ID NO: 6679 - DNA, 4117 bp, Homo sapiens
  misc_feature (42)..(67): n is a, c, g, or t
  misc_feature (971)..(987): n is a, c, g, or t
  misc_feature (1009)..(1114): n is a, c, g, or t
acgatggcagcgtcagtggcagctgcagcccggaggctgcgnnnnnnnnnnnnnnnnnnnnnnnnnnggcggggcctcagccatcggccgctctcatcggagccccctgcagccaaggcctcggccgtgagggccgcctttctgaacttctttcgggaccgccatggccaccggctggtgccctccgcttccgtgcggccccgcggcgaccccagtttgctttttgtcaatgcgggcatgaaccagttcaagccaatctttctgggcaccgtggatccacgaagcgagatggcaggcttccgacgtgtggccaacagccagaaatgtgtgagagctggaggacaccataacgacctggaagatgtgggtcgagacctttcccatcataccttctttgaaatgcttggcaattgggcctttgggggtgaatattttaaggaggaggcttgtaacatggcctgggaactgctgactcaggtctatgggatccctgaggaaaggctctggatctcctactttgatggtgaccccaaggcagggctggacccagacctggagaccagggacatctggctgagcttaggggtgcctgctagccgtgtgctttcctttggaccacaagagaacttctgggagatgggggatactggcccttgtgggccctgtactgagatccactacgaccttgctggtggggtgggagccccccagctggtagagctttggaacctggtcttcatgcaacacaacagagaggcagatggaagcctgcagcccctgccccagcggcatgtggacacaggaatgggcctggaaaggctggtggctgtgctgcaaggcaaacactccacctatgacactgacctcttttccccgctgctcaacgccatacagcagggctgcagggcacccccttacttgggccgagtaggggtggcagacgaggggcgcacagacacagcgtaccgcgnnnnnnnnnnnnnnnnncgcacactcagtgtctgcatcnnnnnnnnnnnnnnnnnnnnnnnnnnnnnnnnnnnnnnnnnnnnnnnnnnnnnnnnnnnnnnnnnnnnnnnnnnnnnnnnnnnnnnnnnnnnnnnnnnnnnnnnnntcctaggcagcctggtacctgtagtggtggagacactgggagatgcttatccagaactgcaaaggaactcagcccagatcgccaacctggtgtcagaggacgaggcagccttcctggcctccctggagcggggtaggcggatcattgatcggactctgaggaccctggggccttcagatatgttccctgctgaagtggcctggtccttgtcactgtgtggagacctgggactccccttggacatggtagagctgatgctggaggagaaaggggtccagctagactccgctggactggagcggttggcccaagaggaggcccagcaccgggcacggcaggctgagccagttcagaagcagggattgtggcttgatgtccatgcgcttggggagctgcagcgccaaggagtgcccccaactgacgacagccccaagtacaactactccctgcgacccagcggaagttatgagttcggcacctgtgaggcccaggtgttgcaactgtatacagaggacgggacagcagtggcctccgtggggaaaggccagcgctgtggcctcctcttggacaggaccaacttctacgcagaacaggggggccaggcttcagaccgtggctacctggtgcgggcagggcaagaggacgtgctgttcccagtagcccgggcccaggtctgtggaggtttcatcctgcatgaggcagtagcccctgagtgcctgcggttaggggaccaggtgcagctgcatgtggatgaggcctggcgtctaggctgcatggcgaagcatacggccacccacctgctgaactgggcactgaggcagaccctgggccctggcacagagcagcagggctcccatctcaatcctgagcagctgcgcttggatgtgaccacccagaccccattgaccccagagcagctccgggcagtggagaacactgtgcaggaggccgtggggcaggatgaggctgtgtacatggaggaggtgcccctggcgctcactgcccaggtccctggcctgcgctctctggatgaggtttacccagaccctgtgcgggtggtatcagtgggggtgcccgtggcccatgcattggacccagcctcccaagccgcactgcagacctctgtggagctatgctgtgggacgcacctgttacgtactggggctgtaggggacctggttatcatcggggaccgccagctttccaagggcactacccgcctgctggccgtcactggggagcaggcccagcaggcccgagagctaggccagagcctggcccaggaagtgaaagcggccactgagcggctgagtctggggagccgggatgtggcggaggcactgaggctgtccaaggacataggacgactcattgaagctgtggaaactgctgtgatgccccagtggcagcggcgggagctgctggccacagtgaagatgctgcagcggcgtgccaacactgccatccgtaagctgcaaatgggacaggctgcaaaaaaaactcaggagctgctggagcggcactcgaaggggcctctgattgtggacacagtctctgctgagtctctctcagtgctggtgaaggtggtacggcagctgtgtgagcaggcccccagcacgtctgtgctcctactcagcccccagcccatggggaaggtgctgtgtgcctgtcaggtggcccagggtgccatgcccaccttcacagcagaggcctgggcactggcagtgtgcagccacatggggggcaaggcgtggggctcgcgagtggtggcccaaggcaccggaagcactactgacctggaagctgccctcagtatagcccaaacctatgccctcagccagctctgacccaggtccgcccagggacccacatggactaaaggcaatgccaggagccctgaaggagccagcagaaccttcccacatgctgaagcgaggactagaggctggaggccaagcagctgagccaaagaagatcacctgggccagggcctacatgacacaaggagacatgggctagggaaggcagaactgggcccaaagacacacacccccttggtgaaagagaagacatggacaattatggctgtgactgcacattagaaattatttcactggccgggtgtggtggttcacacctgtaatccaagcactttgggaggccgaggcaggtagatcatgaggtcagaagatcaaaaccatcctggctaacacggtgaaaccccatctctactaaaaatacaaaaaattagccgggtgtggtggcacacacctgtagtcccagctactcgggaggctgaggcagaagaatcgcttgaacctgggaggtggaggttgcagtgggccaagatcgcaccactgcactccagcctgggtgacagagcgagactctgtctcaaataaataaattatttcacagaggataaaaaaaaaaaaaaaaaaaaaaaaccgtttaaaaaagagtagttttgcccctcccagcaacctggtatgggtgccctaagaccagtctgaactcacactgtctgaaaggccacccaggatccaaatcgggccatcttcattgccatgagtgttcggacaggctctgcgtgccaggcaacagtgggcagacaaagggctccctggctactgggaagatacagaaccatcctgtgaaaatcatttcagcactggagaccttctttgctattacttctttcattaacaatgacctctaatttaaattgggccctgctggtttgttgatgaattgagcaactgagaacgtggcgggcactaaactgacagttccttccttcatggagcctgcttcatgtggaggaaacaggaaataaagcaaaagaagagggtcaggcttggtggctcatgcctataatcctggcattttaggaggctgaggttggagaatcgcttgaggccagaagtgcaagaccagcctgcgcaaacagcaagaccctgtctacaaaaaaaaaaaaaaaaaatttaatgaaaaaaaaaaaaa

SEQ ID NO: 6680 - DNA, 3415 bp, Homo sapiens
  misc_feature (3130)..(3146): n is a, c, g, or t
gcagttcagacccccccacacccatcaaagagccgctcctcccccccgcaggcgccttcgccgcctccctcccttcctttcctttccgctcctcttccgacctgtccacccgggaggaagggagctggaaagggggcggaaacctctcccctccaaaaagcacaacaaaactgttcagtgcggaggagccgggttcgcccctgccggacagcggggggctttgttccccgcagttgtttcctgcccatttgacctgtcagctgctggggaaacgctgctgttgacctttggttgaactgctaaggcgattttgctgatttttctttctttttccgcgagggctgtcttttgctcctccaaatgagcccagtccccctcccttctccccaaagcgctccaagagaaagtgccaggaaggggcttgtcccggaaggcctggcggctgagcggggccaggtcctggttaggccaccagggtgggcgtccgcgccattgtttgagcttgtcggcgctggtgggagagatgagggcaattcctctgggacgcaagtcccctcgaatggccggggctggccgggatgttccccgcacggcgctgccctcgagtccccccgatggagagcgcgggcgcgccttccttcgctggcgtccaaacccgggaccagctagaacacagcagggctgggactgggttccagccccacgtggagtctggatttgttttgttgtgttttgctttccttcctggaagaaatcccgaggggaccgccctagagcggcagctccaggacctcggcccttgggcttccgggggtgcagccacttaggccccgctcccggggagagagggattattttttaagatttatccccagggcgcgcggcatttccctgtccctcgtgaatcccgttgagagtcctccctccccaacctcctccatttccccagccagaccgattcgagagccctggagattctgggcgaggctagtgactgggtagtacaggcctctagccccaccattgctctctctgtcttcagttccccaggagggcaatggcatcaaacagcacagctctgggggatgtcaatattgcataccttttctacctaaagggaaaatgactcgcttttctgcttgcaaatatggtagtttctgcttacaaatgtaatacaatgcccatgacagccaaggactggaagcataagttgctaggtcttacaggtgattttttacaatgaagcaaactcactatgttagacaccatttacattggatgtctccaactaacaaaagtaactaaagacagatgtaggtgtaaattgagagtgaaatttgaccctttagaccgtcacaacttccttgggcttatcctgggtgcttataggagaggtgggctccacccacaaaaatggactgctcagaaaaatgagggagagagaaagggtggccactttcccgagccaagaaattccttgaaaaaaaatcagaacatctgaaaccagagagccgatttccttaccgggaggcagttcctggctaacgaagaggaagcacgatgggaagaaaagttcactccaacggaagccagtttgctgaacatagcagatcgcccaggaggactgggagagactgcaaaccagttcgagcccccagcatggcgttaggtgtcagccagctggcaggaaggtccaggtgtctgtgttcagagtctcaaggcggctatgagaggttttcctccgagtacccagaattctgttctaaaaccaaggccctggcagccatcccacccccggttccccccagtgccacagagcccttggacctgggctgcagctcctgtgggaccccactacacgaccaggggggtcctgtggagatccttcccttcctctacctcggcagtgcctaccatgctgcccggagagacatgctggacgccctgggcatcacggctctgttgaatgtctcctcggactgcccaaaccactttgaaggacactatcagtacaagtgcatcccagtggaagataaccacaaggccgacatcagctcctggttcatggaagccatagagtacatcgatgccgtgaaggactgccgtgggcgcgtgctggtgcactgccaggcgggcatctcgcggtcggccaccatctgcctggcctacctgatgatgaagaaacgggtgaggctggaggaggccttcgagttcgttaagcagcgccgcagcatcatctcgcccaacttcagcttcatggggcagctgctgcagttcgagtcccaggtgctggccacgtcctgtgctgcggaggctgctagcccctcgggacccctgcgggagcggggcaagacccccgccacccccacctcgcagttcgtcttcagctttccggtctccgtgggcgtgcactcggcccccagcagcctgccctacctgcacagccccatcaccacctctcccagctgttagagccgccctgggggccccagaaccagagctggctcccagcaagggtaggacgggccgcatgcgggcagaaagttgggactgagcagctgggagcaggcgaccgagctccttccccatcatttctccttggccaacgacgaggccagccagaatggcaataaggactccgaatacataataaaagcaaacagaacactccaacttagagcaataacggctgccgcagcagccagggaagaccttggtttggtttatgtgtcagtttcacttttccgatagaaatttcttacctcatttttttaagcagtaaggcttgaagtgatgaaacccacagatcctagcaaatgtgcccaaccagctttactaaagggggaggaagggagggcaaagggatgagaagacaagtttcccagaagtgcctggttctgtgtacttgtccctttgttgtcgttgttgtagttaaaggaatttcattttttaaaagaaatcttcgaaggtgtggttttcatttctcagtcaccaacagatgaataattatgcttaataataaagtatttattaagactttcttcagagtatgaaagtacaaaaagtctagttacagtggatttagaatatatttatgttgatgtcaaacagctgagcaccgtagcatgcnnnnnnnnnnnnnnnnnggaagtaaatggtgtcttgtagatatgtgcaaggtagcatgatgagcaacttgagtttgttgccactgagaagcaggcgggttgggtgggaggaggaagaaagggaagaattaggtttgaattgctttttaaaaaaaaaagaaaagaaaaagacagcatctcactatgttgccaaggctcatcttgagaagcaggcgggttgggtgggaggaggaagaaagggaagaattaggtttgaattgcttttttaaaaaaaaaaaaaaaaaaaa

SEQ ID NO: 6681 - DNA, 6732 bp, Homo sapiens
  misc_feature (398)..(412): n is a, c, g, or t
  misc_feature (2328)..(2329): n is a, c, g, or t
  misc_feature (2441)..(2456): n is a, c, g, or t
  misc_feature (2621)..(2628): n is a, c, g, or t
  misc_feature (6497)..(6500): n is a, c, g, or t
gctggtggcgcccgccagccggcccgggagaggggacttgagcgcttcgcggccggtgcgcagcgcggctccggccccgcagtctgtctgcaagtggccatccccgcccccgactcctgcggccggtgcgggagctgtcagctgcacgttgcgggggtaccggagaagccggggttgccttctcccggttctgtgcgctaaccccggagcccggccccggggaactagggagcgtctccggctgcacagcgctcaggttttagggtttcctttgggccacccaaaatgttttttaaatactttggataagagctaaaccacctgccactggggacttccatactctcggctcccttgtcatctgatggcattttgattgtctcgaggccaagtgactnnnnnnnnnnnnnnngtgatgagaagaaccttggtgtgtcccaaaaattggtatcaccttcaaggagcacaagtagctgctcttccaagcaaggaagtcgacaggacagctgggaagtggtggaaggactgaggggggagatgaattacacccaggagccaccagttcagaaaggatttttgctgaaaaagaggaagtggcccttaaaaggctggcataagagattcttctatctggacaaaggaatcttgaaatatgccaagagccaaaccgatatagagagagagaagctgcatggctgcattgatgtcgggctctcagtgatgtctgtaaagaagtcatcaaaatgcatagaccttgacaccgaggagcacatctaccatctgaaggtcaagtcagaagaagtctttgatgagtgggtatcgaaacttcgccaccacagaatgtatcgtcagaatgaaattgccatgtttccacatgaagttaaccactttttctcagggtccaccatcacagactcttcatctggggtgtttgactccatttcaagtaggaagcgtagcagtatatcaaagcagaatttatttcaaactggaagcaatgtatcattttcttgtggtggtgagacacgagttcctttatggttacagtcttcagaggacatggaaaaatgctccaaagacctggcgcactgtcatgcctacctggtagaaatgagccagctcctgcaaagcatggacgtcctgcatcggacatactcggcaccagctatcaacgccatccagggtggatcttttgaaagtcccaaaaaggaaaaaagatcgcacaggaggtggcggtccagagctattggcaaagatgctaaaggaacactgcaggtcccgaaacctttttctggcccagtaagactacactcctccaatcctaatttgtcaacactagattttggagaagagaaaaattattctgatggctctgaaacctcatcagagttttctaaaatgcaagaagatctgtgtcatattgcccataaagtttacttcactttaaggtcagcttttaatatcatgtcagcggagagagagaaactgaagcagctgatggagcaggatgcctcctcctccccgtctgctcaggtcattggtctgaagaacgccctgtcatccgccctagcacaaaacacagatcttaaagaacgcttacgccagaaatccatggcgagtctctgctcctcgactcccccgctgtcgccaagtcgggtgacaatctggcagaggaaaactccagagatgaaaaccgagctctagttcatcagctttctaatgaaagtagactctccatcactgactccctttctgagttttttgatgctcaggaagttctgttatctccaagctcttcagaaaacgagatttctgatgatgactcatatgtcagtgacataagtgataatctttccttagataatctcagtaatgatttagataatgagagacagaccttggggcctgtccttgatagtggtcgggaagcgaagtcccggagaagaacgtgcctgccggcgccctgcccgagcagcagtaacatcagcctgtggaacatcctgaggaacaacatcgggaaggacctgtccaaggtggccatgccggtggagctgaacgagcccctgaacacgctgcagaggctctgcgaggagctggagtacagcgagctcctggacaaggccgcgcagattcccagccccctggaaaggatggtatatgtggcagcctttgccatatcagcgtatgcatctagctactaccgagctggaagcaagccatttaatccggttcttggagaaacatatgaatgtattcgggaggacaagggcttccagtttttttcagaacaggtcagccaccatccgcctatccctgcgaacctatgannagtctagaaattttgttttctggcaagatgtgagatggaaaaacaaattctggggcaaatccatggaaattgttccaattggcacaacccatgtgactctgccagtttttgnnnnnnnnnnnnnnnngaacaaagtgacctcttgcatccataacatcttaagcgggcagaggtggattgagcactatggagagattgtcatcaagaacctgcatgatgattcctgctactgcaaagtgaattttataaaggcaaaatactggagcactaatgcccatgagattgaaggcannnnnnnngacaggagtggaaaagcggttcatcggctgtttgggaaatggcatgaaagcatctactgtggcggcggctcctcttctgcctgtgtatggagagcaaatcctatgcgaaaggctacgagcaatactatagcttcacacagtttgcgctggaattaaatgaaatggatccatcatcaaagtctttattgccacctactgacactcgatttaggccagaccagaggtttctagaggaagggaacttagaagaagctgaaatacaaaagcagaggattgaacaactgcagagagaaaggcggcgggtcttagaagaaaatcatgtggagcaccagcctcggtttttcaggaaatccgacgatgactcttgggtgagcaacggcacctatttggaacttagaaaagatcttggtttttccaaactggaccatcctgtcttatggtgaaaaagtaaagaagaaagataacattagtgtatttctcctgtgcttgccttctgaagtggcacaaacctgtgtttatatatttaaaagatactctaggatgatcacttgtgcttagcttagcattgtaactctttaagtctatattttcctcagtgcgtttctttacaatttcaaatgttaccctgattgtttatatgaatgtagaacaccttgacatttctttttatatataaactatttaataaaaatgaaagattgaatgttcatgtgtgggttaaaaaaagaagctttaacactaattttccaaaggttagggaagattccaattaaatttatgccttataaaattatgttgtagaaaaaaaatcaacctctcccaggtgcattaagaaataagaattcccagggttactcacccatgcgtaagctacccaagtttaatttggtagctgaaatatctttttgcctcagacagctcttgaattgctcatacagaacaattctgctggtgctggagtctgaagaatattttcatttgcattttagtggttagggagaggatataagattaatggaatgtatatttttatataagacgtatacggcaccttcttgaaaaggaagcatttgaacttgttcctccctatagttctattgccttatatgcaaaattgtaccctgttgctcagagaaattattcataagagaaaagaattccaattaattaaatatcacaatagcatcccagagagacagtaggaaatttctccttagtgagagctgagtccttgagaagttaagagactgtttcctgcttcccaccccaccccgttttttgtccctccgtttgatcacctccctgttgagtatggaatgtcccagtttaatataaaacatacagtttattccacacagcagtttgactttgtaaaagtttagcaaaataactgattgttttggataactcaacatgtttttcttaaatgctgttttagtattttctacctcttaataagcaccatattttagatcttgtataaaaagttgccatctgccttatagacaaatgtagagaattgatgttcttgctttgtgttgtgttctggtaaagctttaagtgagtgtcttacccctttcctatactttcttgttatccatatcattcttttgtgagttttgcagcagtcttgaataatacagattataactactgaaaggggaaccttcgtctttttaaatgtgtcatttcacattacaataatatgtgtagtagttgaattgtgttatcaaagcatgtccaacttctgtccagatgacattaaaaccaaagcctaattgttaagcctcttattctaaagtccatagcaatgctatggaatatcaagtataatgatgtagtaaaaagatttctccagaaaacactttgagatacttaaagaaattcagagcatatcgaatgttatgaatgaagagtaaaataattacaggaaaagaatgcatgatttttcattgtcacaccaaataaccagttggacaatattgcattttcaaaatggagagttatttaaagtggatgtgtagccttctggaatctgcacgtgactggcattttaaaacaactcattaaatattggattcattttatcgagatgccaagatgaacacaatgtgaatatcatttccatttctaagcagttgaatgacacagtcagattctttggtgtatgctttgttctttccatctcaagcatttatccaaattctgctcacagacatgaggaagcaggctgtagatttaagggcactcaaggggaaaacaaatgtagtttccacagtgtgaggataaatgtagaatcgtggtaatattggctgttaaattggcctgctccagagactggctcaaaaaagaaagaagcaacgaaaacaaaatgcacagcctgaatggacgtagcactgtcatgtggcatttggaaaatctttaattatcctaatgttatttcacttgcccttatgctttattttagagtcccagggacaactggatgaaacattacgtctgtagtcatcttatttgagatgggggtgggaacgaattaaaatatgatagagaactatatgcagattttaaaatctagtcagtactagcatctataaagggcttttctgaaatttaaacagcttggtgatgcatcctgatattataagcttaaaactatcttgagggggaaatgacttcttttctccttctgtcccttttctcaaaagcatctttcccccaaatgtatgtctctaggacattttatagttttaagaggaagaaaacagaaacgtggcatcatttgggaagaaccaaggtagaatttaattttctggactttaaatctcctggttaaataatgctaatcactgtaccatttgagttacatgttttaacctcttttttttttctaattattccatccaaaatttctggtgaattacacagaaatttttggaaatgggactttgtgcaggtaaccaccctgcacttcaggtaatgttcctgtcacagctgtcgactaccccacgctgcaggaaatccattcagaaatgagctaacagtctccagtgtagcaggagagccagtcacttccctccccaggccccaaagcaccccaaggctggtattccttgagtcataggtattaataataaaagcctcaatgcagcttctccatgtagttcctctcctacaagccaggtggattctggtcctaactaaagagatgggagttcacctgagggcaagaagtacccaggatgcccaaacagccgcacaggtgtcctgtgcttcctgtgagacttcctgggggaaatatacaaactaatatattttttaatgtttacgtcatttacactgctgcttttctcatattctgcttttaattacttgtagtaaatcatttgtttgggcttcaagcactgtcttccatctgcatcttccagatttatcatgagtgatcttgttctactgttaaagatgtcaagcctaaaaagtaataaagtttttatttggctgttgaaccttgatgtagcccctactacatacactacaagttatgccttctggctactacagaatctccgcagaccttttagttatgagtagaagcaataagaaggtgtccttatggtcttaggaataatagttccaatgtattggcataatttgtttgaatgtctttattttgatattaacaccggcataaatctatttttgctaccagatgatagctattttcatttgctctattttcctctgcattgtactaatctgttactcagtgttagtcttcatttttctgtgttggaaacctgcgtcatgtaaatatctgcaaatcatgacagtctaaagtgcaaaccattttcagagactttgggaatgcnnnngatcagaagtggctaatttattttatttctgattattttatccagagggtacttttttaatggatatttgtaaatcttccacttaaccactgaaaattattttgttttaatcccacccttccatccatacctctgcctccccaaaaagctcctattaatttgcttatccccctcatgtagctagttgaatgtgaataaataacatggaaaaaaaaaaaaaaaaaaaaaaaaa

SEQ ID NO: 6682 - DNA, 508 bp, Homo sapiens
tttttttttttttttttgagttttttatctaacaactttaataaatcgattataaatgaaaacacaaagaatgaagtgttcttttccatgcacaaggcccctaacttggatgtggttcccccgctaggcggtcaccaagtgatgccctccctgagggcaggcgttgatcgagtctgttttcttctcatgatttctcctgttgggaacatggtccctggcacatggcctcattgatgtttgccaaatgaatgaatgaggtgctgggtggtggctgcaggcccatgccactcccaccctggtcagcaagccccttgcatggcacgcggaggcaagcagggaagcacgtttgtggttctagcatggaggagacccccggccaggcagcaccagaggccaagcccaagggtctgtcttccttgctgggcaggcgaggggcattgcagtgctcagcatttccccagagggcagcggcctccgtagccattccccagctggccattgctaggct

SEQ ID NO: 6683 - DNA, 834 bp, Homo sapiens
ttttttattttattattattttttttttttaaagataggggctctctgttgctcaggctggagtatagaggcaagatcatggctcatggcagcctccgcctcccaggctcaaacgatcttttcacctcagcctcccaagtagctggaactataggcccatgccaccacgccgggctaatttttaaattttttgtagagatggggtctttatgttgcccaggcttgtttcaaactcctggcctcaagtgatcctcctcggcctccaaaagtgctgggattacagacatgagccactgtgcctggcctgttatttttgtttcctcattaaatgcttgactgcttgcatcatccagcaaaaatcctttgctaccaagtctcaacagatggtcccgctggtagtttatgaacacaacacagaacagaaaatggacggggactgttgagaggaaagaagcaggtctctgctcttcttgcacagggggagtgctgacaaagaccctccctccccacactccagccaggctccttagagtccccttctccactgggcctcaccctggcctatctaggctggaacgaacactaacatagctcctaacagctcaaggccacattcccagaacgatcctagccccctctaaagtgcctgcctgagaagttcaaggctgccacaagaatttcctgtgtgttccagccaacacctgaggatggggcccctgtctcccagtctctgtgggaggttgggggcctgacttcggtaagccccagtggcaaacccagatcagttggtttcacaggggccaaccctcccacttcagattcgtcgtgccgaat

SEQ ID NO: 6684 - DNA, 420 bp, Homo sapiens
ttttaagagatgaggtctggctatgtttcccaggctcgtctcgaactcctggcctcaagtgattttcctgccttggccttctaaagtgcagaggttataggcgtgagccatcatgcttggcctggtttttacattttaagtggttaaaaaattaatattttgtgatctgtgaaaattacataaggttcaaattttggtgtccataaacaaagctttattgaaacacagccccactgctttatgtatgcattgcctatggacgctacccagcagaactgggtagctgcagtcagctttatggcctgcaaagatgaaaatattcacgacttggccctttacagagtttgtccacctcagtatgaaacaactgctactgttcacaggcctggaccccgtgcatctagccccctcccgtaccag

SEQ ID NO: 6685 - DNA, 2869 bp, Homo sapiens
  misc_feature (573)..(578): n is a, c, g, or t
  misc_feature (590)..(632): n is a, c, g, or t
attttcgggatcacggcgggacccccaagtttggaaagctcttttaacggctatgcgaaagttctgtccaaaggctgctcacagcccctgtctgactggttgtcatgatgaattgagctctctgttacctgcgcatcacaaccgatagtaactggcacgaggcctcgtgccgggaaagctcttttaacgagctgaggcttcgaagacctcagaggacttctctcagcactcacagaaacctcctacaccctcggatggcacaaagggactgttttcttactcttagtctgagtgactgccaaggaaggcaaaggtagagcaactggatctctggctctccacatagcttctgatctcagaccttactaaaatgctttctgggcccaaggacaaagctcacatgaacaaatgattttgagtcatgaatgaaaaatcttgctctttccatagtaaagaagaattaagagatggacagggtgaaagattgtctgctggatattctccatcatatgacaaggacaagagtgttctggctttcagaggaatccctatctcagagttgaagaaccatgnnnnnnggcacgagctgnnnnnnnnnnnnnnnnnnnnnnnnnnnnnnnnnnnnnnnnnnnatagaggtggtcagagcccaagaagaatgggaagctgtggacaccatccagccagagacagggagccaagctagctcagagcagcctgggcagctaatctccttcagtgaggccctgcagcacttccagactgtggacctttcccccttcaagaaaagaatccagccaactattcgaaggactgggctcgccgccctccgacactacctcttcgggcctccaaagctccaccagcgccttcgggaagaaagggacttggtcctgaccattgctcagtgtggcctggatagccaagacccagtgcatggccgagtcctccagaccatctataagaagctgaccggctccaagtttgactgtgcccttcatggaaaccactgggaggacctgggctttcagggagcgaatccagccacagacctgagaggcgcaggcttccttgccctcctgcatctgctctacctggtgatggactcaaagaccttgccgatggcaggaaaaattttccgcctgtctcgtcaccacatccagcaattccctttctgtttgatgtccgtgaacatcacccacattgccatccaggccttgagagaggagtgtctctccagagagtgtaatcggcagcagaaggtcatccccgtggtgaacagcttctatgccgccacattcctccatctcgcacatgtctggaggacacagcggaagaccatctcagactcgggctttgtcctcaaaggtgtgctctttcttctggggaggcctaggctgaatgcacagtgtcccaggtccagagagcccaaggtggttgctagactggttttggctgcagttcttccccatccacactttctcaaattccagcttaccaaaatctccatcacccaccccctggagtctgctagttctcctttctctgccctgactgttgcccttttctggtcttatacttatgacaagcatatattctgatcaaaaattgggagccagggtccaatagttggactattcaaagttgcaattgtgcagacaaggtagagtgtgtggtccctgtggctgtagctggctccctagcctacctctctggtgatctctccatctgaggctccttcactttctctccatgggataggggttgggggtactccctagagctgctaggcttgaggccttgactgttgtgtcacccagagccccctcaagccttctgctccccaattctctctgttgcagagttggaagtattggccaagaagagcccactgcggctgctcaagaccctggagctgtacttggccagggtgtcaaagggacaggcctccttgttgggagcacagaagtgctatgggccagaagcccctcccttcaaggatctcaccttcacaggtgagagtgacctgcagtctcactcatccgaaggcgtatggctgatctgacctccgagatgaatggaggcttaaaggctgagctgcaggggctttcagggggtcatgtcaggagcctggccaggccacaccccttgctgtctcagcagatgggatataggaagctcctgggcttagctgtgggaagccaagtaccctcaccggcatgggacatgaggggcagctagacttcacccccttcccgcagacctgcctccagagcaaggagaattctgccttaatctgttgggctccagtctccgggttgaattccagtgtatcccactgggagtgaatggatcatgaggtgggatggccccatctggatgttctgcagatccccacatgggaggagattcccaagtagaggcagccagaattctgactccctggcagcagcagggctttcaggcaccagtgtctgtgttgttagaactcagaggaagaggcaggggcagcagccgacagggggcagcatgacccaagcaaggggcctgaggcctcagtgggggtagggcaaggaggtacctcacaggtgggtgtgaggccccctctggagtttctggccattcacttacccactctcttctccccctgacccccgctccattgtttatgatggaaaaacggacatttggctaggtgtctctcacggctgctccatcctagcccccacaagctggggcttcctcctgtagatgctgtgcatgccccatgatgagtttctggcctaattgagggaaggaggaaattcataccagcagttttcaaataaaagaattgttctaaaaaaaaaaaaaaaaaaaaaaaaaaaaa

SEQ ID NO: 6686 - DNA, 1118 bp, Homo sapiens
gcttgaattcggcgcgccagatatcacacgtgccaagggctggctcaagcatggcccgggggccgctggccgcccgcggactgcggctgctgctgccgctcctgccgctcctgccgctcctgccgctgccgcaggtggcgctgggcttcgcggacggcagctgcgacccctcggaccagtgcccgccccaggcccgctggagcagcctgtggcacgtggggctcatcctgctggcggtcctcctgcttctgctgtgtggtgtcacagctggttgtgtccggttctgctgcctccggaagcaggcacaggcccagccacatctgccaccagcacggcagccctgcgacgtggcagtcatccctatggacagtgacagccctgtacacagcactgtgacctcctacagctccgtgcagtacccactgggcatgcggttgcccctgccctttggggagctggacctggactccatggctcctcctgcctacagcctgtacaccccggagcctccaccctcctacgatgaagctgtcaagatggccaagcccagagaggaaggaccagcactctcccagaaacccagccctctccttggggcctcgggcctagagaccactccagtgccccaggagtcgggccccaatactcaactaccaccttgtagccctggtgccccttgaaggaggtaggagaacggaccagagcttggagaactaatgcttggagccaagggccccagcccaccccaccgtcccacacattgctgtggccccaacctcggtgccatgttacaccggcccctggcgtcacccactaggcaggctgctgctttcagcctcagcccctggcccagccccagcaggccctcagcctggaagaggccccttgggcctaagcctcgggtgggagctcagggccacctgtgacgtctgcatcttcttggagagagaataaagtttgtatttaagtggaaaaaaaaaaaaaaaaaaaaaaaaaaaaaagaaaaaaaaaagaaaaaaagaaaaaaaaagggggggagaaaaaaaaaaaacaaaaagggggggcggggaagaaaaagaggaaaacgcggaagagagggagaaaaagagggggaaaaa

SEQ ID NO: 6687 - DNA, 3850 bp, Homo sapiens
  misc_feature (2075)..(2096): n is a, c, g, or t
agcggtccggcggtggcggttgccatgagcggggggcttgggtggcaaccagaactagggagctggtggagaaggtggcggccgctggaaggaggcccgggaggtggctgaggggtccaggcggcgggacgactctggccttttgaagaccgggaggaaactctacagagaagaatgtcagatgcagcagaagctccccgagaagcaacaggagaaaatggagaaacagaaatgaaagaagaggaggaacctaatccaaattataaagaagtagaagatccacaacaggaatcaaaagatgacacaatagcatggagagagtctcaggaggaggagaggaaaacgggcgaggaggaaggggaggaggaggagaaagaggaggaggggaaggaggacaaaaagattgtcatggaagaaactgaggaaaaggctggagaagtccaagagaaggaggcttcaggaatacaggaagaaaccacagtagagccccaagaagtcacagcgtccatgatccgtttggagacacagattactgattcccagtcaatcacatcaggaattttcccaaaaacccaaagaggtagcaagtcaaagctttccttacaattggaggatgcagaaacagatgagcttttaagagacctgagcacacaaattgaatttcttgatttggatcaaatcagtcctgaggaacaacagattagttcccctgaaaggcagccctcaggagagcttgaggagaaaaccgaccggatgccccaagatgaactgggacaagaaagaagggacttggagccagaaaacagagaggagggacaagaaaggagagtatccgacatccagtccaaagcagggatctcccgggagtcactggtgtccagcaccacagaggacattctgtttcaaaaggataaaagcaccccggtgtatcccttgaccatgacctggtcgtttggatggaacagttctcttcctgtttactatattcgagaggaaaggcagagagttcttctgtatgtttgtgctcacactgcgatcatctacaatgtgttcaggaacaatcaataccaccttcagggccacgccaatattatctcctgcctctgcgtcagtgaagacaggcggtggatcgccacagcagacaaagggccagactgcctggtgattatatgggactccttcacaggtattcctgtgcacacaatatttgacagctgccctgaagggaatggcatcatggccatggccatgacccacgacgccaagtatctggcaaccatctcagatgctgaagtccagaaggtatgcatctggaagtggactttggcagtggaaacgccagcatgcactctcgaactccccacagagtacggtgttcagaactacgttacttttaacccaacaaataataaagaattggtgagcaatagtaaaacacgggcaatatattatgcatggtatgaagagagggatacactggctcacagtgccccacttttaactgaaaaaaccttcaacaagcttgtgggaaagtttagccagtccatctttcacttgaatttaacacaaatactctcagccacaatggaagggaagctggttgtctgggacatacaccgcccaccctcatctgcctccacctttttgggctttccctatatcaagccttgtaaattggttcatttgcagaaagagggtatcacggtacttaccacaattgatagctacattgtcacaggtgacattaaggggaacattaagttctatgatcacaccctgtctattgttaactggtacagtcacttgaaactgggcgccataagaactctgtccttttcaaagaccccagcaactcctcctactgaaaaatcaaactatcctcctgactgcactttaaaaggtgacctttttgtcttaaggaattttatcattggaacatctgatgccgcggtgtaccacttaacaacagatgggaccaaacttgagaagttatttgtagagcccaaggatgccatttgtgccatctcctgccacccatatcaacccctcattgccatcgggagcatctgtgggannnnnnnnnnnnnnnnnnnnnnaaaacaaacaatatcttttcagcagggtttttgagaaggggtttggagtccagagtctgacctacaaccccgaaggagcccttcttggagctggctttacagaggggacagtttacattcttgatgcaatgtctttagaaaatgaaagcccagagcctttcaaatattccagaaccagtgtgactcatataagcttttcccatgactcccagtatatggcaactgctgatagaagttttactgtggctgtttacatgctggtggtcagaaatggacagagggtctgggagtacttagcaagacttcgctctcatcgcaaaagcattcgaagtctcctgtttggggtttacctggacagcaatgagcctagactgctgagccttgggacagacaggctcttgatagagtatgatcttctcaggagctacaaagaccacctggaagtcctggacattcaccacaccgaccagggctgctatcccacctgcatggtctggtacccaccactcaccagggaactcttcctgcttatttgcaacagtggctacaaagtgaagctttttaatgctactaccaaaatgtgcagaaagacgcttctggggccagcttatggttcccctattgagcagacacaagtcctcccagtgagaagcatggcggagctacagaaacgctacttggtgtttattaacagagacaagttgggacttcagatcttaccagttgacggcaatccacataagacatctgctattgtttgccacccgaacggggtggccggcatggccgtttcctatgatggctgctacgccttcactgcgggagggcacgatcgctcggtggtgcagtggaaaatcaccttaagtgtcctggaggcagcggtttctcttgggggtgaagacttgaccccattctatggtctgctgtctggtggccgggaaggaaaattctacagggagctagaagactacttctactattctcagctccgcagtcaaggcatcgacacaatggagaccagaaaggtgtcagaacacatttgcctgtcagagcttccttttgtcatgagagcaattggcttttacccatctgaagagaagattgatgatatatttaacgaaatcaaatttggtgaatatgtggacactggaaagctaatcgacaagatcaacttaccagatttcctaaaagtgtaccttaaccacaagccaccttttggtaacaccatgagtggcatccacaagagctttgaggtgctcggttataccaactccaaagggaaaaaggccattcgaagagaggacttcctgagactgctcgttactaaaggtgagcatatgacggaggaggagatgttggattgctttgcttcactgtttggcctgaatcccgagggatggaaatccgagcctgcaacctgctccgtcaaaggttcagaaatttgccttgaagaagaacttccagacgaaatcactgcagaaatattcgcgactgaaattcttggcttaaccatttcagaagattccggccaggatggtcagtgaagttaccaggaatgtttaaagcacaaaggactttgggtgtgtgtgcatgcacatgtgtgtgttttccatgaggcactgctttttatgcatttccctcccccctctcatctttagaacatttagacattaaagcaagtttctggtgagcaaaaaaaaaaaaaaaaaaaaaaaaaaaaaaaaaaaaaaaaaaaaaaaaaaaaaaaaaaaaaa

SEQ ID NO: 6688 - DNA, 1631 bp, Homo sapiens
agcgggagggcgacgcagttcgcaggcgcgtcggcgcgcctgttctggggcgcttggcttcaccgcgcaggcgcggtcgccgctgttgttgtggtccccattgagctgccgtagcggacccagcacagccaggagcgtccgggatgagctcagccgcggccgaccactgggcgtggttgctggtgctcagcttcgtgtttggatgcaatgttcttaggatcctcctcccgtccttctcatccttcatgtccagggtgctgcagaaggacgcggagcaggagtcacagatgagagcggagatccaggacatgaagcaggagctctccacagtcaacatgatggacgagtttgccagatatgccaggctggaaagaaagatcaacaagatgacggataagctcaaaacccatgtgaaagctcggacagctcaattagccaagataaaatgggtgataagtgtcgctttctacgtattgcaggctgccctgatgatctcactcatttggaagtattattctgtccctgtggctgtcgtgccgagtaaatggataacccctctagaccgcctggtagcctttcctactagagtagcaggtggtgttggaattacctgttggattttagtctgtaacaaagttgtcgctattgtgcttcatccgttcagctgaacaggaggatggatacagccgcgaggctaaaaaacggatttcctcttcctagcttaaaatctgatttacactgttttgttttttaagaaacaaaagtgcatagtttagattttttttttgtttgaatatgtttgttcttggactttatgagatagtcttataagaatcacgattttctacacctgtcattgagccaagaaagtccagtttatgacacgtatgtactagtgaacaccgtcctcgatctgtacgaaatgtgaaatgtttagggacatctccatgctgtcacttgtgatttgccctcttatgtattttggtcatattgccaactggaaagtcaaaattttctaacaactttaagtaagttctttgaagacttagtgctgtttttaatccagtttagaaagtaacttaattttaataccgctactaaaaattcgaaaatttcttctttaatcacattcaatatggttaaaagaacaacactaattgacattgcgtgggctttttctccctttgtttaaaatgtcatttgttgagcaagagttgtatagtattatctacttacttgaggctgttaatttttcattacagtgttttgtaaatgtatccacgagaccatgatgcattgttttgtgctcaacttgtgttttgtatttaaagcattttgaatgaagtgtattttataagcatttaatatttatgctctttagaatggaacacagaaaacaaaccttataagtcctgattaaattaatctgaaccaaaaaaaaaaaaaaaaaaaaaaaaaaaaaactattaaatgttccttaaaacacttttttctaattaaaatctttgcaaatgcttgtgtaacttcctgccttacagctacttgtttgctgtgagccacccgcaactgacaagtggctgttaactgagtcaccatatcccagtaaagctgaattttctcactaaaaaaaa

SEQ ID NO: 6689 - DNA, 1666 bp, Homo sapiens
gaggaattaacttcctggtctgtgcccttctctagaagaatataagatgctcctcctcctcaccccttctcagcctcctcccaagtcttcctcttctgcaccacccccgagtccaaacccacctcttgccccagcattcaggctggaaaacactgatgtggactcagtatgacaactgagatgggggaagccagacatgtgaggacgctgtcctccgagaggtgtccccggctgttagccagctgtgctgtggtgctgtgggtctgtcataccctcccttgcttctgttcacactgggaggcccactcctggctcacctctccctctcagggacccacgtgggagcctggatccctggactgtcctgggcataggtttcaggggcctcctttgttgtcatcagaacccagaggaattcttctcctaaaaaatacgtatggcataccaatctgtgcggggcagtgtcctaagcacttagactacatcagggaagaacacagaccacatccctgtcctcatgcggcttatgttttctggaggaaagtggagacacaagtccttggctttagggctcccccggctgggggctgtgcagtccggtcagggcgggaggggaaatgcaccgctgcatgtgaaccttaccagcccaggcggatgccccttccccttagcactaccctggcctcctgcatcccctcgcctcatgttcctcccaccttcaaagaatgaagagccccatgggcccagcccctgccctgggaaccaggcagccttccagacctcaggggctgaggcagactattagggcagggctgactttggtgacactgcccattccctctcaggccagctcaggtcacccgggcctctgacccaggcctgtcactttgagaggggcaaaactgagaggggcttttcctagagaaagagacagaaggagcttgcaggccttcatgtagccgacacacgtctcaggattttaagtccacattggcctcacactaccagggccaatgcccaaaataaggagttccaatttggggccaaatgaggaaggacacagactctgccctgggatctcctgtgctagcggccaatgacaaatccagtcattggccaccagccacctctgcagtggggaccacactagcagccctgactccacactcctcctggggacccaagaggcagtgttgctgtctgcgtgtccaccttggaatctggctgaactggctgggaggaccaagactgcggctggggtgggcagggaagggaagccgggggctgctgtgagggatcttggagcttccctgtagcccaccttccccttgcttcatgtttgtagaggaaccttgtgccggccaggcccagtttccttgtgtgatacactaatgtatttgctttttttggaaatagagaaaatcaataaattgctagtgtttctttgaaaaaaaaaaaaaaaaaaaaaacaataaataaaaaaacaagttgttgctgggccgaactagggccctaggaagaaagtttttgtaaaaccaattctggtttggaggccgaggggcccccaatctagtatacgtggaaccgttggccacaaagggggtcccctagggaaaaccgggggaccaagaatagggtgtgggattctcccagaataaaaagcccg

SEQ ID NO: 6690 - DNA, 4153 bp, Homo sapiens; identical to SEQ ID NO: 5810
  misc_feature (2451)..(2467): n is a, c, g, or t

SEQ ID NO: 6691 - DNA, 4117 bp, Homo sapiens
  misc_feature (300)..(316): n is a, c, g, or t
  misc_feature (2707)..(2726): n is a, c, g, or t
ggggaatatagatccggcaagagcttagctgtgatcactcctagctgctcagcaaaccactgaggttcctgggaaaaaaaaaaaaatatctcaagggtgtgttaacttgggacactcgttaactgggggaccttcttgaggcttttttccttctttttaaaaatcatctttgattattcttcttttctagtaaaataatatttagaaaaaataatgtcagagcacagcagaaattcagatcaagaagaacttctcgatgaggagattaatgaagatgaaatcttggccaacttgtctgcnnnnnnnnnnnnnnnnntgcagtcggaaatggaagtcatggcccctgaccccagccttcccgtgggaatgattcagaaagatcaaactgacaagccaccgacaggaaacttcaatcataaatctcttgttgattatatgtattgggaaaaggcatccaggcgcatgctggaagaggaacgagttcctgtcacctttgtgaaatccgaggaaaagactcaagaagagcatgaagaaatagaaaaacgtaataaaaatatggcccagtatttaaaagaaaagctcaataatgaaatagttgcaaataaaagagaatcaaagggcagcagcaatatccaagaaacagatgaagaagatgaagaagaagaagatgatgatgatgacgacgaaggagaagatgatggtgaagagagtgaagaaacgaacagagaagaggaaggcaaagcaaaggaacaaattagaaattgtgagaacaactgccagcaggtaactgacaaagcattcaaagaacagagagacagaccagaggcccaagaacaaagtgagaaaaaagtatcgaaattagatcctaagaagttagctctagacaccggctttttgaaggtaagtacaaggccttcaggaaaccagacagacctggatgggagcttgaggagagttaggaaaaatgatcctgacatgaaggaactcaacctgaacaacattgaaaacatccccaaagaaatgttactggactttgtcaatgcaatgaagaaaaacaagcacatcaaaacattcagtttagccaatgtgggtgcagatgagaatgtagcatttgtcttggctaacatgttgcgtgaaaatagaagcatcaccactctcaacatcgagtccaatttcatcacaggtaaagggattgtggccatcatgaggtgtctccagtttaatgagacgctaactgagcttcggtttcacaatcagaggcacatgttgggtcaccatgctgaaatggaaatagccaggcttttgaaggcaaacaacactctcctgaagatgggctaccattttgagcttccgggtcccagaatggtggtcactaatctgctcaccaggaatcaggataaacaaaggcagaaacgacaggaagagcaaaaacagcagcaactcaaggaacagaagaagctgatagccatgttagagaatgggttggggctgccccctgggatgtgggagctgttgggaggacccaagccagattccagaatgcaggaattcttccagccaccgccacctcggcctcccaacccccaaaatgtcccctttagtcaacgcagtgaaatgatgaaaaagccatcgcaggccccgaagtacaggacagaccctgactccttccgggtggtgaagctgaagagaatccagcgcaaatctcggatgccggaagccagagaaccacccgagaaaaccaacctcaaagatgtcatcaaaacgctcaagccagtgccgagaaacaggccacccccattggtggaaatcactcccagagatcagctgctaaacgacattcgtcacagcagtgtcgcctatcttaaacctgtgcaactgccaaaagaactggcgtaagaggcaacagagccatctagaagaacaagaaatggaaatagtgactcttggattacagcatggagactatgtcagcagcaatactttaggatccacgtggcagaactggaaacaatgctaccatctgataagggtatttgtaaaaggcagaatgtttgggccatgaagaagtaggggctgaagaggaaggtggaaggagataaaatataatatttagaggcaatattttctacttgcaatcaatttgagtgactcaggtgaaatttagagtcatatttcccgaagcagaagttaaagaaaattttttaaacatttgctttattattgttttcttctggtaaataataaatataacagaagtgttaaaaaaaaaattcccatttttttctccttccatctcttctgcggtaattcatcacgtagtatcttaaagggaacaaataatgtttcatcctatggaaatgtgaaggatgaattgagctcctggcccttctgatgctttgaaatggaaggattgttccttagagcttctctgcagaatcagtggagattttcagtttcccaccctgcccggctttctctcttggtgactcccttggtgttttggagtattctttctataggggtacctgtgaggggcagaacacgtaagccacagaacatggtgaaaactaagtgtcactaggaaaagtaatgggaaagtaaaccctgcatatatgaaaacttcctggcagcaagttttcatatatagagggacaatgggagacagcatgctgtttttatagaaaagaagttttacataatatagttnnnnnnnnnnnnnnnnnnnnggctaaatacacacacacacacacacgctcatatgtgtttactctgtaagtctaatttgattttatcactctcaaacatactttaaaggaaacttgcttacaggaaggattaaacttgaactacttatcctattctttaaggcactccattgcctggccccaatttactaatcctgtcttatttcccacaaatcctttatactctactcgatgaaacatccttgtgcacacccttgtgcctttgctcgcattaatccttccaagagacttccctcctgttctccattaatgaacgtcctacccagtcttcaactcccgggtcagatcctgtgtcctccataaaaaattttccagacaactccaatctgtccttcttccaagttcctagaggccttaattattcattctagccactaggtgcatagaatttgagatttttgtaataatagaagtagtgtgaaccctagaaattagaaaatcaagctttgggccaggtgcggtggctcatgcctgtaatcccagcactatgggaggccagggagggaggatctccagaggtcaggagttcgagaccagcctggccaacatggtgaaaccccgtctctattaaaaatacaaaaattagctgggcatgatggcaggcacctgtaatcccagctactcgggaggctgaggcaggagaattgcttgaactggggaggcagaggttgcagtgagacaagatcacgtcactgtactccagcctgggtgacagagtgatactccatctcaaaaaaaaaaaaaaaaaaaaaaaaaaaaaaaaaaaaaaacctttggtgccttttctctcttctttacctgagtaaataattggcacctgccttctttctccttttatgttatcataagtggcatgtatcaaaccaaacaggctaggggagaataggtctaattgtgacagacttaaaaacaacacattatttggaaagacaagccatgggaaagaaatatggcgtttctatttttttaagataatttagtatgtacaaaagtatccaaatttaaatatagttttcaatggctgatagttttgttttctcacccttcaatatttctagaaaacatccttgcatacaaagcaggatagctaagaaagggctgtaacaaacaaaacttcaagtgtctagcacatactacatctaagaggctaaactctgataggaaaagcactttaaacataattaaaagcttaatgtaaattagtagttgaaattctaggccggtgcggtggctcatgcctgtaatcccagcactgtaggcggccgaggtgggtgaatcacatgaggtcaggagttcaagaccagcctgaccaacatggtgaaaccccatttctaccaaaaaaaaaaaaaaaa

SEQ ID NO: 6692 - DNA, 2325 bp, Homo sapiens
ggcacgagggccccgtcccggcctcgcgcacctgctcaggccatgatgagcttcggcggcgcggacgcgctgctgggcgccccgttcgcgccgctgcatggcggcggcagcctccactacgcgctagcccgaaagggtggcgcaggcgggacgcgctccgccgctggctcctccagcggcttccactcgtggacacggacgtccgtgagctccgtgtccgcctcgcccagccgcttccgtggcgcaggcgccgcctcaagcaccgactcgctggacacgctgagcaacgggccggagggctgcatggtggcggtggccacctcacgcagtgagaaggagcagctgcaggcgctgaacgaccgcttcgccgggtacatcgacaaggtgcggcagctggaggcgcacaaccgcagcctggagggcgaggctgcggcgctgcggcagcagcaggcgggccgctccgctatgggcgagctgtacgagcgcgaggtccgcgagatgcgcggcgcggtgctgcgcctgggcgcggcgcgcggtcagctacgcctggagcaggagcacctgctcgaggacatcgcgcacgtgcgccagcgcctagacgacgaggcccggcagcgagaggaggccgaggcggcggcccgcgcgctggcgcgcttcgcgcaggaggccgaggcggcgcgcgtggacctgcagaagaaggcgcaggcgctgcaggaggagtgcggctacctgcggcgccaccaccaggaagaggtgggcgagctgctcggccagatccagggctccggcgccgcgcaggcgcagatgcaggccgagacgcgcgacgccctgaagtgcgacgtgacgtcggcgctgcgcgagattcgcgcgcagcttgaaggccacgcggtgcagagcacgctgcagtccgaggagtggttccgagaagaaggaacctgctgtcgaaaagcccaaagaatccaaagttgaagccaagaaggaagaggctgaagataagaaaaaagtccccaccccagagaaggaggctcctgccaaggtggaggtgaaggaagacgctaaacccaaagaaaagacagaggtggccaagaaggaaccagatgatgccaaggccaaggaacccagcaaaccagcagagaagaaggaggcagcaccggagaaaaaagacaccaaggaggagaaggccaagaagcctgaggagaaacccaagacagaggccaaagccaaggaagatgacaagaccctctcaaaagagcctagcaagcctaaggcagaaaaggctgaaaaatcctccagcacagaccaaaaagacagcaagcctccagagaaggccaagtccccagagaaggccaagactcttgatgtgaagtctccagaagccaagactccagcgaaggaggaagcaaggtcccctgcagacaaattccctgaaaaggccaaaagccctgtcaaggaggaggtcaagtccccagagaaggcgaaatctcccctgaaggaggatgccaaggcccctgagaaggagatcccaaaaaaggaagaggtgaagtccccagtgaaggaggaggagaagccccaggaggtgaaagtcaaagagcccccaaagaaggcagaggaagagaaagcccctgccacaccaaaaacagaggagaagaaggacagcaagaaagaggaggcacccaagaaggaggctccaaagcccaaggtggaggagaagaaggaacctgctgtcgaaaagcccaaagaaactcagaagagtcccggagctcaaggatcagagtaacacaattttcactttttctgtctttatgtaagaagaaactgcttagatgacggggcctccttcttcaaacaggaatttctgttagcaatatgttagcaagagagggcactcccaggcccctgcccccatgccctccccaggcgatggacaattatgatagcttatgtagctgaatgtgatacatgccgaatgccacacgtaaacacttgactataaaaactgcccccctcctttccaaataagtgcatttattgcctctatgtgcaactgacagatgaccgcaataatgaatgagcagttagaaatacattatgcttgagatgtcttaacctattcccaaatgccttctgttttccaaaggagtggtcaagcccttgcccagagctctctattctggaagagcggtccaggtggggccgggcactggccactgaattatgccagggcgcactttccactggagttcactttcaattgcttctgtgcaataaaaccaagtgcttataaaatgaaaaaaaaaaaaaaaaaaaaaaaaaaaaaaaaaaaat

SEQ ID NO: 6693 - DNA, 1086 bp, Homo sapiens
  misc_feature (106)..(158): n is a, c, g, or t
  misc_feature (194)..(208): n is a, c, g, or t
  misc_feature (1032)..(1085): n is a, c, g, or t
gccccgctacggtttacattttacacctggagtccgctagtgtgcctttagcctatgtttacggtgacaaccataagacacgggctgtgtcactatataagcacgnnnnnnnnnnnnnnnnnnnnnnnnnnnnnnnnnnnnnnnnnnnnnnnnnnnnncctaagtggttcggcctcatatggctgtatcgctcnnnnnnnnnnnnnnntaaacctctaaattgtaacttttcccaggccccttcatttccccaggccttggacaaccatgtgcctctgtagggtgaacaacaattgattcaccgaaatattctagcaaatgctggccttgggttgcagcctgcactgtagacccaagggttttgctgtggctcttcttatctcccttggctcataaagcccctgatgatgccagagcttcaattagagccatcatcatcccaggcagggatatctttgagaaatgactcagttcagccccaggcccctgtgactctgcttaaagcacacatttctgctgactcttgtacctggggcagcaggataatcaccaacacactcttaacgagaaacaacacaccaagcacagtggagctgtcctaggcaacactcgcggtctcaggctgcggtgggcgtctgtcctgcatgtggcccagaccaccctgacccccgggcctgcctgcctggccctgcatgctgcacgctcactgtatttgtgcagatcctggccagtacaaagtcgttgctcttgtcttatcttctcttacagagtctccctccctttatagaatgtcaaccaaagagtgccctcctcccctctcagcctcctctttagctagcctccccatctcatcacaacgcatgtctgtgacctttggtaatcatttacagtgccacacggaaccctgtattttgcacacagcaaaacaaacaatgtttagctttatttatggtatttgatgctgtaaatggaaataaatattgttctttataaaaaaaaaaaaaaaaaaaaaaagggggggaaaaaaaaaannnnnnnnnnnnnnnnnnnnnnnnnnnnnnnnnnnnnnnnnnnnnnnnnnnnnnt

SEQ ID NO: 6694 - DNA, 2462 bp, Homo sapiens
ggggagacagagagaaatacttgcagagccagcaggtagctgggcagctccttcccggacggacggatggacagacgctggggaccctccactccatatggaaagatgacatgaccttgtggtagatcccagaactgaggccccaggatgacagaacaggagaccctggccctactggaagtgaagaggtctgattccccagagaagagctcaccccaggccttggttcccaatggccggcagccagaaggggaaggtggggccgaatccccgggagctgagtccctcagagtggggtcttcagctggatctcccacagccatagagggggctgaggatggtctagacagcacagtaagtgaggctgccaccttgccctgggggactggccctcagcccagtgctccgttcccggatccccctggctggcgggacattgaaccagagccccctgagtcagaaccacttaccaagctagaggagctgcccgaagacgatgccaacctgctgcctgagaaagcggcccgtgccttcgtgcctattgacctacagtgcattgagcggcagccccaagaagaccttatcatgcgctgtgaggcaggcgagggcgagtgccgaaccttcatgcccccccgggtcacccaccccgaccccactgagcgcaagtgggctgaggcagtggtgaggccgcctggctgttcctgtgggggctgcgggagctgtggagaccgtgagtggctaagggctgtggcctccgtgggagccgcactcattctcttcccttgcctactatacggggcatatgccttcctgccgtttgatgtcccacggctgcccaccatgagttcccgcctgatctacacactgcgctgcggggtctttgccaccttccccattgtgctgggtgagcctgtgagaagaaagggggcatcgggaagtggacttgaggagggcagggcctgcctggtgtggggagcaggaggatttcccttcacttgacctgggcccctcagggtctcccaccccctgccagtctgcatgcccatctcctcccaggaccacctccaccccactgtgtagagcccatgcactgcccacagtgaatctgcccccagcttactgcctcttgcgcccttcccctgccttttctgaccctaccctgtttcccaactccacccagggatcctggtgtacgggctgagcctgttatgcttttctgcccttcggccctttggggagccacggcgggaggtggagatccaccggcgatatgtggcccagtcggtccagctctttattctctacttcttcaacctggccgtgctttccacttacctgccccaggataccctcaaactgctccctctgctcactggtctctttgccgtctcccggctgatctactggctgacctttgccgtgggccgctccttccgaggcttcggctacggcctgacgtttctgccactgctgtcgatgctgatgtggaacctctactacatgttcgtggtggagccggagcgcatgctcactgccaccgagagccgcctggactacccggaccacgcccgctcggcctccgactacaggccccgcccctggggctgagcctctccgccctcgccctcggagtagggggtagcggcttgggtctgacacatctttgaaccttgtggccaggcctggacttcgcccccaggcctaggaccgcggtgggtggaaccctgctactgccccaacagggactccaatcaatcggagttctccccttgccggagctgcccttcacctttggggcccgagacagtcataagggatggacttagttttcttgcagggaaaaaggtggacagccgtgtttcttaaggatgctgagggcatggggccaggaccaggggagaggcacagctccttcctgagcagcctctcaccactgccacaaggctccctaatgctggtctctgctccactccccggcttcccgtgaggcaggaggcagagccacagccaaggccctgaccacttctgtgccagttgtctaagcagagcgcctcagggacgctggaaatgccttaaggatagaggctgggcatcacatcaaatgggactgtggtggttggtgaaacctttcctgaggactggattcaggaccctccatgactggcctatttactgtttacagctggccagtgcagagctgctgctcttttacctttttaggcccctgtaacttcccacctttaaactgcccagaaggcatgcctctcccacaggaagaggggagcagacagggaaatctgcctaccaagaggggtgtgtgtgtctttgtgcccacacgtggtggctggggagtgcctggatggtgcggtggttgatgttaacctagtgtgtgtgtgtgtgtgtgtgtgtgtgtgtgtgtgtgtaacaataaattactaccagtcaaaaaaaaaaaaaaaaaa

SEQ ID NO: 6695 - DNA, 2210 bp, Homo sapiens
tggagagccgcggctgggaccggagtggggagcgcggcgtggaggtgccacccggcgcgggtggcggagagatcagaagcctcttccccaagccgagccaacctcagcggggacccgggctcagggacgcggcggcggcggcggcgactgcagtggctggacgatggcagcgtccgccggagccggggcggtgattgcagccccagacagccggcgctggctgtggtcggtgctggcggcggcgcttgggctcttgacagctggagtatcagccttggaagtatatacgccaaaagaaatcttcgtggcaaatggtacacaagggaagctgacctgcaagttcaagtctactagtacgactggcgggttgacctcagtctcctggagcttccagccagagggggccgacactactgtgtcgggcccagtcatatatgcacagttagaccactccggcggacatcacagtgacaagattaacaagtcagagtctgtggtgtatgcggatatccgaaagaattaagagaatacctagaacatatcctcagcaagaaacaaaaccaaactggactctcgtgcagaaaatgtagcccattaccacatgtagccttggagacccaggcaaggacaagtacacgtgtactcacagagggagagaaagatgtgtacaaaggatatgtataaatattctatttagtcatcctgatatgaggagccagtgttgcatgatgaaaagatggtatgattctacatatgtacccattgtcttgctgtttttgtactttcttttcaggtcatttacaattgggagatttcagaaacattcctttcaccatcatttagaaatggtttgccttaatggagacaatagcagatcctgtagtatttccagtagacatggccttttaatctaagggcttaagactgattagtcttagcatttactgtagttggaggatggagatgctatgatggaagcatacccagggtggcctttagcacagtatcagtaccatttatttgtctgccgcttttaaaaaatacccattggctatgccacttgaaaacaatttgagaagtttttttgaagtttttctcactaaaatatggggcaattgttagccttacatgttgtgtagacttactttaagtttgcacccttgaaatgtgtcatatcaatttctggattcataatagcaagattagcaaaggataaatgccgaaggtcacttcattctggacacagttggatcaatactgattaagtagaaaatccaagctttgcttgagaacttttgtaacgtggagagtaaaaagtatcggttttattctttgctgatgtcctttctgcttgaaataacagtcaccatacagctaaaggagaggagtttctttccttctaagtaggcagaaatggtatcattatgttgccgctctccaatctcccagagctcgctctctagagaatcaccttctttcgctttttttttttttttggaggtagagtctcactatgttgcccagactagccttgaactcttggggctcaagtgattctccctcctcagcctcccgagtagctggaacgaactatagttgcaccactgcagctggcaagaatcaccttctttataaagcgtcagtcatgcttccagcaagaggcagcatcagtcatggctttataacagcttcatggtgcctcaaaggatgttgaggttaatgagaggctagattagacagttgggctgtccttccctaaagttgtgttttctcttattcactattccccacggcacttaaaatctatgagttttacttttactggggaatggactagtgtggtgaagatctttccacccatttatgttgtcctttctcccattttctgaattttcttttaaatttcccccctttaaatattgttcgaaagcccccgttttggacagcatttctggtcttaaatggtcctgcgaacgtgttggcggtagttggacacggggggccaggtgtctttcccccgtgttgggccctttgagcgccggcgtatccccccctggacactcggggagtttgagggggttcccgagattacgggtaccgtttgcattcggtggccggcggaatgtactgaccaattgtgttccacctttttggctgtgtttaggccctcctctgttagaacataccttgtcctcttggtgaaacgcctc

SEQ ID NO: 6696 - DNA, 2062 bp, Homo sapiens
  misc_feature (50)..(50): n is a, c, g, or t
agatcctttggcgggcttccacctcctcacttcacctccgagtagctgtntaacaagaatgaatgaatgtctttgtcttaaattttgcccatgtgttaaaagatgtaattctcagaatgggagagaaatgactacctttgttcctactcttttatataattatccttttagggaaagacttggtcaactctaatatatctagaaggaagactatatctggtgtagactaatatgagatgttttagaagagttaacctgaacactttgagggagagattattcttgccagcaaaaagctagccaggaatgagcctaccacattatttgagaatatcaaacctcaggcctggggggttgaggggaagaagattaccagaagtgcaggaaagagaagtttgaggaacacccttggcttagcaacatgtgataatgcaaagctgttataacctgttaatcctacgtactatgtgttctgtacctttacatgtttttaaatttaagatagtttgtaagaactgtacaaaaaaatgcttctggagatttctttggcagaaatgcctttcatctataatttcatggagaactgctttaattagcctaggtgaaaagtagtcctagcagtgtaaatatgtataattagagttttctaatttcactgtgagatctctaacttttgagtggcaaacagatcaagtcttctgctcatagacttttctgtggggttattaaaatgcaaaagctttattttttttaataatgccatactccattagtgtcagatgatggtatggaatttgttcccttgctttcccccactgttactgcttcagtttatagattgccagcagagttcagaaatagagcagggatttacccgttctttgcttggacatcccattttcttttgtccagacccatgttggcaatcatgtatgaactgtgttatacttctcagtgctttcttttttctttttgataagatggatatcaaaaatagttgctgtgcaaaagttagtagtcttcttcaagaagaaaaccaattctttttctaataatatcctgtgaaattgcttcattcattcatttatttttaagccaaatgtcagcagagtgctgctgcttttatctagtaattttgatatgtaagtattaatgcatttttaaaagatgtctacattgaaacatgttcttcccagtgtcctgcttatgatgctttgttcagattttttgtaagagaccagttagtacactgggggtgtatattgtgtacatgtgtcattttagttaggcagtgtaggccaaatgtgattataaatgaagttgatgaacattaattttgttattagtgagttttttgaattgtaaatggatttccagtttaccttctgttgtctacagcttttttaattttaaggtttgactaattgtatccatctcattgtacagtgttttagttgcaagcagaaagtagaatttggtataaagcaggttatttctatattgaaaggagtacagttgaaattgtagatttaagattgttaaaatcatgacaattctaacttgtctattctaacctattgtgtacaatctgattttttaaaattgtaaacatgtatgatcttggtttcatgtgtttttgaaagtgttattgtttaaaaaatgaaaaaagcatatctgctaaagagctgtcagttttcattactgactctgtaaaatacactgttctttgtgtactgtgtgttattttgccagctgctgcattagccttcaaaagtatttggaaacttaagatgaactacatttcttgcaaagtacattcctttctgtggtattttgtcctgtaactgaagtatagtaattattttatggaaatgttagcaattctgtaccaactttgaataaaatgaaaaatttaaaaaaaaaaaaaaaaaaaaattttggcggcctgggcctaaaagtttttaaacactctttgggggggcccaaggtgtgaaaggccacgtgttccaagaaccgccttaggggggtttcccaaaaaccggggcagggttgcaccacggtg

SEQ ID NO: 6697 - DNA, 1099 bp, Homo sapiens
  misc_feature (449)..(467): n is a, c, g, or t
  misc_feature (1017)..(1021): n is a, c, g, or t
  misc_feature (1032)..(1035): n is a, c, g, or t
tcctctgcactcaggtacctggcacactggcattcgggaagcatgtcttgaatgcctattaaaatgattaggaccgggcgtggtggctcacgcttgtaatcccaacactttgagaaggcaaggtgggaagattgcttgaggccaggagtttgagaccagcctgggcagcatagtgagactttgtctctaccagacataaaaagtaaataaaaataaaatgattaaacatgcacaactccacctcgagctggatctctccttaggtctaaagacacttgctgagaacctgatgtgtgcctggccttccaaggcacacctgtcactggcttggaactcagaccaatcaaaatgcctgtgctgctgacagctgagctctcttcctctggttctcctcctgtgtcctgggggtgtttttccagacctgctgtggggagaacctttgggctcannnnnnnnnnnnnnnnnnntagcagagtcctgtgccagctccagcccctgcctttgggtggaccggactaggctggggaaagaaagatgtctggctatgaaagggtggctggccaaggttgaggctcagcctgcccctgctcaggctccgagcagcaggctcagcagccacagttaggcacgtttgcacttccaaccatcacaggcaggcgggccaaccggcccatggtgtggtgactaacacctcattaatggtcataccccttctgtacctggcatgtgccctccattgtgtgcctccggcaaagagcccactatcaagttccccagtcagcagctacttggtagtcactgtggcatgtcggtcaccattaatatttgaaagatgcctgtgctctgcttcaggctgaggcaggcaccccttaccttcctgttatgtgaagatgcctgcaggaaaggtcacacctagggtgggtggactagtaatgctccctgttgttatttggccttcaaaattaaatttgccttggggcccaagtggtaaaaaaaaaaaaaaaaaaaaaaaaaaannnnnaaaaaaaaaannnnaaaaaaaagggcgccgctccaaaaaaaatccccgaaggggcccagttttcgggaaccccttttt

SEQ ID NO: 6698 - DNA, 3434 bp, Homo sapiens
aaggcgagagcggagctccaagcccggcagcccgagaggaagatgaacagccccaggccagagcctctggcagagtggaccccgagccgcccccaggtagccaggagcggcctcagcggcagccgcaaactccagtagccgcccgtgctgcccgtggctggggcggagggcagccagagctggggaccaaggctccgcgccacctgcggcacagcctcacacctgaacgctgtcctcccgcagacgagaccggcgggcactgcaaagctgggactcgtctttgaaggaaaaaaaatagcgagtaagaaatccagcaccattcttcactgacccatcccgctgcacctcttgtttcccaagtttttgaaagctggcaactctgacctcggtgtccaaaaatcgacagccactgagaccggctttgagaagccgaagatttggcagtttccagactgagcaggacaaggtgaaagcaggttggaggcgggtccaggacatctgagggctgaccctgggggctcgtgaggctgccaccgctgctgccgctacagacccagccttgcactccaaggctgcgcaccgccagccactatcatgtccactcccggggtcaattcgtccgcctccttgagccccgaccggctgaacagcccagtgaccatcccggcggtgatgttcatcttcggggtggtgggcaacctggtggccatcgtggtgctgtgcaagtcgcgcaaggagcagaaggagacgaccttctacacgctggtatgtgggctggctgtcaccgacctgttgggcactttgttggtgagcccggtgaccatcgccacgtacatgaagggccaatggcccgggggccagccgctgtgcgagtacagcaccttcattctgctcttcttcagcctgtccggcctcagcatcatctgcgccatgagtgtcgagcgctacctggccatcaaccatgcctatttctacagccactacgtggacaagcgattggcgggcctcacgctctttgcagtctatgcgtccaacgtgctcttttgcgcgctgcccaacatgggtctcggtagctcgcggctgcagtacccagacacctggtgcttcatcgactggaccaccaacgtgacggcgcacgccgcctactcctacatgtacgcgggcttcagctccttcctcattctcgccaccgtcctctgcaacgtgcttgtgtgcggcgcgctgctccgcatgcaccgccagttcatgcgccgcacctcgctgggcaccgagcagcaccacgcggccgcggccgcctcggttgcctcccggggccaccccgctgcctccccagccttgccgcgcctcagcgactttcggcgccgccggagcttccgccgcatcgcgggcgccgagatccagatggtcatcttactcattgccacctccctggtggtgctcatctgctccatcccgctcgtggtgcgagtattcgtcaaccagttatatcagccaagtttggagcgagaagtcagtaaaaatccagatttgcaggccatccgaattgcttctgtgaaccccatcctagacccctggatatatatcctcctgagaaagacagtgctcagtaaagcaatagagaagatcaaatgcctcttctgccgcattggcgggtcccgcagggagcgctccggacagcactgctcagacagtcaaaggacatcttctgccatgtcaggccactctcgctccttcatctcccgggagctgaaggagatcagcagtacatctcagaccctcctgccagacctctcactgccagacctcagtgaaaatggccttggaggcaggaatttgcttccaggtgtgcctggcatgggcctggcccaggaagacaccacctcactgaggactttgcgaatatcagagacctcagactcttcacagggtcaggactcagagagtgtcttactggtggatgaggctggtgggagcggcagggctgggcctgcccctaaggggagctccctgcaagtcacatttcccagtgaaacactgaacttatcagaaaaatgtatataataggcaaggaaagaaatacagtactgtttctggacccttataaaatcctgtgcaatagacacatacatgtcacatttagctgtgctcagaagggctatcatcatcctacaactcacattagagaacatcctggcttttgagcacttttcaaacaatcaagttgactcacgtgggtcctgaggcctgcagcacgtcggatgctaccccactatgacagaggattgtggtcacaacttgatggctgcgaagacctaccctccgtttttctactagataggaggatggtagaagtttggctgctgtcataacatccagagctttgtcgtatttggcacacagcagaggcccagatattagaaaggctctattccaataaactatgaggactgccttatggatgatttaagtgtctcactaaagcatgaaatgtgaatttttattgttgtacatacgatttaaggtatttaaagtattttcttctctgtgagaaggtttattgttaatacaaggtataataaaattatcgcaacccctctccttccagtataaccagctgaagttgcagatgttagatatttttcataaacaagttcgagtcaaagttgaaaattcatagtaagattgatatctataaaatagatataaatttttaagagaaagaatttagtattatcaaagggataaagaaaaaaatactatttaagatgtgaaaattacagtccaaaatactgttctttccaggctatgtataaaatacatagtgaaaattgtttagtgatattacatttatttatccagaaaactgtgatttcaggagaacctaacatgctggtgaatattttcaactttttccctcactaattggtacttttaaaaacataacataaattttttgaagtctttaataaataacccataattgaagtgtataatataaaaaattttaaaaatctaagcagcttattgtttctctgaaagtgtgtgtagttttactttcctaaggaattaccaagaatatcctttaaaatttaaaaggatggcaagttgcatcagaaagctttattttgagatgtaaaaagattcccaaacgtggttacattagccattcatgtatgtcagaagtgcagaattggggcacttaatggtcaccttgtaacagttttgtgtaactcccagtgatgctgtacacatatttgaagggtctttctcaaagaaatattaagcatgttttgttgctcagtgtttttgtgaattgcttggttgtaattaaattctgagcctgatattgatatggttttaagaagcagttgtaccaagtgaaattattttggagattataataaatatatacattcaaaaaaaaaaaaaaaaaa

SEQ ID NO: 6699 - DNA, 1609 bp, Homo sapiens
atgtcacttgcacacacagctgcagagtacatgctctcagatgccctgctgcctgaccgcaggggaccccgcctcaaaggactgcgtctggaactgcccctggaccggatagtcaagttcgtagctgtgggctcccccttgttgctgatgtccctggcattcgcccaggagttctcctctgggtctccgatcagctgcttctctcccagtaacttcagcatccggcaggcagcctacgtggacagctcctgctgggactcactgcttcaccataagcaggacgggcctggccaggacaaaatgaaatctctctggccccacaaggccctcccctactccctgctggccctggccttgctcatgtacctgccggtgctgctgtggcagtatgcagctgtgccagccctcagctccgatctgctgttcatcatcagcgaactggacaaatcttataatcgctccatccgcctcgtgcagcacatgctgaagatccggcagaagagttccgacccctatgtgttctggaatgagctggagaaggctcggaaagaacgatactttgaattccctttgctagagcggtacctggcatgtaagcagcgttcacattcgctagtggctacctacctcctgaggaactccctcttgctcatcttcacctccgccacttacctataccttggtcatttccatctggatgtcttcttccaggaagaattcagctgctccatcaagacagggctgctaagtgatgagacccatgtccccaatctgatcacatgcaggctgacatcactgtccattttccagattgttagcctctccagtgtagcaatatacaccatattggttccagtgataatatacaacctcacacggctatgtcggtgggacaaacgacttttatctgtctatgagatgctcccagcttttgatctcctcagcagaaagatgctaggatgtcccatcaatgacctcaatgtgatccttcttttcctccgagctaacatctctgagctcatctcttttagctggctgagtgtcttatgtgtgttgaaggatacaaccacccagaagcacaatattgacacagtagttgattttatgactttattggctggcttagaaccctcaaaacccaaacacctcaccaactcggcatgtgatgaacacccatagttaagaaaccatggagcaagaaagcttgtggaaagtctctctccttcctcataagacatgcacactaatacacatacacaccaaaaaattacacattttaaaactgctaagcttggatttaactgaatcatatatcttttatcatgttatcctaaaagtgagaagacataaccaagacatggaaataaatgtgaaagctggagccgaagagtcaaagagctaaaaaattaagtctagaacattctatgaggatagtataaataaaaagaaatacagtctagacatgctgcaaggaaagaagattctaaagtccgtttatggaggcaattccatatcctttcttgaacgcacattcagcttaccccagagagcaagtgaggcaatctggcaaaagattaataaagatgtaaacccctggaaaaaaaaaaaa

SEQ ID NO: 6700 - DNA, 2789 bp, Homo sapiens
ctcttctcacatcagcgggtccaggcccaaccgacagactatgggggctccttcaccaggcgctgcgtggagtggctgctgggcctctacttcctcagccacatccccatcaccctgttcatggacctgcaggcggtcgtgccgcgcgagctctacccagtcgagtttagaaacctgctgaagtggtatgctaaggagttcaaagacccactgctacaggagcccccagcctggtttaagtcctttctgttttgcgagcttgtgtttcagctgcctttctttcccattgcaacgtatgccttcctcaaaggaagctgcaagtggattcgaactcctgcaatcatctactctgttcacaccatgacaaccttaattctgatactctccacatttctgtttgaggatttctccaaagccagtggtttcaagggacaaagacctgagactttgcatgaacggttaacccttgtgtctgtctatgccccctacttactcatcccattcatacttttaattttcatgttgcggagcccctactacaagtatgaagagaaaagaaaaaaaaaatgaaggaaacaaccactggcccagggtagagatgcctacagggtggttgcttgttggatacatacaggaacactgctcagaacccacgtcttcagcagcatttgaaacactggcagcaatgcacaagagcaagatggtgtcaggaaccatgtcaaaccctcaccttcttccattttttttttttttttgagacagtctcactctgttgccaggctggagtaaagggcagtggcatgatctcggctcactgcaacctccgcctcctgggctcaagccatcttccttagcctcccaagtagctagaactacaggtgtgtaccaacacgtatggctaatttgttttgttttttttgtgtgtgtggagacagggttttgccatgttgcccaggttggtctcgaacgcctaggctcaagtgatctgcccacctcagtctccctaagtgctgggattacagacgtgaaccactgggcccagcccaaaccttcaccttctaagggcactgggatgaacagaccgatcggcttgagggtgggcaaaggggtgtgggctaggttataaggaagtggtaccaaataactgtgtgcctgagttccaccgcaagattactaaaagcaggaccagaccagaaactgctaaagaacatggcctgtttgacatgttcatgagtcacctgacccacagcatatatgcttatgactaaaccctccactcctgattctcaagagtgtatcacctgtcagcaaaatgaatagtgggatattttgggccattttaaatgtgaaattttgcctctttaatgttaattcaaaactatatcaatgttttcttgttcccacctctaacccaaggaaaaaagagaaaacatactatgcaaaggaagtttaaacttaagttttccttaagggtcagcccaacaatgactttcagtcaaatggattaaactggaaaatgtttttgtttctgttgtaaacagatcatcctaggcgaaagttttttttgtttgtttgcttttaaattagtttatttctaaatcttagtcttccacatttctagaggccacctgacacaagtccctgtatctgaagtctagcatctcaaggctgatctggaagtgtgctagtatgctccctagtggataacttaatcttttaatacagttccgtcattcccatcttgttttcagaagagaaggtggctacagccaggcataacatatccactgtgtgcatagagggtctcttcacgttgatgcttggcattccatcagctttctctaagtctttgctcaagttcaaccttaaaatgatgttagacaacaggtcccagtcagttccctctattttcacccattttgctcacaagccatattggcccgattagtggtactgtctgactcacgtgtgtgatccaaataaaggtagctgctgacaattaaaaaaaaaaaaaaaaacttttaccaaaaactcaaacaacaaaaacaataaaaaaggggcggcccgcccttttttttttttttttgctattaaaatttttcttttaatatgccctgaaaaatcctgattggaaattttcccaagaactttccagccacatttcccccacccttccaaaaaactttccccagtttttcccagggaataaaaaaaagctggggataaatacttttgggcaaccattttctttttttggaaaccccaattttatactaaaggggcttctaatggggaaaaaccccttctttattctaattaaagcaaaaccccctttttttcgcattattcgcaaaaacccccgcgtcttgaaaaaacatttcgcactttaactttttggaacctggaattccaaaccttttttgtgtggggtctttcttttatcaatggcacccatgttatttcggcccctctccacaatttatcacgggatgtaataagcccctgtcacgggcccccttcgttctaaaatccctatcaccatcaccctaatttaatccttaccctccgcctcctttactcttctacccatctctattgcctctccccaacgtcgtgttcttcttccttatcccacgccctcacgtacgcctcaatccctatcgagtatcccgcgcacggccggttacttcgcggcgtcttcggtactctcatccccaatctctcctgctcacactatccccacacatgccacacccggtacagcccccatccttcttcctccggttccc

SEQ ID NO: 6701 - DNA, 2390 bp, Homo sapiens
ggcacgaggtttccccgcccctcgcctcggccctttctcttcccagcacctcggctgttccccggcggcggcagcggcagcggcggcccacacagcagcgagaggcgagaggaggctgcctcgaggatgaagtgcaaacccaaccagacgcggacctacgaccccgaggggttcaagaagcgggcggcgtgcctgtgcttccggagcgaacgcgaggacgaggtcctgttagtgagtagcaaccggtacccggaccgctggatcgtgccgggcgggggcatggagcccgaggaggagccgggcggtgcggcggtccgagaggtgtacgaagaagcgggagtcaaggggaagttaggccggctcctgggcgtcttcgaacagaaccaggatcgcaagcacagaacgtacgtgtatgtactgactgtcacggagctgctggaggattgggaagattcggttagcattgggaggaagcgagagtggttcaaagtcgaagatgccatcaaggttctccagtgccacaagcccgtgcacgccgaatatctggagaaactaaagctgggcggttccccaaccaatggaaactccatggccccatcctcgccagatagcgatccctaatgaacagcaaagatgttcagtattgtgctgaaagaaacattgatgtgaacccagtgatcagtggaattgtcaagtacaggtgagcacttctgtgttcccaagaagacagctcatctggtttcttcctgcatcttgggacactccttccctgtctataccactgactcttgctctggttgttgtactcttatacgtgaatagactcttaattcagcacctatagccttttgttgtgcttttttgatgtgtctgccttcattagactatgatgtctttgagagcaaagactatttttccttactctttgcatattctgcatctgagacactacttgaaatatggttggcatcactgaaggttctttgattcaattaatattttgtaatcaccgtgtggcaaaacattccccttccaatctggtgctagtagagtatatgctatctaggcaccatgtgtgtggcttttgtgtatcaggtgtttcagaaatatttcaagacggttgtaagatgtttgaggacaagaattattactcctatttctatgtcataccacacagtagctgcacagttttaagattatgccatcacctagggtaatgttttgtagaatcagtccttcgtgtaacaactctagtgtttttgtactgttgatgatttacttaaattttattcaaaaactatcacttgctataaaggtaattgtaaaaataaatacagtggacgcaaaataatgttgtgagtttttataaaaataaattttaaaatgatatataagacatttttttgcaatgcctgccctaaccacttcttacatgtcatcttaacatctctttgaggaaacactgtttcctcattttacagatttaacatactgtattatttgatgccagagccaacaggctatatcataggcagtttccaaacttaattatgccatttagtttgtctagatttcttttgcctctctcactgatccatttggctgtagttttcatcccttttccagtacacacagctagctcctcatcctacctggtttctgcatatgagaatgcagagggctgagagagggcaaaattgttgtcatttagaaaaggcatttaggaaagaggctgctattagaggggaacacaaagtgaaggtttttttaaaaaagaggacttgcatcagctgcctccagaacaattttaagaaaataacaaagatgtttagaagaaatcttacggagtttgccatgggatgtgtgatatcagcagtcttcagctccttacaaattaccaaaagtggttctaatatgctagtttgtttgattttttcttttatattataaagcaattgcatcgataaaagcttggactccattttagtgtgacactcttcctcatgataccagtgaaatgtattgattgtgtccccagttgttacataatttgaaataaaaatataacttcttgatttattgttttttaagatgtgatatggtactgtggttatgttgttttaaaaaatgattatcttttagagaagtatactgaaaaatgtacaggtgaaatgatatgttactggtattcgcttcaaaatcatctgagtgtggggtaattgagtacatagatgaaacaagattggccataaattggtaattgctgaagctgtgtgatggatgtttgagagttcattatactattctctatacttttgtatatgtttgaaattttccataataaaaattgaaaaaagtaaaaaaaaaaaaaaaaaaaaaacaaaaaaaag

SEQ ID NO: 6702 - DNA, 4123 bp, Homo sapiens
  misc_feature (107)..(121): n is a, c, g, or t
cagaccccagttcgccgactaagcagaagaaagatcaaaaaccggaaaagaggagaagagcaaacaggcactttgaggaacaatcccctttaactccaagccgacannnnnnnnnnnnnnnaagttcagtgcctaccgaagacaaaggcgccccgagggagtggcggtgcgaccccagggcgtgggcccggccgcggagcccacactgcccggctgacccggtggtctcggaccatgtctcccgccccaagacccccccgttgtctcctgctccccctgctcacgctcggcaccgcgctcgcctccctcggctcggcccaaagcagcagcttcagccccgaagcctggctacagcaatatggctacctgcctcccggggacctacgtacccacacacagcgctcaccccagtcactctcagcggccatcgctgccatgcagaagttttacggcttgcaagtaacaggcaaagctgatgcagacaccatgaaggccatgaggcgcccccgatgtggtgttccagacaagtttggggctgagatcaaggccaatgttcgaaggaagcgctacgccatccagggtctcaaatggcaacataatgaaatcactttctgcatccagaattacacccccaaggtgggcgagtatgccacatacgaggccattcgcaaggcgttccgcgtgtgggagagtgccacaccactgcgcttccgcgaggtgccctatgcctacatccgtgagggccatgagaagcaggccgacatcatgatcttctttgccgagggcttccatggcgacagcacgcccttcgatggtgagggcggcttcctggcccatgcctacttcccaggccccaacattggaggagacacccactttgactctgccgagccttggactgtcaggaatgaggatctgaatggaaatgacatcttcctggtggctgtgcacgagctgggccatgccctggggctcgagcattccagtgacccctcggccatcatggcacccttttaccagtggatggacacggagaattttgtgctgcccgatgatgaccgccggggcatccagcaactttatgggggtgagtcagggttccccaccaagatgccccctcaacccaggactacctcccggccttctgttcctgataaacccaaaaaccccacctatgggcccaacatctgtgacgggaactttgacaccgtggccatgctccgaggggagatgtttgtcttcaaggagcgctggttctggcgggtgaggaataaccaagtgatggatggatacccaatgcccattggccagttctggcggggcctgcctgcgtccatcaacactgcctacgagaggaaggatggcaaattcgtcttcttcaaaggagacaagcattgggtgtttgatgaggcgtccctggaacctggctaccccaagcacattaaggagctgggccgagggctgcctaccgacaagattgatgctgctctcttctggatgcccaatggaaagacctacttcttccgtggaaacaagtactaccgtttcaacgaagagctcagggcagtggatagcgagtaccccaagaacatcaaagtctgggaagggatccctgagtctcccagagggtcattcatgggcagcgatgaagtcttcacttacttctacaaggggaacaaatactggaaattcaacaaccagaagctgaaggtagaaccgggctaccccaagtcagccctgagggactggatgggctgcccatcgggaggccggccggatgaggggactgaggaggagacggaggtgatcatcattgaggtggacgaggagggcggcggggcggtgagcgcggctgccgtggtgctgcccgtgctgctgctgctcctggtgctggcggtgggccttgcagtcttcttcttcagacgccatgggacccccaggcgactgctctactgccagcgttccctgctggacaaggtctgacgcccaccgccggcccgcccactcctaccacaaggactttgcctctgaaggccagtggcagcaggtggtggtgggtgggctgctcccatcgtcccgagccccctccccgcagcctccttgcttctctctgtcccctggctggcctccttcaccctgaccgcctccctccctcctgccccggcattgcatcttccctagataggtcccctgagggctgagtgggagggcggccctttccagcctctgcccctcaggggaaccctgtagctttgtgtctgtccagccccatctgaatgtgttgggggctctgcacttgaaggcaggaccctcagacctcgctggtaaaggtcaaatggggtcatctgctccttttccatcccctgacataccttaacctctgaactctgacctcaggaggctctgggcactccagccctgaaagccccaggtgtacccaattggcagcctctcactactctttctggctgaaaggaatctaatcttgttgagggtagagaccctgagacagtgtgagggggtggggactgccaagccaccctaagaccttgggaggaaaactcagagagggtcttcgttgctcagtcagtcaagttcctcggagatctgcctctgcctcacctaccccagggaacttccaaggaaggagcctgagccactggggactaagtgggcagaagaaacccttggcagccctgtgcctctcgaatgttagccttggatggggctttcacagttagaagagctgaaaccaggggtgcagctgtcaggtagggtggggccggtgggagaggcccgggtcagagccctgggggtgagcctgaaggccacagagaaagaaccttgcccaaactcaggcagctggggctgaggcccaaaggcagaacagccagagggggcaggaggggaccaaaaaggaaaatgaggacgtgcagcagcattggaaggctggggccgggcaggccaggccaagccaagcagggggccacagggtgggctgtggagctctcaggaagggccctgaggaaggcacacttgctcctgttggtccctgtccttgctgcccaggcagcgtggaggggaagggtagggcagccagagaaaggagcagagaaggcacacaaacgaggaatgaggggcttcacgagaggccacagggcctggctggccacgctgtcccggcctgctcaccatctcagtgaggggcaggagctggggctcgcttaggctgggtccacgcttccctggtgccagcacccctcaagcctgtctcaccagtggcctgccctctcgctcccccacccagcccacccattgaagtctccttgggccaccaaaggtggtggccatggtaccggggacttgggagagtgagacccagtggagggagcaagaggagagggatgtcgggggggtggggcacggggtaggggaaatggggtgaacggtgctggcagttcggctagatttctgtcttgtttgtttttttgttttgtttaatgtatatttttattataattattatatatgaattccaaaaaaaaaaaaaaaaaaaaataacaaggggcatggggaggggtgggggtgggggggcagaggcgtctgaccccaggaacctgcagggcggggctgggtcggtgccctctaaggacaattttgaccttgttcaacctttccacaaagaataaattgtgtttcacaaaaaaaaaaaaaaaaaaaaatggaaaaaaaacaaaaaaaaaaaaaacaaaaaaaaaaaacaaacacaaggaaacaaagaagaacaaaaaagaaaaaagagacaaaaaaaaaaaaagagaggaggcggggcgcgacacatacaactaatggcgggggaggaagaaccccccaaaaaagaggggccggagagtgccgtgtacaagacaagaacagcgcagggcggcgctgaacaacaagtgcgtgagcgagtagaaagcagcgctgcgtgacactatggaggaaaaaaaactccattgggggagtgcagcaacacgggacaccccacacagcacagaaatcacggaggaaaacaaaacaaccgagggtctagtgagaaaagacagtgagcgcgagaaaaaggcgcggggatcataatatacga

SEQ ID NO: 6703 - DNA, 6854 bp, Homo sapiens
  misc_feature (3090)..(3187): n is a, c, g, or t
  misc_feature (4362)..(4368): n is a, c, g, or t
aatctcccaaggcctaaggaggcaagaggcctgcaaatcgcctcctgctcagcaaacgggttgctcagcaggcccggggtcctggtccaccccaggtccctggtttgcccacctccgatggcggccttcgctggcagggtgggcgcctctggggagccagctccgtcccggcgcctttagagccccatctcttccacgtccctggccttcctccccttccaggcggctgtccccgccggggtccagatggtgtcggagggccggcggttcgacggcgggcccggggttcagcctcccggcctccctccgtccctgactctcctttcttcggagagggcgcgggggccggggccaaagcgccgctcttggggttctcctggactcggagttgccccaggcgggcgcagctctgccccgcggggtgccagcctcgggcgggcaaggtccgtgagtcaccgcctgtaaccgaacaccaggcctccctgccccctcccccagctccggccgccaggctgcggcgacacctacaagaaaatgaaggggcgcccaggcccgcggcggccccggccgtatcgcgagcaggtcccggcggcccccggctcgcggcgctctttcttccccggccccggggctcggccagccgcaaccgccgccccggcgccagcaggaatccaggccgagcgaccggccccggagcccgaggcggcggagggcccgcggtagctgcgactggcgagcccgagagcgcccggggagggggcgcccggcttggaatttcccggtcccttccggcccagcgaggacaaagcactcctggccgccgccgccgccgccgccgtggcctacgccgcgccgcacaaagggcgagtcgcgacacgctcccatccccctcccagctcacggcggccccggccccgggtggctgcagggaggtgggggaagccctggctgcaccgcccctcgctccccctcccctggggccgcgcgagcgccgcccccgccccgtctgcgcgtcctcccggggaggggttggggggcgcggcgccccacataacactccccctcctgcgctgcgagccaccctctcccctccctcctgcaaacaccaccgcctcccctgccaccgccgccacctcgcccgacgctccacagctcgccgcggccggggggcggtgcgcggaccgtgcgcgccgcgggcgccagatgtgcagtccccgccgccgccagtgaccgagccgcagtccgagcggtatcgggccgcctccctgatgctgcgggggcgaccttgagcgtacagcggcttccctcggtggggaccccgacatcccagcgctgtgcccggtcttgccctctgtagcccggctcgccccgcgcttggacatggaaggggccgccgcgcctgtggcgggggaccgccccgacttggggctgggggcgccgggctctccccgagaggcggtggcgggggcgactgcagccctggagcccaggaagccgcacggggtgaagcggcatcaccacaagcacaacttgaagcaccgctacgagctgcaggagaccctgggcaaaggcacctacggcaaagtcaagcgggccaccgagaggttttctggccgagtggttgctataaaatccattcgtaaggacaaaattaaggatgaacaagacatggttcacatcagacgagagattgagatcatgtcatctctcaaccatcctcatatcatcagtatttatgaagtgtttgagaacaaagataagattgtgatcatcatggaatatgccagcaaaggggagctgtacgattacatcagtgagcggcgacgcctcagtgagagggagacccggcacttcttccggcagatcgtctctgctgtgcactattgtcacaagaacggtgtggtccaccgggacttgaagctggaaaatatactgctcgatgacaactgcaatattaagattgctgactttgggctttccaacctgtaccagaaggataagttcttacaaacgttttgtgggagtccactctatgcatctcctgagattgtcaatgggagaccttaccgagggccagaggtggacagctgggccctgggtgtgttgctttacactcttgtttatggaacaatgcccttcgatggtttcgatcacaaaaacctcattcggcaaatcagcagcggagagtaccgggagccaacacagccctcagatgctcgaggactcatacggtggatgctgatggtgaaccccgatcgccgggccactattgaggacattgccaaccactggtgggtgaactggggctataagagcagcgtgtgtgactgtgatgccctccatgactctgagtccccactcctggctcggatcattgactggcaccaccgttccacagggctgcaggctgacaccgaagccaaaatgaagggcctggccaaacccacgacctctgaggtcatgctagagcggcagcggtcgctgaagaaatccaagaaagagaatgactttgctcagtctggtcaggatgcagtgcctgaaagcccatccaagttgagttctaagaggcccaaggggatcctgaagaagcgaagcaacagcgagcatcgctctcacagcactggcttcattgaaggtgtagttggtcctgccttaccctctactttcaagatggagcaggacttgtgcaggactggcgtgctcctcccaagctcaccagaggcagaggtgccgggaaaactcagccccaagcagtcggccacgatgcccaagaaaggcatcttgaaaaagacccagcagagagaatcaggttactactcttccccagagcgcagtgagtcttcggagctgttggacagtaatgatgtgatgggcagcagcatcccctcccccagccccccggacccagccagggtaacctcccacagcctctcctgccggaggaagggcatcttgaaacacagcagcaaatactcagcgggcaccatggacccagccctggtcagccctgaaatgcccacactggaatccctgtcagagcctggtgtccctgccgagggcctctcccggagctacagccgcccttccagnnnnnnnnnnnnnnnnnnnnnnnnnnnnnnnnnnnnnnnnnnnnnnnnnnnnnnnnnnnnnnnnnnnnnnnnnnnnnnnnnnnnnnnnnnnnnnnnnnctctgcagaaaacttcctccagatccaggactttgaggggctccagaaccggccccggccccagtacctgaagcggtaccggaaccggctggcagacagcagcttctccctcctcacagacatggatgatgtgactcaggtctacaagcaagcgctggagatctgcagcaagctcaactagcattccagggcgcccaggggcgggcgggggtacgagggaggaaggggagcaagacttgggctcacaggctggttacctctttgctggctgtgacaacagactgaaaaaggattggcactgtctcacttggccaagtttgcagccttgagccaacacctaaaagggagaggtgggctcttctgccagttctgtcaattgtcagtcagaatttgggccctgtttggcatttgctttatggcacctcctagaggaccagctgtccaggggaggtggtattgaccggcactcagtgggtggagaggaagcatatgtggaaggagcatttccttagaaatgcttcattcatccagatgcttctggaggaggggcaggagacacttgggctgtttgccttgggcgagcccaaagaacttgccccttttctccttgcattagcaagctaggtctggctgcgtggagctggcaagtagatttcagcaacttgagcttgagttgatgatcaattaatagtggctgccagttgtgctggcgtaagtggcccacatcatggggaaggagtgctgtgattgactagtaatggctaccacgggaaagggaaggggaagcagtagcactaatgctatgtagttgtcatctttgatctggctaggccctgggaatcgggtttagtcatcctgtgggatctgtgttaactctttcatgccactggtgaggcatttgttaatttgctactcaactttgaggaaagacagggccttggtcagagagagaatgctctgaactctgctaaggacatagagtcagcccatggtgatttagctccttgctgttcacctcctctttcctgatgtctgccttgctctacagcacaacctcttgagggtggacagggagaaagatgatggtgtcagaggtcaaaactattatatatgacagggcacaagatggtctgtgatctttgcacagatgaatggaagttgatgcacaccaacannnnnnnacttgtcactttctttctcaatattaactggaatgctgcctcttgggttctcacctgcatggatgctttgagttggatgtgatactgtccatattctccagaggattacctggctgaaccattggctctgttcaccagtgacagatggtttccccatccactgagtgtagcatcctcagaggtaggcaagtttgcttctagggagttagcatgtagatgggatattgggatgaggaaaggaaaatcaggtagatggtgctttttttcccccaaatctaagtattctatgtcatggttttaaactttgccatgaactcctgggctttgggggaagagaaagttccattcatttaaatgaataaggtgttgaaagagtgcagggggttgggaggaagcatgtaagagagggaacatttccttagatgttacccagatggttctgggggagacagaaaagaggtgcggcaggactcttatcttaaaaagtaaacaaaacaaaacaaaacaaaacaaaaaaactagatatgtaatttctaaacacccagatcacaatgacaagatgccactccaaccatgggacaccttcatgatactaggtttgtacttcctggtctctgggatgacttcagattctgctggccaaggcaaattgaactcagttcaagatggccaccactggtagacgtgtagatagaaaagaggactggtcttgggaacatctttggaaaaaccaacaaacaatagttctagggagatgagaaaaaaattcaccttacagtgctaagaaagtgcattagaatggaattgccctttccttaaggagacagtttgggctctccccttgccaccggctctggtgttttggcttatgcgttccttcaggttgagctgagcagtgtgttatgggaagctgctcaatttcctttcattcaattccacctccttcctgaactctaatagaggttaaaagggaaaaaaaaaattctgtagatagcaaattgtgtgtgtgggggggggtgggggtgtgggtgcatggaggacaacctgcaactctgagctccctacttcctgcctcatttcatgcagtcttttctgaacagcctatgctgctgccctgctggccccttgtgcacggcagctggccgtgtccgtagctgtcagtatgacttagatctagctcctacctactggttgatgtgttttttccttttgccaagtgattgagtctgtttagtagtttccatcattctagtctttaagtaaaaatgacactattgaggaaagtcagtctactcccttcttcctccccccaaacacgtgttctcttttgtcaggaaactcagccagtgggctgtggcagagaaagtcctccactcagaggcagagactgagttaagtcataggtggccttaggcatctgcattgtttgcaggggttaagttttccttccagtgagggctggagggatgaattagctggtacctgaagccccgcttagctctgacactctgccaacatcctctgattctaggtgtggtgttgactgtcctttcaaggaaaaacttgcaatagagggaaaagccattaaagcagctccctgcttcatcattaagtcctgtcatccctaccagccaatcccagtcaaagaagttatgctttattcacttctgtggaattacaagtgagagacacttttaggacctgatggacaaagcaggagattcactgtcagctttcctggtcctctccttacttctgtgggccttgcaccgtcttagtttacacatctgccaaaggggtagaattacacttctttttacaggtaaatgtcaaggcacaatcagttttcagggaagtgcttcaagacccccaggtgaaatgaaaatgctaagtaccctctgaatggccatgcctgttaccaggtgctgcttcttcagatgatggggagcacttttcagggtgaaattcaggcgagttttgcccaggcctgctgtcttgagtacaaatgtgaatgatcgactgactgcttgttgccaaactggaaatgttctgtagggatttactggcatggtatcattcctagaagaaaaaaagagagaaacttgactgcacattaaaaaaaaaaaaatccacattgtgacttttatttaatttctattttttttggtaataaaaagttgacttttttatttgaatttgtcttttttatttattggtctgaaaggcatttcaaaggtattataataatatattggtgtaatttaattggtgcaacatgctttatggctcctgtcaaaattggttttcactcatttgattggtttgagcccagaacagcctacaggggaaaaacaagctggataaccacccaaagtgtttgtattttcgttggaaactgatttttgtttcattttggtttttgtttctgtttttatttttaaattaaataaattgcaatgaactgaaaaagaaaaaaaaaaaaaaaa

SEQ ID NO: 6704 - DNA, 1979 bp, Homo sapiens
ggtagttggttgtgggcactgggttagaggtatcacgtgggggcactttcgtcttagcttttggacaagacgcaggcgcaacccacggctgctgcggggatccttgtggcccttccggtcggtggaaccaatccgtgcacagagaagcggggcgaactgaggcgagtgaagtggactctgagggctaccgctaccgccactgctgcggcaggggcgtggagggcagagggccgcggaggccgcagttgcaaacatggctcagagcagagacggcggaaacccgttcgccgagcccagcgagcttgacaacccctttcaggacccagctgtgatccagcaccgacccagccggcagtatgccacgcttgacgtctacaacccttttgagacccgggagccaccaccagcctatgagcctccagcccctgccccattgcctccaccctcagctccctccttgcagccctcgagaaagctcagccccacagaacctaagaactatggctcatacagcactcaggcctcagctgcagcagccacagctgagctgctgaagaaacaggaggagctcaaccggaaggcagaggagttggaccgaagggagcgagagctgcagcatgctgccctggggggcacagctactcgacagaacaattggccccctctaccttctttttgtccagttcagccctgctttttccaggacatctccatggagatcccccaagaatttcagaagactgtatccaccatgtactacctctggatgtgcagcacgctggctcttctcctgaacttcctcgcctgcctggccagcttctgtgtggaaaccaacaatggcgcaggctttgggctttctatcctctgggtcctccttttcactccctgctcctttgtctgctggtaccgccccatgtataaggctttccggagtgacagttcattcaatttcttcgttttcttcttcattttcttcgtccaggatgtgctctttgtcctccaggccattggtatcccaggttggggattcagtggctggatctctgctctggtggtgccgaagggcaacacagcagtatccgtgctcatgctgctggtcgccctgctcttcactggcattgctgtgctaggaattgtcatgctgaaacggatccactccttataccgccgcacaggtgccagcttcagaaggcccagcaagaatttgctgctggtgtcttctccaaccctgcggtgcgaaccgcagctgccaatgcagccgctggggctgctgaaaatgccttccgggccccgtgacccctgactgggatgccctggccctgctacttgagggagctgacttagctcccgtccctaaggtctctgggacttggagagacatcactaactgatggctcctccgtagtgctcccaatcctatggccatgactgctgaacctgacaggcgtgtggggagttcactgtgacctagtccccccatcaggccacactgctgccacctctcacacgccccaacccagcttccctctgctgtgccacggctgttgcttcggttatttaaataaaaagaaagtggaactggaactgacaaaaaaaaaaaaaaaaaaaaaaaaccaaaaaaaaaaaaaaaaaaaaaatgcaaagccccaaaaacaacccccagtcgcccccccggaccacaacgcgcgtcccccgagccaaagcccgccccgggggggcgccaaacccccccccccgcttacgcccctggtggaaacagcgggctcccagaatgtattgcacagccggcccagcagccgtcgaaccctctgtctattaatgtacccacaacacccccgggcgtgttgtgccacacaccgggggcatggaccaacgcgcagcggaattctaggggacatcacccacggccagggatataaggtgcggcccccaggtacaactcggcgcgggaacacgagcaactctttccttgagtggcg

SEQ ID NO: 6705 - DNA, 442 bp, Homo sapiens
atttttaccttttgcgtattcaaccaaatttatttttgaacattcagaacaccagattatcacagattaaaaagaaagcaccaaaaattactacacattaatacctgagcagagactgaaggcaaatattcatctattaaacctacaccataatgctcaaacacaggtaaaaacattcacaacacactctacagaatatagtaagtagtactttttgtgaattacaatcacataaatgtaataattttaattataccatataaaaatacacacaaaattacacataaatgtatttaatatactatacattgtacaaagtactggagatcatgcatgtttaaatggaaagatcagcaagggtggccaatcatttttttatttattattctacgggggcgggtgtccctctgggccttggttaggtggttggttggttagggcc

SEQ ID NO: 6706 - DNA, 2007 bp, Homo sapiens
attaaaaggttttccctttggcccctgggtaaaaaagactgttttcccaaatttcccgcgatttttcaaaattaaaccttccaatttcctttcccattagggtggcaaatttttgaaaggccatcggttgggcctttttgcttatcccccactggcgaaaagggtattcctccaagccattaaatttggtaaccccaggggttttcccgtccccccgttttaaaccccgggcccattaatttttaaaccgccccccataaggggaatggcccaattagccccaaattcggccccaagcaaaaacttgctccaatttaaaattcacttggcccaagcggcccacattgtttttttttttttttttttttttttttttccctttttttttttttttttttttttttttttttttttttttttttttttttttttttttttttttttttttttttttttttttttttttctcattaagaaacatttatttggataagaaagaaggcctgagggctaggggccggggctggcctgcgtctcagtcctgggacgcagcagcccgcacaggttgagaggggcacttcctcttgcttaggttggtgaggatctggtcctggttgggccggtggagaaccacaaagctctctggaggaaggacggggcctctgttctcttctacctggcccatcagcagataactgactcctttcttcatgggggggcactgcttgcaaggcacgtaaaacttcagggaggcaccagtgggtggagaaggcaggtccagtcctccagttttataagcaccaataagactgacagtcacggcaaggccctcccctggctcccgaaccatggacttcactgtcgcagtcaccacaaggctgctggcacagaagttgctctgcaaggtgcctgtccggcggcactgctttgggcaggtgggtgcatcaggggctgaaggagattcctctgttttctccggaggttgggacttggggggcagcttgactttaggctcagttccccgtttggggccgggcccttgcccttctttggcagtgccccgcggcagggtcttgtaggaggctgagaagccatcagcggtgacactgagatctgagacgaactggacgaggagttcattcccttcggaggagatggagcccgggactgcgtcgccgcagaacttccccagcctccgggagtcgtcgctcacggctccgttgaacacgctgaccgagtcatagcggcagtaggtgtccggctccaggtcaaacttctcgaaggtcagcgcgatgacctggtccgggggcgcgatgatgtgccaggaacagctgatgcccggggggtaatcggactcgggccagttgggcgtggtcagggttccctgggccttctccagccgccccccgcaaaattggtgctcagtgcccgaggtggcccgcccgctgtaccagagcaggaagcctcgtcctcctgtgccctcatccgtcgtcatcctcagggtcacctggttgccgggggcgactaggggcgcaggccggaaggtcccacaaaagcgtccgagccgctggccggaagtcccagacccagcgaagacctccagagcatcgtagcggcaggcggggtgcagctccaggtcgaagactcggaatgagagggacacagtctggccctcggggaccgttatggtccagatgcactccttattaggggggtagaggttggggaacccctcacttgccacgtaacctgattcccccttcacatcccctccgcacaggaacacgggtctggtgtagttgggggtctggccctgggcaaaaggcagcagggcgcaggcagtgaggaggggccccaggagggaggctgtggctgcaggcagcatggccccgggggaaaggcgctggggtcctcaagacagaggcagcagctgaattttgcagagcagcagcagcggtggcggcagcagcaggatacctcgtgccagatggggcagccttgggtgtc

SEQ ID NO: 6707 - DNA, 2242 bp, Homo sapiens
agcgggcgcgggcggaggcggggcgcggagaagtggcggaggtggaagcggaggcgtacccgcccctggggacgtcattggtggcggaggcaatggccggcaaccagctgtaagcgaggcacggaagacatatgcttgtgagacaaaggtgtctctgaaactatggatggtacaagaacttcacttgacattgaagagtactcggatactgaggtacagaaaaaccaagtactaactctggaagaatggcaagacaagtgggtgaacggcaagactgcttttcatcaggaacaaggacatcagctattaaagaagcatttagatactttccttaaaggcaagagtggactgagggtattttttcctctttgcggaaaagcggttgagatgaaatggtttgcagaccggggacacagtgtagttggtgtggaaatcagtgaacttgggatacaagaattttttacagagcagaatctttcttactcagaagaaccaatcaccgaaattcctggaaccaaagtatttaagagttcttcggggaacatttcattgtactgttgcagtatttttgatcttcccaggacaaatattggcaaatttgacatgatttgggatagaggagcattagttgccattaatccaggtgatcgcaaatgctatgcagatacaatgttttccctcctgggaaagaagtttcagtatctcctgtgtgttctttcttatgatccaactaaacatccaggtccaccattttatgttccacatgctgaaattgaaaggttgtttggtaaaatatgcaatatacgttgtcttgagaaggttgatgcttttgaagaacgacataaaagttggggaattgactgtctttttgaaaagttatatctacttacagaaaagtaaatgagacatagataaaataaaatcacactgacatgtttttgaggaattgaaaattatgctaaagcctgaaaatgtaatggatgaatttttaaaattgtttataaatcatatgatagatctttactaaaaatggctttttagtaaagccatttactttttctaaaaaagttttagaagaaaaagatgtaactaaacttttaaagtagctcctttggagaggagattatgatgtgaaagattatgcctatgtgtcttgcagattgcaagatattttaccaatcagcatgtgttacctgtacaattaaaaaaatatttcaaaatgcaatgcatattaaatataatacacacagaaaaactggcatttattttgttttattttttttgagatggagtttcgttcttgttgcccaacctggagtgcaatggtgcaatctcagctcactgcaacctctgcctcccaggttcaggtgattctcctgcctcagcctcctgagtagctgggattacaggtgtgcgccaccacgcccagctaattttttgtatttttagtagagacagggtttcaccatgttggtcaggctgatctcgagctcctgacctcaggtgatctacccacctcggcctcccaaagtgctgggattacaggcgtgagccactgcacctggcctgacattctttatgaaatttagaattgttgaagaactataacatttcagtagggttcaaggtggtcccaaaagttatataaaagattagtttttactataaacccttgtcttttactcagatcctagcatcccttttcacatggtttctccatgtatataacagaatcaagaaacaaattttaattaaacaatctgtaacagaatcaagaaacaaatacattttaattaaacaatctatatggaacaaacattcccaaattctaagaataaatttttctttaagccaaaaaaaaaaaaaaaaaaaaaaaaaaaaaaaaaaaaaaaaaaaaacaaacaaaagacaaaaaaaaaaagcaagagaaccagaaaaaaagaaaataaagaagagtgaaccactcaaaccgaagcacggcagcgagctgggaacggcccgcgcgtatgagaagaaaggccgcgaatactgtgacaaaacaaaaagaggagtaccccggacgccgacgaacgagcggagacacagcccgaccgccgtgaccacagatactgccgcgttttgtgtatagtgacacgaggaggcaaacaacgcgaaccgactagcacagatagttcatggaacgagatgcacacaacgtgcagcgagcaagtagcaaacatacgcaacacaaggaaatacaaag

SEQ ID NO: 6708 - DNA, 491 bp, Homo sapiens
ttagaattcagcggccgcttaattctagaagtccaaatcactcattgtttgtgaaagctgagctcacagcaaaacaagccaccatgaagctgtcggtgtgtctcctgctggtcacgctggccctctgctgctaccaggccaatgccgagttctgcccagctcttgtttctgagctgttagacttcttcttcattagtgaacctctgttcaagttaagtcttgccaaatttgatgcccctccggaagctgttgcagccaagttaggagtgaagagatgcacggatcagatgtcccttcagaaacgaagcctcattgcggaagtcctggtgaaaatattgaagaaatgtagtgtgtgacatgtaaaaactttcatcctggtttccactgtctttcaatgacaccctgatcttcactgcagaatgtaaaggtttcaacgtcttgctttaataaatcacttgctctacaaaaaaaaaaaaaaaaaaaaaaaaaaa

SEQ ID NO: 6709 - DNA, 1190 bp, Homo sapiens
aagaaggccaagactgcgttcctgctcaacatccagctctttgaggagttgcaggagctgctgacccatgacaccaaggaccagagcccctcacgggcaccagggcttcgcagcgggccagcaacaaagtgcaagattctgcccccgtggagactcccagaggaagcccccactcaacacccgctcccaggctccgcttctccgatgggtccttacactcagctttctggtggcgacagttgctgtagggctttatgccatgtgaatgcaggcatgctggctcccagggccatgaactttgtccggtggaaggccttctttctagagagggaattctcttggctggcttccttaccgtgggcactgaaggctttcagggcctccagccctctcactgtgtccctctctctggaaaggaggaaggagcctatggcatcttccccaacgaaaagcacatccaggcaatggcctaaacttcagagggggcgaagggatcagccctgcccttcagcatcctcagttcctgcagcagagcctggaagacaccctaatgtggcagctgtctcaaacctccaaaagccctgagtttcaagtatccttgttgacacggccatgaccactttccccgtgggccatggcaatttttacacaaacctgaaaagatgttgtgtcttgtgtttttgtcttatttttgttggagccactctgttcctggctcagcctcaaatgcagtatttttgttgtgttctgttgtttttatagcagggttggggtggtttttgagccatgcgtgggtggggagggaggtgtttaacggcactgtggccttggtctaacttttgtgtgaaataataaacaacattgtctgatagtaaaaaaaaaaaaaaaaaaaaaaaaaaaaaaaaaaaaaaaaaaaaaaacaaaaaaaaaaaaaaaaaaaaaaaaaaaaaaaaacaagggggggcggcgcgcagaagcccccccggacgtacgaacaagaatactaacaacccccccctacttcacagcaaggaacaggccacaaaagaggatggtgtattatctacacacgccgcagacacaggaggcggcggggcagaccaccacgctctgtgcgcgcgcaaagatagactagcaacgaagagaatagtagggacgaagagacagaggtgtctccatgacacgcgcgg

SEQ ID NO: 6710 - DNA, 2339 bp, Homo sapiens
tttttttttttgtagagagaaaaatttattgcaaggcagccaagcaaggacacaggagtctggcccaaatctgtctctccaagttggaggctggggcagattttatatacagagggtagtgaggcatgatatgattggatcttgtaatgaggggattcaggaggcttgatctgactggatcacgccagggctcaatctgattggatcaaggatcatgccacgtggtgtccacttcttaactcagtccctgttcctcagtctgagcacttaggttccacgtggatttgcacgcttcgttcatctggacatgcccagggtatgtaacttgcaacctgggggtccacgacaactgaaaaacaactcgccattttattacacaaagttgaaccagattgggctgaatctgcggttacaatgtttaccagtttattataaaggatacaactagaggggcggggcggtgccggcaagatggctgcgcccgaaaaggtgacatttccagagaaaccaagccacaaaaagtacagggccgccctgaagaaggagaaacgaaagaaacgccagcaggaacttgctccactgagggactcaggactctcacagaaagaggaggacacttttattgaaaaacaacaactagaaaagctatggggaagagagaggcaaagattacatgaggagtggttgctgagagagcagaaggcacaagaagaattcagaataaagaaggaaaaggaagaggtggctagaaaacggcaagaacaagagcgaaagttaaaggaacaatgggaagaacagcagaggaaagagagagaggaggaggaacagaaacgacagaagaaacaaaaaccggaagctgtccagaagatgctggatcaggctgaaaatgagttggaaaatggcgccacatggcaaaacccggaacccccccttggatttcagagtcatggagaaggatggagttaattgtcccttctacagtaaaacaggagcttgcagatttggagatagatgttcacatgatttctgtgaggatgtgctgcccgagttcaagaacgtggggagagactgggcgcggtggctcaggcctgtaatcccagcactttgggaggacgcggcgggcgaatcacgaggtcaagagatcgagaccatcctggtcaacatgttgaaaccccgtctctaccaaaaatacaagaattagctgggcgcggtggtgcacgccagctaatttttgtacttttagtagagtcccagctactcgggaggctgaggcaggagaatcgcttgaacccgggaggcggaagttgcagtgagcctagatcgcgccactgcactccagcctggcgacagagcaagaccccatctttaaaaaaaaatagtaattaaaaaataacgtggggagagtgattcagttcaaggtcagttgcaacttggaacctcacctgaggggcaagtatatatgttcagtaccagtcggaagaagaatgccaagcagctctttctctgtttaacggacgatggtatgtacgcaggacgacagcttcagtgtgaattctgcccagtggctcggtggaaaatgatgatttgtggtttatttgaaatacaacaatgtccaagaggaaaacactgcaactttcttcaggtgttgagaaatccaatagagacctctgcttgtctcctcctttggcaagagctccaaggggagagagaggatgggccaccacgatgaatactacaggctgcggggaaggagaaccctagtccagatcattcctacaaaagaaatggggaatccgaaaggaaaaggaagaaatctcactagcacatgtcaaagagccaggagaggcacaattcaccaagcagaggaagaaatagtgaccgcagcgggggccggtgcagccgcagtgagaacggccggagccgtcacagccggagccaaagctcctctagatcccaaagtcgtggtaggaggagatcaggtagtagagacagaactgttcagagtcccaaatcccagtaaacctgttttattcttacaaaaaaataataggccaggcgcggtggctcacacctgtaatcccagcaattttgggaggccgaggcgggcagatcatctgaggtcgggagttcaagaccagcctgaccaacacggagaaaccccatctgtactaaaaatacaaaaaattagccgggtctggtggcgcctgcctgtaattccagctactcgtgaggctgaggcaggagaaccacttgaacccgggaggcagaggttgcagtgagccaagatcgcgccatggcactccagcctgagcgacaagagtgaaactccatctcgaaaa

SEQ ID NO: 6711 - DNA, 3372 bp, Homo sapiens; identical to SEQ ID NO: 5785
  misc_feature (119)..(164): n is a, c, g, or t

SEQ ID NO: 6712 - DNA, 1482 bp, Homo sapiens
  misc_feature (162)..(218): n is a, c, g, or t
gttcggagtgttggatggcattcctacttacggggttggagctggtggctttcccggctttggtgtcggagtcggaggtatccctggagtcgcaggtgtccctggtgtcggaggtgttcccggagtcggaggtgtcccgggagttggcatttcccccgaagnnnnnnnnnnnnnnnnnnnnnnnnnnnnnnnnnnnnnnnnnnnnnnnnnnnnnnnnntggctcctggagttggcgtggctcctggtgtcggtgtggctcctggagttggcttggctcctggagttggcgtggctcctggagttggtgtggctcctggcgttggcgtggctcccggcattggccctggtggagttgcagctgcagcaaaatccgctgccaaggtggctgccaaagcccagctccgagctgcagctgggcttggtgctggcatccctggacttggagttggtgtcggcgtccctggacttggagttggtgctggtgttcctggacttggagttggtgctggtgttcctggcttcggggcagtacctggagccctggctgccgctaaagcagccaaatatggagcagcagtgcctggggtccttggagggctcggggctctcggtggagtaggcatcccatgcggtgtggtgggagccggacccgccgccgccgctgccgcagccaaagctgctgccaaagccgcccagtttggcctagtgggagccgctgggctcggaggactcggagtcggagggcttggagttccaggtgttgggggccttggaggtatacctccagctgcagccgctaaagcagctaaatacggtgctgctggccttggaggtgtcctagggggtgccgggcagttcccacttggaggagtggcagcaagacctggcttcggattgtctcccattttcccaggtggggccctgcctggggaaagcttgtggccggaagagaaaatgagcttcctaggacccctgactcacgacctcatcaacgttggtgctactgcttggtggagaatgtaaaccctttgtaaccccatcccatgcccctccgacttccccaccccaggagggaacgggcaggccgggccggccttgcagatccacagggcaaggaaacaagaggggagcggcaagtgcccgacaggaggcccctacttcagaggcaagggcatgtggtcctgggccggcgacgcataccttcccagctaggagctccccctccacacaggctccatctccaggggaactaggtgctaacacgctggtgctcttatcttcctgggggacggaggacggaagggcggccccgtcggcggaacaccctacctgggggcccgaaggaggggccaacacttgcgggcggtccacgcgccgcgaccagcagaccacgttgctgcaccagtggtacaccggcctgagcccagacgtcgcaacccccgcggggaaggggctcaccagggcggcccacggcgctgcgc

SEQ ID NO: 6713 - DNA, 12775 bp, Homo sapiens
  misc_feature (1360)..(1384): n is a, c, g, or t
  misc_feature (2300)..(2337): n is a, c, g, or t
  misc_feature (2734)..(2754): n is a, c, g, or t
  misc_feature (2845)..(2898): n is a, c, g, or t
  misc_feature (3926)..(3977): n is a, c, g, or t
  misc_feature (7549)..(7611): n is a, c, g, or t
  misc_feature (9139)..(9159): n is a, c, g, or t
  misc_feature (10085)..(10088): n is a, c, g, or t
  misc_feature (10091)..(10107): n is a, c, g, or t
cgagggctcggctgggggtcgccggggtcgcgggccgggcctgcaggagccgggccgccgaggtcggggctggttgaactcatggacctgatacttttctcttgagaagcaaaccagcccaaaagaaaaatggcgtttgttgcaacacagggggccacggtggttgaccagaccactttgatgaaaaagtaccttcagtttgtggcagctctcacagatgtgaatacacctgatgaaacaaagttgaaaatgatgcaagaagttagtgaaaattttgagaatgtcacgtcatctcctcagtattctacattcctagaacatatcatccctcgattccttacatttctccaagatggagaagttcagtttcttcaggagaaaccagcacagcaactgcggaagctcgtacttgaaataattcatagaataccaaccaacgaacatcttcgtcctcacacaaaaaatgttttgtctgtgatgtttcgctttttagagacggaaaatgaagaaaatgttcttatttgtctaagaataattattgagctacacaaacagttcaggccaccgatcacacaagaaattcatcattttctggattttgtgaaacagatttacaaggagcttccaaaagtagtgaaccgctactttgagaaccctcaagtgatccccgagaacacagtgcctcccccagaaatggttggtatgataacaacgattgctgtgaaagtcaacccggagcgtgaggacagtgagactcgaacacattccatcattccgaggggatcactttctctgaaagtgttggcagaattgcccattattgttgttttaatgtatcagctctacaaactgaacatccacaatgttgttgctgagtttgtgcccttgatcatgaacaccattgccattcaggtgtctgcacaagcgaggcaacataagctttacaacaaggagttgtatgctgacttcattgctgctcagattaaaacattgtcatttttagcttacattatcaggatttaccaggagttggtgactaagtattctcagcagatggtgaaaggaatgctccagttactttcaaattgtccagcagagactgcacacctcagaaaggagcttctgattgctgccaaacacatcctcaccacagagctgagaaaccagttcattccttgcatggacaagctgtttgatgaatccatactaattggctcaggatatactgccagagagactctaaggcccctcgcctacagcacgctggccgacctcgtgcaccatgtccgccagcacctgcccctcagcgacctctccctcgccgtccagctcttcgccaagaacatcgacgatgagtccnnnnnnnnnnnnnnnnnnnnnnnnncctgcaagctcctgctgaacctggtggactgcatccgttccaagagcgagcaggagagtggcaatgggagagacgtcctgatgcggatgctggaggttttcgttctcaaattccacacaattgctcggtaccagctctctgccatttttaagaagtgtaagcctcagtcagaacttggagccgtggaagcagctctgcctggggtgcccactgcccctgcagctcctggccctgctccctccccagcccctgtccctgccccacctccacccccgcccccacccccacctgccacccctgtgaccccggcccccgtgcctcccttcgagaagcaaggagaaaaggacaaggaagacaagcagacattccaagtcacagactgtcgaagtttggtcaaaaccttggtgtgtggtgtcaagacaatcacgtggggcataacatcatgcaaagcacctggtgaagctcagttcattcccaacaagcagttacaacccaaagagacacagatttacatcaaacttgtgaaatatgcaatgcaagctttagatatttatcaggtccagatagcaggaaatggacagacatacatccgtgtggccaactgccagactgtgagaatgaaagaggagaaggaggtattggagcatttcgctggtgtgttcacaatgatgagccccttaacgttcaaagaaatcttccaaactacggtcccttatatggtggacagaatctcaaaaaattatgctcttcagattgttgccaattccttcttggcaaatcctactacctctgctctgtttgctacgattctggtggaatatctccttgatcgcctgccagaaatgggctccaacgtggagctctccaacctgtacctcaagctgttcaagctggtctttggctctgtctccctctnnnnnnnnnnnnnnnnnnnnnnnnnnnnnnnnnnnnnncacaagattgtgaacagctctatggagctcgcgcagactgccaaggaaccctacaactacttcttgctgctacgggcgctgtttcgctctattggtggaggtagccacgatctcttgtatcaggagttcttgcctctccttccaaacctcctgcaagggctgaacatgcttcagagtggcctgcacaagcagcacatgaaggacctctttgtggagctgtgtctcaccgtccctgtgcggctgagctcgcttttgccgtacctgcccatgcttatggatcccttggtgtctgcactcaatgggtctcagacattggtcagccaaggcctcaggacgctggagctgtgtgtggacaacctgcagcccgacttcctctacgaccacatccagccggtgnnnnnnnnnnnnnnnnnnnnnctgtggcgcaccttacgcaaccctgctgacagcatctcccacgtggcctaccgtgtgctcggtaagtttggcggcagtaacaggaagatgnnnnnnnnnnnnnnnnnnnnnnnnnnnnnnnnnnnnnnnnnnnnnnnnnnnnnnatcactgtggagttttccgactgcaaagcttctctccagctccccatggagaaggccattgaaactgctctggactgcctgaaaagcgccaacactgagccctactaccggaggcaggcgtgggaagtgatcaaatgcttcctggtggccatgatgagcctggaggacaacaagcacgcactctaccagctcctggcacaccccaactttacagaaaagaccatccccaatgttatcatctcacatcgctacaaagcccaggacactccagcccggaagacttttgagcaggccctgacaggcgccttcatgtctgctgtcattaaggacctgcggcccagcgccctgccctttgtcgccagcttgatccgccactatacgatggtggcagtcgcccagcagtgtggccctttcttgctgccttgctaccaggtgggcagccagcccagcacagccatgtttcacagtgaagaaaatggctcgaaaggaatggatcctttggttctcattgatgcaattgctatttgtatggcatatgaagaaaaggagctttgcaaaatcggggaggtggccctagctgtgatatttgatgttgcaagtatcatcctgggctccaaggagagggcctgccagctgcccctgttttcttacatcgtggagcgcctgtgtgcatgttgttatgaacaggcgtggtatgcaaagctggggggtgtggtgtctattaagtttctcatggagcggctgcctctcacttgggttctccagaaccagcagacattcctgaaagcacttctctttgtcatgatggacttaactggagaggtttccaatggggcagtcgctatggcaaagaccacgctggagcagcttctgatgcggtgcgcaacgcctttaaaagacgaggagagagccgaagagatcgtggccgcccaggaaaagtctttccaccatgtgacacacgacttggttcgagaagtcacctctccaaactccactgtgaggaagcaggccatgcattcgctgcaggnnnnnnnnnnnnnnnnnnnnnnnnnnnnnnnnnnnnnnnnnnnnnnnnnnnnacaaagaggtcctgcaggatatggtcccccctaagaagcacctgctccgacaccagcctgccaacgcacagattggcctgatggaggggaacacgttctgtaccacgttgcagcccaggctcttcacaatggaccttaacgtggtggagcataaggtgttctacacagagctgttgaatttgtgtgaggctgaagattcagctttaacaaagctgccctgttataaaagccttccgtcactcgtacctttacgaattgcggcattaaatgcacttgctgcctgcaattaccttcctcagtccagggagaaaatcatcgctgcactcttcaaagccctgaattccaccaatagtgagctccaagaggccggagaagcctgtatgagaaagtttttagaaggtgctaccatagaagtcgatcaaatccacacacatatgcgacctttgctgatgatgctgggagattaccggagcttgacgctgaatgttgtgaatcgcctgacttcggtcacgaggctcttcccaaattccttcaatgataaattttgtgatcagatgatgcaacatctgcgcaagtggatggaagtggtggtgatcacccacaaagggggccagaggagcgacggaaacgaaagcatttccgagtgcgggagatgtcccttgtctccattctgtcagtttgaggaaatgaagatttgctcagcaattataaacctttttcatctgatcccggctgctcctcagacactggtgaagcctttgctagaggttgtcatgaaaacggagcgggcgatgctgatcgaggcggggagtccattccgagagcccctgatcaagttcctgactcgacatccctcgcagacagtggagctgttcatgatggaagccacactgaacgatccccagtggagcagaatgtttatgagttttttaaaacacaaagacgccagacctctgcgggatgtgctggctgccaaccccaacaggttcatcaccctgctgctgccggggggtgcccagacggctgtgcgccccggttcgcccagcaccagcaccatgcgcctggacctccagttccaggccatcaagatcataagcattatagtgaaaaacgatgactcctggctggccagccagcactctctggtgagccagttgcgacgtgtgtgggtgagtgagaacttccaagagaggcaccgcaaggagaacatggcagccaccaactggaaggagcccaagctgctggcctactgcctgctgaactactgcaaaaggaattacggagatatagaattgctgttccagctgctccgagcctttactggtcgttttctctgcaacatgacattcttaaaagagtatatggaggaagagattcccaaaaattacagcatcgctcagaaacgtgccctgttctttcgctttgtagacttcaacgaccccaacttcgagagatgaattaacagttaaagttgtgcagcatatgttgaatctgctttcttgtacagctttgagaagggggaaggagagcagctcttgggacctcccaatccagaaggagataacccagaaagcatcaccagtgtgtttattaccaaggtcctggaccccgagaagcaggcggacatgctggactcgctgcggatctacctgctgcagtacgccacgctgctggtggagcacgccccccaccacatccatgacaacaacaagaaccgcaacagcaagctgcgccgcctcatgaccttcgcctggccctgcctgctctccaaggcctgcgtggacccagcctgcaagtacagcggacacttgctcctggcgcacattatcgccaaattcgccatacacaagaagatcgtcctgcaggtttttcatagtctcctcaaggctcacgcaatggaagctcgagcgatcgtcagacaggcgatggccattctgaccccggcggtgccggccaggatggaggacgggcaccagatgctgacccactggacccggaagatcattgtggaggaggggcacaccgtcccgcagctggtccacattctgcacctgatagtgcaacacttcaaggtgtactacccggtacggcaccacttggtgcagcacatggtgagcgccatgcagaggctgggcttcacgcccagtgtcaccatcgagcagaggcggctggccgtggacctgtctgaagtcgtcatcaagtgggagctgcagaggatcaaggaccagcagccggattcagatatggacccaaattccagtggagaaggagtcaattctgtctcatcctccattaagagaggcctgtccgtggattctgcccaggaagtgaaacgctttaggacggccaccggagccatcagtgcagtctttgggaggagccagtcgctacctggagcagactctctcctcgccaagcccattgacaagcagcacacagacactgtggtgaacttccttatccgcgtggcctgtcaggttaatgacaacaccaacacagcggggtcccctggggaggtgctctctcgccggtgtgtgaaccttctgaagactgcgttgcggccagacatgtggcccaagtccgaactcaagctgcagtggttcgacaagctgctgatgactgtggagcagccaaaccaagtgaactatgggaatatctgcacgggcctagaagtgctgagcttcctgctaactgtcctccagtccccagccatcctcagtagcttcaaacctctgcagcgtggaattgccgcctgcatgacatgtggaaacaccaaggtgttgcgagccgtccacagccttctctcgcgcctgatgagcattttcccaacagagccgagtacttccagtgtggcctccaaatatgaagagctggagtgcctctacgcagccgtcggaaaggtcatctatgaagggctcaccaactacgagaaggccaccaatgccaatccctcccagctcttcgggacccttatgatcctcaagtctgcctgcagcaacaaccccagctacatagacaggctgatctccgtctttatgcgctccctgcagaagatggtccgggagcatttaaaccctcaggcagcgtcaggaagcaccgaagccacctcaggtacaagcgagctggtgatgctgagtctggagctggtgaagacgcgcctggcagtgatgagcatggagatgcggaagaacttcatccaggccatcctgacatccctcatcgaaaaatcaccagatgccaaaatcctccgggctgtggtcaaaatcgtggaagaatgggtcaagaataactccccaatggcagccaatcagacacctacactccgggagaagtccattttgcttgtgaagatgatgacttacatagaaaaacgctttccggaagaccttgaattaaatgcccagtttttagatcttgttaactatgtctacagggatgagaccctctctggcagcgagctgacggcgaaacttgagcctgcctttctctctgggctgcgctgtgcccagccactcatcagggcaaagtttttcgaggtttttgacaactccatgaaacgtcgtgtctacgannnnnnnnnnnnnnnnnnnnnnnnnnnnnnnnnnnnnnnnnnnnnnnnnnnnnnnnnnnnnnngcagtgcattgagctgcttctggccgtgtgtgagaagagcacccccattggcaccagctgccaaggagccatgctcccgtccatcaccaacgtcatcaacctggccgatagccacgaccgtgccgccttcgccatggtcacacatgtcaagcaggagccccgggagcgggagaacagcgagtccaaagaggaggatgtagagatagacatcgaactagctcctggggatcagaccagcacgcccaaaaccaaagaactttcagaaaaggacattggaaaccagctgcacatgctaaccaacaggcacgacaagtttctggacactctccgagaggtgaagactggagcgctgctcagcgctttcgttcagctgtgccacatttccacgacgctggcagagaagacgtgggtccagcttttccccagattgtggaagatcctctctgacagacagcagcatgcactcgcgggtgagataagtccatttctgtgcagcggcagtcaccaggtgcagcgggactgccagcccagcgcgctgaactgctttgtggaagccatgtcccagtgcgtgccgccaatccccatccgaccctgcgtcctgaagtacctggggaagacacacaacctctggttccggtccacgctgatgttggagcaccaggcttttgaaaagggtctgagtcttcagattaagccgaagcaaacaacggagttttatgagcaggagagcatcaccccgccgcagcaggagatactggattcccttgcggagctttactccctgttacaagaggaagatatgtgggctggtctgtggcagaagcggtgcaagtactcggagacagcgactgcgattgcttacgagcagcacgggttctttgagcaggcacaagaatcctatgaaaaggcaatggataaagccaaaaaagaacatgagaggagtaacgcctcccctgctattttccctgaataccagctctgggaagaccactggattcgatgctccaaggaattgaaccagtgggaagccctgacggagtacggtcagtccaaaggccacatcaacccctacctcgtcctggagtgcgcctggcgggtgtccaactggactgccatgaaggaggcgctggtgcaggtggaagtgagctgtccgaaggagatggcctggaaggtgaacatgtaccgcggatacctggccatctgccaccccgaggagcagcagctcagcttcatcgagcgcctggtggagatggccagcagcctggccatccgcgagtggcggcggctgccccacgtagtgtcccacgtgcacacgcctctcctacaggcagcccagcaaatcatcgaactccaggaagctgcacaaatcaacgcaggcttacagccaaccaacctgggaaggaacaacagcctgcacgacatgaagacggtggtgaagacctggaggaaccgactgcccatcgtgtctgacgacttgtcccactggagcagcatcttcatgtggaggcagcatcattaccagggtaannnnnnnnnnnnnnnnnnnnnttcatcatcgattgtaactgcctatgagaatagctctcagcatgatcccagttcaaataacgctatgcttggggttcatgcatcagcttcagcgatcatccagtatggaaaaatcgcccggaaacaaggactggtcaatgtagctctggatatattaagtcggattcatactattccaactgttcctatcgtggattgcttccagaagattcgacagcaagttaaatgctacctccagctggcaggcgtcatgggcaaaaacgagtgcatgcagggccttgaagttattgaatctacaaatttaaaatacttcacaaaagagatgacagccgaattttatgcactgaagggaatgttcttggctcagatcaacaagtccgaggaggcaaacaaagccttctctgcagctgtgcagatgcacgatgtgctggtgaaagcctgggccatgtggggcgactacctggagaacatctttgtgaaggagcggcagctgcacctgggcgtgtctgccatcacctgctacctgcacgcctgccggcatcagaacgagagcaaatcgaggaaatacttagccaaggtgctgtggcttttgagttttgatgatgacaaaaacactttggcagatgccgtcgacaagtactgcattggtgtgccacccatccagtggctggcctggatcccacagctgctcacctgcctggttggctcggagggaaagctgctcttgaacctcattagccaggttggacgcgtgtatccccaagcggtctactttcccatccggaccctgtacctgaccctgaaaatagaacagcgggaacgctacaagagcgatccagggcccataagagcaacagcacccatgtggcgctgcagccgaatcatgcacatgcagcgagagctccaccccacccttctgtcttccnnnnaannnnnnnnnnnnnnnnnggtctggttcagagaaaattggcatgaagaggttctcaggcagctccaacagggcctggcgaaatgttactccgtggcgtttgagaaaagtggagcggtgtccgatgctaaaatcaccccccacactctcaattttgtgaagaagttggtgagcacgtttggggtgggcctggagaatgtgtccaacgtctcgaccatgttctccagcgcagcctctgagtctctggcccggcgggcgcaggccactgcacaagaccctgtctttcagaagctgaaaggccagttcacgacggattttgacttcagcgttccaggatccatgaagcttcataatcttatttctaagttgaaaaagtggatcaaaatcttggaggccaagaccaagcaactccccaaattcttcctcatagaggaaaagtgccggttcttgagcaatttctcggcacagacagctgaagtggaaattcctggggagtttctgatgccaaagccaacgcattattacatcaagattgcacggttcatgccccgggtagagattgtgcagaagcacaacaccgcagcccggcggctgtacatccggggacacaatggcaagatctacccatacctcgtcatgaacgacgcctgcctcacagagtcacggcgagaggagcgtgtgttgcagctgctgcgtctgctgaacccctgtttggagaagagaaaggagaccaccaagaggcacttgtttttcacagtgccccggggttgtggcagtttccccacagatgcgcctcgtggaggacaacccctcttcactttcccttgtggagatctacaagcagcgctgcgccaagaagggcatcgagcatgacaaccccatctcccgttactatgaccggctggctacggtgcaggcgcggggaacccaagccagccaccaggtcctccgcgacatcctcaaggaggttcagagtaacatggtgccgcgcagcatgctcaaggagtgggcgctgcacaccttccccaatgccacggactactggacgttccggaagatgttcaccatccagctggctctgataggcttcgcggaattcgtcctgcatttaaatagactcaaccccgagatgttacagatcgctcaggacactggcaaactgaatgttgcctactttcgatttgacataaacgacgcgactggagacctggatgccaaccgtcctgtcccatttcgactcacgcccaacatttctgagtttctgaccaccatcggggtctccggcccgttgacagcgtccatgattgcggtcgcccggtgcttcgcccagccaaactttaaggtggatggcattctgaaaacggttctccgggacgagatcattgcttggcacaaaaaaacacaagaggacacgtcctctcctctctcggccgccgggcagccagagaacatggacagccagcaactggtgtccctggttcagaaagccgtcaccgccatcatgacccgcctgcacaacctcgcccagttcgaaggcggggaaagcaaggtgaacaccctggtggccgcggcaaacagcctggacaatctgtgccgcatggaccccgcctggcacccctggctgtgactgtggccaccacggccacccggaatgtgaagggcgctccgggctctgagcccgcagcttttacgacttctccctgcctcgttccttatattcacagaagccccatagtttcactgggttgcggttattttcctggtagtttgcgtgtaagaaagggagaatatagttttagaggaagctgaactatgacgatgctgggcgaagcggttggaaatggcagagctgaaacttattccaagctttcaaaataatcttttaagaagccaggattctccggtctggaatttctgagtgagtcctttttttatggtgtcctccctctgtgaatgtacaggcggaactgtacgaacagctcccttccatccatttttaactctttcggaaataacacctcacagcagcttcgtgcttttgtacagacctttgtaacaagtgtacagaaaactcattttgtttgagaaacaggagttgatgaacccatcatgctggtttttctctgagcacaaagttttaggctgtacacagccagccttgggaatctcgttgagcgttcggcgtggatccacggggccaggccaccctgcgggagcgccacacgcatccacttcggattcagtgggtgaagacagaactctgagagtctgcaggcggctcctgtgctttttatttctggctcttcggatgtcttctagacatttactatcactgcacctgaagaaaaaatcacttttaccttcctaatttaaaaagacaaaacagaaatgtacgttccttcgctagctttagtctttctgttcccatttttataaatctgagcattgataatgttctatctaaatttgtacagtgtgatttttttttttagaataaatattttataaaagggaaaaaaaaaaaaaaaaaaaaactaaaattccccaagggccatttccggtaccgtttggacaagggccaaaggggtaaaagaagcagggggtaaaccgaggaaagccgtttgagggctcggggatggaccccagaacggtaaaatgtgaccgcgggttgtaaaaaaaagggaaggc

SEQ ID NO: 6714 - DNA, 3023 bp, Homo sapiens
ggaattccctgcagcatgggctggttaactaggattgtctgtcttttctggggagtattacttacagcaagagcaaactatcagaatgggaagaacaatgtgccaaggctgaaattatcctacaaagaaatgttggaatccaacaatgtgatcactttcaatggcttggccaacagctccagttatcataccttccttttggatgaggaacggagtaggctgtatgttggagcaaaggatcacatattttcattcgacctggttaatatcaaggattttcaaaagattgtgtggccagtatcttacaccagaagagatgaatgcaagtgggctggaaaagacatcctgaaagaatgtgctaatttcatcaaggtacttaaggcatataatcagactcacttgtacgcctgtggaacgggggcttttcatccaatttgcacctacattgaaattggacatcatcctgaggacaatatttttaagctggagaactcacattttgaaaacggccgtgggaagagtccatatgaccctaagctgctgacagcatcccttttaatagatggagaattatactctggaactgcagctgattttatggggcgagactttgctatcttccgaactcttgggcaccaccacccaatcaggacagagcagcatgattccaggtggctcaatgatccaaagttcattagtgcccacctcatctcagagagtgacaatcctgaagatgacaaagtatactttttcttccgtgaaaatgcaatagatggagaacactctggaaaagctactcacgctagaataggtcagatatgcaagaatgactttggagggcacagaagtctggtgaataaatggacaacattcctcaaagctcgtctgatttgctcagtgccaggtccaaatggcattgacactcattttgatgaactgcaggatgtattcctaatgaactttaaagatcctaaaaatccagttgtatatggagtgtttacgacttccagtaacattttcaagggatcagccgtgtgtatgtatagcatgagtgatgtgagaagggtgttccttggtccatatgcccacagggatggacccaactatcaatgggtgccttatcaaggaagagtcccctatccacggccaggaacttgtcccagcaaaacatttggtggttttgactctacaaaggaccttcctgatgatgttataacctttgcaagaagtcatccagccatgtacaatccagtgtttcctatgaacaatcgcccaatagtgatcaaaacggatgtaaattatcaatttacacaaattgtcgtagaccgagtggatgcagaagatggacagtatgatgttatgtttatcggaacagatgttgggaccgttcttaaagtagtttcaattcctaaggagacttggtatgatttagaagaggttctgctggaagaaatgacagtttttcgggaaccgactgctatttcagcaatggagctttccactaagcagcaacaactatatattggttcaacggctggggttgcccagctccctttacaccggtgtgatatttacgggaaagcgtgtgctgagtgttgcctcgcccgagacccttactgtgcttgggatggttctgcatgttctcgctattttcccactgcaaagagacgcacaagacgacaagatataagaaatggagacccactgactcactgttcagacttacaccatgataatcaccatggccacagccctgaagagagaatcatctatggtgtagagaatagtagcacatttttggaatgcagtccgaagtcgcagagagcgctggtctattggcaattccagaggcgaaatgaagagcgaaaagaagagatcagagtggatgatcatatcatcaggacagatcaaggccttctgctacgtagtctacaacagaaggattcaggcaattacctctgccatgcggtggaacatgggttcatacaaactcttcttaaggtaaccctggaagtcattgacacagagcatttggaagaacttcttcataaagatgatgatggagatggctctaagaccaaagaaatgtccaatagcatgacacctagccagaaggtctggtacagagacttcatgcagctcatcaaccaccccaatctcaacacgatggatgagttctgtgaacaagtttggaaaagggaccgaaaacaacgtcggcaaaggccaggacataccccagggaacagtaacaaatggaagcacttacaagaaaataagaaaggtagaaacaggaggacccacgaatttgagagggcacccaggagtgtctgagctgcattacctctagaaacctcaaacaagtagaaacttgcctagacaataactggaaaaacaaatgcaatatacatgaacttttttcatggcattatgtggatgtttacaatggtgggaaattcagctgagttccaccaattataaattaaatccatgagtaactttcctaataggcttttttttcctaataccaccgcctaacagagaacacaggtgaatgcagatgttcactttagcagacttaatgtttcctatgagatttcactgtacaggtttgtctttcttctttgcctgagaaataaaaatgtcatttgccatattgccatctaaaggagaaaaactgcatcagcaaagccattgtattgaactaaaagtttaaaatgaactgcatggatttactaagctgatgaatattccaaaacgtggttggattcaaggatatattttgtctaccggccctcatgtttgtatgtacttgaggagtaaaatgagtaaaatgatactgaatgaaatgttctgtggaaatattaaaaaaaaaataggctccttttcgaaaaatggtacgggtaaaggggttcttcagtggcaagtttttacatttgtccgaaatgggaatgggtttaaaaaaaaaaaaagggggggaataaatggggcaagagagaaaggaggtcaggggaagggtggaatga

SEQ ID NO: 6715 - DNA, 536 bp, Homo sapiens
ttttttttttttttttttatattcacgaagctttattgcagctgtttcccttacccagttgaagtggccagtcattttaatttgcagttctatttacattcccaaggtaaccacgttcagtaactctctagaggctaagctgttaaaatttccatttttatacaaatagcaaagatatttctttccctttctttctttctttctttctttctttctttctttctttctttctttctttctttcttttctttctttctttccttccttccttccttactatccttccttcctttcaaactttttgtttgagacagagtttcgctcttgaccccgaggctggagtgcagtggcccggaacttggcccaatggaaacctctgcctcccggattcaagcgattctcctgcctcagcctcccgagtagctgaggcaggagggtcgcccgagcccaggaaagttcgagtccaagctgggcaacagagcaaaaccttgtctcttaaaaaagaaaaaaaatagagttcagaatagataaaagag

SEQ ID NO: 6716 - DNA, 4487 bp, Homo sapiens
agagtagggtcagccgcggcggcagggcggcggcggcagcggcgcagctccgctccccgcgcgtctcccttccccgcgcccaggtagggcgctcagcctccgccgccaggatgcggccgcccgcctgctggtggctgctcgcgccgccggcgctgctcgcgctcctcacctgctccctggcttttggtttggcttctgaagatacaaagaaagaggtcaagcagtctcaggatttggagaaaagtggtatatcaaggaaaaatgacatagacttaaaaggaattgtattcgtcatccagagtcaaagtaattcttttcatgcaaagagagcagagcagttaaaaaaaagcatcttaaagcaggctgcagatcttacacaggagctccccagtgtcctcctccttcatcagctggctaaacaagaaggtgcatggaccatacttccgttgttaccgcacttttctgtaacatatagcagaaattcatcttggattttcttctgtgaagaagagacaagaatacagattccaaaactcttggaaaccctcagaagatatgacccctctaaggaatggtttttgggaaaagcattacatgatgaagaagctacaataattcaccattatgccttttccgagaatcctacagtttttaagtatccagactttgctgcaggctgggccttaagtattccacttgtaaacaagcttaccaagagactaaagagtgaatccttgaaatccgactttacaatagatttcatgagattgccctctacatctgggacaaaggcggaggacctcccctgaccccagtgcctgagttttgtaccaatgacgtggacttctactgtgctaccacattccattcttttctaccgctttgtagaaagccagtgaagaagaaggatatttttgttgcagtaaaaacatgcaagaaatttcatggtgacagaatacctattgttaagcagacttgggagagccaggcaagtctcattgaatactatagtgactatactgaaaattccattcctactgtggatttgggaattcctaatacagatagaggtcattgtggaaagacatttgccattttggaaagatttctgaatcgtagccaggacaaaacagcatggttagtcattgtggatgatgatacattaataagtatctccaggctccagcacttgcttagctgttatgactccggcaagcctgtgtttctgggagagcgctacggctacggcctgggcactggtggctacagctacatcacgggaggaggaggaatggtcttcagcagagaagccgtcaggagacttctcgccagtaaatgtcgatgctacagcaatgatgctcccgatgatatggtcctgggaatgtgctttagtggcttgggaatccctgtgacacacagccctctcttccatcaggctcggccggtggattaccctaaggactacctttctcatcaagttcccatatcgctccacaaacactggaacatcgatccagtgaaggtgtatttcacatggttggcacccagtgacgaagacaaagccaggcaggagacacagaaaggttttcgagaggagttataaatcagggtgacctgtgcgcctagcctgctcagggaatgaactggagactgtggcctcatcccactgtgctgtgctcacaacacttgtgtctgccacatggcattgggtgcttcctgactttagggggagattttatgtatggtattttttgacagaggaagaaaaggggtcacaggagaaacatttttttttctgggaaaaatcacttgcttttgacttatgcagttgttttaacacttagtgatgactgtgtattctccaagctgtgatacagcagtttttttttattgtcacagggaaataaatggtaccagaagtccctttcctgttctgtctcttcattgtaatggaagtttcagttgggcatgagcctggagagatgtgactgtctacagttctatttgtatatataaaaagaagactgaaagtcttttgacatggatattgtgaatggtatgaacttttaaaccatattattgatgatgaaaattatttcctgggaactcagtaggaataataccgtattaaggaataatactgtacataaaacatcatgaaaccctagatatgaaatcccctgaagtctgtaatcatggtggttatgttttgtctattcttttgctgtttgtgcctcataaaaagagaatgaggtcttctgctagagcttcgtattgctttggaagttcatctgtgttttatttctccctgaagccctatctttatggcttacttgtaacatgaaagtagtagatgctgccagaaaatagtgtcctcaatattttaaaacaatgttgacatgttttgttcaagtcagcaagctctatgtgagtctcaggaagtgaattaaatttggaccttatgttttactcttgttttttttttttttttttgaatgttacttaatgactctctcctgactcaggagagaaaccccttgtggaaggacagcatggtgatcaggcaatttctctgggttcccaaagaatgacatttgaacacagtattttgaaacagctctagttttcaaattatatctttaatatatagtaatgtaacatattcagtattaatgtataaaaagcactctaattatataattcagtttttgtaaaggtatttgcataaaatttaatatgtcttaaactaattttggtaaattacttcttttttttctttttaataaaaactgttactcattaactttgcttataatgctttttatagcccagcacagaatttaaagccataccaccaaaagtacctgtgtgtgttaatatgtttttcttgtagcatagattgactatttgcaatagtattagtatttaccatttttccaaattagcaactaccagacctcacgtgttgcagtgataacacaatgcattggattcagttttgtgaaaatggattctgtggccatccaagggatgtatcagggatgatcagctgatgagaggctccagaaggatttctagatcgcttcaagcctatactgatggccttagctttgttcagtcattgtaactgggattgttgtcattgctaccgtggtagtcaccttcatgtcatctataatagtactcctggagagccctggctgcctacaccagtggaaaagagtctccagttctgctctggcctactaactgttaccactgagagaacaacatgttcatttgacatgattgaagctggcatccgtatatgaagatccttgtcaagctttcttctgtggtctgattagtgttgataccggggcacctcctctggtacttttaagtgttttgttaattatgtttactttttggaatggtgtaagcctaaccacaaataaaagatctttgcctaagtttttgatttctcaaatattgtgttcattagtctagactgggaatggggaggggaaatggggaaaatgaatgaatgaaatcagaaaaaagtcagcggctcagtaaatacagtttaaagagagaataattacttcagagctacccttttaagagaaaaccatcagaaattgataatgtttatataaagtttataaagccattgtgttttgttgtataacaaatcagatatgttattttagaatcgattcccatctaaagaactcaattttgagtctgacattcccaggaccagatattgtcttactcacatttcctttgctttgaaatagggctttccttccaaatggctatttttaggctagggatgttaacatcagggatttgtgtgtggaataactggaatgtcatttttgcttttaagccatttctgatgatatagccaaagcaggttgtctgactatgtaggatttttacatcttgcaactaaatcagaaatccagacatgaaaataacctttctagaatgcctaggagcagaaaacaataatagcatgctaaatcacaaatgatgctatgtatgggtatgtaaatatcagtgctgtctgcatttctgggtttattgaagacctctcgttgtatatatcctcaaaaattaatgtaattgacatcttcaagaatgtttctattgtcttccattcataatcagagatgtaatttgtatggactaaataaaaactttattatgtaatgaaaaaaaaaaaaaaaaaaaaaaaatttggggggggtggggctggaaaaagttttctaaaaacaattcggtggggcgcgcgggcccagtatgttctactggagacacgttggcccaacaggttgctcccaaagggaacaccgggcccaggcacacgtggctgtgggttccccacccaaaaaaaaaacgccggggcggaacccggagggttctgaccaaacccaaagggagtcgagaggcccatcggggtctatcacacggggtgctccagagagcgaaattaattc

SEQ ID NO: 6717 - DNA, 3035 bp, Homo sapiens
  misc_feature (832)..(885): n is a, c, g, or t
gaattccgaaaaagaaaaagaaagaaggggagagggctcccggcagcaccaggaccgacgcgcgcaccagctccggagcccagctcgcgcgcgtctgtggggccgcctgactccggggccgaggcggcggcggcggcagcgggcgcggcggcccgggctgcgcgccggcgcgggaccatggagcgcgggatgcacctcggtgcagcggccgccggcgaggacgacctcttcctgcacaagagcctgagcgcctccacctccaagcgcttggaagcggctttccgctccacgcccccgggcatggacctgtccctggcgccgccgcctcgggaacgcccggcgtcctcctcctcgtcgcccctgggctgcttcgagccggctgaccccgagggggcagggctgctgttgccgccgcctggaggaggcggcggcggcagcgcgggaagtggcggcggcggcggcggcggggtgggtgtccccgggctgctagtaggttcagccggcgttgggggcgaccctagcctaagcagcctgccggccggggccgccctttgcctcaagtacggcgaaagcgcgagccggggctcggtggccgagagcagcggcggcgagcagagccccgacgacgacagcgacggtcgctgcgagctcgtgctgcgggccggagtagccgacccgcgggcctccccgggagcgggaggtggtggcgcgaaggcagccgagggctgctccaatgcccacctccacggcggcgccagcgtccccccggggggcctgggcggcggcggcggcgggggtagcagcagcggtagcagtggcggcggtggcggtnnnnnnnnnnnnnnnnnnnnnnnnnnnnnnnnnnnnnnnnnnnnnnnnnnnnnnaaatccaaagagcaaaaggcgctgcggcttaacatcaatgcccgagagcgccggcggatgcacgacctgaacgacgcgctggacgagctgcgcgcggtgatcccctacgcgcacagcccctcggtgcgaaagctctccaagatcgccacgctgctgctcgccaagaactacatcctcatgcaggcgcaggccctggaggagatgcggcgcctagtcgcctacctcaaccagggccaggccatctcggctgcctccctgcccagctcggcggctgcagcggcagcagctgctgccctgcacccggcgctcggcgcctacgagcaggcagccggctacccgttcagcgccggactgcccccggctgcctcctgcccggagaagtgcgccctgtttaacagcgtctcctccagcctctgcaaacagtgcacggagaagccttaaacacacccccgaaaaacacaagaccgacccaaaatctagaggaaagcgaaaagctgctccccaccccctttattttggtcctctcgtagttgtgaaacacttgcagagcaaacaaagcagaggcaagaactgaggagaagtatcagagacaaacgggacttttagccttgacatccccagaatctcggtctttggggtggggagggagggaggagggaggtggagttgggatggagtatggatgtcttttttttctcagaaaagtggcaactttggtggcagcctagaccgcgaggaagtggaatcttccttaaaggtgaaacatagttgagaagtagtgcttggttattaagcctggagagtgtttgaatggcaaaatactaatcctactaataattgtggatttggctagtgctgagggggagaggaggggttagcggtttggtagcatgagagatggaatattcattcagacaaatcagaaagggcacttgaaaataaattttgattctgagccaggagaaaaacttgaaatgttgacttaagtgagggggaaataaaacccagagagagagacgagagagagagacatgttactatgaaagacttgtattttttattgtctctgaactttaatcctgtgaaaatgctcaaagttttggcgagagtgatataaaaaaactgactgtggctgaaagaattgcatttaaaaatatttatgtgcaccttgttactttctactctgcaatgatgtattaacaattcatggtatttatttgttattcttcaatgacccttccacatcaacagtatttatcatgtgttaaagtcatgggtcttatgtgcagatttttttaatgcctctaaaattgttttatagattacttatgctgtgtgccaagtgtttaaaggtttatttgccaacaagtatgaagagaaatattgatgtatctgagctgcttaggtttatgaaaggtcacctggatattttcagttgcatcatccctgtatttaaattgagctttaataaattgcttcagtccaaaaattacaggaaaggtgtattcttaattgatgaatgaattgatctcttttttgaaaggggactcctttacattccaaaagggaaaaacatcacagcaatagttgctatacgtaagaacatgctaagcaaatatttttccaggctgtgctgtgcatttttaaaaggtctaatttaattgcttttaatatatatgtacatatatgttattttaactgtggagaattatttaagttaaaagactggtttgatttgcctatggtgtgaaatcctttgttatttttctaaaaaaataaaatttaaaaagaaagaaaactaaggaagaacaagaagctatttacccaaagtgagctttcagttttagttttgcatggctgtttgactgcctttccgccctatgaaaatcaagaaaatcttttttaaaaatggagtcctgctattttccactccttgcagataatacaaattcagtttgtcaggttggatggtgagttgggagctgtgatggatctgttggcgggttttggatgtgtaaagaatgatatatatattaaataggtcaatcagactatgacagctatgtacgaccatttgtatgtgtatctatgtcagaaagaatctttattaaaatattttgatcaaacaaaaaaaaaaaaaaaaaaaagac

SEQ ID NO: 6718 - DNA, 7790 bp, Homo sapiens
  misc_feature (4550)..(4568): n is a, c, g, or t
  misc_feature (7482)..(7493): n is a, c, g, or t
tacggctgcgagaagacgacagaagaccggccacagcctgcctactgtcacccgcctctcccgcgcgcagatacacgcccccgcctccgtgggcacaaaggcagcgctgctggggaactcgggggaacgcgcacgtgggaaccgccgcagctccacactccaggtacttcttccaaggacctaggtctctcgcccatcggaaagaaaataattctttcaagaagatcagggacaactgatttgaagtctactctgtgcttctaaatccccaattctgctgaaagtgaataccctagagccctagagccccagcagcacccagccaaacccacctccaccatgggggccatgactcagctgttggcaggtgtctttcttgctttccttgccctcgctaccgaaggtggggtcctcaagaaagtcatccggcacaagcgacagagtggggtgaacgccaccctgccagaagagaaccagccagtggtgtttaaccacgtttacaacatcaagctgccagtgggatcccagtgttcggtggatctggagtcagccagtggggagaaagacctggcaccgccttcagagcccagcgaaagctttcaggagcacacagtagatggggaaaaccagattgtcttcacacatcgcatcaacatcccccgccgggcctgtggctgtgccgcagcccctgatgttaaggagctgctgagcagactggaggagctggagaacctggtgtcttccctgagggagcaatgtactgcaggagcaggctgctgtctccagcctgccacaggccgcttggacaccaggcccttctgtagcggtcggggcaacttcagcactgaaggatgtggctgtgtctgcgaacctggctggaaaggccccaactgctctgagcccgaatgtccaggcaactgttccacccttcccgaggcccgggtggcatctggatgggggcaggtggcatctgtgacgacggcttcacgggcgaggactgcagccagctggcttgccccagcgactgcaatgaccagggcaagtgcgtgaatggagtctgcatctgtttcgaaggctacgccggggctgactgcagccgtgaaatctgcccagtgccctgcagtgaggagcacggcacatgtgtagatggcttgtgtgtgtgccacgatggctttgcaggcgatgactgcaacaagcctctgtgtctcaacaattgctacaaccgtggacgatgcgtggagaatgagtgcgtgtgtgatgagggtttcacgggcgaagactgcagtgagctcatctgccccaatgactgcttcgaccggggccgctgcatcaatggcacctgctactgcgaagaaggcttcacaggtgaagactgcgggaaacccacctgcccacatgcctgccacacccagggccggtgtgaggaggggcagtgtgtatgtgatgagggctttgccggtttggactgcagcgagaagaggtgtcctgctgactgtcacaatcgtggccgctgtgtagacgggcggtgtgagtgtgatgatggtttcactggagctgactgtggggagctcaagtgtcccaatggctgcagtggccatggccgctgtgtcaatgggcagtgtgtgtgtgatgagggctatactggggaggactgcagccagctacggtgccccaatgactgtcacagtcggggccgctgtgtcgagggcaaatgtgtatgtgagcaaggcttcaaggggctatgactgcagtgacatgagctgccctaatgactgtcaccagcacggccgctgtgtgaatggcatgtgtgtttgtgatgacggctacacaggggaagactgccgggatcgccaatgccccagggactgcagcaacaggggcctctgtgtggacggacagtgcgtctgtgaggacggcttcaccggccctgactgtgcagaactctcctgtccaaatgactgccatggccagggtcgctgtgtgaatgggcagtgcgtgtgccatgaaggatttatgggcaaagactgcaaggagcaaagatgtcccagtgactgtcatggccagggccgctgcgtggacggccagtgcatctgccacgagggcttcacaggcctggactgtggccagcactcctgccccagtgactgcaacaacttaggacaatgcgtctcgggccgctgcatctgcaacgagggctacagcggagaagactgctcagaggtgtctcctcccaaagacctcgttgtgacagaagtgacggaagagacggtcaacctggcctgggacaatgagatgcgggtcacagagtaccttgtcgtgtacacgcccacccacgagggtggtctggaaatgcagttccgtgtgcctggggaccagacgtccaccatcatccaggagctggagcctggtgtggagtactttatccgtgtatttgccatcctggagaacaagaagagcattcctgtcagcgccagggtggccacgtacttacctgcacctgaaggcctgaaattcaagtccatcaaggagacatctgtggaagtggagtgggatcctctagacattgcttttgaaacctgggagatcatcttccggaatatgaataaagaagatgagggagagatcaccaaaagcctgaggaggccagagacctcttaccggcaaactggtctagctcctgggcaagagtatgagatatctctgcacatagtgaaaaacaatacccggggccctggcctgaagagggtgaccaccacacgcttggatgcccccagccagatcgaggtgaaagatgtcacagacaccactgccttgatcacctggttcaagcccctggctgagatcgatggcattgagctgacctacggcatcaaagacgtgccaggagaccgtaccaccatcgatctcacagaggacgagaaccagtactccatcgggaacctgaagcctgacactgagtacgaggtgtccctcatctcccgcagaggtgacatgtcaagcaacccagccaaagagaccttcacaacaggcctcgatgctcccaggaatcttcgacgtgtttcccagacagataacagcatcaccctggaatggaggaatggcaaggcagctattgacagttacagaattaagtatgcccccatctctggaggggaccacgctgaggttgatgttccaaagagccaacaagccacaaccaaaaccacactcacaggtctgaggccgggaactgaatatgggattggagtttctgctgtgaaggaagacaaggagagcaatccagcgaccatcaacgcagccacagagttggacacgcccaaggaccttcaggtttctgaaactgcagagaccagcctgaccctgctctggaagacaccgttggccaaatttgaccgctaccgcctcaattacagtctccccacaggccagtgggtgggagtgcagcttccaagaaacaccacttcctatgtcctgagaggcctggaaccaggacaggagtacaatgtcctcctgacagccgagaaaggcagacacaagagcaagcccgcacgtgtgaaggcatccactgaacaagcccctgagctggaaaacctcaccgtgactgaggttggctgggatggcctcagactcaactggaccgcggctgaccaggcctatgagcactttatcattcaggtgcaggaggccaacaaggtggaggcagctcggaacctcaccgtgcctggcagccttcgggctgtggacataccgggcctcaaggctgctacgccttatacagtctccatctatggggtgatccagggctatagaacaccagtgctctctgctgaggcctccacaggggaaactcccaatttgggagaggtcgtggtggccgaggtgggctgggatgccctcaaactcaactggactgctccagaaggggcctatgagtactttttcattcaggtgcaggaggctgacacagtagaggcagcccagaacctcaccgtcccaggaggactgaggtccacagacctgcctgggctcaaagcagccactcattataccatcaccatccgcggggtcactcaggacttcagcacaacccctctctctgttgaagtcttgacagaggaggttccagatatgggaaacctcacagtgaccgaggttagctgggatgctctcagactgaactggaccacgccagatggaacctatgaccagtttactattcaggtccaggaggctgaccaggtggaagaggctcacaatctcacggttcctggcagcctgcgttccatggaaatcccaggcctcagggctggcactccttacacagtcaccctgcacggcgaggtcaggggccacagcactcgaccccttgctgtagaggtcgtcacagaggatctcccacagctgggagatttagccgtgtctgaggttggctgggatggcctcagactcaactggaccgcagctgacaatgcctatgagcactttgtcattcaggtgcaggaggtcaacaaagtggaggcagcccagaacctcacgttgcctggcagccnnnnnnnnnnnnnnnnnnncccgggcctcgaggctgccacgccttatagagtctccatctatggggtgatccggggctatagaacaccagtactctctgctgaggcctccacagccaaagaacctgaaattggaaacttaaatgtttctgacataactcccgagagcttcaatctctcctggatggctaccgatgggatcttcgagacctttaccattgaaattattgattccaataggttgctggagactgtggaatataatatctctggtgctgaacgaactgcccatatctcagggctaccccctagtactgattttattgtctacctctctggacttgctcccagcatccggaccaaaaccatcagtgccacagccacgacagaggccctgccccttctggaaaacctaaccatttccgacattaatccctacgggttcacagtttcctggatggcatcggagaatgcctttgacagctttctagtaacggtggtggattctgggaagctgctggacccccaggaattcacactttcaggaacccagaggaagctggagcttagaggcctcataactggcattggctatgaggttatggtctctggcttcacccaagggcatcaaaccaagcccttgagggctgagattgttacagaagccgaaccggaagttgacaaccttctggtttcagatgccaccccagacggtttccgtctgtcctggacagctgatgaaggggtcttcgacaattttgttctcaaaatcagagataccaaaaagcagtctgagccactggaaataaccctacttgcccccgaacgtaccagggacttaacaggtctcagagaggctactgaatacgaaattgaactctatggaataagcaaaggaaggcgatcccagacagtcagtgctatagcaacaacagccatgggctccccaaaggaagtcattttctcagacatcactgaaaattcggctactgtcagctggagggcacccacggcccaagtggagagcttccggattacctatgtgcccattacaggaggtacaccctccatggtaactgtggacggaaccaagactcagaccaggctggtgaaactcatacctggcgtggagtaccttgtcagcatcatcgccatgaagggctttgaggaaagtgaacctgtctcagggtcattcaccacagctctggatggcccatctggcctggtgacagccaacatcactgactcagaagccttggccaggtggcagccagccattgccactgtggacagttatgtcatctcctacacaggcgagaaagtgccagaaattacacgcacggtgtccgggaacacagtggagtatgctctgaccgacctcgagcctgccacggaatacacactgagaatctttgcagagaaagggccccagaagagctcaaccatcactgccaagttcacaacagacctcgattctccaagagacttgactgctactgaggttcagtcggaaactgccctccttacctggcgacccccccgggcatcagtcaccggttacctgctggtctatgaatcagtggatggcacagtcaaggaagtcattgtgggtccagataccacctcctacagcctggcagacctgagcccatccacccactacacagccaagatccaggcactcaatgggcccctgaggagcaatatgatccagaccatcttcaccacaattggactcctgtaccccttccccaaggactgctcccaagcaatgctgaatggagacacgacctctggcctctacaccatttatctgaatggtgataaggctcaggcgctggaagtcttctgtgacatgacctctgatgggggtggatggattgtgttcctgagacgcaaaaacggacgcgagaacttctaccaaaactggaaggcatatgctgctggatttggggaccgcagagaagaattctggcttgggctggacaacctgaacaaaatcacagcccaggggcagtacgagctccgggtggacctgcgggaccatggggagacagcctttgctgtctatgacaagttcagcgtgggagatgccaagactcgctacaagctgaaggtggaggggtacagtgggacagcaggtgactccatggcctacacaatggcagatccttctccacctttgacaaggacacagattcagccatcaccaactgtgctctgtcctacaaaggggctttctggtacaggaactgtcaccgtgtcaacctgatggggagatatggggacaataaccacagtcagggcgttaactggttccactggaagggccacgaacactcaatccagtttgctgagatgaagctgagaccaagcaacttcagaaatcttgaaggcaggcgcaaacgggcataaattccagggaccactgggtgagagaggaataaggcccagagcgaggaaaggattttaccaaagcatcaatacaaccagcccaaccatcggtccacacctgggcatttggtgagagtcaaagctgaccatggatccctggggccaacggcaacagcatgggcctcacctcctctgtgatttctttctttgcaccaaagacatcagtctccaacatgtttctgttttgttgtttgattcagcaaaaatctcccagtgacaacatcgcaatagttttttacttctcttaggtggctctgggaatgggagaggggtaggatgtacaggggtagtttgttttagaaccagccgtattttacatgaagctgtataattaattgtcattatttttgttagcaaagattaaatgtgtcattggaagccatccctttttttacatttcatacaacagaaaccagaaaagcaatactgtttccattttaaggatatgattaatattattaataataaaaaaaggggaggnnnnnnnnnnnnttaggatttttcaagagatctttctttccaaaacatttctggacagtacctgattgtattttttttttaaataaaagcacaagtacttttgaaaaaaaaccggaattcaactcgaaggcattctaatgtcggggggcgggaaaaaagagggtaattgaaatgggcccctggggccatagcttggttcccctgaccccagttttttctttgtaaaaaagggggtagaaatcttgccgggtcctcccctaatagggggaagccctcatttaaatttcccaaaaaaaccccagggtttaa

SEQ ID NO: 6719 - DNA, 6501 bp, Homo sapiens
  misc_feature (2006)..(2026): n is a, c, g, or t
gggaaatccagtggccgggcagtgggcaggtatggctgagggcgtgtgagcgccgagcgctaagggccgccgccaccatgccagggggcgcaggcgccgcccggctctgcttgctggcgtttgccctgcagcccctccggccgcgggcggcgcgggagcctggatggacaagaggaagtgaggaaggcagccccaagctgcagcatgaacttatcatacctcagtggaagacttcagaaagccccgtgagagaaaagcatccactcaaagctgagctcagggtaatggctgaggggcgagaactgatcctggacctggagaagaatgagcaactttttgctccttcctacacagaaacccattatacttcaagtggtaaccctcaaaccaccacacggaaattggaggatcactgcttttaccacggcacggtgagggagacagaactgtccagcgtcacgctcagcacttgccgaggaattagaggactgattacggtgagcagcaacctcagctacgtcatcgagcccctccctgacagcaagggccaacaccttatttacagatctgaacatctcaagccgcccccgggaaactgtgggttcgagcactccaagcccaccaccagggactgggctcttcagtttacacaacagaccaagaagcgacctcgcaggatgaaaagggaagatttaaactccatgaagtatgtggagctttacctcgtggctgattatttagagtttcagaagaatcgacgagaccaggacgccaccaaacacaagctcatagagatcgccaactatgttgataagttttaccgatccttgaacatccggattgctctcgtgggcttggaagtgtggacccacgggaacatgtgtgaagtttcagagaatccatattctaccctctggtcctttctcagttggaggcgcaagctgcttgcccagaagtaccatgacaacgcccaattaatcacgggcatgtccttccacggcaccaccatcggcctggcccccctcatggccatgtgctctgtgtaccagtctggaggagtcaacatggaccactccgagaatgccattggcgtggctgccaccatggcccacgagatgggccacaactttggcatgacccatgattctgcagattgctgctcggccagtgcggctgatggtgggtgcatcatggcagctgccactgggcacccctttcccaaagtgttcaatggatgcaacaggagggagctggacaggtatctgcagtcaggtggtggaatgtgtctctccaacatgccagacaccaggatgttgtatggaggccggaggtgtgggaacgggtatctggaagatggggaagagtgtgactgtggagaagaagaggaatgtaacaacccctgctgcaatgcctctaattgtaccctgaggccgggggcggagtgtgctcacggctcctgctgccaccagtgtaagctgttggctcctgggaccctgtgccgcgagcaggccaggcagtgtgacctcccggagttctgtacgggcaagtctccccactgccctaccaacttctaccagatggatggtaccccctgtgagggcggccaggcctactgctacaacggcatgtgcctcacctaccaggagcagtgccagcagctgtggggacccggagcccgacctgcccctgacctctgcttcgagaaggtgaatgtggcaggagacacctttggaaactgtggaaaggacatgaatggtgaacacaggaagtgcaacatgagagatgcgaagtgtgggaagatccagtgtcagagctctgaggcccggcccctggagtccaacgcggtgcccattgacaccactatcatcatgaatgggaggcagatccagtgccggggcacccacgtctaccgaggtcctgaggaggagggtgacatgctggacccagggctggtgatgactggaaccaagtgtggctacaaccatatttgctttgaggggcagtgnnnnnnnnnnnnnnnnnnnnnaaactgaaggctgtgggaagaagtgcaatggccatggggtctgtaacaacaaccagaactgccactgcctgccgggctgggccccgcccttctgcaacacaccgggccacgggggcagtatcgacagtgggcctatgccccctgagagtgtgggtcctgtggtagctggagtgttggtggccatcttggtgctggcggtcctcatgctgatgtactactgctgcagacagaacaacaaactaggccaactcaagccctcagctctcccttccaagctgaggcaacagttcagttgtcccttcagggtttctcagaacagcgggactggtcatgccaacccaactttcaagctgcagacgccccagggcaagcgaaaggtgatcaacactccggaaatcctgcggaagccctcccagcctcctccccggccccctccagattatctgcgtggtgggtccccacctgcaccactgccagctcacctgagcagggctgctaggaactccccagggcccgggtctcaaatagagaggacggagtcgtccaggaggcctcctccaagccggccaattccccccgcaccaaattgcatcgtttcccaggacttctccaggcctcggccgccccagaaggcactcccggcaaacccagtgccaggccgcaggagcctccccaggccaggaggtgcatccccactgcggccccctggtgctggccctcagcagtcccggcctctggcagcacttgccccaaagtttccagaatacagatcacagagggctggagggatgattagctcgaaaatctagacctgtccaaggggcttctccctttccttgagctctctggacactgcagaggacccatgaccatggaaccctgaagaagcatgtctggccgcctctgagctcctcccaccctcctccaggaacctccacatctccaaaaatctccctgttgactcagtgcctcctcggcttccttggaagcccagagggactatgatctgatggcctctaggtgttgttttgtgcaatatacagccccaggtagggaggggagagtatgaggagggtgactggcagcttctcctccagactcctagccccgaggtgctgatggagatgctcaaggccagcaagcccctcaggccagcacttcgcttgcagaagccatccattcactcctggggtgcagggcacgcaagagagcttcccattgcttctgctctcctcagaggtcccgggctggatggaggtggtacttacccaccccttttagcttttagggattaaggaagggtcaagccagccactgctgtggccctgcccagggcttggttgagggaacggcttctggctgtatggctgcatgtgacaagccacgtcccctcccacctctccccaaacccctgcatccctgtattcacacgggtcactctgactcagacaggtactattcgtaggcagtgtagacagcaggaggagcaccgggcttgggcttcctctgagccgtgatgccaaaggttgcgactcctgactctggataatttttagttgctctttgttttctctgccgcactttcctggtgccccacgcttttctctcttccttcccctctcattctccctctaatgtgtggtgctttggtgagcaaaccctcagcagtcctgaccttcgggtgaccaggtgcttgtgacctacaagtcagagtccactctcacagtcggccactggatttccctcactggctctcaggagtgtgaccagagtagactcggggcatggccattggggtcatatgtttatttttcattgtgttttgtgacctcagcagggtgggggtcttcctccttactctaagctaaatctaggtgaggtttccccttagggagcccagctatttacaaagtacacacgagggagcaggctggtcattgacttcgggctggaccgttgccctctgagcagagaacagacccattttctgggagctgcccgagatcactggagaaggcagccagcagcagctgcactggaacagtcagagcagggagcctcttcctcaacccagctttttgtcattcacttccttttgttctctctctggtcactgcccttacctgaccctcacagaaagagagctctgagcaggtgagggggtctgcggtggctcctgtcttccctgcagcagggaaggagggccgtgtggtgctttgctagataggacggtttttgcaaagcacctggagatgtttgctgggagatagactcccactccacaaaggtgctgggtggctctccggacaggagctggcctgactctcactcctctgaggctttcctggggcctcctcccatcctgccatgagcaattgtttgctcttgaaaacctcactgcaaggctgaagctgacttctgattcaccaccccagggcctccttatagttctctgcacacaataggtgcttcttggatgttcttgggtttggaaataagtggaaaatacgggatgtacccctgggggaaaagcctgggttgggtttagaaagatctcaggaaaatgagtttctcttccctcagggtggctgtgatacaggttccccatgtccttgccgtgggtcatccttgctgtgggtcatccttgctgtggagatccattccccacctttcctgtggcccaaccttttatttaaatgtgctaccctctgcctcaaggcttggttcctggaaagtaaaggtgaaaacatcccctttcacccctctgcaaaacaaacaagcaacatcctcaaaacccaaccccatgcctcacagagcttcctgtggcttctccagcctttctccctcacatcaggaggtagatagctctgaaatgacagcgccacagccatagtgactgcatgagccatctgaacctgcagtccaccctccctggaaccacaccagaaagagacctgggttgtcgttttcttgctttttgttttgttttgttttattattttcatatcacctccatcccataaagttgtactgtgaactggaagatggtggaatgttttggaatttgatagactttcggcaaccagttctactaatgcttcactcctggctctgttcagggaagctgcccaggaagaagactggccattatgcatccccttttctttccagtgcccagtatgctgtttttgaggtgtcaaatacaaataaatctgggcttagggaaggagagaccttattccaaagcatgattgcagaaggggaaagggaatattgcaaaagggagaggaaggggccttatgggaatagtgaaaaggctcagaccgaccgatggcaagatctgcaagcgtctcaaagcccaggcagaaaaggacttttcttttattggaagaagtaaacatggctagaaagaaccacgttcagggaatgacgttgtgcccagcgtttttttttttttttttttttgtctccaggggaggggctgtttgctggctcaggctgaggatggcccaaagtccagggtctggtggggaggagggaagcttaactcaagtttgggttagtgagttagcaagctctttgtgcagatggggatgtaggtaaatctttttaaaagtgaaattaacctcctgccaattttacaacccaagaatttttttttaagggccttggagccatctctaaaacaaacctcaagggatttagtgccctgtctccctgtctctagaagccttagcctgggcacctggctcaatcttgtaactgcctgctagccatagattcctttcagccttgctgacttctccctataaaagtaaagcctttttctgccccagctctgagacacttgcagatcttaaggtctgagacttgctgattttctggttggagtgtttttttgtattgccatagtcccttccccctgaagcaatagcccctccccacctcctgcaatacgcctttccaatctttattggaagtctctccctgcctacttcctaatttattcttatttgacagagggtatggaagacttgcaatttgaaaactggggaccagttccaaagtcagtaattgtgttaaccacgtgtataacagctctgctggacacccaagaaagccatgggaacgccaactggaaaggtccccttccccaggggagcctgcgaaggagaggttctgtagaatccaagcccacatttccaaagtcacccccaacgcgtcctctcacaccgtccactgtgcgtttgtatgtgtctgggatccagggcaatgtgaattttctttttatttgggagattgttcacggaaaacagatcttcttctctcttgtccacctattaattgtttacaatatttgtacatctatgcaaaatacttgaatgggccatggtgccttttttccttgttagtatttaattaaaaatgaattgtttgtcatttgcaatgttaaaaaaaaaaaaaaaaaaaaaaag

SEQ ID NO: 6720 - DNA, 5363 bp, Homo sapiens
ggaggctgagggatgggaagagctggaacagcaggaggcggaggtgcaggggccgcccgaggcgttggaggagactggggagggccggcggggcgcggaggaggaggatctgggggaagaggaggaggagggccgatcgtcctgggcccgaggaaaagagagaagaaggggacacggagcctctcctgaaacaagaggggccggtggaagccgcgcagcctccggtggagaggaaagaagccgccgcccttgaacaaggccgcaaggtggaggagctgcggtggcaggaggtggacgagagacagaccatgccccggccctacacgttccaggtgtcctccggagggaagcagattctctttcccaaagtcaacctgagccccgtgacgcccgcaaaggacacggggctcaccgctgctccccaggaaccaaaggcccccaaagccagcccagtccagcacgccctaccgtcgtccctgagcgttccccacaccgccattctggtcacgggcgcgcagctctgtggcccggcagtcaacctgagccagatcaaggacaccgcgtgcaagtccctcctgggcttggaggagaagaagcacgcggaagccccagctggggagaaccctccccgaggccccggcgacgcgagggcgggcagcgggaaggctaagcccccccaggagtctcccagcagcgcgtccgcactcgcagaatgggcttccattcggtccagaatcctgaagaacgcagagagtgacccgcgcagcagcgagagggaccagttgaggcccggtgatgagtccactcccaggggccggtgtgattcccgcgggaaccaacggaagactccgccagtcaatgcaaagttctctattatgcctgcctggcagaaattttccgatggtggcacggagacctccaaacagagcacggaagctgaaagcatacgaaaaagacccatgctgggacccagcgaagagacagccccccagcctcctcctgctggtgttcgcgagctcgggaagggtccggagaagtcggagatgcaccgggagcccgcagacaccaccgagggatgcaaatttgccaaagacctcccgtctttccttgtcccaagccttccttaccctccgcagaaagtggtggcccacacagagttcacgacctcgtcggacagcgagactgcaaacgggatagcaaagccagaccctgtgatgccaggtggagaggaaaaagcctcaccgtttggaataaaattgagaaggaccaactattccttgcgcttcaactgcgaccaacaggcagaacagaagaagaagaagaggcacagcagcaccggagacagcgcggatgcagggccgcctgcagcggggagcgctcgtggagagaaagagatggagggtgtggccctcaagcatggtccatccctcccccaagagcggaagcaagccccttccacccggagggactccgctgaaccttccagcagccgctctgttcctgtggcccaccctgggcctccaccggccagcagccagaccccggctccggagcacgacaaggcagcaaacaaaatgccactggcacaaaagccagcactggctcccaagcccaccagtcagaccccaccagcatccccactttccaaactgagcaggccctacttggtagagctgctgtctcgccgagcggggaggccggacccagagccaagtgagccgtccaaggaggaccaggagagcagtgaccgccggccaccctcgcccccaggccccgaggaaaggaagggacagaagagggacgaggaggaagaggcgacagagaggaaacctgcttccccacctctgcctgccactcagcaagagaaaccttctcaaacacccgaggccgggaggaaagagaagccgatgcttcagagcagacactccttagatggctccaaacttacagagaaagtggaaactgctcagccgctgtggataacgttagcactgcaaaagcaaaaggggtttcgggagcagcaggcgacgcgggaggagagaaagcaagccagagaggccaaacaggcagaaaagctctccaaagaaaatgtcagtgtcagcgtgcagcctggaagcagcagtgtcagcagagcaggttccctgcacaagtccactgctctgccagaagagaagagacccgagactgcagtgtccaggcttgagcgcagagaacagctgaaaaaggccaatactcttcctacgtctgtgacagtggagatctccgactcggctcccccagcgccgctggtaaaagaagtcaccaagaggttttccaccccggatgctgcccccgtgtcaacagaaccagcctggctggctttggccaaaaggaaagcaaaggcttggagcgactgtccacagattattaagtaaagagtgactctcacccatccctactgccagttattggctcctctcttgccctttttatttatttattttttatatggggtaaagaaatcaagctagggaaaagaagcatgttttataggctccaaaataatgtttagaaactgaactggtggtgttcattgtaaagagtggatttgcacaaccctaggtcctggtgcctcgagctcctcctagttctcaagagaaaattccgtccacaggaccacatgaagcaaaatctctaagctaagaactcgtgagagcctgccatgcccatttcatggccttgcacacacacccacccacacaccattcagaacatgtacttttgccaaccttttgtaatggttttttgattctatgcactaattttctttgtccaaaacatttactctaccatatgtctgggaatgtttatcctttctacagtaatggtgaaaggatcatatctagctaaaagcaagaacacccgttctcctgaatgcagtgagtaattgggaatcacaaggaacattctggcacccaactgtgcccatgttagttttcatgagttttccccactctgaagctgtaacccagaaggcacatccattcacatttttaccgcactgtggattcatagtgtggggccctgttattccaataccctccttaaggacatgtgaagcatttggcccagttggctcccagggaacattttaatttaatgtagtgaagaaagaccattctagatcagagctacaagttcactttctgtctctgagaatctccatctagggcagtagttcttatgatgtgtaggctccctcctagggcctactcaatcagagcctgtggggactgggccaggaatatgtattctggcaaaaactcttcaggtcagttctgatagatcccaaaggttaagaactgtgagaaacactgatcctaatgcaatctagtttttcagacttcgaaggggaggctcattcactcaaaaagcaacagtgagacaggaaaaataataaaacaaccccccaagccagccatttattacaagaagcaacaggttattgacattacatgtttgaaaattccctttggtctttagggaaaataaacaggaagccaagatttggagcctttgtaataaggacttcctgcagaaagtcttttctttactataattgagtaattcatatttagagtcacatgtccagtagcatttctaattttgagcattcaccttgctacctttaaaaaacatctgagttttaagtggcctttttatcatcatacacatgtgcatacaaagaagggacttggcagtttaaaagccacatatattcacttttattgccctaaatttacatgaaacagacatactggcaaactcacatattgctggtgctaaccttatatttcatagtgttggcatattccccttttcttagattcttactccgaaatataggtacacatcctttgctctgtgcagagggaattacatcctttttcctctcctacaaaaacatgctttattaagtatccatcattactttcctttatgctcgctcaatatgcaatgtgctgttattctaccatgtaccttaaataaaggatgatggcaaagttatttaccatgtagaaaccattttctttctagaaacaatagctcagcctcactgtagcagctggcatgtgtggtcaagtggatagttgtactcttgcaagttggatttaatatcatatatactggaccttcagactgttaaaaatcaatgtaacctttttttattgctatggcaagcaattagtatttcactgcacgtcttccatactaatgttcatttctaaatcttatatgtaggcatttgttagttccaatgatttcctcactaatataacactttttaatgggaatctttccacctacagccctggaatgataatgctacagtaattcttctgaattgactttttctttcatcctgtcagctttggacaatatcccaattatggcagggaacaggtggggaactaagatcagttacaaaaagttgtagatgtgtcaactttgtattggctgggatatcactgtgcccaaacaaaacaggcgaaatacctcagttaaaatttttccatcaaagtctttaaaagaagagtatactgaagaaagggcagtcataatacttacttctaacagcttctaaagggtacatgtttaacatttcatttcaaaatcaccccaaatttgcactaaataccaatgaagtgttattttgctttagtagtcttctgagcaacaaactatggggaattctgtaaaaacatataaaaagttcaagactttttttttaaatgaatgattactatgttaaatgcaaactttttttttttttatttaaacaaacatacacttctcctggcaaggttatagatgattaacctctgttcatagacttatatataaaactagagggttttttgtttacttttttaatttttcaagtgcaattgtttcttacacagacattattactattaaattatcatttagccagttatctgcaaatatatagtatgtattgtctcttcttgtgacgtttagtttaattgcttattttaaagcagaaacattagttacaagtgtcttacaatatttttaccaacagtaaagtagagacttaatgaaaataccttagtgtgattttaatataatttgcatattttagttgtataaagttttaatgtaaaatgtccattattgaagggaaaagatctttcaataaaaaatacccacgagatcttcggcactgatggaatttgatttccgatgaccaactgcaaaacaatctcattatatttacataacttttgttgaacaagaacaactttaaactggttttattacatttttttcctaggtatttttagagaaaaataatgaac

SEQ ID NO: 6721 - DNA, 2801 bp, Homo sapiens
tctttcgcgggcacttcgaattctagtcccctccaggtgggtggtgaagccgcggagtgtgagaggcatctccgtgctcatccgtgaccccagctgtactccaagggaaggcatctccagggaagagcagcttggtcccgcaaaagctggactgaaagaaggactttgtgacttgggatgtgacgggcacggagatggagtggggggtggtggcagcgcaaggtgtgcaggtgacagcaggggacacccccaaggcaggagcccgggccgacggagaggacttaacgacactatcggaccctctgggaaaagaggggagacgtcgtgacccaggccccgccccaccttgccgcctcgtgcccggcgctaagacccagcgggcgcgccgcccgcccggggcccggccctgtccccttccgtccgcggggcagccagctcagctccggagagccggcggcgcggcgggcatggctcgggtggcgtgggggctgctgtggttgctgctgggcagcgccggggcgcagtacgagaagtacagcttccggggcttcccgcccgaggacctgatgccgctggccgcggcgtacgggcacgctctggagcagtacgagggagagagctggcgcgagagcgcgcgctacctggaggcggcgctgcggctgcaccggctcctgcgcgacagcgaggccttctgccacgccaactgcagcggccccgcgcccgcggccaagcccgatcccgacggcggccgcgcagacgagtgggcctgcgagctgcggctcttcggccgcgtcctggagcgagccgcctgcctgcggcgctgcaagcggacgctgcccgccttccaggtgccctacccgccgcggcagctgctgcgtgacttccagagccgcctgccctaccagtacctgcactacgcgctgttcaaggctaaccggctggagaaggcggtggcggcggcctacaccttcctccagaggaacccgaagcacgagctgaccgccaagtatctcaactactatcaggggatgctggacgtcgccgacgagtccctcacggacctagaggcccagccctacgaggccgtgttcctccgggctgtgaagctctacaacaggggatttccgcagcagcacggaggacatggagcgggccttgtcagagtacctggcagtctttgcccggtgcctggccggctgtgaaggggcccatgagcaggtggacttcaaggacttctacccggccatagcagatctctttgcagagtccctgcagtgcaaggtggactgtgaggccaatttgacccccaatgtgggtggctacttcgtggacaagttcgtggccaccatgtaccactacctgcagtttgcctactataagttgaatgatgtgcgccaggctgcccgcagcgccgccagctacatgctcttcgaccccaaggacagcgtcatgcagcagaacctggtgtattaccggttccaccgggctcgctggggcctggaagaggaggacttccagccccgggaggaggccatgctctaccacaaccagaccgccgagctgcgggagctgctggagttcacccacatgtacctgcagtcagatgatgagatggagctggaggagacagaaccgcccctggagcctgaggatgccctatctgacgccgagtttgagggggagggtgactacgaggagggcatgtatgctgactggtggcaggagccggatgccaagggtgacgaggccgaggctgagccagagcctgaactcgcatgagaaggggacaccccacacccctcaagcttgggaagcctggtgccgatggccccaccctcaccagcctgggcagcagcaagaactatttattaaaaacttaagatgggccaggtgcggtggctcacacctgtaatcccagcattttgggaggccaaggtgggtggatcacttgaggccaggagttcaagaccagcctggccaacatgatgagacctccgtctctactaaaatacataaattagccgggtgtggtggcaggcgcctgaaatcccagctactcaagaggctgaggcaggagaatcgcttgaacctgggaggcaaaggttgcagtgaactgagattgcgccaccgcactccagcctgggcgacagagcgagactccatctttaaaaaaaaacaagacgggccggcacggtggctcacgcctgtaatcccagcactgagaggccgatcacttgaggtcaggagttcaagacctgcctggccaacatggtgaaaccccatctctactaaaaaatacaaaaattagccaggcatggtggcacacacctgtaatcgtagctgaggcaggagaatcgcctgaacccaggaggcggagcttgcagtgagccgagatcgtgccactgcactccagcctgggcgacagagtgagactccatctcaaaaaaaaaaaaaaaaaacttaagatggacacagctgactggacccccatcctgcctcacccatgggtgctgcaccccagacccatcctgccacttctatgtctctggaccacaggatggtggtggcattgcaggttggcaagtgggctgatggggtccgccctcctcactgctgagctcctcacctggacagtctcctggacaaggagtttccagctgctggctggagtctcaggccaaattgcagagggtcctccagggtcctgaagagcactggactaagagtctagtggttccagggccctgaccagtaggtgctcaataaatgtttgttgttgaatgaaaaaaaaaaaaaaaaaa

SEQ ID NO: 6722 - DNA, 991 bp, Homo sapiens
gcaggctctggatgtctccggaggttgtttgaaggattgggcaagctgaggcagttggaagctactctgaggtgtggcatgaatgagggcgtggctgtggtgggcagtggtgacctgagctacccccaagtatccgcccccagccctgctctggcagcccctgcagctgctctgggtaagggagcagggccagcattctatctcactgctgttctctggtgtgctcgcaggtggaaggctttagggccaccatggcgcagcgcctggtgcgcgtgctgcagatctgtgctggccacgtgcccggtgtctcagctctgaacctgctgtccctgctgagaagctctgagggcccctccctggaggacctgtgagggtggctggcccctgggctgccccttctcatggcttcgtgctgactccataaacattctctgttgaggatgtccagtcagggcttgacaggcccaggctcagcccgccgtggctgggaaggttccctgcagtgccagtgctgcagcagggagagctgggcagaagcagcgagggggcccagctggcgagactgtagccccctcccactcccacactcactcttgcagagcctgtgtctttaagcagctggcgtgttacatctccatttaaggtttcctttgaacaaaaggtctgtggctaaaaaaagtttaaaaatcaaaaaaaaaaaaaaaaaattttgacttggtagatgaggaaaactgactcagaacaattcaagagtagggcacggtgggccaggtgccagagggctcaacgccttgtaaatcccaagcacttctggggaggccgagggtggtgtgggatcaactgtgaacgtccagggaattccgagaccatccttggccaacactggggtatcccttggttctaccagagatacagaatttaggcagatgttgttggttggcggctttatcaccactactcaggaggctggagcaggagaatctgctgaagg

SEQ ID NO: 6723 - DNA, 1718 bp, Homo sapiens
gccgcccagccccgccgccctggcaataaggggcctgagcgcgcgggggagaagcgggagcgggagcgggagcgagctggcggcgccgtcgggcgccgggccgggccatggagctgtggccgtgtctggccgcggcgctgctgttgctgctgctgctggtgcagctgagccgcgcggccgagttctacgccaaggtcgccctgtactgcgcgctgtgcttcacggtgtccgccgtggcctcgctcgtctgcctgctgcgccacggcggccggacggtggagaacatgagcatcatcggctggttcgtgcgaagcttcaagtacttttacgggctccgcttcgaggtgcgggacccgcgcaggctgcaggaggcccgtccctgtgtcatcgtctccaaccaccagagcatcctggacatgatgggcctcatggaggtccttccggagcgctgcgtgcagatcgccaagcgggagctgctcttcctggggcccgtgggcctcatcatgtacctcgggggcgtcttcttcatcaaccggcagcgctctagcactgccatgacagtgatggccgacctgggcgagcgcatggtcagggagaacctcaaagtgtggatctatcccgagggtactcgcaacgacaatggggacctgctgccttttaagaagggcgccttctacctggcagtccaggcacaggtgcccatcgtccccgtggtgtactcttccttctcctccttctacaacaccaagaagaagttcttcacttcaggaacagtcacagtgcaggtgctggaagccatccccaccagcggcctcactgcggcggacgtccctgcgctcgtggacacctgccaccgggccatgaggaccaccttcctccacatctccaagaccccccaggagaacggggccactgcggggtctggcgtgcagccggcccagtagcccagaccacggcagggcatgacctggggagggcaggtggaagccgatggctggaggatgggcagaggggactcctcccggcttccaaataccactctgtccggctcccccagctctcactcagcccgggaagcaggaagccccttctgtcactggtctcagacacaggcccctggtgtcccctgcagggggctcagctggaccctccccgggctcgagggcagggactcgcgcccacggcacctctgggagctgggatgataaagatgaggcttgcggctgtggcccgctggtgggctgagccacaaggcccccgatggcccaggagcagatgggaggaccccgaggccagacgcacactgtccgagccctctgctcagccgcctgggacccaccagggtgcagctgggctccagggtccagcccacaagctgcatcagggtctctgggagaggaggggcctggagggccaggagtcccagactcacgcaccctgggccacagggagccgggaatcggggcctgctgctcctgctggcctggaagactctgtggggtcagcactgtactccgttgctgtttttttataaacacactcttggaagtggaaaaaaaaaaaaaaaaaaaaaaaaaaaaaaaaggtgaccagggcggtggaggcgacgctgtgtcttcccagctgccctgcctagaggcccagggtgcaggcaccgccacccacccgtgttccctatccaggagtggacccacatccccctaaaaaaaaaaaaaaaa

SEQ ID NO: 6724 - DNA, 660 bp, Homo sapiens
ttttttttttctttttctttttttttttttttttgagtatatgtgacaactgtgaaagaaaaatagattcttgggaccccaaacttactatactaaagggaaagttaactgcctttcttttgttcccaaacagaagctgtgatttcacatgtgcactttatccgatgtaaaatgtagatttactgagcgcgagatgaatgcatgattgactttctctccacgcctttcttttcacatttaacacatagattcactgagtgctggtcagagccttacacgagggtgacctctgcctcattgcctcattgcctaccctccttccttctttcttccccacctgctcgctctttcctttttaaatactgaagttcccctaaaccctcttaggaaaagcacaggtcacagatagcactggaacttgtatttttttttcccacgtacatcctcgacctgggcaaaataaatctcggatcgaggcagatctgcctcagtcactttcggtctacacaacaaaggacagtagaccctttgggagcagaagtggccttggccccacttcctcaagatttgtgacacaggagggagcgagcccccccagctctttttgggtttagggcaatggtccagtcatgggccttggagaaaccccccagtccctgg

SEQ ID NO: 6725 - DNA, 7642 bp, Homo sapiens
  misc_feature (3686)..(3728): n is a, c, g, or t
  misc_feature (5514)..(5543): n is a, c, g, or t
cggaccctgcgcgcccccgtcccggctcccggccggctcgggggagaaggcgcccgaggggaggcgccggacagatcgcgtttcggaggcggcgcaggtgctgtaaactgcaaaccataatcctgtcttaatactgcaaacaaatcatagtggaactaaggggaacttaatttactgtttccaggttaactaaggtctcagctgtaaaccaaaagtgagaggagacattaagattttcattcttaccgggttgtcttcttcctgaagagcaatggagccgcttttacttggaagaggactaatcgtatatctaatgttcctcctgttaaaattctcaaaagcaattgaaataccatcttcagttcaacaggttccaacaatcataaaacagtcaaaagtccaagttgcctttcccttcgatgagtattttcaaattgaatgtgaagctaaaggaaatccagaaccaacattttcgtggactaaggatggcaaccctttttatttcactgaccatcggataattccatcgaacaattcaggaacattcaggatcccaaacgaggggcacatatctcactttcaagggaaataccgctgctttgcttcaaataaactgggaatcgctatgtcagaagaaatagaatttatagttccaagtgttccaaaattcccaaaagaaaaaattgaccctcttgaagtggaggagggagatccaattgtcctcccatgcaatcctcccaaaggcctcccacctttacacatttattggatgaatattgaattagaacacatcgaacaagatgaaagagtatacatgagccaaaagggagatctatacttcgcaaacgtggaagaaaaggacagtcgcaatgactactgttgctttgctgcatttccaagattaaggactattgtacagaaaatgccaatgaaactaacagttaacagtttaaagcatgctaatgactcaagttcatccacagaaattggttccaaggcaaattccatcaagcaaagaaaacccaaactgctgttgcctcccactgagagtggcagtgagtcttcaattaccatcctcaaaggggaaatcttgctgcttgagtgttttgctgaaggcttgccaactccacaggttgattggaacaaaattggtggtgacttaccaaaggggagagaagcaaaagaaaattatggcaagactttgaagatagagaatgtctcctaccaggacaaaggaaattatcgctgcacagccagcaatttcttgggaacagccactcacgattttcacgttatagtagaagagcctcctcgctggacaaagaagcctcagagtgctgtgtatagcaccggaagcaatggcatcttgttatgtgaggctgaaggagaacctcaacccacaatcaagtggagagtcaatggctccccagttgacaatcatccatttgctggtgatgttgtcttccccagggaaatcagttttaccaaccttcaaccaaatcatactgctgtgtaccagtgtgaagcctcaaatgtccatggaactatccttgccaatgccaatattgatgttgtggatgtccgtccattgatacaaaccaaagatggagaaaattacgctacagtggttgggtacagtgctttcttacattgcgagttctttgcttcacctgaggcagtcgtgtcctggcagaaggtggaagaagtgaaacccctggagggcaggcggtatcatatctatgaaaatggcacattgcagatcaacagaaccaccgaagaagatgctgggtcttactcatgttgggtagaaaatgctataggaaaaactgcagtcacagccaatttggatattagaaatgctacaaaacttagagtttctcctaagaatcctcgtatccccaaattgcatatgcttgaattacattgtgaaagcaaatgtgactcacatttgaaacacagtttgaagttgtcctggagtaaagatggagaagcctttgaaattaatggcacagaagatggcaggataattattgatggagctaatttgaccatatctaatgtaactttagaggaccaaggtatttactgctgttcagctcatactgctctagacagtgctgccgatataactcaagtaactgttcttgatgttccggatccaccagaaaaccttcacttgtctgaaagacagaacaggagtgttcggctgacctgggaagctggagctgaccacaacagcaatattagcgagtatattgttgaatttgaaggaaacaaagaagagcctggaaggtgggaggaactgaccagagtccaaggaaagaaaaccacagttatcttacctttggctccatttgtgagataccagttcagggtcatagccgtgaacgaagtagggagaagtcagcctagccagccgtcagaccatcatgaaacaccaccagcagctccagataggaatccacaaaacataagggttcaagcctctcaacccaaggaaatgattataaagtgggagcctttgaaatccatggagcagaatggaccaggcctagagtacagagtgacctggaagccacagggagccccagtggagtgggaagaagaaacagtcacaaaccacacattgcgggtgatgacgcctgctgtctatgccccttatgatgtcaaggtccaggctatcaatcaactaggatctgggcctgaccctcagtcagtgactctctattctggagaagactatcctgatacagctccagtgatccatggggtggacgttataaacagtacattagttaaagttacctggtcaacagttccaaaggacagagtacatggacgtctgaaaggctatcagataaattggtggaaaacaaaaagtctgttggatggaagaacacatcccaaagaagtgaacattctaagattttcaggacaaagaaactctggaatggttccttccttagatgcctttagtgaatttcatttaacagtcttagcctataactctaaaggagctggtcctgaaagtgagccttatatatttcaaacaccagaaggagtacctgaacagccaacttttctaaaggtcatcaaagttgataaagacactgccactttatcttggggactacctaagaaattaaatggaaacttaactggctatcttttgcaatatcagataataaatgacacctacgagattggagaattaaatgatattaacattacaactccatcaaagcccagctggcacctctcaaacctgaatgcaactaccaagtacaaattctacttgagggcttgcacttcacagggctgtggaaaaccgatcacggaggaaagctccaccttaggagaagggagtaaaggtatcgggaagatatcaggagtaaatcttactcaaaagactcacccagtagaggtatttgagccgggagctgaacatatagttcgcctaatgactaagaattggggcgataacgatagcatttttcaagatgtaattgagacaagagggagagaatatgctggtttatatgatgacatctccactcaaggctggtttattggactgatgtgtgcgattgctcttctcacactactattattaactgtttgctttgtgaagaggaatagaggtggaaagtactcagttaaagaaaaggaagatttgcatccagacnnnnnnnnnnnnnnnnnnnnnnnnnnnnnnnnnnnnnnnnnnnccgacagtgatgaaaagcctctcaaaggaagccttcggtcccttaatagggatatgcagcctactgaaagtgctgacagcttagtcgaatacggagagggagaccatggtctcttcagtgaagatggatcatttattggtgcctacgctggatctaaggagaagggatctgttgaaagcaatggaagttctacagcaacttttccccttcgggcataaacacaacatatgtaagcaacgctactggttcaccccaaccttccatatttatctgttcaaaggagcaagaactttcatataggaatagaaacatgctggccgaagatttcatccagaagtcaacatcctgcaattatgttgaaaagagtagtactttcttcaaaatataaaatgccaagcacttcaggcctatgttttgcttatattgttttcaggtgctcaaaatgcaaaacacaaaacaaatcctgcatttagatacacctcaactaaatccaaagtccccattcagtatattccatatttgcctgattttactattcggtgtgtttgcatagatgttgctacttggtgggtttttctccgtatgcacattggtatacagtctctgagaactggcttggtgactttgcttcactacaggttaaaagaccataagcaaactggttatttaaaatgtaaaaaggaatatgaaagtcttattaaaacacttcattgaaaatatacagtctaaatttattatttaaattttactagcaaaagtcttaggtgaacaatcaactagtatttgttgagctcctatttgcccagagatggtcatatttaaacagaagtatacgtttttcagtttcaacatgaatttttttatttctgtcagttatgacatccacgagcatcactttttgtgtctgtttttttttttttcttggactaaattcaactgcatggaagcggtggtcagaaggttgttttatacgagaacaggcagaaagtgcccattgttcaggattctaatagctacatctacttaatatcttcatttctaaattgactgcttttacctttttctcatgtttatataatggtatgcttgcatatatttcatgaatacattgtacatattatgttaatatttacacaatttaaaatatagatgtgttttattttgaagtgagaaaatgaacattaacaggcatgtttgtacagctagaatatattagtaagatactgtttttcgtcattccagagctacaactaataacacgaggttccaaagctgaagactttgtataaagtatttgggttttgttcttgtattgctttctttcaacagtttcaaaataaaatatcatacaaatattgagggaaatgttttcatatttttcaaaataggtttttattgttgaatgtacatctaccccagcccctcaaaagaaaaactgtttacatagaaattcctacacatacgtttgcgtatatgttattttaaacatctttgtggtgagaattttttccccgatattctccttctgtcaaagtcagaacaaattcagggaatttattttctggcagttgtgctccagtccttttaaaattgtacatgaacatgttttagaaacaatatggaggatgatgcatacatgtcggtcaagttcagcgctcgacattttatggaaagatttttttaaccttaccacgaaatacttaactactgtttaagtgaattgacttatttcactttagtttttgaactgtgattattggtatactgttatatcctcaacttggannnnnnnnnnnnnnnnnnnnnnnnnnnnnnccaaaatttggggtatttataatagtcagcgcaggaatgcacatggaatatctacttgtccttttgaacctcacgagtcatccagaatgtatagacaggaaaagcatgtcttatttaaaactgtaatttatgggctcaggatctgaccgcagtcccgggagtaagcatttcaaagggggaaggcagtgtggtccctaccctgtgtgaatgtgaggatgtagacatccatcagtgcaactcgagctccatcctcctccgatttctaaggttccagttttctggagggacagtcatcatgttttgatttatctgggagaaaactgtggtgcacagcttgtgaggagggcaaggttgtgacgttcgagcttagttctggtgttattctgtctcctcttctttgtcatcagccaaaacgtggtttttaaagagagtcatgcaggttagaaataatgtcaaaaatatttaggaatttaataacctttaagtcagaaactaaaacaaatactgaaatattagctcttcctacacttcgtgttcccctttagctgcctgaaaatcaagattgctcctactcagatcttctgagtggctaaaacttatggatatgaaaaatgagattgaatgatgactatgctttgctatcattgttacctttcctcaatactatttggcaactactgggactcttcagcacaaaaggaatagatctatgattgaccctgattttaattgtgaaattatatgattcatatattttatgaatcagaataaccttcaaataaaataaatctaagtcggttaaaatggatttcatgattttccctcagaaaatgagtaacggagtcccacggcgtgcaatggtaattataaattggtgatgcttgtttgcaaattgcccactcgtgataagtcaacagccaatatttaaaactttgttcgttactggctttaccctaactttctctagtctactgtcaatatcattttaatgtaattgattgtatatagtctcaagaatggttggtgggcatgagttcctagagaactgtccaagggttgggaaaatccaaattctcttcctggctccagcactgattttgtacataaacattaggcaggttgcttaacctttttatttcaaactctctcaactctaaagtgctaataataatctcagttaccttatctttgtcacagggtgttcttttttatgaagaaaaatttgaaaatgataaaagctaagatgccttctaacttcataagcaaacctttaactaattatgtatctgaaagtcacccccacataccaactcaacttttttcctgtgaacacataaatatatttttatagaaaaacaaatctacataaaataaatctactgtttagtgagcagtatgacttgtacatgccattgaaaattattaatcagaagaaaattaagcagggtctttgctatacaaaagtgttttccactaattttgcatgcgtatttataagaaaaatgtgaatttggtggttttattctatcggtataaaggcatcgatattttagatgcacccgtgtttgtaaaaatgtagagcacaatggaattatgctggaagtctcaaataatatttttttcctattttatactcatggaagagataagctaaagaggggacaataatgagaaatgttggtgtgcttttctaagcatttaaaacataattgccaattgaaaccctaaatatgtttacataccattaagatatgattcatgtaacaatgttaaattaattataatgggattgggtttgttatctgtggtagtatatatcctagtgttcctatagtgaaataagtagggttcagccaaagctttctttgttttgtaccttaaattgttcgattacgtcatcaaaagagatgaaaggtatgtagaacaggttcacgtgattacctttttcttttggcttggattaatattcatagtagaactttataaaacgtgtttgtattgtaggtggtgtttgtattatgcttatgactatgtatggtttgaaaatattttcattatacatgaaattcaactttccaaataaaagttctacttcatgt

SEQ ID NO: 6726 - DNA, 1611 bp, Homo sapiens
caggagtgcgccgcgtccgttcaccgcggcctcagatgaatgcggctgttaagacctgcaataatccagaatggctactctgatctttgttgataaggaaaatgaagaaccaggcacccgtgtggttgctaaggatgggctgaagctggggtctggaccttcaatcaaagccttagatgggagatctcaagtttcaacaccacgttttggcaaaacgttcggtgccccagccttacctaaagctagcagaaaggctttgggaactgtcaacagagctacagaaaagtctgtaaagtccaagggacccctcaaacaaaaacagccaagcttttctgccaaaaagatgactgagaagactgttaaagcaaaaagctctgttcctgcctcagatgatgcctatccagaaatagaaaaattctttcccttcaatcctctagactttgagagttttgacctgcctgaagagcaccagattgcgcacctccccttgagtggagtgcctctcatgatccttgacgaggagagagagcttgaaaagctgtttcagctgggccccccttcacctgtgaagatgccctctccaccatgggaatccaatctgttgcagtctccttcaagcattctgtcgaccctggatgttgaattgccacctgtttgctgtgacatagatatttaaatttcttagtgcttcagagtttgtgtgtatttgtattaataaagcattctttaacagaaaaaaaaaaaaaaaaaaaaaaaaaaaaaaaaaaaaaaaaaaaaaaaaaggggggggagacacaaaaagaattccccaagagggggccacaagataatcagaggatatcacacaagatctctcggcgcaccaacgacgggggccccaaataagggagagacccagaatcacaacagccaagacacggtggacacgacggaaacaaacacacagcccagacacgggggcaaacacgcgcgcacaccgcggacaccatgggacaaagcagacaccacccacaaaacaacaccgcggagggggaagaacaacaaaacaagtgcgcaaacagaacacaaccacagaaagagaaaaattaaaacggcccccaagacggcgacaacacaacaaaacaaccactacagagcgctcaacagccgagtaaaaacacaacaacggacaactaacacacaaaggaatgaaacaaagcggggccacacaccgacaccggaaatccggcgaacaactcacaccgagcgagggtcccagacaacaaatacacagacaacgaaaccgagaaacaagaccagcaagacgagcaggcaaaagacaaacaagacagaggagacgacgacgaacgcaaaggacaagaggacacaacgacgcgaggagcgagagcgagaggaagagacaacaaaaagacacaaaagaacaacaagcaagcagcgaagaacgacacacaaccacacgagacagcaggagcagaggcggagaaaacacaacgagcaagccaagaccaagagaggagaacaaaataaaaaaatacgagagcaggcggacgagagcacgagacgaacagacaaacgggaatcagaagcataacgatccgcgacgcgaacaac

SEQ ID NO: 6727 - DNA, 2263 bp, Homo sapiens
  misc_feature (192)..(192): n is a, c, g, or t
aaggaaaactcatgtgtaaaccaatcttttccaaaatgtatcacttttgcggagcataatgatctgcaatatgctgctccaggcggtcttattggagttggaacaaaaattgaccccacttgtgccgggctgacagaatggtggggcaagtacttggtgcagtcggagctttacctgagatattcacagaantggaaatttcctatttcctgcttagacggcttctaggtgtacgcactgaaggagacaagaaagcagcaaagtttaattggttggggtcagataagaagaggagtgacaatcaagccaacagtagatgatgactgaagaataccagttaaataatacattcggatggatttggaagttggaattcctcttaacaaccaaggggtttattttcaaacgcaataattggggaaattgatttcacagttcgttaccttagtaaggtaacggtaaggttattctccttttttttttttttttttttggttatgaaaacttagggactaaaattaatataaaaattggcataatgttggattgaatctacattttggcagaagttaaacattcccacataatgtcaaaattatacatcatgcagttctgtttttttgtttgttttattttgttttgtttttgagtctggctctgtcacccaggctggagtgcagtggcgtgatctgcaacctctgccccccgggttcaagcgattctcctgcctcagcctcccgagtagctgagattacaggtgcgcgccaccacacttggctaatttttgtattattagtagagacggggtttcagcatgttggctaggccggtctctcctgacctcagggtgatcagcccacctcggcctcacaaagtgctgggattacacggcgtgagccaccttgcccagcccacatcatacagtttgaaatgaaactttgccacaaccagcctttgctgtagcacacacatatatcactgaacctgtttgaaataaagtttttttctctttttcatgattcgtctttgagtacctccaggctgaaagactgttgtaccagtaaaaacttaaaggcacaaattctccttgaagaccttctcccttttatgtggccccatattttatgttgctttatctttgaaattttgcatgaaaaggaaatgaatggattcgaatgaaattgtcctttagagcatgattacttgttcccatggacaaatatttttctccccttgctcttcctggcctgaaacacgggaaaccagagtcaaaagttatctccctctccctgtgatgccttgagatttttttctgcgttgtttaatgcctgaaatccaagtcttcctccatgggaaaatactgttataccaaataattctagatgagtaacaaagatctttttaggccttcattttatgttttttcttaactgttatattatgattgtgacatagattatactactactaatttttggatgtttcaaaaggtcaagaagtaaaagatgttagaaagcaaaaagtgagtccttttgattttaacttattccccatgtccctatacttcgtgtgcttttcctttttttttttgagacggaggctcactccgtcacctaggctagagtacagtggcacgatctgtggctcgctgcaacctctgcctcccgtgattcaagtgattctcgtgcttcagcctcccatgtagctgatatttacaggcactgtggcaccatacccggctaatttttggttcttttagtagagatgggggtttaaccatgtttgcccaggctgggtctttgaactcctaaccctcagggtgaatccgcccgccttctgtcctttccaaagtggctggggaattacacggcggttaacccaaccttgggcccggggtcaactttctccctcaaaaggctccttgcctcccacaaacagagctccgttctcgcaaaccatcaaccttgacaacactttacttaaaccctcccccgcccacaaccctttattccctttccaaaacacagtccctctcccggagacttctgcagtttacccccgcccaactaattcaacattcgcctttacacttgtcacatctcccctccctctctcacaacccccgcactatatccacccccaccccttaatataaatcatctcttactcacagattcggcaccgcgcgtctatctacctaactattcctcgcaacatcttaactcccccatcactccctgttccctctactcggctccccccc

SEQ ID NO: 6728 - DNA, 5653 bp, Homo sapiens
  misc_feature (931)..(1018): n is a, c, g, or t
ttttttttttttttttttctttctctctttctttttttgttttgttttgttttattttgttttgttttgtttttttgagattcagttttgctctgttgcccaggctggagtgcaatggcatgatcattgcacctctgcctcccaggttcaagcattttcctgcctcagcctcccgcgtagctcagattacaggcctgcaccaccacgcccagctaatttttgtatttttagtagagacagggtttctccatgttggccaggctggtctcgaactcctgacctcgtgatctgcccacttcggcctccaaagtgccgggattacaggcatgaaccaccgcgcccggccttttttttttttctgagacagggtctcactctgtctcccaggctggagtgcagtggctggatctctgctcactgcaacctccgtctcccaggttcaagcgagtctcctgcctcagactcccgagtagctgcgattacaggagcccaccaccgcgcccggctaatttttgtatttttagtagagacggggtttcacccaccatgttggccaggctggtatcgaactcttaacctcaagtgatccacccgcctcggcctcccaaagtgctggtattacaggcatgagccaccgcgcccggccagtatttgttcttttcttcatttttcacgtcaggagactgcgtttcagaatagtaaaaagaaatgcctaggaaaaggcctgcggtctctccatttccacagtagcgtgttccccaaagaccaaaccctcaggggaaacgtctagaatgagtaacaacttaaggctgcaaccttaaactttcccaggactcagtttccccagctgtgaaatggctgctgtcgggctgtcatctccaggcccggggcgctgacatttgggccactctcggtctccctcttcattctnnnnnnnnnnnnnnnnnnnnnnnnnnnnnnnnnnnnnnnnnnnnnnnnnnnnnnnnnnnnnnnnnnnnnnnnnnnnnnnnnnnnnnnntccccggggctctgttctgaggcctcaaaagtgctccttgtagatgggaccaggggtcatttgggcagtagcagcgccgggtctcagtctggtactgaagtcaggaatggcttaaggtgaaatcgtggtcctctggtgaactcagcgaagaccccctcgccttgtttatgacaagagaacttctgggggcgggaggaagagtccctgttacgatgctgatcatcattgagcttttgctgagaaaactctttagtactaaggtcgagagtctctgtggtctgcctggcaccagcaccttcctacaaccctagttttccaaaaggaaaagcctggggccaggcgacgtcctagctcgcattatgaacagggccgcgggccaccagagatgcgcgatgcccaactctttccaagagcacctcgcgtcccgaaccggtgccttcaactcggagaagtcaagagacccgcaagaaacttgcacgactgcacccgccgccgcgctgctgggggctgggcaggggcagctgggctggctcccggggagacgcgacccccccgcgccccgcagaccggctgtctcccatggacccctcggcacctgcagcctccgaggaagggtcagcgcgcgtgtccgcaccccgcccccaccgcgcgcccagagccgggggtcgccgtggcccttcgccacctccccaggagggcgtccggggcgtcccctctgggcgacgcgaggcccgggggcgctgcggtggccgcggcgcggagccgcactccggcggcggcggcggcgcggctccccctgctctgtgcagctgccgcccgggcttgcgctgggccaggcgcgcggcggccccgggctttgtgtgtgtgtatgtgtgtgtgtgtgtgtgtgtgtgtgtgtgagagtgtgtgcgtgtgagagtgcgagtgtctgtgcgcgagtgagtgagcggcgggcgggcgcgagtgtggccggccggagcgcgagcatgacccggcgggcgcgctccccagcctccgtctccccgccggaaccatgtcgggcaggtcggttcgagccgagacgaggagccgggccaaagatgatatcaagagggtcatggcggcgatcgagaaagtgcgcaaatgggagaagaaatgggtgaccgttggtgacacatccctacgaatctacaaatgggtccctgtgacggagcccaaggttgatgacaaaaacaagaataagaaaaaaggcaaggacgagaagtgtggctcagaggtgaccactccggagaacagttcctccccagggatgatggacatgcatgacgataacagcaaccagagctccatcgcagatgcctcccccatcaaacaggagaacagcagcaactccagccccgctccagagcccaactcggctgtgcccagcgacggcaccgaggccaaggtggatgaggcccaggctgatgggaaggagcacccaggagctgaagatgcttctgatgagcaaaattcacagtcctcgatggaacattcgatgaacagctcagagaaagtagatcggcagccgtctggagactcgggtctggccgcagagacgtctgcaatctctcaggtacctcgctcgaggtctcagaggggcagccagatcggccgggagcccattgggttgtcgggggatctggaaggagtgccaccctctaaaaagatgaaactggaggcctctcaacaaaactccgaagagatgtagacgatgctttaaagcctccgataactgttccatggaaggtacatcagcaattaattctagagcaactttgccccagcgattcctcttgggtgcgaacagaactactaacgtttcaagtttaccaagtgcaaatccaagaagacccagaacggcgtcacttctcagacactgaagaactctgctgtgaagcaaaacactcaaacctttaagggactgtccttggggaggcaggcggggctgacagctcaggagtgtctgcacactgtctcggaagccaggattccatttgtgttgctgctgtattttccccccacttctctatgtaacgatataagctatcggagggtggtaccgatcaggaacgctttttggcggggctttccactgttcaaccgattccttccgctttctttttttgtgccttgtgcccttgaggtgacctctggcatgtatcctggtggttcttacatccccctctgcaaagtgccctcttggtttggttcgggcggcggctgccaccctactcaccgctctcctccctgccccaggacttcatcggagcaggcagggtggagcgaaggagctccttagcccacctggtttgcaggtgcagggggaccttaggcacgccccaagcaccaggcaccagggcccaaggacgcgcaggtgttggggcacagtccccaagggctcggccccttggatcaggctgggcactcgctgtgctctcccctccttggggcgtttaggactgggcgtctccaagcccaccatggcccagatggacgtgcaaagcccttggaattttctggcacttcctctctattgcccccaccaccaccacccccatcactgctttctcccagacctccgaatacgaaatggcttctctggctgactgcaaggctgtctccttaaggcactgagtgggccggggaggctgggagccggcggcaggattagctggtgctgaactttctctcataggacgtcgcttggatttcaaatccacggtcacctgctgccctttgcctcccccgacgccccagcctgtgccccggagaggcaggatcgcagtggtcagaatccacgtgctttcctattctcaggctgttctgactctgagccaacagctggaccgtgtctcatccccagaacatgccgtctgtccaccggggagtggccttgatggccggcctcgaaggccacaaacaaggcgtcgaggaattggaaagatttgcacaccctccagaaaggagagacgcaatctcccctccctcccatcccccaccttcgctggaacagcttcctctcactgaacggagacgcccccttggacgaactgcctaatcgtttggttctgaggcctggtttgctcttaattaatatatgaactcctcagaccttaaaccttttcctaagctttctttactgcactggagttctgactccctttgagttgtgtgttactgggggtggggtggggtcatgggttttgttgtttttgggggctaattggtgcatattcaggtaccacctttgacgtgtggctctttctcctgaccatcatgggaagtgtctgctggattccattttctaagagtttctgagggtgaggctcttattttttttttaagggatcctgtctatttcctgcacttcgagaagaatcaaaatgttcctgaatttcaaatacctcatgcaaaatgtctcctgaaataagggaaaaaaaaaaaaaaccacaactttgaaaatcttaatgttgaagttagcaatgccgaaaggtttctgtcttaaaaaaaaaaaatccttgtacttatcaattttgccccttaggcagtcagttttgttgagaactgtgtcctgcatcctggcgcagaacctacctgatgcggttcctctccacgcatctcgaggcggcgttacctccagattccgtagagttagagtcacatttttctttgcagcgaaactccatcttggtgagagatgaatttggatatttatttccttctctgtttttgggaaacgagaggctacaaccaagacagctgaaggagaatgaaacacacacatccacagaaacagagaggcgtaggtggccctgccgttgaccgcagcctctctggacaggcaaggggagttggcgcaggtgaggactcagacgacgtccaccgtcccaaggctgtcactagtatttctctgaagtgcctgaaggtaggaatgggccggcgattgggaccagctgggccccaccacggccacgccaggcaaagcgccagcagccctgcactccacgctggccaagaaggccttccacgcagaatgacaagactgcaaaaatccgatgtgcttccttccctggcgcagtcgctcctcgagccgctgccccccacccaccctgcacccctcgccctcccccccaccacagaatctaagacctttcagcttcgagccagggggcgggggatcccgagcaaaagccttccgtggacatcaggccccgtggcctcaagggctcccagggcaaacctaattccccccaaaacgtgaagtcggggaagctgcggctacacattccacaaagtgctggcacttacacccacaacccggaaggctgtggaccgattcctctagggtggtgacctcccattagcaaacggtgtcatggtttggaatgttcattatcgccaagaacctggttagaggcataaagaccttttttcaccgttacctaattttttcccctttcaagaattttttttttttttggtgtgttgtacagcagtataatttttcacttatttattccatcagtagatatggtttgtacaatgtacaattgtttcatttcagaaaataaaaatttcaaatcatgaaaaaaaaaaaaaaaaaaaaggccgctc

SEQ ID NO: 6729 - DNA, 2558 bp, Homo sapiens
  misc_feature (205)..(242): n is a, c, g, or t
cagagggaggaagaagcggcggcgcggcggcggcggctcctctttgcagagggggaaactcttgggctgagagcaggaacaacgcggtaggcaaggcgggctgctggctcccccggctccggcagcagcggcggcagcccgagcagcggcagcagcagcggcagcaccccaggcgctgacagccccgccggccggctccgttgcnnnnnnnnnnnnnnnnnnnnnnnnnnnnnnnnnnnnnngccaacacggtcttgctgaaagccagggaagggggcggaggaaagcgcaaagggaaaagcaagaagtggaaagaaatcctgaagttccctcacattagccagtgtgaagacctccgaaggaccatagacagagattactgcagtttatgtgacaagcagccaatcgggaggctgcttttccggcagttttgtgaaaccaggcctgggctggagtgttacattcagttcctggactccgtggcagaatatgaagttactccagatgaaaaactgggagagaaagggaaggaaattatgaccaagtacctcaccccaaagtcccctgttttcatagcccaagttggccaagacctggtctcccagacggaggagaagctcctacagaagccgtgcaaagaactcttttctgcctgtgcacagtctgtccacgagtacctgaggggagaaccattccacgaatatctggacagcatgttttttgaccgctttctccagtggaagtggttggaaaggcaaccggtgaccaaaaacactttcaggcagtatcgagtgctaggaaaagggggcttcggggaggtctgtgcctgccaggttcgggccacgggtaaaatgtatgcctgcaagcgcttggagaagaagaggatcaaaaagaggaaaggggagtccatggccctcaatgagaagcagatcctcgagaaggtcaacagtcagtttgtggtcaacctggcctatgcctacgagaccaaggatgcactgtgcttggtcctgaccatcatgaatgggggtgacctgaagttccacatctacaacatgggcaaccctggcttcgaggaggagcgggccttgttttatgcggcagagatcctctgcggcttagaagacctccaccgtgagaacaccgtctaccgagatctgaaacctgaaaacatcctgttagatgattatggccacattaggatctcagacctgggcttggctgtgaagatccccgagggagacctgatccgcggccgggtgggcactgttggctacatggctccagaggtcctgaacaaccagaggtacggcctgagccccgactactggggccttggctgcctcatctatgagatgatcgagggccagtcgccgttccgcggccgtaaggagaaggtgaagcgggaggaggtggaccgccgggtcctggagacggaggaggtgtactcccacaagttctccgaggaggccaagtccatctgcaagatgctgctcacgaaagatgcgaagcagaggctgggctgccaggaggagggggctgcagaggtcaagagacaccccttcttcaggaacatgaacttcaagcgcttagaagccgggatgttggaccctcccttcgttccagacccccgcgctgtgtactgtaaggacgtgctggacatcgagcagttctccactgtgaagggcgtcaatctggaccacacagacgacgacttctactccaagttctccacgggctctgtgtccatcccatggcaaaacgagatgatagaaacagaatgctttaaggagctgaacgtgtttggacctaatggtaccctcccgccagatctgaacagaaaccaccctccggaaccgcccaagaaagggctgctccagagactcttcaagcggcagcatcagaacaattccaagagttcgcccagctccaagaccagttttaaccaccacataaactcaaaccatgtcagctcgaactccaccggaagcagctagtttcggctctggcctccaagtccacagtggaaccagcccagacccttctccttagaagtggaagtagtggagcccctgctctggtggggctgccaggggagaccccgggagccggaaggaggccgtccatcccgtcgacgtagaacctcgaggtttctcaaagaaatttccactcaggtctgttttccgaggcggccccgggcgggtggattggatttgtctttggtgaacattgcaatagaaatccaattggatacgacaacttgcacgtattttaatagcgtcataactagaactgaattttgtctttatgatttttaaagaaaagttttgtaaatttctctactgtctcagtttacattttcggtatatttgtatttaaatgaagtgagactttgagggtgtatattttctgtgcagccactgttaagccatgtgttccaaggcattttagcggggagggggttatcaaaaaaaaaaaaaatgtgactcaagacttccagagcctcaaatgagaaaatgtctttattaaatgtagaaagtgatccatacttcaaaaaaaaa

SEQ ID NO: 6730 - DNA, 1833 bp, Homo sapiens
ggctcttgttggctaccgtttcagttgatacccacaagggaaggggggccccacaaaatggatacgtccaatcccagacatgggaacctgttgtggaccagagtacatattagaataacaggatttaaagggaacattttttaaaaggtatgttccaaaggaaggtatagttgaaagtactctatccagtccaagaaattcatataaaatcagatttgggagagaatttttgctgagtaccctttccagtgtatacctttgcattttgttaaaggtcacaatccataccataggggctttagaaataatggtaactttttttaaaaaaggtataatcacctcttatttataatgaacagctttagttaaaatatttggccagatgaaagctcttgagcatcaccatggactctcaggctttacatctctggagtattcctgagaaaatagtaagaaaaaaaagcaactttcatcactttttaaaagctctttttcagaggttgttcaggcttttcgagatgaaatatacagacaatactgcaggtaaaggaaaaactgagagactgcttcccacttaagctaagtaggaagaaaacaaaatgatctgctataaactgcaaggtacaacacaagtcaaaagtgaacagtgcatagtatccttcgttaagtgaaggaaaaagtgtgattacccattttttttttttttttttttttttttttttttttttctggggaaaatagtttaatgtatcgctcagaaaaaaatagtttatatttttccatctgaaacagtgctttacgaggtccaacgccaccaagcgactttcattctgtcccatactgccgaaagtgaatctaaggcaggacggacgtccaggatggtgaactggtagtccttgttgacttcaccaccatcataataatcaatcacatatctaacttctgtcccgcaacggtttatgatccaatcgtgcctatcaaaaggcaactcataccccatccaggaacgaattcgtgcccttggtgaatactcttttgctttccctccaaaccggatcaatgatggaccacaaggacactctgcagcatgaagggcttcccacttcaaaatctccttccaagcctgctcgttattctgattgtgaattctaatgatattatacatatccttctgactgatatcctcatccttccacttccaccctttctttaacattgcattccagaacatctgctcagaagggtaaacccactttttctctgaatctgctctcggaatggatgactcttctctgacagtagacaatgcaaatggctgatctggagctggtgtttgatttggtggtggcatcagatttgaaggatctaggttctccttattctcagccgcagtgcccctaatgggacactccacgtactcataggcgcgttccgggtggggcagcacagagtaagttttcttctcacaggttgggccagatggctctgtattcactggacagcctttcattttcccttcatgcatcgggcatcctgaaggtggggacgctgaagcatttgaggcctgaactgcaacagcaggagcagatggagacaaacccatggctggaaacagtgttgactgtaaacaattttaaatttccacctgctccagcccgtggtccccagaccaaaccggccgcggccagcctgcccttctgcacctaagccctcccccgggctgttccgggaggccggtaccgccttcagtcgccaacccgaacccagagcagcagtgacttcacgccgccgccgccgccccgccgccgccttcctctcactcggtcaccgctg

SEQ ID NO: 6731 - DNA, 3714 bp, Homo sapiens
  misc_feature (1227)..(1245): n is a, c, g, or t
  misc_feature (1491)..(1505): n is a, c, g, or t
  misc_feature (3611)..(3611): n is a, c, g, or t
ccggaaaggtgtgaataagcaacatcatttgcactccacttggtttcagtagagtgctgatttcttgatctttcctattgttaagctggtgcttttcagtaaagattaataacttggttcaaaactcatttctatttacctgatactattgtttctataaaattttatatatgagacattagaggattaaaaacatcatatttgggaaagaaatgttttttaatgctaataaaaccaatatggtaacattcttaatggctttatttaaaacttaatttaaagtgattgcttcttagttttagcaacacttccttaatgtacttgatgctatgaactaggctctttacattttaaaactcaagatttttggtcatctattaccttcttcaagcagaaatcttacagataatatagaacaacttggtttacttgaggtagtacatgttctcctttgttcagagaattaataattatttgagggcagagaaagtcagtgaatgtgcatgtgagtttcctaaaatagagtgtagggtcttttttttttttcttatttaatggaaaactgttcaacagtagagagaggagcataatgaggcctgatgtacccaacatctctccatagcacttatcagtacatggcacgcatataagcaatcttcttttacctcccaccttgcattccctagattattttgaaggaactcaaacatcagagcatttcttctgtaaatatttcagtacacatttctaaaacataagcatttctttttaaaaagtgtgatattacacttaaaaatacattcttaattttgtatagtatgcatttctccagttgtcataaattgtctgttttattaaataataacttactgtagtttgttttaatcaggatccgaataaggtcagtatgtaactggtttgagacatctcttagatattttttaatcctcgggttccccgactctttctcagcagcaccccacctcctttaaaaaaaaaacaaaaacaaaacttagtggtttcctatgaagtttcccacagtttggatttagttgactgcatccctgtggtgttagcatgttcctcttttctttatgtatcttttatgtatcaaatctgtaatcaggaatctgattcctggtcagattaaggctcagtattttgggggtagggtagagtaggggcaagaccacttcatgggcggtggtgtgcactttcatgaggagnnnnnnnnnnnnnnnnnnnttgtcttcctttggcccattggaacttatttaggtttgttaccaagtcgttttgacacaatgctgctaaactttgatagcttctatgctttgtggtatgataaggtgctcctgatttatcatatacatttcctgccccaaacatagaatcaactatttctccaaggagctctgtgggtgctaggggtgggagttatggtgaatggttgcatggatttgaaaaaaaggcaaaagaatgtatggctgnnnnnnnnnnnnnnnaggaggttaaggttctagagcacaagttgaaagaagctgatgaaatgcgcacattgttacagctagagtgtgaaaaatacaaatccgtccttgcagaaacagtaggaaatgatttttaatctacattttgattttactttaaatcattaccttcttccttcatggcctaaatagttttatcttggcattagaacatgaatttttcaaaacaactatgcttttgtctgtaggaaggaattttacagaagctacagagaagtgttgagcaagaagaaaataaatggaaagttaaggtcgatgaatcacacaagactattaaacagatgcagtcatcatttacatcttcagaacaagagctagagcgattaagaagcgaaaataaggatattgaaaatctgagaagagaacgagaacatttggaaatggaactagaaaaggcagagatggaacgatctacctatgttacagaagtcagagagttgaaggcacagttaaatgaaacactcacaaaacttagaactgaacaaaataaaagacagaaggtagctggtgatttgcataaggctcaacagtcactggagcttatccagtcaaaaatagtaaaagctgctggagacactactgttattgaaaatagtgatgtttccccagaaacggagtcttctgagaaggagacaatgtctgtaagtctaaatcagactgtaacacagttacagcagttgcttcaggcggtaaaccaacagctcacaaaggagaaagagcactaccaggtgttagagtgaagtaattgggaaactgttcatttgaggataaaaaaggcattgtattatattttgccaaattaaagccttatttatgttttcaccctttctactttgtcagaaacactgaacagagttttgtcttttctaatccttgttagactactgatttaaagaaggaaaaaaaaaagccaactctgtagacaccttcagagtttagttttataataaaaactgtttgaataattagacctttacattcctgaagataaacatgtaatcttttatcttattttgctcaataaaattgttcagaagatcaaagtggtaaagacaatgtaaaatttaacattttaatactgatgttgtacactgttttacttaacattttgggaagtaactgcctctgacttcaactcaagaaaacacttttttgttgctaatgtaatcggtttttgtaatggcgtcagcaaataaaaggatgcttattattcaaacttgaaaaaaaaaaaaaaaaattgagctttaacagatttcattagtagtacagatcattgtaatttagaatacagctattaattggcaaccattcaacaagataggtttatgtagcctctgtaacctttctaactgatgctctgggtcctcttcagtttggtccaatgtaaagtgccccaggagtgctggggtttcagaaaggacagagcaagcatttaggatttcagactaaacacccacacttcaggtagaggagctctatttttaccattactatttttttttgaagtaataataattaactgttagttttctttttcaggcacggttacacagtttacatgtgttatcttttttgttgttgttgttgttgttactgtttttttgatacagagtctcactctgttgtccacgcaggagtgcattggcactatctgggcttactgcaacctccacctcccggttcaagcaattctcatgtagctgggattacaggcgcctgccgccatgcctggctaatttttgtatttttagtagaaagagtttttcaccttgttggccaggctggtctcgaactgctgacctcaagtgatccacccatcccaaagtgctcggattaccggtgtgagccactgtgcccagccaatgaaagtttttttaataatttgttaaaaacacttcagatgctaaataaccactgagaaatatcttgtgccattgagtactaaagtacccattaggctgcactgggggcatcttggtatttttgtgcacataacagtcatgcttctgtcatgggggcctctgcattttctggttctctgggcttggaactctccctctggtngtgccagcttttgggctgctccctcactatgttgaaatctggcttaatgtcaccccttcctattaaggtcctttcctgactggtccgcctatccttctgcccc

SEQ ID NO: 6732 - DNA, 4361 bp, Homo sapiens
  misc_feature (1034)..(1058): n is a, c, g, or t
ggggcacactcatgcattcctgtcaagtcatcttgtgaaaggctgcctgcttccagcttggcttggatgtgcaaccttaataaaactcactgaggtctgggagaaaatagcagatctgcagcagatagggtagaggaaagggtctagaatatgtacacgcagctgactcaggcaggctccatgctgaacggtcacacagagaggaaacaataaatctcagctactatgcaataaatatctcaagttttaacgaagaaaaacatcattgcagtgaaataaaaaattttaaaattttagaacaaagctaacaaatggctagttttctatgattcttcttcaaacgctttctttgagggggaaagagtcaaacaaacaagcagttttacctgaaataaagaactagttttagaggtcagaagaaaggagcaagttttgcgagaggcacggaaggagtgtgctggcagtacaatgacagttttcctttcctttgctttcctcgctgccattctgactcacatagggtgcagcaatcagcgccgaagtccagaaaacagtgggagaagatataaccggattcaacatgggcaatgtgcctacactttcattcttccagaacacgatggcaactgtcgtgagagtacgacagaccagtacaacacaaacgctctgcagagagatgctccacacgtggaaccggatttctcttcccagaaacttcaacatctggaacatgtgatggaaaattatactcagtggctgcaaaaacttgagaattacattgtggaaaacatgaagtcggagatggcccagatacagcagaatgcagttcagaaccacacggctaccatgctggagataggaaccagcctcctctctcagactgcagagcagaccagaaagctgacagatgttgagacccaggtactaaatcaaacttctcgacttgagatacagctgctggagaattcattatccacctacaagctagagaagcaccttcttcaacagacaaatgaaatcttgaagatccatgnnnnnnnnnnnnnnnnnnnnnnnnnaatcttagaaatggaaggaaaacacaaggaagagttggacaccttaaaggaagagaaagagaaccttcaaggcttggttactcgtcaaacatatataatccaggagctggaaaagcaattaaacagagctaccaccaacaacagtgtccttcagaagcagcaactggagctgatggacacagtccacaaccttgtcaatctttgcactaaagaaggtgttttactaaagggaggaaaaagagaggaagagaaaccatttagagactgtgcagatgtatatcaagctggttttaataaaagtggaatctacactatttatattaataatatgccagaacccaaaaaggtgttttgcaatatggatgtcaatgggggaggttggactgtaatacaacatcgtgaagatggaagtctagatttccaaagaggctggaaggaatataaaatgggttttggaaatccctccggtgaatattggctggggaatgagtttatttttgccattaccagtcagaggcagtacatgctaagaattgagttaatggactgggaagggaaccgagcctattcacagtatgacagattccacataggaaatgaaaagcaaaactataggttgtatttaaaaggtcacactgggacagcaggaaaacagagcagcctgatcttacacggtgctgatttcagcactaaagatgctgataatgacaactgtatgtgcaaatgtgccctcatgttaacaggaggatggtggtttgatgcttgtggcccctccaatctaaatggaatgttctatactgcgggacaaaaccatggaaaactgaatgggataaagtggcactacttcaaagggcccagttactccttacgttccacaactatgatgattcgacctttagatttttgaaagcgcaatgtcagaagcgattatgaaagcaacaaagaaatccggagaagctgccaggtgagaaactgtttgaaaacttcagaagcaaacaatattgtctcccttccagcaataagtggtagttatgtgaagtcaccaaggttcttgaccgtgaatctggagccgtttgagttcacaagagtctctacttggggtgacagtgctcacgtggctcgactatagaaaactccactgactgtcgggctttaaaaagggaagaaactgctgagcttgctgtgcttcaaactactactggaccttattttggaactatggtagccagatgataaatatggttaatttcatgtaaaacagaaaaaaagagtgaaaaagagaatatacatgaagaatagaaacaagcctgccataatcctttggaaaagatgtattataccagtgaaaaggtgttatatctatgcaaacctactaacaaattatactgttgcacaattttgataaaaatttagaacagcattgtcctctgagttggttaaatgttaatggatttcagaagcctaattccagtatcatacttactagttgatttctgcttacccatcttcaaatgaaaattccatttttgtaagccataatgaactgtagtacatggacaataagtgtgtggtagaaacaaactccattactctgatttttgatacagttttcagaaaaagaaatgaacataatcaagtaaggatgtatgtggtgaaaacttaccacccccatactatggttttcatttactctaaaaactgattgaatgatatataaatatatttatagcctgagtaaagttaaaagaatgtaaaatatatcatcaagttcttaaaataatatacatgcatttaatatttcctttgatattatacaggaaagcaatattttggagtatgttaagttgaagtaaaagcaagtactctggagcagttcattttacagtatctacttgcatgtgtatacatacatgtaacttcattattttaaaaatatttttagaactccaatactcaccctgttatgtcttgctaatttaaattttgctaattaactgaaacatgcttaccagattcacactgttccagtgtctataaaagaaacactttgaagtctataaaaaataaaataattataaatatcattgtacatagcatgtttatatctgcaaaaaacctaatagctaattaatctggaatatgcaacattgtccttaattgatgcaaataacacaaatgctcaaagaaatctactatatcccttaatgaaatacatcattcttcatatatttctccttcagtccattcccttaggcaatttttaatttttaaaaattattatcaggggagaaaaattggcaaaactattatatgtaagggaaatatatacaaaaagaaaattaatcatagtcacctgactaagaaattctgactgctagttgccataaataactcaatggaaatattcctatgggataatgtattttaagtgaatttttggggtgcttgaagttactgcattattttatcaagaagtcttctctgcctgtaagtgtccaaggttatgacagtaaacagtttttattaaaacatgagtcactatgggatgagaaaattgaaataaagctactgggcctcctctcataaaagagacagttgttgggaggtagcataccgtttcaacctgtggacggtccataagcactatgccttaatggtttcctccatttgagaaaataaagctattcacattgttaagaaaaatactttttaaagtttaccatcaagtcttttttatatttatgtgtctgtattctacccctttttgccttacaagtgatatttgcaggtattataccatttttctattcttggtggcttcttcatagcaggtaagcctctccttctaaaaacttctcaactgttttcatttaagggaaagaaaatgagtattttgtccttttgtgttcctacagacactttcttaaaccagtttttggataaagaatactatttccaaactcatattacaaaaacaaaataaaataataaaaaaagaaagcatgatatttactgttttgttgtctgggtttgagaaatgaaatattgtttccaattatttataataaatcagtataaaatgttttatgattgttatgtgtattatgtaatacgtacatgtttatggcaatttaacatgtgtattcttttaattgtttcagaataggataattaggtattcgaattttgtctttaaaattcatgtggtttctatgcaaagttcttcatatcatcacaacattatttgatttaaataaaattgaaagtaatatttgtgcaaaaaaaaaaaaaaaaaaaaaaaaa

SEQ ID NO: 6733 - DNA, 2093 bp, Homo sapiens
  misc_feature (613)..(635): n is a, c, g, or t
  misc_feature (2015)..(2015): n is a, c, g, or t
  misc_feature (2039)..(2039): n is a, c, g, or t
  misc_feature (2076)..(2076): n is a, c, g, or t
  misc_feature (2087)..(2087): n is a, c, g, or t
acgcacacagccatccatcctcccccttccctctctcccctgtcctctctctccgggctcccaccgccgccgcgggccggggagccaccggccgccaccatgagttccttcagctacgagccgtactactcgacctcctacaagcggcgctacgtggagacgccccgggtgcacatctccagcgtgcgcagcggctacagcaccgcacgctcagcttactccagctactcggcgccggtgtcttcctcgctgtccgtgcgccgcagctactcctccagctctggatcgttgatgcccagtctggagaacctcgacctgagccaggtagccgccatcagcaacgacctcaagtccatccgcgacctgcgcctggcggcggaagatgccaccaacgagaagcaggcgctccagggcgagcgcgaagggctggaggagaccctgcgcaacctgcaggcgcgctatgaagaggaggtgctgagccgcgaggacgccgagggccggctgatggaagcgcgcaaaggcgccgacgaggcggcgctcgctcgcgccgagctcgagaagcgcatcgacagcttgatggacgaaatctcttttctgaagaaagtgcacgaannnnnnnnnnnnnnnnnnnnnnngcagatccagtacgcgcagatctccgtggagatggacgtgaccaagcccgacctttccgccgcgctcaaggacatccgcgcgcagtacgagaagctggccgccaagaacatgcagaacgctgaggaatggttcaagagccgcttcaccgtgctgaccgagagcgccgccaagaacaccgacgccgtgcgcgccgccaaggacgaggtgtccgagagccgtcgtctgctcaaggccaagaccctggaaatcgaagcatgccggggcatgaatgaagcgctggagaagcagctgcaggagctggaggacaagcagaacgccgacatcagcgctatgcaggacacgatcaacaaattagaaaatgaattgaggaccacaaagagtgaaatggcacgatacctaaaagaataccaagacctcctcaacgtgaagatggctttggatattgagattgcagcttacaggaaactcttggaaggcgaggagacccgactcagtttcaccagcgtgggaagcataaccagtggctactcccagagctcccaggtctttggccgatctgcctacggcggtttacagaccagctcctatctgatgtccacccgctccttcccgtcctactacaccagccatgtccaagaggagcagatcgaagtggaggaaaccattgaggctgccaaggctgaggaagccaaggatgagcccccctctgaaggagaagccgaggaggaggagaaggacaaggaagaggccgaggaagaggaggcagctgaagaggaagaagctgccaaggaagagtctgaagaagcaaaagaagaagaagaaggaggtgaaggtgaagaaggagaggaaaccaaagaagctgaagaggaggagaagaaagttgaaggtgctggggaggaacaagcagctaagaagaaagattgaacccccatttccttaattatttcaggaataattctcccgaaatcaggtcaaccccatcaccaaccaaccaaccagttgagttccagattctatgtgaattaaaaagtcaatatatgtataattctgagatgacttaggttggacattcaatgttgtgctatgaatttcctctttatgcagagtatctgtttgcttgcagagtggctttctggcttgctgccagcctgtgcatggtccacgcttatgagttcaggatctacggcaatgtgaatcattcagatgtttacaataaaaaacaccacatgagtaaatgaattcactaatgttaatgttaaacttcatggaaaaatagtcctttgaaccttcggtggttagcaattaaagaccctgagttatgtgcaataaatagtaaataaagttaacagaaagaaaaaaaaaaagtaccaacccacccnacccaggtggagtttccagaatcncatggtggaatttaaaaggccatatatggggtaattnccgagatgacntagggt

SEQ ID NO: 6734 - DNA, 3824 bp, Homo sapiens; identical to SEQ ID NO: 2600

SEQ ID NO: 6735 - DNA, 3292 bp, Homo sapiens
  misc_feature (1809)..(1827): n is a, c, g, or t
gaattccgccagccccgccagtccccgcgcagtccccgcgcagtcccagcgccaccgggcagcagcggcgccgtgctcgctccagggcgcaaccatgtcgccatttcttcggattggcttgtccaactttgactgcgggtcctgccagtcttgtcagggcgaggctgttaacccttactgtgctgtgctcgtcaaagagtatgtcgaatcagagaacgggcagatgtatatccagaaaaagcctaccatgtacccaccctgggacagcacttttgatgcccatatcaacaagggaagagtcatgcagatcattgtgaaaggcaaaaacgtggacctcatctctgaaaccaccgtggagctctactcgctggctgagaggtgcaggaagaacaacgggaagacagaaatatggttagagctgaaacctcaaggccgaatgctaatgaatgcaagatactttctggaaatgagtgacacaaaggacatgaatgaatttgagacggaaggcttctttgctttgcatcagcgccggggtgccatcaagcaggcaaaggtccaccacgtcaagtgccacgagttcactgccaccttcttcccacagcccacattttgctctgtctgccacgagtttgtctggggcctgaacaaacagggctaccagtgccgacaatgcaatgcagcaattcacaagaagtgtattgataaagttatagcaaagtgcacaggatcagctatcaatagccgagaaaccatgttccacaaggagagattcaaaattgacatgccacacagatttaaagtctacaattacaagagcccgaccttctgtgaacactgtgggaccctgctgtggggactggcacggcaaggactcaagtgtgatgcatgtggcatgaatgtgcatcatagatgccagacaaaggtggccaacctttgtggcataaaccagaagctaatggctgaagcgctggccatgattgagagcactcaacaggctcgctgcttaagagatactgaacagatcttcagagaaggtccggttgaaattggtctcccatgctccatcaaaaatgaagcaaggccgccatgtttaccgacaccgggaaaaagagagcctcagggcatttcctgggagtctccgttggatgaggtggataaaatgtgccatcttccagaacctgaactgaacaaagaaagaccatctctgcagattaaactaaaaattgaggattttatcttgcacaaaatgttggggaaaggaagttttggcaaggtcttcctggcagaattcaagaaaaccaatcaatttttcgcaataaaggccttaaagaaagatgtggtcttgatggacgatgatgttgagtgcacgatggtagagaagagagttctttccttggcctgggagcatccgtttctgacgcacatgttttgtacattccagaccaaggaaaacctcttttttgtgatggagtacctcaacggaggggacttaatgtaccacatccaaagctgccacaagttcgacctttccagagcgacgttttatgctgctgaaatcattcttggtctgcagttccttcattccaaaggaatagtctacagggacctgaagctagataacatcctgttagacaaagatggacatatcaagatcgcggattttggaatgtgcaaggagaacatgttaggagatgccaagacgaataccttctgtgggacacctgactacatcgccccagagatcttgctgggtcagaaatacaaccactctgtggactggtggtccttcggggttctcctttatgaaannnnnnnnnnnnnnnnnnntttccacgggcaggatgaggaggagctcttccactccatccgcatggacaatcccttttacccacggtggctggagaaggaagcaaaggaccttctggtgaagctcttcgtgcgagaacctgagaagaggctgggcgtgaggggagacatccgccagcaccctttgtttcgggagatcaactgggaggaacttgaacggaaggagattgacccaccgttccggccgaaagtgaaatcaccatttgactgcagcaatttcgacaaagaattcttaaacgagaagccccggctgtcatttgccgacagagcactgatcaacagcatggaccagaatatgttcaggaacttttccttcatgaaccccgggatggagcggctgatatcctgaatcttgcccctccagagacaggaaagaatttgccttctccctgggaactggttcaagagacactgcttgggttcctttttcaacttggaaaaagaaagaaacactcaacaataaagactgagacccgttcgcccccatgtgactttatctgtagcagaaaccaagtctacttcactaatgacgatgccgtgtgtctcgtctcctgacatgtctcacagacgctcctgaagttaggtcattactaaccatagttatttacttgaaagatgggtctccgcacttggaaaggtttcaagacttgatactgcaataaattatggctcttcacctgggcgccaactgctgatcaacgaaatgcttgttgaatcaggggcaaacggagtacagacgtctcaagactgaaacggccccattgcctggtctagtagcggatctcactcagccgcagacaagtaatcactaacccgttttattctatcctatctgtggatgtataaatgctgggggccagccctggataggtttttatgggaattctttacaataaacatagcttgtacttgagatctacaaatccattcatcctgattgggcatgaaatccatggtcaagaggacaagtggaaagtgagagggaaggtttgctagacaccttcgcttgttatcttgtcaagatagaaaagatagtatcatttcacccttgccagtaaaaacctttccatccacccattctcagcagactccagtattggcacagtcactcactgccattctcacactataacaagaaaagaaatgaagtgcataagtctcctgggaaaagaaccttaaccccttctcgtgccatgactggtgatttcatgactcataagcccctccgtaggcatcattcaagatcaatggcccatgcatgctgtttgcagcagtcaattgagttgaattagaattccaaccatacattttaaaggtatttgtgctgtgtgtatattttgataaaatgttgtgacttcatggcaaacaggtggatgtgtaaaaatggaataaaaaaaaaaaaagagtaaaaaaaaaaaaaaaaatt

SEQ ID NO: 6736 - DNA, 7396 bp, Homo sapiens
  misc_feature (4759)..(4776): n is a, c, g, or t
gatctttgttgatgtgtcagctccgcaggggtttggggaaacggccgctgagtgaggcgtcggctgtgtttctcaccgcggtcttttcctcccactcttggctggttggaccccgctatggaaaagttggcccctgagccagagctccagcagccttgttagggcgtggccctgaggcttggataagtgggaggaaaaagtcctggatttcgagtcagaacatctggattagaatcctacttctttcacttgataatcttgttaccttgtggaaatcagaagagagaatatagtacaaatacgcagtacagtcccagatgtaaaaccgaagatcaggagcagatttgaacgaattccaaagtgaattgggtgccagtcagcatgtcagagacagaccacataggcctctacttcctctgataccacatgtcgggaaaacaccttgaattaccggaagactctattgcaacttgtgtcttcctgggcaatgaacagcagcaaattagcaacatgagtccaaactattggtcattaaacactgataaaactttatgtcaacctaatgagcataataatcgaattgaagcccaggacaattatatccaggatcaaattcggcacgaggattcttgtgccaaaacagacataggctcagaaaattctgaacaaatagctaattttcctagtggaaattttgctaaacatatttcaaaaacaaatgaaacagaacagaaagtaacacaaatattggtggaattaaggtcatctacatttccagaatcagctaatgaaaagacttattcagaaagcccctatgatacagactgcaccaagaaatttatttcaaaaataaagagcgtttcagcatcagaggatttgttggaagaaatagaatctgagctcttatctacggagtttgcagaacatcgagtaccaaatggaatgaataagggagaacatgcattagttctgtttgaaaagtgtgtgcaagataaatatttgcagcaggaacatatcataaaaaagttaattaaagaaaataagaagcatcaggagctcttcgtagacatttgttcagaaaaagacaatttaagagaagaactaaagaaaagaacagaaactgagaagcagcatatgaacacaattaaacagttagaatcaagaatagaagaacttaataaagaagttaaagcttccagagataaactaatagctcaagacgttacagctaaaaatgcagttcagcagttacacaaagagatggcccaacggatggaacaggccaacaagaaatgtgaagaggcacgccaagaaaaagaagcaatggtaatgaaatatgtaagaggtgagaaggaatctttagatcttcgaaaggaaaaagagacacttgagaaaaaacttagagatgcaaataaggaacttgagaaaaacactaacaaaattaagcagctttctcaggagaaaggacggttgcaccagctgtatgaaactaaggaaggcgaaacgactagactcatcagagaaatagacaaattaaaggaagacattaactctcacgtcatcaaagtaaagtgggcacaaaacaaattaaaagctgaaatggattcacacaaggaaaccaaagataaactcaaagaaacaacaacaaaattaacacaagcaaaggaagaagcagatcagatacgaaaaaactgtcaggatatgataaaaacatatcaggagtcagaagaaattaaatcaaatgagcttgatgcaaagcttagagtcacaaaaggagaacttgaaaaacaaatgcaagaaaaatctgaccagctagagatgcatcatgccaaaataaaggaactagaagatctgaagagaacatttaaggagggtatggatgagttaagaacactgagaacaaaggtgaaatgtctagaagatgaacgattaagaacagaagatgaattatcaaaatataaggaaattattaatcgccaaaaagctgaaattcagaatttattggacaaggtgaaaactgcagatcagctacaggagcagcttcaaagaggtaagcaagaaattgaaaatttgaaagaagaagtggaaagtcttaattctttgattaatgacctacaaaaagacatcgaaggcagtaggaaaagagaatctgagctgctgctgtttacagaaaggctcactagtaagaatgcacagcttcagtctgaatccaattctttgcagtcacaatttgataaagtttcctgtagtgaaagtcagttacaaagccagtgtgaacaaatgaaacagacaaatattaatttggaaagtaggttgttgaaagaggaagaactgcgaaaagaggaagtccaaactctgcaagctgaactcgcttgtagacaaacagaagttaaagcattgagtacccaggtagaagaattaaaagatgagttagtaactcagagacgtaaacatgcctctagtatcaaggatctcaccaaacaacttcagcaagcacgaagaaaattagatcaggttgagagtggaagctatgacaaagaagtcagcagcatgggaagtcgttctagttcatcagggtccctgaatgctcgaagcagtgcagaagatcgatctccagaaaatactgggtcctcagtagctgtggataactttccacaagtagataaggccatgttgattgagagaatagttaggctgcaaaaagcacatgcccggaaaaatgaaaagatagaatttatggaggaccacatcaaacaactggtggaagaaattaggaaaaaaacaaaaataattcaaagttatattttacgagaagaatcaggcacactttcttcagaggcatctgattttaacaaagttcatttaagtagacggggtggcatcatggcatctttatatacatcccatccagctgacaatggattaacattggagctctctttggaaatcaaccgaaaattacaggctgttttggaggatacgttactaaaaaatattactttgaaggaaaatctacaaacacttggaacagaaatagaacgtcttattaaacaccagcatgaactagaacagaggacaaagaaaacctaaaacaagcctcttgctcagtaaagagacaaaagccacacaggagtaggtgccactgacctctattgttggagactttgttccactttttgtttcagccagtaaaaatattgttttgcttcatctgtacacaaaaaaatacccttttacaatatgaatgcattgctgtatatactgtaagactgaaagctttgatgaaatttgtttttgtatggtgcaatatgacagcctgtcattgaatctaaacaacttaatttgcttgtattcataagaagtgttgaacattacaagggcttttataaaaaaccctttgttcatatttcttccctttaaaatatgtaatgtcaaaaatgactcaccttttaaaaattatgcatgaaaacaggtggtaaacattcagtaatacgctatttctccaacatcaagacaactaaaacaaatgataaaaatgtttatttttacactccagcatatcgggtgagttttagggatgtgtatgaatatttaaatcttttaatttcagttttaatgaaagctgaacttaataggaaagctagctcttggtaactagcaatgatcaggcattgtttgcctctgtcaggttttcttatctgttttaggtacattttttcagattctgattgtttgagttaatggttgaatttttaaagtttttagttacttaaaatatgattttaaattacatattaatttagaaaattcctgtgtttacttatattttaaattgtgaaatggatccaatcattagaacagagagaatagttctttgaaactgaaatactttagttttactgaccttgtgtaaagataaatatttatgaagaaccagcttccaaaagaaaccagcatatggcactataaactatttcatttgagcaccattctttaccatggatatattaattatgtattatagtggagtgatcatacagttcccccaaatgtgatgtttcagtgtatttatttaaaacataaagtagaccaggtgcagtagctcacgcctgtaatcccagcactttgggaagccaaggcaggaggattacctgaggccaggagtttaagaccagccttggcaacatagcgagacccccatctctacaaagaaattttaaaagattatccaggcatggtggtgcatgcctatggttccagctactcgggaggctgaagcggtagaatcacttgagcacaggaggtcaaggctgcaggtgagccatgatcgtgtcactgcactccagcctaggcaacagagcaagaccctgtctcttaaaacaaaaaacctcacacatacctaaaataagtatatatctgtaaccaaaggaacttaattttagagccaaatttttctatcttgttggattttttacaatgtttaagatagacacttaagtgttgccgtagtatcaatatttctgtcattgaattttttctcaccccttattatttctcacttacaatttctgagcatgatttttcataattcattatcttcagatcattactataataagataccgtggctcttatgcagatattgcagcaagccttgtttggtttggatttttgcatccctttttctcccattaagggaattaagttttgggatgatggattaaaagcctgtaaagaattgtttgggctctaaaagttnnnnnnnnnnnnnnnnnntccttttaatgtgttttaacattttttaatcaacatcgtttaaaaataatttactaaggattagattatttaatgaatgtctttttttctatatattgaattagatgttatcccaaaaaaaatatcttttcacttcaaaatgaaaatatatgttcaaagatgttttatttttagaatagttataaaaagtattagtcttaacataatgtgtcttgttctttttaccaataataatttatcaaaataagagggaaagtgcaatcaaatctgaattattttactatttgtttctagacacactacttaacactcctaaagactactttgagtaggcaacataactaaatttttctagtttcttatgatacaggttcataaactacaatatttggatttttttccccaaggcacaaaatgtataatggagaccaaatagtgatctgatccatagtatcctatgcctatacactttaaaatgtatatacattttagacaaaaatgcacactccagtattaatatttgtgctaccatctacttggagaagtttaatgagaaaattttagaagaaaagtattacaaacaatattttgactctattacctgttttgccttatacattttagaaactggaaattttttaaagaaaatgctttagttttcttctgttcttcactgtctacagtgtgcttttgtatatggatcaggactgagcaaagtaattacatgtatcagagatacttatctctatactaattcacagacagctcctgatgtaaggatttagagggccttctgccctctgaatatatggtgaggagaatggggtatctggaaaaggaaaatgatctggattaatctgagacctggggggaagtttgttttatatgttcattattggttgttacatatcaaggctgttttggttatgtatcaatattgtggtttatttgagctggaagtgattttttctgtgtatgtatatgtatacacttcaataggttttaattttgaagtgaatatttgccatgactccattttccccataccacttcagactttagcctgtttagttttaaggactgaaaatggtaggtttgggcagaagaatgaatttgaactttgatggggtttttttgtttttactttctatcttcataaccatttaaagcgatttagcttgaaattaaattttatcaggctaccaacatgttatttatttatttaataaacacatttattgaaaacctatactattgtattggcaccatacagggtattgtatttatactagtgagcagaccagggcatttccatcctcatggagttcatggtctaatgaaaatagctggggccgggtgtggtggctcacccctgtaatcccagcactttgggaggctgaggtgggaggattgtttgagcccaggagtttgagaccagccagggcaacatggcaaaaccccatgtgtacaaaagattaaaaaattagccagatgcagtggcacatggctggggtcccagctacccaggaggctgagttgggaggatcatctgagcctgggaggttgaagcttgcagtgagctatgattgccactgtactctatactccagcctgggtgacagagtgaaaccctgtctcaaaaaaaaaaagaggaaagaaaatagctaggagacaatcagagcagatcttgggcttctgtggctcatctcagccctttataactggcctgagaagagggtttatctacttgtgcaagtggcccagaaatctcactcgtacatgaggctttggaacatccttgcaaaggtacgctgaaagcaaattgctgttttcctggtggttctgcacgtttcctaacttttatcatagtttgattttcattatttaagaaaaaataaaaaatccaaagaccataagatggcattagattttttaccattaaattattaatgcctatttggtgctcataaagattaatcatgtcacgcatgtttccaatctttcttttgcagtatattattttctaaaaattgttacatgcaaatttaaaccaagatttatcagtaaaagaaaaaaatagaatccttaataatgtaaatgttgttatatatgctaccctggtgaaaatatttttataaatcatgttgtcatttatgctttatgtagcctatttttcaataacctttttttaaaagcaattttttttgacaccaagattgttgatttttaattaacaccagttggtggcactagaaacctgaaatttttcaaagatgaacaaagaaaaattgaaaaggtaatctaaacatggagaatttttaggaaaataaatgaaaaatataattgtatattagagatgtatttttcttctggaatggaattctttttctaaaatgcaaatcgctatccattttgactgcaatgatgaaacttgtttatcttccagaggacatatatatatgtgtgtgtgtgtgtattgtacagatacctttaatttgattacactgtttcttgtaaatatgtttctgtataaaatgaaacttttcaagaggattctatgtatatattgtacttattaaataggtaatgcctatttaccaaaaaaaaaaaaaaaaaaaaa

SEQ ID NO: 6737 - DNA, 6046 bp, Homo sapiens
  misc_feature (5816)..(6043): n is a, c, g, or t
gcggccgccacccccttccccgctgccagcactcaccctctctccgctcctgctcgcaacctcgcggttcctggggtgcttgtgcccactgtgtggacagcgcgggcggacttttgggccggggccgggcggcgggggaggctctctaaggcctccgcctctgcctctcccgcccccttacccgccccggagcgggaagcggcggaggctccgccatggcctcgggagccggaggagtcggagggggcggtggcggcaagatccggacgcggcgttgccaccaggggccaattaagccttaccagcaggggcgacaacagcatcagggcattcttagcagggttacagaatctgttaagaatattgtgccagggtggctacaaagatacttcaacaagaatgaagatgtatgcagctgttcaacagacacaagcgaggttccacgctggccagaaaataaagaggaccatctggtatatgccgatgaggagagctctaatattactgatgggagaatcacacctgagccagcagtcagtaatacagaagaaccttcaacaactagtactgcttcaaattatccagatgtgttaacaaggccttctcttcatcggagccatctgaatttttccatgttggaatcccctgcattacactgtcagccatctacatcctcggcattcccaattggcagttcgggattttcccttgtaaaggaaattaaagattctacctctcagcatgatgatgataacatctcaactaccagtggtttttcttcaagagcttctgataaagatataactgtttcaaagaacacttcattgccacctctgtggtccccagaagctgaacgttctcactcactctcacagcacactgccaccagctcaaaaaaaccagcattcaacttgtctgcctttggaacactttccccttcacttgggaattcttcaatccttaaaaccagtcagcttggagattctcctttttatcctggaaaaacaacatacggtggggcagcagctgctgtaagacagtctaaactacgaaatacaccttatcaggcaccagttagaagacaaatgaaagctaagcaactcagtgcacaatcttacggtgtgaccagttcaacagctcggcgaatattgcagtctttagagaagatgtcaagccctttagcggatgcaaaaagaattccatccattgtttcttctcctctgaattctcctcttgataggagtgggatagatatcacagattttcaggccaaaagagaaaaggtggattctcaatatcctcctgttcagagacttatgaccccaaagccagtttccatagcaacaaatcgaagtgtttattttaaaccatctctgactccttctggtgaattcaggaagactaatcaaagaatagataacaagtgcagtactggatatgaaaaaaatatgacacccggacaaaatagagaacaacgagaaagtggcttttcatatccaaatttcagtttgcctgcagccaatggtttatcttctggagtaggtggtggaggtggcaagatgagacgagaaagaacacgctttgttgcttctaaacctctggaggaggaggaaatggaagttccagtattaccgaaaatctctctaccgatcaccagttcttcactgcctacctttaattttagttcccctgagatcacaacttcctctccatcacccatcaattcgtctcaagcattaacaaacaaggtacaaatgacctctccgagcagcactggcagtcccatgtttaaattttcatctccaatcgtaaaatctactgaggcaaatgtactacctccatcatctattggatttacatttagtgtgcctgttgcaaaaacagcagaactttctggttctagtagtactttagaaccaattataagtagttcagctcatcatgtcactacagtgaacagtacaaattgtaagaagacaccacctgaagattgtgagggtccttttagacctgcagaaatcctgaaagaaggaagtgttctagatattctgaaaagccctggtttcgcatcgccgaagatagattctgttgctgctcagcccaccgcaacaagcccagtagtttatacaagaccagcaataagtagcttttcttctagtggaattgggtttggggagagtttaaaagctgggtcatcatggcagtgtgatacatgtctactccagaacaaagttacagacaacaaatgcatagcctgtcaagcagcaaaattgtcacccagagatactgctaaacagactggaattgaaacaccaaataaaagtggcaaaacaactctttctgcatcagggacaggctttggagacaaatttaaaccagtgataggcacttgggattgtgatacctgtttagtgcaaaataaacctgaagcaataaaatgtgtagcctgtgaaacaccgaaacctggaacttgtgtgaagcgagcccttacattgacagtggtttcggaaagtgctgagactatgactgcttcatcttccagctgcactgtaaccactggtaccttaggatttggagataaattcaaaaggcccattggatcttgggagtgttcagtatgctgtgtttctaataatgcagaagacaataagtgtgtgtcctgtatgtctgagaaaccaggaagttcagtacctgcttcaagtagcagcactgtacctgtctctctgccttctggaggctctctaggattggaaaagttcaagaaacccgagggaagctgggactgtgaattgtgcctagtgcagaataaggcagactctaccaaatgtttggcatgtgaaagtgcaaagccaggcacaaaatctgggtttaaaggctttgacacatcttcctcatcttcgaactcagcagcctcctcatccttcaaatttggtgtctcatcatcctcttctgggccttctcagactttaacaagcactggaaattttaaatttggagatcagggaggattcaaaataggtgtgtcatctgattctgggtctataaaccccatgagtgaaggctttaaattttctaaaccaataggagattttaaatttggagtttcatctgaatctaagcccgaagaagttaaaaaagatagtaagaatgataattttaagtttggactttcttctggtttaagcaacccagtttctttaactccatttcaatttggggtatctaatcttggacaggaagaaaagaaagaggaactgcccaaatcttcctctgcaggttttagctttggtacaggtgttattaactccacccctgctcctgctaacaccatagtgacctctgagaacaagagcagcttcaaccttggaaccatagaaaccaagagtgcttcagtggctcctttcacatgtaagacatcagaagctaaaaaagaagaaatgcctgccaccaaaggaggattctcttttggcaacgtggagcctgcctctctgccatctgcctcagtgtttgttttgggaaggacagaagagaaacagcaagagcctgtcacttctacttccctagtttttgggaagaaagctgacaatgaagagccaaagtgtcaaccagtgttttcctttgggaattcagagcaaaccaaagatgagaattcttcaaagtccacatttagttttagtatgacaaaaccatctgagaaggaatctgaacagccagcaaaagccacttttgcctttggagctcaaactagtactacagctgatcaaggtgcagcaaagccagtttttagtttcttgaacaacagttcctctagttcaagtacaccagccacttctgctggtggtggcatatttggtagttccacctcttcctccaatccacctgtggctacctttgtgtttggacagtccagcaatcctgtgagcagctctgcctttggtaacactgctgaatccagcacctctcagtctttgctattttctcaagatagcaaactagcaaccacatccagcacaggtacagctgtcaccccatttgtctttggtccaggagccagcagtaataatactaccacctctggtttcggctttggagccacaaccacatctagctctgcaggatcctcctttgtatttggaactggaccctcagcaccatctgccagtccagcatttggtgctaaccagaccccaacatttggacaaagtcaaggtgccagccagcccaatcccccaggctttggatctatatcatcttccacagcattatttcccactggttctcagcctgcaccacctacttttgggacagtgtcaagcagtagccagccccctgtgtttggacagcaacctagtcagtctgcatttggctctggaacaactcctaattctagttcggctttccagtttggcagcagcactacaaatttcaacttcacaaacaacagtccatcaggagtgttcacatttggtgcaaattctagcacacctgcagcctcagcccagccttcaggctcggggggctttccatttaaccagtctccagcagcatttacagtggggtcaaatgggaaaaatgtgttctcttcttctggaacttcattctctggtcgcaagataaagactgctgttagacgcaggaaataaaggtcacattggtgttgtactcaattttaacaaccagctggtgccctgtttcagatactgattgtacttgtgctggggttatctgaagtcagatctgcctaaggacttctttaattttggaattttcctcctttctctttcgttacagaagccccaccctgcctcacccacccttttttaaataaataaatagctagactggtgactgattcttcagcaaaaatattttatgatccagcagattattcactgatttgacatagtctggctgtacccaggaatggagcctgcacggtgaatggctttgtatagaacctctttgtctacaccattatgtgcgctgataagcgttcatggaacgcgttgaaattgtaattatatctgaggaattctgtatagattagaattctgtatagattagagagtgttgaaacggatgatttctatgctgagtttgtgctggtgtatgtgtgaagtgagtgagttgggtgtattgtgcgctaaacttttctgataaaggaagaccctgattaaagaatggtccgtgctaaggacttgttagatctagttcactctccatttaataattatatgctatttctatattttcattctcctatcacctgtcttgcctttttcattattttattatgaaacttgtgtaaatacaattttgtttctgtactttttggcataacataaatctgtgaacttgaaatttgaattttgtgttagagatttttttgttgtttgtttagtcttgtctcagattttattatgtaaatcccattattcaaagttgcctaaatccatttggaaatctttaaaaaaaaaattggggattcttaaagttgaatttattggcttttctgatccagttttgtttggaccaaaaaccagtattgtacaaagtattaagcatatatttttatatttactaaaatggactgtggtgactttggataataaggaaaagtttaatattaaagccatgtttattacagtataattaacatgttaaaccatgggataaatgccatcaataaaaaattatgacataaaaaaaaaaaaaaaaaaaaaaaaaaaaaaaaaaaaaaaaaagaaaaagcatgtaaaacagcacaaaaacgacaaactaaaaaatacagcgcaaacacaatccaagccacacgnnnnnnnnnnnnnnnnnnnnnnnnnnnnnnnnnnnnnnnnnnnnnnnnnnnnnnnnnnnnnnnnnnnnnnnnnnnnnnnnnnnnnnnnnnnnnnnnnnnnnnnnnnnnnnnnnnnnnnnnnnnnnnnnnnnnnnnnnnnnnnnnnnnnnnnnnnnnnnnnnnnnnnnnnnnnnnnnnnnnnnnnnnnnnnnnnnnnnnnnnnnnnnnnnnnnnnnnnnnnnnnnnnnnggt

SEQ ID NO: 6738 - DNA, 1342 bp, Homo sapiens
gaattccggggatgctgccccatgcagccctgagccccatagcaagtctgccatgggccgcggggcccgtgtcccctcggaggccccgggggcaggcgtcgagcgccgctggcttggagccgcgctggtcgccctgtgcctcctccccgcgctggtgctgctggcccggctgggggccccggcggtgccggcctggagcgcagcgcagggagacgtcgctgcgctgggcctctcggcggtcccccccacccgggtcccgggcccactggccccccgcagacgccgctacacgctgactccagccaggctgcgctgggaccacttcaacctcacctacaggatcctctccttcccgcggaacctgctgagcccgcgggagacgcggcgggccctagctgccgccttccgcatgtggagcgacgtgtcccccttcagcttccgcgaggtggcccccgagcagcccagcgacctccggataggtgggcgcccgcccccgccccggcccggccctgcgcgcccggcctctcagccccgtgctccccccaggcttctacccgatcaaccacacggactgcctggtctccgcgctgcaccactgcttcgacggccccacgggggagctggcccacgccttcttccccccgcacggcggcatccacttcgacgacagcgagtactgggtcctgggccccacgcgctacagctggaagaaaggcgtgtggctcacggacctggtgcacgtggcggcccacgagatcggccacgcgctgggcctgatgcactcacaacacggccgggcgctcatgcacctgaacgccacgctgcgcggctggaaggcgttgtcccaggacgagctgtgggggctgcaccggctctacggatgcctcgacaggctgttcgtgtgcgcgtcctgggcgcggaggggcttctgcgacgctcgccggcggctcatgaagaggctctgccccagcagctgcgacttctgctacgaattccccttccccacggtggccaccaccccaccgccccccaggaccaaaaccaggctggtgcccgagggcaggaacgtgaccttccgctgcggccagaagatcctccacaagaaagggaaagtgtactggtacaaggaccaggagcccctggagttctcctaccccggctacctggccctgggcgaggcgcacctgagcatcatcgccaacgccgtcaatgagggcacctacacctgcgtggtgcgccgccagcagcgcgtgctgaccacctactcctggcgagtccgtgtgcggggctgagcccggctgataaagcactttctctctgaaaaaaaaaaaaaaaaaaaaaa

SEQ ID NO: 6739 - DNA, 3681 bp, Homo sapiens
  misc_feature (1682)..(1699): n is a, c, g, or t
  misc_feature (2699)..(2699): n is a, c, g, or t
  misc_feature (2710)..(2710): n is a, c, g, or t
  misc_feature (2712)..(2712): n is a, c, g, or t
  misc_feature (2720)..(2720): n is a, c, g, or t
acgcgtgggcccacgcgtccggcgggagcccgcggcgagcgtagcgcaagtccgctccctaggcatcgctgcgctggcagcgattcgctgtctcttgtgagtcaggggacaacgcttcggggcaactgtgagtgcgcgtgtgggggacctcgattctcttcagatctcgaggattcggtccggggacgtctcctgatcccctactaaagcgcctgctaactttgaaaaggagcactgtgtcctgcaaagtttgacacataaaggataggaaaagagaggagagaaaagcaactgagttgaaggagaaggagctgatgcgggcctcctgatcaattaagaggagagttaaaccgccgagatcccggcgggaccaaggaggtgcggggcaagaaggaacggaagcggtgcgatccacagggctgggttttcttgcaccttgggtcacgcctccttggcgagaaagcgcctcgcatttgattgcttccagttattgcagaacttcctgtcctggtggagaagcgggtctcgcttgggttccgctaatttctgtcctgaggcgtgagactgagttcatagggtcctgggtccccgaaccaggaagggttgagggaacacaatctgcaagcccccgcgacccaagtgaggggccccgtgttggggtcctccctccctttgcattcccacccctccgggctttgcgtcttcctggggaccccctcgccgggagatggccgcgttgatgcggagcaaggattcgtcctgctgcctgctcctactggccgcggtgctgatggtggagagctcacagatcggcagttcgcgggccaaactcaactccatcaagtcctctctgggcggggagacgcctggtcaggccgccaatcgatctgcgggcatgtaccaaggactggcattcggcggcagtaagaagggcaaaaacctggggcaggcctacccttgtagcagtgataaggagtgtgaagttgggaggtattgccacagtccccaccaaggatcatcggcctgcatggtgtgtcggagaaaaaagaagcgctgccaccgagatggcatgtgctgccccagtacccgctgcaataatggcatctgtatcccagttactgaaagcatcttaacccctcacatcccggctctggatggtactcggcacagagatcgaaaccacggtcattactcaaaccatgacttgggatggcagaatctaggaagaccacacactaagatgtcacatataaaagggcatgaaggagacccctgcctacgatcatcagactgcattgaagggttttgctgtgctcgtcatttctggaccaaaatctgcaaaccagtgctccatcagggggaagtctgtaccaaacaacgcaagaagggttctcatgggctggaaattttccagcgttgcgactgtgcgaagggcctgtcttgcaaagtatggaaagatgccacctactcctccaaagccagactccatgtgtgtcagaaaatttgatcaccattgaggaacatcatcaattgcagactgtgaagttgtgtatttaatgcattatagcatggtggaaaataaggttcagatgcagaagaatggctaaaataagaaacgtgataagaatatagatgatcacaaaaagggagaaagaaaacatgaactgaatagattagaatgnnnnnnnnnnnnnnnnnngccagtgtttccattatgcaacttgtctatgtaaataatgtacacatttgtggaaaatgctattattaagagaacaagcacacagtggaaattactgatgagtagcatgtgactttccaagagtttaggttgtgctggaggagaggtttccttcagattgctgattgcttatacaaataacctacatgccagatttctattcaacgttagagtttaacaaaatactcctagaataacttgttatacaataggttctaaaaataaaattgctaaacaagaaatgaaaacatggagcattgttaatttacaacagaaaattaccttttgatttgtaacactacttctgctgttcaatcaagagtcttggtagataagaaaaaaatcagtcaatatttccaaataattgcaaaataatggccagttgtttaggaaggcctttaggaagacaaataaataacaaacaaacagccacaaatacttttttttcaaaattttagttttacctgtaattaataagaactgatacaagacaaaaacagttccttcagattctacggaatgacagtatatctctctttatcctatgtgattcctgctctgaatgcattatattttccaaagtatacccataaattgtgactagtaaaatacttacacagagcagaattttcacagatggcaaaaaaatttaaagatgtccaatatatgtgggaaaagagctaacagagagatcattatttcttaaagattggccataacctgtattttgatagaattagattggtaaatacatgtattcatacatactctgtggtaatagagacttgagctggatctgtactgcactggagtaagcaagaaaattgggaaaactttttcgtttgttcaggttttggcaacacatagatcatatgtctgaggcacaagttggctgttcatctttgaaaccaggggatgcacagtctaaatgaatatctgcatgggatttgctatcataatntttcctatgcngntgaattcngtgtgaggtcctgtgtccgtcctatcctcaaattatttattttatagtgctgagatcctcaaataatctcaatttcggaggtttcacaaaatggactcctgaagtagacagagtagtgaggtttcattgccctctataagcttctgactagccaatggcatcatccaattttcttcccaaacctctgcagcatctgctttattgccaaagggctagtttcggttttctgccagccattgcggttaaaaaatataagtaggataacttgtaaaacctgcatattgctaatctatagacaccacagtttctaaattctttgaaaccactttactactttttttaaacttaactcagttctaaatactttgtctggagcacaaaacaataaaaggttatcttatagttgtgactttaaacttttgtagaccacaattcactttttagttttcttttacttaaatcccatctgcagtctcaaatttaagttctcccagtagagattgagtttgagcctgtatatctattaaaaatttcaacttcccacatatatttactaagatgattaagacttacattttctgcacaggtctgcaaaaacaaaaattataaactagtccatccaagaaccaaagtttgtataaacaggttgctataagcttggtgaaatgaaaatggaacatttcaatcaaacatttcctatataacaattattatatttacaatttggtttctgcaatatttttcttatgtccacccttttaaaaattattatttgaagtaatttatttacaggaaatgttaatgagatgtattttcttatagagatatttcttacagaaagctttgtagcagaatatatttgcagctattgactttgtaatttaggaaaaatgtataataagataaaatctattaaatttttctcctctaaaaactgaaaaaaaaaaaaaaaaaaaaaaaa

SEQ ID NO: 6740 - DNA, 1485 bp, Homo sapiens
  misc_feature (7)..(9): n is a, c, g, or t
  misc_feature (98)..(105): n is a, c, g, or t
caggcgnnngcctgacaggcaggtagggctaggctgtgcatccctccgctcgcattgcacggagatggctcagcgacttcttctgaggaggttcctgnnnnnnnnctgtcatctccaggaagccctctcagggtcagtggccacccctcacttccagagccctgcagaccccacaatgcagtcctggtggcctgactgtaacacccaacccagcccggacaatatacaccacgaggatctccttgacaacctttaatatccaggatggacctgactttcaagaccgagtggtcaacagtgagacaccagtggttgtggatttccacgcacagtggtgtggaccctgcaagatcctggggccgaggttagagaagatggtggccaagcagcacgggaaggtggtgatggccaaggtggatattgatgaccacacagacctcgccattgagtatgaggtgtcagcggtgcccactgtgctggccatgaagaatggggacgtggtggacaagtttgtgggcatcaaggatgaggatcagttggaggccttcctgaagaagctgattggctgacaagcagggatgagtcctggttcccttgcccgcgtgggaccccaatagaactcagcccttccatgccagcccttcctgctgcctccctcctgtctggctcctggggcccatgcttagagcccaggctccagccctgagtgcttccgagctggcggactgcccaggggccatcagaggatggtggtgctgctgctgatccggggaccgctgtcttccctcccatacgcctttcatccctccttctagggcctatggcagttctcccaggatgtgtggcgagagcctgggccagcccacagcgttcctagtcaggcagccacaccttggtcctcatcttggtcccttccaatctgaaacctcgtgcctggctcgtctgccacctacatttctctttccagctgctgttttgtaaaaagaaaaagaaaaaagaagcccaaactaaaaaaaaaaaaaactaattatctcattttttgtaggtctgtgataaagaacttagtcatcccttccacctcctactgtgaagaacagaccctgggtcccacactgaaatcccctctagtcacccattcccaccccccagggagctgcctcccaggcagggggtgcagaaaattgattgatgggctggggaaccctggagagcctcgactccggaagtctcaaggtgcctcctcctctccttagctggcccgttggttttctgagcagggggctgaactgtgaacaagtcagacaaataaagcaagggtctgcaccatccaaaacccaaaaaaaaaaaaacccccaggcaccttcgtcggggccgagaaacaaggcccccagatggcccatgcgacacacctggttccgccgcccccctttcctggacacaagggggtaaaccgcccgggcttcactatcaaggcgcccccaccac

SEQ ID NO: 6741 - DNA, 3151 bp, Homo sapiens
  misc_feature (2497)..(2498): n is a, c, g, or t
  misc_feature (2502)..(2520): n is a, c, g, or t
aagtagcacggattgctcatccgatccgtgccgccgcagggagtgtgtcaagttacagaggcgccggaatcggcccctgcgctcctcgccagccgccacgacccacctctgcccatggggccctccgtgtgcgccccttcgcccggggactgaaactgactggcccgggagacacgaggcgcccagaaggactgacagcgcggcaccaactgctctgcagacacttgaagggaaagactgggcggagagaaggagagccggtcagattcccctaactttcctggacttggaacgttcttcgaaataacttttttctcacctaggtgtaccccaattaccgctggttgtgctttttcggcacttcctctcctactgctaatttttccgtcctctttgccgggagcagcggaaagggacgttttccagcgatacaagccctttccccctgccccgcagtttggatagagccttttggcagcggctgtcgcctttatttattctatttatttatttattggttctcaagacgcgagaggatggtagcggagcgcacccacaaagcggcagccaccggtgcccgcggccctggggagttgggcgcgcccgggacggtggctctggtggcggcgcgggcggagcgcggcgcacggctgccgagtccagggtcgtgcgggctgctgacgctggccctctgctcgctggcactcagcctgctcgcccactttcggacggccgagctgcaggcccgggtgctgcgcctggaagcggagcgcggggagcagcaaatggagacggctattttgggacgagtcaatcaactgctggacgagaaatggaagctccactcaaggaggcgccgggaggccccaaagacatctccaggatgtaactgcccaccagcatttcagggtcccactggaagacccggactcccaggggacaaaggtgccattgggatgcctggacgtgtggggtcccccggagacgctgggctgtccatcattggtccccgcggcccccctggtcaaccaggaactagaggtttccctggatttccgggtcccattgggctggacggcaaaccgggccacccaggaccaaagggcgacatgggtctgacgggtcccccaggacagccgggaccccagggacaaaaaggagaaaagggtcagtgtggagagtacccacaccgggagtgcctaagcagcatgccagcagctctgcgctccagccaaataattgccctgaagctgctgcctctcctcaattcagtgcgactggctccacccccggtcataaaaaggcggacgttccagggcgaacagagccaggccagcatccaaggtccaccagggcccccaggcccccctggaccaagtggacctctggggcacccaggactgccagggcctatggggccacctggcttacctgggcctcctggaccaaagggagacccagggatccagggctaccacggccggaagggagaacggggcatgccagggatgccaggcaagcatggagccaagggggcgcccggaattgccgtggctgggatgaagggtgagccagggatcccaggaaccaagggtgagaagggggctgaaggctcccctgggcttcctggcctcctggggcagaagggagagaaaggcgatgctggcaactccattggaggaggcagaggggaacctggccctccagggctccctgggcccccagggccaaagggagaagcaggtgtcgatggccaggttggccccccagggcagccaggagacaagggggagcgtggagcagctggagaacagggaccagatggccccaagggctccaagggagaaccagggaaaggagagatggtggattacaatggaaacatcaatgaggctctccaggagatccggacgctggccttgatggggcctcctggtcttcctgggcaaattggcccacctggagctccagggattccaggccagaagggggagattggactgccaggccctccaggacacgatggggaaaagggacctcgcggtaaaccaggagacatgggccctcctggtccccaaggccccccaggaaaggatggacctccaggagtgaagggagaaaacgggcacccagggagcccaggagagaagggggaaaaaggggagacaggacaagcaggctcaccgggagagaaaggagaagccggggagaagggcaatccaggagcagaggttcctgggctgccagggccagaggggcctcccggacctccggggctccaaggtgttcctggaccaaagggggaagcaggactagatggagcaaaaggagagaaaggcttccagggagaaaaaggagaccgtggtcccctgggactacccggagcttcaggtttggacggcaggcctgggccaccgggtactccaggaccaattggagttccaggcccagcgggaccaaagggcgagaggggcagcaaaggagaccctgggatgannggannnnnnnnnnnnnnnnnnnttcctggtttacatggaccacccggggacaagggaaaccggggggagagggggaagaaaggctctagagggcctaaaggggataagggagaccaaggagcgcctggattagatgccccctgcccattgggcgaagatggcttaccagtccaaggctgctggaacaagtgatgcctctaaccttggattggcctgtgtgtgtgtttgtacatagaatatttatttttatacagttttcactttttgaaaatgccagaagtatgatgcatcttacagattattaaaaaagaaagaaaaacctgcatattttgtacagaaaatatcaacctcttcccttttgtttacaagatgttttgtataagcctatgtctctaatacattttttgtttggtcgtaatgtctgcatgatatttgtgcacatttattaagtatcgaagcttaataaattattgtgtcctggtgccaaagggggccagccagaactgaggtgctggctagctcatgtgtgaattcacataaatgtagaggtccatgatatttgctaagctaggtgtgtctaagagtattttaaacccttatggattttcattattaaaggaaatgaaacatggcaattcaaaaaaaaaaaaaaa

SEQ ID NO: 6742 - DNA, 2538 bp, Homo sapiens
ctggttcggcccacctctgaaggttccagaatcgatagtgaattcgtggaagagaccatatttgttcgcagaggaagccgttgctttctgggatctggctacggcagaaaagacatcggctccaacaggagtgtccacagggtagctggcgggttggaagagccaagaacgcctccgagctctggatttgagcttctctgcccatgggtgaagcgcccatgctcagcttgtgagcttcttcccgggagagcagccatggcactgaggaatgtgccctttcgctcagaggtcctgggctgggaccccgacagccttgctgactatttcaagaagctcaactataaggactgtgagaaggcagtgaagaagtaccacatcgatggggctcgcttcttgaacctgacagaaaatgacatccagaagttccccaagctccgggtgccgattctcagtaagttaagtcaggaaatcaacaagaacgaagagaggaggagcatcttcacacgcaaaccccaagtcccgcggtttcctgaagagacagaaagccacgaagaggacaatgggggttggtcgtcctttgaagaagacgattatgaaagtcccactgatgaccaggatggggaggatgatggagactatgagtcccccaatgaggaggaagaggcacccgtggaagatgacgcggattatgagccgccaccctccaatgacgaggaagctctgcagaactccatcctgcctgccaagcctttccccaactccaactccatgtacatcgaccggcccccctctgggaaaaccccccagcagcctcctgtgcccccccagagaccgatggccgccctcccgcccccaccagccggccggaatcactcgccactgcccccaccccagaccaaccacgaagaacccagcagaagcagaaaccacaaaacggcaaagctccctgctccttcaatagacagaagcacgaaacctcccctagatcgttcattagctccgtttgatagagaacccttcacactaggaaagaaaccaccattttctgacaagccctcgattccagcgggaaggtcactcggggagcatttacccaagattcaaaagcctcctttaccaccgaccacggaaagacatgaaaggagcagccccctgccagggaagaagccacctgtgccaaagcatggatggggaccagacagaagagagaatgatgaagatgatgtgcatcagagacctttgccccagccagcactacttcctatgagctccaacactttcccttcaagatctactaagccaagtcccatgaaccctctcccatcctctcacatgcctggagcattctcagaaagtaacagcagttttccacagagtgcctccctgccaccatacttctctcaaggccctagcaacagaccacctatcagagccgaaggcagaaacttccccttgccacttccaaacaaacctcggcccccatcccccgcggaggaagagaattcattaaatgaagagtggtacgtttcttatattacccgaccagaggcagaagctgctcttagaaagataaacagggatggcacatttctggtcagagacagctctaaaaaaacaacaaccaatccatatgtcctcatggtgttgtacaaagataaagtttacaacatccagatccgttatcagaaggaaagtcaagtttacttgttgggaactggactccgagggaaagaggactttctgtctgtgtcagatattattgactacttcaggaaaatgccacttctgctcattgatgggaaaaaccgaggttccagataccagtgcacattaacgcatgctgcagggtacccatagcaagttatagccgagcaaatgaaccgtcctcctgcctctgttgccaacacgagatcaatcagccttggtcaatggacaaacacttaggactgaactgaacccctccccatgaacacaagggttttatcctttcctttaaaaacagtgtttgaaatgaagactgtcaactatcccataatttatttattcttcttcaatgtttgtaaagtgcatgagtcatgttcacacttgaagtctagtagtgcactgtaataattcattttttaaaagattatttaatgcccatttcaaaatacagtagtttacacagctacagaaacaatttggggcaagttttaaaacactgaaacagtaatagttattggtgtcacataaaactgatttgttttttacagccaaacctctgtcagtcagaggcattcattagttttatacatgtaatttgaaaatcactaaacctcgttttctcagcagcaataatttaagaggcttcaaaaatataatttcactcttatttagtattttttcctgggggcatttttacgtaatttttttatgaaaagacaaatgcatgttgagataacttctgggattaaaatagtcttttgctttaaaaaaaaaaaaaaaaaaaaaaaaaaaaaaaaaaaaaaaaaaaaaaaaaaaaaaaaaaaaaaaaaaaaa

SEQ ID NO: 6743 - DNA, 4123 bp, Homo sapiens
  misc_feature (1122)..(1136): n is a, c, g, or t
ggccggcggcaagtgacccaccgcggcggggccggcggcccagaaatagcagcggcggcggttccgcccgcgggcggcgcgagcgaggggcagaggcgagagacgccggcggggcgcgggcgcggcggccccggaggatgctgctgagccccggcactgcctggctgcgagcacatgatggcgatacgggagctcaaagtgtgccttctcggggacactggggttgggaaatcaagcatcgtgtgtcgatttgtccaggatcactttgaccacaacatcagccctactattggggcatcttttatgaccaaaactgtgccttgtggaaatgaacttcacaagttcctcatctgggacactgctggtcaggaacggtttcattcattggctcccatgtactatcgaggctcagctgcagctgttatcgtgtatgatattaccaagcaggattcattttataccttgaagaaatgggtcaaggagctgaaagaacatggtccagaaaacattgtaatggccatcgctggaaacaagtgcgacctctcagatattagggaggttcccctgaaggatgctaaggaatacgctgaatccataggtgccatcgtggttgagacaagtgcaaaaaatgctattaatatcgaagagctctttcaaggaatcagccgccagatcccacccttggacccccatgaaaatggaaacaatggaacaatcaaagttgagaagccaaccatgcaagccagccgccggtgctgttgacccaagggccgtggtccacggtacttgaagaagccagagcccacatcctgtgcactgctgaaggaccctacgctcggtggcctggcacctcactttgagaagagtgagcacactggctttgcatcctggaagacctgcagggggcggggcaggaaatgtacctgaaaaggattttagaaaaccctgggaaaacccaccacaccaccacaaaatggcctttagtgtatgaaatgcacatggaggggatgtagttgcatttttgctaaaaaaaaaaaaaaaaataaaaatccagggactcctatgtccgggggggcggaaaaaaaaggtattggaaatggccccaggggccccaagccgggnnnnnnnnnnnnnnnctatcccaaattcccagtaactacttcagtgtcattgcctttgttacctaaccaaccttcactgaaaggcaaatttagttcaggaggttagtttttagctagctttggaagtaagcctttatttattactttttggaggaaatcagagaagtgtcaatggaccgtcactcagactgagacttgagttattacagaagccaggaaaagtgtattagaaactgttgtctacaccacttttaattggtgaacaatttttctaagttatggtcatatatacccaaacaaaccaaatcaaactaaattactgcatataattttgggattgggtggcctagtttgaaagagtgatttaagtaatcactatgtaagtggtgagagatgcaggacatacacattattcaagagaccacctgacatgcatctcctccgcaggaatacattcgtcctctcttagagaagtttaacgcacatagtattattttactaagagaatatctcttggtgtcatatctaggggaagagaattaactagaattaaatttaatgtttgaatctaaatcattgggcaaacttctaataataacaattaataataggttacaggaaagccagccagaggaagtgtcagcactttaaaattctagaccccaaaaaactacaaaatcagaaaaagtatttttatgtttctagcttgaggagaagggctttagggctaaccagaggtctgaccctagaatgccaaggaactgagaatgggctccgatgaaaaccttccttttcagattccctgtctgctcaattaagatgtttgaatccaaaggaagtcaaggaagaaaaagcatggaaaggaagagaactgattcctactgaaaattcaaattctattaccattctaactttcataaaaagttgggatcaagaagcagctgatttcctgccagggcttatattaggggggtgattcttaaaggacattaggattggtgctcagaaatggttaatcatgctgtgtgctagccagggccagctggtaccttctttgccatgagcattcaagggacagctaacctttattgacaatctatattgcaaaagtcaggaaagaggttgtgagctgattggattaaagacctggcacttcagtaactcagcacgcttccacttcactcaacttaagagagttcattgacagtgttaggatgtgaaggctgggaaacacttattttgcttcaagagttccacttggctctcccaaataggtacctcaaaaactgttagcaagcggcatttggatgtcttgacaggggctttgcagggatttttagggttttttccacattgtccacattaatggttggcatgattgtgcttgcaggccaagaaatgatcataccccttgccaaaggtaaaaaaaaaaaaaaaaaaatgagttgaaaattgaagtgacctctttccagctgacttgcaggcttattttgtaacctttcctcatccagttttccctgagaacctgggtttatctctagatagctgttcaggttttttagctgaggggtaagtatcctagctgagagttttgcatctttgggctgggtttgcagtggttgtgttttgcataaaatgtctagtctttgccacagatagtgagctacccactaatgagcccatggttttatttcagaagcacatgagggtgtgaaaccactctgttacctttctgtattgtcttagctattcaagccagtcagaggataatatatatattctcatcagcactcagagtagtcagtgaagagagtaggatcacacttggggcacaccaggattcacataaacattgtatcttctctgtggatgctcaggccttgtctacaatgaggctttacaaccttccttgtttggctcgggattacttcctggctgtctaataattgaaccataaccatgtaatattatgtaaaggcctggaaattactgttgctaaaaaaagtcatgtagtttcatgtagtgtagcatccttggcatcgttttccaaaatttgttccttctcccttttttttttctttcgtgtgtggcatgagtgtgtatctgtgtaaatatgattgtatatgtgttactccgatatgtaatccatttcactggctgagtttggcccctagccatgtgttaatataaagtagggcatgggcttcccaatggaaatctctgagaatgacagtggagttgtgcaagcattttacattgccacataattgacttgccattttatggttaaaaacgggcacattaggcagttgaatatgacgttaccttgcagactaaaaggttgaaggcccgaaactaacttttagctaacaataagggctgtgccccaatggaaactgagttcattttctgagaaaggtttggatgactgaaatatttcctctacagtcaaggactttggcatgcggtggctgaaactgagcttttttgtgtgggctccagttctcactgttctgcaatgctcatggcaagttgaatggtgagctagcttataaattaaagagctctgaactgtattcagaccgactgggtatctagcttactgttttaacatcattgttgaaaccagaccctgtagtccagtggtgctgccctgttgtgcaaactgctcctttttctcgtgtttttgtaaagagcttccatctgggctggacccagttcttgcacatacaagacaccgctgcagtcagctaggacctttccgccatgtattctattctgtagtaaagcatttccatcaacaatgcctaattgtatctgttatttttggtttaacacacactgattcatactaataaatattttcagttttaaaaaaaaaaaaaaaaaaaaaaacattttttgttttttttttttttaaaaaaaaaaaaaaaaaagaaaaaaaaaaaaaaaaaaaaaaaaaaaaaaaaaaaaaaaaaaaaaaaaaaaaaaaaaataaaaaa

SEQ ID NO: 6744 - DNA, 1107 bp, Homo sapiens
gctgctgcagtcacgtgggagcccctttaagtttccatagagaggcctctctggtgtcacatgatggacatgatataatgaaacaacattgtggagaggaaagcattaggggagcccacggctacaaaaacaagtgagtgagaagaggtgggaggaagagaaactacgccacctcccctgcagccgagtgcacgcagcagcctggcgtgacaagtgggcgacgccggggggcagggagccggggtccttggccctggccggggaccccaccgcccaccgcgcggaggacaacttttagccggcagcccagaccagcgcggcacctgtctccggagtctccaccgctcctcccgattcatcccagggaaattctcaagaatacgctctacaaatctacgtgcgcatcattttcacctcgcgtcgcgcccgggaggaaggaacgaggcaaggagctaaagcagcgtgcgttcagccctggggcattttattaatgcttttacgagttagaagagttgggataatttgccatctggagtttctctgccttgctgatctgagctcagacctgccaatttaccagagataattgataacaccctgtaacagctgagaggaaaatggaagaaacggagatacttttagtgaagcagaataaaccactgaacaggaaaaatgaggaagctgtgagtaccagtggaaggaacgagccaggaagagggactggaaccatctcagaagccatgcccctcaggctggaacttgccctgtctcctcgcagatgagctacctcttgtgtttaagaattaagggaagatgagctaggaatcaagaaatacgcagaactgattcctgtcactggcgccaccctgccacttgcccagagctgtggtataaatttttttaataggctgaaataaaaatatgaatagcattttgggtgttaagcattaaattgataaagggctatgagatacacctgctctcaaccatgttaatttttattattggtattaataaattattacttactaacatattaacaagaattgcattgagaaacaaagcatccacaggccaaatcttctgaatttcaaatgtatatattaa

SEQ ID NO: 6745 - DNA, 4951 bp, Homo sapiens
cggacagattccagtctgctgttagatgattattcatccaagttgagccccaaaccaaagagagccaagcacagcctactgtctggagaagagaaagaaaatttgcccagtgactacatggtacccattttctcaggacgtcaaaagcatgtcagtggaattactgatacggaagaagaaagaattaaggaagctgctgcttatatagcccagaggaatcttcttgctagtgaggaaggaatcacaacacctaaacagtccacggcatccaagcagaccacggcatctaagcagtccacggcatccaagcagtccacagcatccaagcagtccacggcatccaggcagtccacggcatccaggcagtctgtggtttccaaacaggccacatccgctcttcaacaggaagaaacttctgaaaagaagtcaaggaaagttgtgattcgaggaaaggcagaacgcctgtccctgaggaaaacattagaagaaaccgagacatatcatgccaagctgaatgaagaccatcttctccatgctcctgagtttatcattaaacctcgctcccacacggtttgggagaaggagaatgtaaaattgcattgctccatagcaggatggccagaacctcgtgtcacgtggtataaaaaccaggtgccaataaatgtccatgcaaaccctggaaagtatattattgagagtcgatatggaatgcacactctggagattaatgcatgtgattttgaagatacagctcagtaccgggcctcggcgatgaatgttaaaggagagctttcggcatatgcttcagttgtggtaaaaaggtataagggagagtttgatgagactcgcttccatgctggggcttccaccatgcccctcagctttggtgtgaccccatatggttatgcatcccggtttgagatccactttgatgacaaatttgatgtgtcttttgggagagagggagagacaatgagtctaggctgtcgtgttgtcatcactcctgaaattaaacatttccagccagagatccggtggtacagaaatggagtacctctttctccatcaaaatgggtgcaaacactttggagtggagagcgggcaacgctgacattttcccatctcaacaaagaagatgaaggcctctatacaatccgtgtacggatgggagaatattatgaacaatatagtgcttatgtctttgttcgagatgctgatgcagagattgaaggagccccagctgctcccttggatgtgaagtgcttggaggccaacaaagattatatcatcatctcctggaaacagccagctgtcgatggagggagtcctattctcggatattttattgataagtgtgaggtgggcacagatagctggtcgcagtgcaatgacacacctgtgaagtttgctcgttttcctgtcactggattgatcgaaggtcgttcctatatcttccgagttcgagctgtgaataaaatgggaataggtttcccatctcgagtttccgaggccgtggctgctctggatccggctgagaaagctagactaaagtcgcccctcagcaccctggactggacagtcattgttactgaagaggaaccttcagagggtattgtgcctggccccccgacagacctctctgtcactgaggccacccggagctatgtggtgctcagctggaagccccctggccagcgtggtcatgagggcattatgtactttgtggaaaagtgtgaggcaggaacagaaaactggcagcgagtgaacacggagctccctgtgaagtctccccgctttgctctgtttgacttggccgaggggaaatcctactgtttccgtgtccgctgttctaattctgcaggagttggtgagccctcagaggcaacggaggtgactgtggtaggggacaaacttgatatccccaaggctcctggcaaaatcatcccaagcagaaacacagacacctcagtggtagtttcgtgggaggagtccaaagatgccaaagagctggtcgggtactacatagaggcaaacgttgctggctctggcaagtgggagccctgtaacaacaaccccgtgaaaactcaccgattcacttgtcatggattagtgactggtcagagttatatattccgggtcagagcagtcaatgcagctggacttagtgaatattcccaggattcagaagctattgaagtcaaagctgctattgcaccaccatctccaccctgtgatatcacctgtcttgaaagttttcgtgactcaatggttcttggatggaagcaaccagataagactggaggggcagaaattactggctattatgtgaactatcgcgaggtcattgatggggtaccaggaaaatggagagaagccaatgtcaaggctgtcagagaggaggcatacaagattagcaacttgaaggaaaacatggtgtatcagttccaagtggcagccatgaacatggctgggctgggcgcgccctccgcagtaagcgaatgcttcaaatgtgaagagtggaccatcgccgtcccaggaccaccgcacagtctcaagtgtagtgaagtcaggaaagactcactggttctccagtggaagccgccagtccactccgggcggactccggtcactggttacttcgtggacttgaaggagaaggccaaagaagaccagtggcgagggctcaatgaggcggctattaaaaacgtatacctgaaggttcgaggcctcaaggagggcgtcagctacgtgttccgtgttcgagccataaaccaggcgggagttgggaagccatctgaccttgctggccctgttgtggcagagacccgtccaggaaggaaagaggttgttgtaaatgtggatgatgatggagtcatttcattgaacttcgagtgtgataagatgactccaaagtccgagttctcctggtccaaagattatgtatccactgaggactctccacgattggaagtcgaaagcaagggcaacaagacgaaaatgaccttcaaagaccttgggatggatgacttgggtatttactcttgcgatgtaacagacactgatggaatagcatcaagctacttaatagatgaggaagaattgaaacgtttacttgctctcagccatgaacacaagttcccaactgtcccagttaaatcagagttggcagttgaaattttggagaaaggccaggtccggttttggatgcaggctgagaaactgtctggcaatgccaaagtcaactacatatttaacgagaaggaaatttttgaaggcccgaaatataaaatgcatattgaccgaaacactggcatcatcgaaatgttcatggaaaagctacaggatgaggatgagggaacgtacactttccagcttcaagatggaaaagcaactaaccattctactgttgttctcgttggagatgttttcaaaaagctccagaaagaagctgaattccagcggcaagaatggatcaggaaacaaggtcctcactttgttgagtatttgagctgggaagtgactggtgaatgtaatgtactattgaaatgcaaggtggcaaatattaagaaggagactcatattgtgtggtacaaagatgagagggagatatcagtggatgaaaagcatgactttaaggatggtatatgtaccctgcttataacagagttttccaagaaagatgctgggatttatgaagttatcctgaaagatgaccgaggaaaagataagagcagactgaagcttgtggatgaagcctttaaggaactgatgatggaagtatgcaaaaaaatagctttgtctgctacagacctgaaaatccagagcacagccgagggcatccaactgtactcttttgtaacttactatgtggaggatttgaaagttaactggtcccacaatgggtccgccattaggtactcagacagagttaagaccggggtcactggagagcagatctggctacaaatcaacgagcccaccccgaatgacaaagggaagtatgtcatggagctctttgatggcaaaactggacatcagaagacagtggatctctctggacaagcatacgatgaggcctatgctgaattccagaggttgaaacaagctgccattgccgagaaaaatcgtgcccgggtgttgggaggtctcccagacgtggtcaccatccaggaggggaaggcccttaatctcacttgcaacgtgtggggagacccgcctccggaggtgtcgtggttgaagaacgagaaggccctggctcagacggaccactgcaacctcaagttcgaggctgggaggaccgcgtacttcaccatcaacggtgtgagcaccgctgactcgggcaaatacgggctggttgtgaagaacaagtatggctcggagaccagcgacttcaccgtcagcgtgttcatcccagaggaggaggcgaggatggccgccttggagtccctgaaaggcggcaagaaggccaagtgaccggaggtgcgaggagagcagccggcctgtgtgacttgggtgtgaatggtttgggttaaggatgagacgtccttcatgcttctcctccctattatttctggcttgagggaaataatgtcaggtctttcactcatataaaaaagcaccaactaatgacactttaattgtttttctttatctacaaaattatgtgttaagaaaataccattcatagcatgaagattaggaaacagttttaaggagaagacttgaatgaagttggagggacattgaatgatggtcagagggcagacgaatgtgtcgtggggcgaattgggatttgctgcagctgtgaagccatggccgtgtctcgtgtgttgttacagaggtgatgtgcttttcgacgggccctcgtggcttggaacctcctctgtatgaataaacagttttcacgtctgtcctcttccccgaaaaaaaaaaaaaaaaaaaaaaaaaaaaa

SEQ ID NO: 6746 - DNA, 3949 bp, Homo sapiens
  misc_feature (2334)..(2353): n is a, c, g, or t
  misc_feature (3199)..(3213): n is a, c, g, or t
  misc_feature (3215)..(3239): n is a, c, g, or t
agcggagagcgccgggaccgcggcggcggggccgcggcgcgcattgcggacggtgcgtcgagcgcaggagctgccgcctgccgggcagatccaagggggcagcacgcttcccgggagcgcccccgcctcctctccggggccgccgcaggctcggtgagcggttttatccctccggccggcaggctgggcgcgcaggggcgcgagcccccgcccggcgcgcagcagcaccatgggcacggtgctgtccctgtctcccagctaccggaaggccacgctgtttgaggatggcgcggccaccgtgggccactatacggccgtacagaacagcaagaacgccaaggacaagaacctgaagcgccactccatcatctccgtgctgccttggaagagaatcgtggccgtgtcggccaagaagaagaactccaagaaggtgcagcccaacagcagctaccagaacaacatcacgcacctcaacaatgagaacctgaagaagtcgctgtcgtgcgccaacctgtccacattcgcccagcccccaccggcccagccgcctgcacccccggccagccagctctcgggttcccagaccgggggctcctcctcagtcaagaaagcccctcaccctgccgtcacctccgcagggacgcccaaacgggtcatcgtccaggcgtccaccagtgagctgcttcgctgcctgggtgagtttctctgccgccggtgctaccgcctgaagcacctgtcccccacggaccccgtgctctggctgcgcagcgtggaccgctcgctgcttctgcagggctggcaggaccagggcttcatcacgccggccaacgtggtcttcctctacatgctctgcagggatgttatctcctccgaggtgggctcggatcacgagctccaggccgtcctgctgacatgcctgtacctctcctactcctacatgggcaacgagatctcctacccgctcaagcccttcctggtggagagctgcaaggaggccttttgggaccgttgcctctctgtcatcaacctcatgagctcaaagatgctgcagataaatgccgacccacactacttcacacaggtcttctccgacctgaagaacgagagcggccaggaggacaagaagcggctcctcctaggcctggatcggtgagcactgtagcctgcgtcatggctcaaggattcaatgcatttttaagaatttattattaaatcagttttgtgtacagtatgtgtctagcaaagccaccaagggcctcacctttcccacagtctctccctggggtttttttcatccctgccaagaactctgggcacttttgaactcacgagccttgcgcaaaacccagaagatgtattcagagccacccaggccactgacctcccactttggggaactcaaaggactgacctgcccctgccgcctgtgcccttgctgggtccagggtaggcaaggctgccggctgcaccctgtatggagctagagaggggcctctggctgcctggcccagggaggaattggggtttctggttggaggcccttttctggctcctgtgtggagttattcactctcccagaggctcctggagccagccaccctaactgagctgccagtggggtcgtgaggcaagatccccgccacccggggacatcttcaatctaggcgaggcgaagctgagcgggtctagtggaaagattgtgtctggtcgtttgaccacacaccgccctgatttgctgttttctttttttagggagaagggcttttctttagtggagaaatggaactcgcccccctacccccttgtctgctgctcccagccacgttggtggtattggccgatgagctggtttgactcattaatttctctcaatttgggtcccagctaaagaggtggggtgaagctggggacagctttcctgggtgagtttttcttttgaataatgtagtgcagtcaccctgtggcaaatgccaggacagctgcaggtgcccattagcaacgcctgccttctgggcaaggtgagggatgccataccttgagaccaagccggtgcccacctaagggctaaggcctcttgctggtgcacatgacatttgtcctgcagagctggggggaaggcgatgtggtgaccccacccccacccgttaatttaaagctgtttctaaacagttgagtttcttctaaagaggaagccttgcccagcaaggaccagtgagacagccggatcttggagacaattacaagacggggagtgagactcctgattgctctggaagcctgctgatttctacaactgatcatttgcagctgctggttttggtttccaccttaccnnnnnnnnnnnnnnnnnnnnaatgtgtactttattgattttctttctaattctcccgcattggtggcttgggacttgggagagggagcaagccttcctccatggcccatcactcggctgtggagaacaaagaccaatgtgaagacactacagaggattctgtcttccaggcccagtccactggggagtgctggaatggggacctggggtggggaggcagagggtcactttacataggattaagttcgaggtggctaccgatttcagcacatgcactactgaaatttacacaaaaagaaagctgtgaaattgaagtcccaatttaagagtcctgaggcagaacctggtggctggaggcattcccagaggtggggaagagagcctgcccggccggagaacatctgccttgctgcacctgaggcccagcagagccgttcctgggactgtcagataatcggtgcagcggtggaaggagcctgcggctgctggcacagacttcacacagcacctcctctctgctgggtttccacacagcctgtcttcagatcatgctgccgcgtgcgaccagaggtgggaggcccctggtggcatggaagagggagggtcagtgccaagtctcaggaggagggcgcatgtgtgtatcaccctcagctggcggaacctggctgcgaactgtgcagttacgttgcatccacaggattccagttgcgtgtctgtttccttctctttctccgtatttatttttttattcttcggaggaggtggacatttcggaagtggtggggactaagggaagaactctctagttccctcagtgtgaagcctgtcgtgttctctccccttgcactggtcatcagtattgtgtannnnnnnnnnnnnnntnnnnnnnnnnnnnnnnnnnnnnnnnatttgccatgctgctatgaagactacttttagatcaacaataaaaaaaaacctacaaaaaaacctttattctttaattgttgcttttacggtgatattgtgcatgcaaaccaggagcattttgtgtcttaagaaaaataatcttagaacagatggctgtgaaaattacacccatgcacagaacaagccacaggaataatagttcaggatttggtttttctctttttcttgtaaacctggagggttgatatattctttccatgcagttattagaacttagttttgttccaacagttaaacttgcaatgaaaagaaaatgtgccatttttttcactcagaattattcatagctgtatatttgaaactgctaattacacacgtgtgatgtatgttggttttttagtgcaatttcttctgtagctattctttgaccaaactgtgggtattgttaatattaatttatatttgtctcattttgtatgtatgtgtagtgtgtttgtgagtatgtgtggtttataatctgacaaagtcatgaagctcagtttggctgtaatttaattccccttcccttatttttatttatttttgtactgtgctgattcaataaaatgcactgaccatccaaaaaaaaaaaaaaaaaaaaacaaaagcagaaatactatatgtctacattttaaaatcagaattagtatatatacttacacacatact

SEQ ID NO: 6747 - DNA, 1801 bp, Homo sapiens
tactaaccatgctgaccactgttcggaacgggattgaatcacagaaaaacagcaaatggctctctcttacagagtgtctgaacttcaaagcacaattcctgagcacattttgcagagcacctttgttcacgttatctcttctaactggtctggattacagacagaatcaataccagaggaaatgaaacagattgttgaggaacagggaaataaactgcactgggcagctcttctgatactcatggtgataatacccacaattggtggaaatacccttgttattctggctgtttcactggagaagaagctgcagtatgctactaattactttctaatgtccttggcggtggctgatttgctggttggattgtttgtgatgccaattgccctcttgacaataatgtttgaggctatgtggcccctcccacttgttctatgtcctgcctggttatttcttgacgttctcttttcaaccgcatccatcatgcatctctgtgccatttcagtggatcgttacatagccatcaaaaagccaatccaggccaatcaatataactcacgggctacagcattcatcaagattacagtggtgtggttaatttcaataggcattgccattccagtccctattaaagggatagagactgatgtggacaacccaaacaatatcacttgtgtgctgacaaaggaacgttttggcgatttcatgctctttggctcactggctgccttcttcacacctcttgcaattatgattgtcacctactttctcactatccatgctttacagaagaaggcttacttagtcaaaaacaagccacctcaacgcctaacatggttgactgtgtctacagttttccaaagggatgaaacaccttgctcgtcaccggaaaaggtggcaatgctggatggttctcgaaaggacaaggctctgcccaactcaggtgatgaaacacttatgcgaagaacatccacaattgggaaaaagtcagtgcagaccatttccaacgaacagagagcctcaaaggtcctagggattgtgtttttcctctttttgcttatgtggtgtcccttctttattacaaatataactttagttttatgtgattcctgtaaccaaactactctccaaatgctcctggagatatttgtgtggataggctatgtttcctcaggagtgaatcctttggtctacaccctcttcaataagacatttcgggatgcatttggccgatatatcacctgcaattaccgggccacaaagtcagtaaaaactctcagaaaacgctccagtaagatctacttccggaatccaatggcagagaactctaagtttttcaagaaacatggaattcgaaatgggattaaccctgccatgtaccagagtccaatgaggctccgaagttcaaccattcagtcttcatcaatcattctactagatacgcttctcctcactgaaaatgaaggtgacaaaactgaagagcaagttagttatgtatagcagaactggcaggtgtcatcaaaggtgttgatttgtaagatgatgaatgagatgtaaatgtgcccagaatatattatataaagaattttatgtcatatatcaaatcatctctttaacctaagatgtaagtattaagaatatctaattttcctaatttggacaagattattccatgaggaaaataattttatatagctacaaatgaaaacaatccagcactctggttaaattttaaggtattcgaatgaaataaagtcaaatcaataaatttcaggctttaaaaaaaaaaaaaaaaaaaaa

SEQ ID NO: 6748 - DNA, 1145 bp, Homo sapiens
gaaggggccatcagtatagagaacgttagcctgtggagctgtgaatgtgatggagacaagatttagtgtatagctctgctacctgcctggtgttcctttgagtttctttatccttagatttgacagctgagaaatctaggtggattcatattcgtaatcattgattaacatgcacatttgggtttgcacatttttgtttatcatacatttttctccgttttctattaaagaacatgctctaggggaactattaatagcccaccagtcgggtaggcagcattcaatccttctatgccttctttcgccacctgttgaggtctttcttctgaaacaaagaagaaatagacaaatcagacttgccctcttggaaatgtggtccagatttctctactcccaagctccaaaaaaggtatacattggatgggctagatcaactcctcctgagagccataaatccgccaagagttgttttccatgtaagggtgtggtacaatggggaacacctgatgttggaggaaagcaggaggactttagagtggagttgcattctaatctctctgccgcttcaactatgtgacctggggcaaatgatataaactctatgagcctctttccttatctttaaaatgaagagaagtaatacctaccttgtagggctgttgtgaggattaaatgaagtaatgcatacagtgcctaacaaagtatttaacatcatattttttaaaagctcatgaaatattagtttttcttccttcccctctttctattttctctcctgttcccttttctctccctcctctgccctctccttccttcagatgttagtctaaaacagcaccttggatctaagcagcacctttgagaaagaaaagactgcttcaagaatgtctagttgcacctcctttccgtatgtggcctaaatgcctaggttggatcaatagtttaatttttttattgaactgtttaatattgactatggacttacattcacttttactgttttctgtatatttacttttgcttgaagtgttttaatattgactatttacctctgctcatttttattgattttctgtattttttcaatgaaaattataataaaaattatttttgttaaaaaaaaaaaaaaaaaaaacacttcaagc

SEQ ID NO: 6749 - DNA, 7370 bp, Homo sapiens
  misc_feature (3918)..(3962): n is a, c, g, or t
acacagtactctcagcttgttggtggaagcccctcatctgccttcattctgaaggcagggcccggcagaggaaggatcagagggtcgcggccggagggtcccggccggtggggccaactcagagggagaggaaagggctagagacacgaagaacgcaaaccatcaaatttagaagaaaaagccctttgactttttccccctctccctccccaatggctgtgtagcaaacatccctggcgataccttggaaaggacgaagttggtctgcagtcgcaatttcgtgggttgagttcacagttgtgagtgcggggctcggagatggagccgtggtcctctaggtggaaaacgaaacggtggctctgggatttcaccgtaacaaccctcgcattgaccttcctcttccaagctagagaggtcagaggagctgctccagttgatgtactaaaagcactagattttcacaattctccagagggaatatcaaaaacaacgggattttgcacaaacagaaagaattctaaaggctcagatactgcttacagagtttcaaagcaagcacaactcagtgccccaacaaaacagttatttccaggtggaactttcccagaagacttttcaatactatttacagtaaaaccaaaaaaaggaattcagtctttccttttatctatatataatgagcatggtattcagcaaattggtgttgaggttgggagatcacctgtttttctgtttgaagaccacactggaaaacctgccccagaagactatcccctcttcagaactgttaacatcgctgacgggaagtggcatcgggtagcaatcagcgtggagaagaaaactgtgacaatgattgttgattgtaagaagaaaaccacgaaaccacttgatagaagtgagagagcaattgttgataccaatggaatcacggtttttggaacaaggattttggatgaagaagtttttgagggggacattcagcagtttttgatcacaggtgatcccaaggcagcatatgactactgtgagcattatagtccagactgtgactcttcagcacccaaggctgctcaagctcaggaacctcagatagatgagaaaaagaaatccaatttcaaaaagaagatgaggacagtggctactaaatcaaaggaaaaatccaaaaagtttacaccccccaaatctgaaaaattttcatccaagaagaagaaaagttatcaagcatcagcaaaagccaaactaggggtaaaggcaaacatcgttgatgattttcaagaatacaactatggaacaatggaaagttaccagacagaagctcctaggcatgtttctgggacaaatgagccaaatccagttgaagaaatatttactgaagaatatctaacgggagaggattatgattcccagaggaaaaattctgaggatacactatatgaaaacaaagaaatagacggcagggattctgatcttctggtagatggagatttaggcgaatatgatttttatgaatataaagaatatgaagataaaccaacaagcccccctaatgaagaatttggtccaggtgtaccagcagaaactgatattacagaaacaagcataaatggccatggtgcatatggagagaaaggacagaaaggagaaccagcagtggttgagcctggtatgcttgtcgaaggaccaccaggaccagcaggacctgcaggtattatgggtcctccaggtctacaaggccccactggaccccctggtgaccctggcgataggggccccccaggacgtcctggcttaccaggggctgatggtctacctggtcctcctggtactatgttgatgttaccgttccgttatggtggtgatggttccaaaggaccaaccatctctgctcaggaagctcaggctcaagctattcttcagcaggctcggattgctctgagaggcccacctggcccaatgggtctaactggaagaccaggtcctgtgggggggcctggttcatctggggccaaaggtgagagtggtgatccaggtcctcagggccctcgaggcgtccagggtccccctggtccaacgggaaaacctggaaaaaggggtcgtccaggtgcagatggaggaagaggaatgccaggagaacctggggcaaagggagatcgagggtttgatggacttccgggtctgccaggtgacaaaggtcacaggggtgaacgaggtcctcaaggtcctccaggtcctcctggtgatgatggaatgaggggagaagatggagaaattggaccaagaggtcttccaggtgaagctggcccacgaggtttgctgggtccaaggggaactccaggagctccagggcagcctggtatggcaggtgtagatggccccccaggaccaaaagggaacatgggtccccaaggggagcctgggcctccaggtcaacaagggaatccaggacctcagggtcttcctggtccacaaggtccaattggtcctcctggtgaaaaaggaccacaaggaaaaccaggacttgctggacttcctggtgctgatgggcctcctggtcatcctgggaaagaaggccagtctggagaaaagggggctctgggtccccctggtccacaaggtcctattggatacccgggcccccggggagtaaagggagcagatggtgtcagaggtctcaagggatctaaaggtgaaaagggtgaagatggttttccaggattcaaaggtgacatgggtctaaaaggtgacagaggagaagttggtcaaattggcccaagaggggaagatggccctgaaggacccaaaggtcgagcaggcccaactggagacccaggtccttcaggtcaagcaggagaaaagggaaaacttggagttccaggattaccaggatatccaggaagacaaggtccaaagggttccactggattccctgggtttccaggtgccaatggagagaaaggtgcacggggagtagctggcaaaccaggccctcggggtcagcgtggtccaacgggtcctcgaggttcaagaggtgcaagaggtcccactgggaaacctgggccaaagggcacttcaggtggcgatggccctcctggccctccaggtgaaagaggtcctcaaggacctcagggtccagttggattccctggaccaaaaggccctcctggaccaccaggaaggatgggctgcccaggacaccctgggcaacgtggggagactggatttcaaggcaagaccggccctcctgggccagggggagtggttggaccacagggaccaaccggtgagactggtccaataggggaacgtgggcatcctggccctcctggccctcctggtgagcaaggtcttcctggtgctgcaggaaaagaaggtgcaaagggtgatccaggtcctcaaggtatctcagggaaagatggaccagcaggattacgtggtttcccaggggaaagaggtcttcctggagctcagggtgcacctggactgaaaggaggggaaggtccccagggcccaccaggtccagttggctcaccaggagaacgtgggtcagcaggtacagctggcccaattggtttaccagggcgcccgggacctcagggtcctcctggtccagctggagagaaaggtgctcctggagaaaaaggtccccaagggcctgcagggagagatggagttcaaggtcctgttggtctcccagggccagctggtcctgccggctcccctggggaagacggagacaagggtgaaattggtgagccgggacaaaaaggcagcaagggtgacaagggagaaaatggccctcccggtcccccaggtcttcaaggaccagttggtgcccctggaattgctggaggtgatggtgaaccaggtcctagaggacagcaggggatgtttgggcaaaaaggtgatgagggtgccagnnnnnnnnnnnnnnnnnnnnnnnnnnnnnnnnnnnnnnnnnnnnnccaggcccacctggtgaaaaaggtgaaaatggggatgttggtccatgggggccacctggtcctccaggcccaagaggccctcaaggtcccaatggagctgatggaccacaaggacccccaggttctgttggttcagttggtggtgttggagaaaagggtgaacctggagaagcaggaaacccagggcctcctggggaagcaggtgtaggcggtcccaaaggagaaagaggagagaaaggggaagctggtccacctggagctgctggacctccaggtgccaaggggccgccaggtgatgatggccctaagggtaacccgggtcctgttggttttcctggagatcctggtcctcctggggaacttggccctgcaggtcaagatggtgttggtggtgacaagggtgaagatggagatcctggtcaaccgggtcctcctggcccatctggtgaggctggcccaccaggtcctcctggaaaacgaggtcctcctggagctgcaggtgcagagggaagacaaggtgaaaaaggtgctaagggggaagcaggtgcagaaggtcctcctggaaaaaccggcccagtcggtcctcagggacctgcaggaaagcctggtccagaaggtcttcggggcatccctggtcctgtgggagaacaaggtctccctggagctgcaggccaagatggaccacctggtcctatgggacctcctggcttacctggtctcaaaggtgaccctggctccaagggtgaaaagggacatcctggtttaattggcctgattggtcctccaggagaacaaggggaaaaaggtgaccgagggctccctggaactcaaggatctccaggagcaaaaggggatgggggaattcctggtcctgctggtcccttaggtccacctggtcctccaggcttaccaggtcctcaaggcccaaagggtaacaaaggctctactggacccgctggccagaaaggtgacagtggtcttccagggcctcctgggcctccaggtccacctggtgaagtcattcagcctttaccaatcttgtcctccaaaaaaacgagaagacatactgaaggcatgcaagcagatgcagatgataatattcttgattactcggatggaatggaagaaatatttggttccctcaattccctgaaacaagacatcgagcatatgaaatttccaatgggtactcagaccaatccagcccgaacttgtaaagacctgcaactcagccatcctgacttcccagatggtgaatattggattgatcctaaccaaggttgctcaggagattccttcaaagtttactgtaatttcacatctggtggtgagacttgcatttatccagacaaaaaatctgagggagtaagaatttcatcatggccaaaggagaaaccaggaagttggtttagtgaatttaagaggggaaaactgctttcatacttagatgttgaaggaaattccatcaatatggtgcaaatgacattcctgaaacttctgactgcctctgctcggcaaaatttcacctaccactgtcatcagtcagcagcctggtatgatgtgtcatcaggaagttatgacaaagcacttcgcttcctgggatcaaatgatgaggagatgtcctatgacaataatccttttatcaaaacactgtatgatggttgtgcgtccagaaaaggctatgaaaagactgtcattgaaatcaatacaccaaaaattgatcaagtacctattgttgatgtcatgatcaatgactttggtgatcagaatcagaagttcggatttgaagttggtcctgtttgttttcttggctaagattaagacaaagaacatatcaaatcaacagaaaatataccttggtgccaccaacccattttgtgccacatgcaagttttgaataaggatggtatagaaaacaacgctgcatatacaggtaccatttaggaaataccgatgcctttgtgggggcagaatcacatggcaaaagctttgaaaatcataaagatataagttggtgtggctaagatggaaacagggctgattcttgattcccaattctcaactctccttttcctatttgaatttctttggtgctgtagaaaacaaaaaaagaaaaatatatattcataaaaaatatggtgctcattctcatccatccaggatgtactaaaacagtgtgtttaataaattgtaattattttgtgtacagttctatactgttatctgtgtccatttccaaaacttgcacgtgtccctgaattccatctgactctaattttatgagaattgcagaactctgatggcaataaatatatgtattatgaaaaaataaagttgtaatttctgatgactctaagtccctttctttggttaataataaaatgcctttgtatatattgatgttgaagagttcaattatttgatgtcgccaacaaaattctcagagggcaaaaatctggaagacttttggaagcacactctgatcaactcttctctgccgacagtcattttgctgaatttcagccaaaaatattatgcattttgatgctttattcaaggctatacctcaaactttttcttctcagaatccaggatttcacaggatacttgtatatatggaaaacaagcaagtttatatttttggacagggaaatgtgtgtaagaaagtatattaacaaatcaatgcctccgtcaagcaaacaatcatatgtatactttttttctacgttatctcatctccttgttttcagtgtgcttcaataatgcaggttaatattaaagatggaaattaagcaattatttatgaatttgtgcaatgttagattttcttatcaatcaagttcttgaatttgattctaagttgcatattataacagtctcgaaaattattttacttgcccaacaaatattacttttttcctttcaagataattttataaatcatttgacctacctaattgctaaatgaataacatatggtggactgttattaagagtatttgttttaagtcattcaggaaaatctaaacttttttttccactaaggtatttactttaaggtagcttgaaatagcaatacaatttaaaaattaaaaactgaattttgtatctattttaagtaatatatgtaagacttgaaaataaatgttttatttcttatataaagtgttaaattaattgataccagatttcactggaacagtttcaactgataatttatgacaaaagaacatacctgtaatattgaaattaaaaagtgaaatttgtcataaagaatttcttttatttttgaaatcgagtttgtaaatgtccttttaagaagggagatatgaatccaataaataaactcaagtcttggctaaaaaaaaaaaaaaaaaaaaacaaaccacacccaccaccaacaaaagg

SEQ ID NO: 6750 - DNA, 2770 bp, Homo sapiens
gggaagaaacacagatggcggcggcgcagcgccattccgggccgggagcaggcagccagcagccctgtcctcaccgcggtccgcccgccgccgctaaatacccggatgcgccgcccaagcgccagacgcggagctgggaaaagggaggcagaggaggcggaggcagaggcagaggcagagcccggtgccgagaccaagcgacagaccggcggggctgggcctcgcaaagccggctcggcgagctctcccgacacccgagccggggaggaaaagcagcgactcctcgctcgcatccccgggagccgcactccagactggcccggtagtcaggggctcaggagcagatcccgaggcaggctttgctcagcctccgacgagggctggccctttggaaggcgccttcaacagccggaccagacaggccaccatgaccgagaattccacgtccgcccctgcggccaagcccaagcgggccaaggcctccaagaagtccacagaccaccccaagtattcagacatgatcgtggctgccatccaggccgagaagaaccgcgctggctcctcgcgccagtccattcagaagtatatcaagagccactacaaggtgggtgagaacgctgactcgaaaatcagtttgtccatcaagcgcctggtcaccaccggtgtcctcaagcagaccaaaggggtgggggcctcggggtccttccggctagccaagagcgacgaacccaagaagtcagtggccttcaagaagaccaagaaggaaatcaagaaggtagccacgccaaagaaggcatccaagcccaagaaggctgcctccaaagccccaaccaagaaacccaaagccaccccggtcaagaaggccaagaagaagctggctgccacgcccaagaaagccaaaaaacccaagactgtcaaagccaagccggtcaaggcatccaagcccaaaaaggccaaaccagtgaaacccaaagcaaagtccagtgccaagagggccggcaagaagaagtgacaatgaagtcttttcttgcggacactccctcctgtctcctattttctgtaaataattttctccttttttctctcttgatgctcaccaccaccttttgcccccttctgttctgactttataagagacaggatttggattcttcagaaattacagaataattcatttttccttaaccagttgtgcaaggacagcaacaaccaatctaatgatgagaatgtacttatattttgttttgctattaacctacttacggggttagggatttgcgggggggcttgtgtgttttgttggcttgtttgccatgaaggtagatgtgggtggggagaagacacaaggcagtttgttctggctagatgagagggaacccaggaattgtgaggttagcaggaatatctttagggtgagtgagttttccttgagttgggcacccgttgtgagagtttcagaacctttggccagcaggagagaggtggtagggagcagccagccggcaaaggaaggaggtggaaaaaaaccgccaccgggctgacttccacctcccagtggtgagcagtgggggcccaaacccagtttccttctcatttttgttagtttgccctttcggcctccctattttcttagggaaggggagtggggtccaagtgacagctggatgggagaagccatagtttctcccagtcagctaggatgtagccattgggggatctttgtggcttcagcaaattctcttgttaaaccggagtgaaaacttcaggggaagggtggggagtcagccaagtgcctcagtgtgccctgttgaaacttaggtttttccacgcaatcgatggattgtgtcctaggaagacttttcttttcctctggatttttgttcctcctgtacaagaggtgtctttgcttggtttggtggggctgcggccacttaaaacctcccgatctctttttgagtcctttattataagtagttgtagctgcgggagggggagggggagtgggcgggcagtggatagtaagacttactgcagtcgatttgggatttgctaagtagttttacagagctagatctgtgtgcatgtgtgtgtttgtgtatatatacatatctagggctagtacttagtttcacacccgggagctgggagaaaaaacctgtacagttgtctttctcttatttttaataaaatagaaaaatcgcgcacttgcgcgtcccccccccacccccttttttaaacaagtgttacttgtgccgggaaaattttgctgtctttgtaattttaaaactttaaaataaattggaaaagggagaaaaaaaaaaaaaaaaaaaaaaaactccgggggtcataggcgggggggcgcccggtaggcccctggtaacgccctttccccttggccccttgggggggccccccctctctaaagattccccccccggggggggccccaaggtttttatcgcgggacccccacccttttttttttgggaaaaaaaaggggggcccccttaataggggggagtccccgccatttaaaaaaagcttaggggccccttgggggcccgccctcttttttttaacaacgccccccctccagctttgggggaaaaaaatatgcgccgccacctgtgggggaaattctttttggtggggaggggggagacccctttttttctttttggggggggggggcggggaaaaaaaaaacggggggggaagcgacaaatctttcccctcaccaaaagaacatttttgttaggcggggcggccc

SEQ ID NO: 6751 - DNA, 3019 bp, Homo sapiens
agattcttctgcagcaatgtcggtgttagaagaaaatcggccgtttgctcaacaattatccaatgtctactttacaatactttcgctgttctgttttaagctttttgtgaaaatcagccttgccatcctcagtcatttctacatagtgaaaggcaaccgcaaggaagcggcaaggatagcagctgaattttatggagtaacccaaggacaaggttcctgggcagatcgatcaccactacatgaagcagcaagtcaaggtcgccttcttgctctgagaacattattatcacagggttataatgtaaatgcagtaaccttagaccatgtcaccccattgcacgaagcctgccttggagatcacgtggcatgtgccagaactctgctggaagcaggagctaatgtaaatgcaatcacgatagatggcgtgactccgttattcaacgcatgctcccaaggcagtccaagctgtgcagagctgcttctggagtatggtgccaaagcccagctggagtcatgtcttccatccccaacgcatgaggccgccagtaaaggtcaccatgaatgtcttgacatcctgatatcctggggcatagatgttgaccaagaaattcctcatttgggaactcctctctatgtagcttgtatgtcacagcaattccattgcatctggaagcttctttatgctggtgctgacgtacagaaaggcaaatattgggatactccattacatgctgctgctcaacaatccagcacagaaattgtaaacttactgctagaatttggagcagatatcaatgccaaaaatacagagcttctgcgacctatagatgtagctacgtctagcagtatggtggaaagaatattgcttcaacatgaagctaccccaagctctctttaccaactttgccgactctgtatccgaagctacataggaaaaccaagattgcaccttatcccacaactccagctgccaacgttactgaagaatttcttacagtatcgataaaacagtaaagtaattctaaataccttgaaaatcaaaatttctatttcttttgcttaaggaatagttcatataaaaatatgctaaagataggataaaagtgagtgtgagatcacccagggaagcagtaaaatatcaattttcattttaagtgtattagtactattgttttatcatttatgctgtctttggattatagcatatttataatatctattttttgttatttcaatataccctcttgtttattcaggaaaaaataataaagtcactatcttatgttttcttttggattggaaagaaataaagctcctagtaaagttattcatattatatttaaaaaggtctatgttcttcaactaatgggttaactttttaattttggctattgtaattggctaacttgttactgatattgacataaaatatgaatatggcttagcaaagagcaactaatatgttttctgaaaccaggatgatgctcattcaggaaatccactatgttgaatgtccactggtcattagaatgaacacttcataaagataaattgcccccctctcccccacttacccctggcaaaggactcacaagtcacttctcttctccatagtacatggacttgttacagaaaagtgataggatgaaaggtcaatactgccctctcaccctgagatatttagaacattacacaccttctaaggctatgttaagactgcctccttctcaggagtagcccctgatgatctcttatcaaggcggttatatgcatattactccagccttcttccatttcagaaattgtcaatagctagtgatacttggacttaagaaaatgaactatatatctaattaacaaacaggccctggatcatattccggggatcatcacatcagtccaaggatataaaaaaatggaagattaaaaactcaaattgtggagtttttaaagagtgggtgccacttaacacattggagaccttaaaaaatgtatatagagaacttaatcgcactgtttctaattctttttacacaaaacaagggcttagagtatactgtatttgcaagtaatagcaagagagtattgtataaaagaagatattactaagctagtcctctgcaagggtaaatactatgtttattctcttcagctttaactatacttgagtgcaataaaaaacttaataaaattttatgcctgttttgtaattcagggcctattatgattttagaaataagataatcaacgtacaactctttgtaaaacaaaagcaactttgggtgagttttatagatttattaaattttgataaagtaaatattttgaccactattttcaacaacccagggcttattttcttctgacttcttggctaacttccagactatgggaaaataaattatgattgtatgtgacccccagatcactaagcttgcattttggcagaaagaaaaaaaatcagttgtgatttaaaacgtttgttgagattttcaaacatagaaataaagctgtagcatattcactaaacaatgttttatatgaggatagggacctttaaatatgtgttttatagaatatctcacacatttgtaatggataacgtgcattaaaatggagttcttattatagaataacctggttaaacagatattaaagctgcttttgggtaaaacaggtttccaccagtattttccctgagctagaggagaagtcttagattttaagagtaatacaacccatctatcttattagtcttgtgccaataagagaagtaaatatcaaacattaaaatggtcactttacaatttcagtatgtctgtaccttgtatcttagcttgagtatgattgtcttatcaaagtagtgttctaactttaatgtattgtatgtttgttattatattaaagtgtgattattattcattggaataaaacacaaaccaactctgggcgcatggccaccttctcttgtgccccacccaccactccacgcggggcgggccggcccctaaaaagatta

SEQ ID NO: 6752 - DNA, 10692 bp, Homo sapiens; identical to SEQ ID NO: 5086
  misc_feature (2176)..(2190): n is a, c, g, or t
  misc_feature (2481)..(2509): n is a, c, g, or t
  misc_feature (3346)..(3364): n is a, c, g, or t
  misc_feature (4008)..(4041): n is a, c, g, or t
  misc_feature (5128)..(5227): n is a, c, g, or t
  misc_feature (9114)..(9131): n is a, c, g, or t
  misc_feature (10580)..(10580): n is a, c, g, or t
  misc_feature (10617)..(10617): n is a, c, g, or t
  misc_feature (10640)..(10640): n is a, c, g, or t
  misc_feature (10665)..(10665): n is a, c, g, or t

SEQ ID NO: 6753 - DNA, 661 bp, Homo sapiens
ttgtatttttttagtagagacggggtttcaccgtgttagccaggatggtctcgatgtcctgaccttgtgatccacccgtcttggcctcccaaagtgctgggattacaggcgtgacacccgtgcccgaccaatgaattcttattaaattactttatcatctgtcttgttagccttactctttcctattaacttctttgccccctgctccctttttgaattgagtggctaaattttagaggtttgtagcttttgtgtgtgtgtgtgtgtgttttatagatggtaaatgatgcttgtacattttgtacatgaatgaatacgtattttagcagacttaaaacattaacagtaattgaccttatacattttgggaaagaaaaattaaatcttcatgctactacgatttttttaaatgtggcatcaatgtttatttttaataatagtattactgacttaataaaccccaaatgtctctttaagctgatttaatggttatattatagaattttttatttcattgtgtgcttattagaaaaaacatattttagagttgggttttaaatggtagacacagaaagtaactttaaaatatcctaaaccaaatatctatttcatttttcttcttaagtaaaataacaacacctcattcgtgtgtggtacatgt

SEQ ID NO: 6754 - DNA, 1282 bp, Homo sapiens
  misc_feature (7)..(10): n is a, c, g, or t
  misc_feature (1210)..(1267): n is a, c, g, or t
gcccagnnnntctcgtttacttagcggggggacatttccaggaaacttttccttgggctattgggcttaaaccagtgtccaaaaaaagggggacgcccgaattcgggattggacgcaggcttcgccaccatgccgccctacaccgtggtctatttcccagttcgaggccgctgcgcggccctgcgcatgctgctggcagatcagggccagagctggaaggaggaggtggtgaccgtggagacgtggcaggagggctcactcaaagcctcctgcctatacgggcagctccccaagttccaggacggagacctcaccctgtaccagtccaataccatcctgcgtcacctgggccgcacccttgggctctatgggaaggaccagcaggaggcagccctggtggacatggtgaatgacggcgtggaggacctccgctgcaaatacatctccctcatctacaccaactatgaggcgggcaaggatgactatgtgaaggcactgcccgggcaactgaagccttttgagaccctgctgtcccagaaccagggaggcaagaccttcattgtgggagaccagatctccttcgctgactacaacctgctggacttgctgctgatccatgaggtcctagcccctggctgcctggatgcgttccccctgctctcagcatatgtggggcgcctcagtgcccggcccaagctcaaggccttcctggcctcccctgagtacgtgaacctccccatcaatggcaacgggaaacagtgagggttggggggactctgagcgggaggcagagtttgccttcctttctccaggaccaataaaatttctaagagagctaaaaaaaaaaaaaaaaaaaaaagggaaactaagttcggggggcggaaaaaagagggaatggaaatgggaactggggcaatagctgttttcctggacccagtttttctttgaaaaaaaggggtaaaatcttggccgggcctccctaatgtgggggtgtgattttaattttccaataagcccagggttaaaacttgcaatttaatggaaatgggcgtggccggaaccccgggggaaattttaaccctcccctcaatgtaagcggagcccttttttttcggggaaacccccggccgcatctattcgcacaaactctcttttcgctgcgacaaacacaatcctatggaatagataaccaaaacatactcctccattnnnnnnnnnnnnnnnnnnnnnnnnnnnnnnnnnnnnnnnnnnnnnnnnnnnnnnnnnnggcttttgggggact

SEQ ID NO: 6755 - DNA, 1566 bp, Homo sapiens
aggcattttactaaccaatactcattaagcatagcgtggattcatatgacatcaaggagctattttatttggtaaaacgaaaaagcacaagaatgaacgaacgcaagaactgaaacagtggagacacctagaatgacttgtctaagatctaaatcattttgttgtcttcccagcgtacttattatcctgatcattgtcatcagcattgtttgggtccttttagcacagatttctcaaaatgggtaactccataacagttggaagcttacgaattcatataatttgtaagaggtcaatttggaagtacctatctattttaaaattccaataacctgggaatttcatcccatgtctagagtcttttatgtaaaatatttccacaattaggagaaatatgtgcatggggattttctatgtagcggtgttttgatggaatagaaaattgggataaaccaaatttccatcacgaaggaaatagtaatatgctgaataataatacagcgaatattatgcaggctttaaacatcaaaaaagagttcaacttctgacttccgatgatggtgttgaagcaggtcactgctggtttacatttgattttcatgtgggaactctggaagtccgccttagtgattttacatgtggctaaattgagctaatgacaagctgttcgaagtatggcaaaatggaactttaaaacagtatcttgtcaacaaccaagaggacctgtttcacataaagcccacgcattcatctgcctgtccatcattctgtctgtccacacgggcatcattcgttagtggaactgagtgcccgctgtcgagctgacaagcccataacctccctgttcctagtcacacattaattcttcaacaagtcccttttgatagattgtgattaagcttagctactatttccaattgcttccccaaacgtacttctcactgttctcccatcacacccttcagcccatccatgcggggttcctttgcttttcccaccttacaccaaactccctatttttactcccacttttacctcctctccaagacaaaacaaacaaaactagcattttaaaacttagttgtaatctttcttccttcatgaaaatttctccaacagccactcccacggtcctgtgtgttccggatattttaaaataatggctataaggttgagcacttcaggatacgctgttttgctgtgtgcagatggaggcagtggctggagtgaatgaacggcaacacttgctggcaaccggcagaagctgagagacagggaacaggctctcctccagagcctccaggagccaggcctttggacaccttgaatgtgggcttctgggagaccatgcgtttctgttataagcagcccagtctctggcagtttttacggctgccccggaacactcatctatacctgtctgacaaggtcaagctccaaggaagggactctctacatacctacattgtttgcagattttacaataatcatttattcttgcatggctgatcattgttaaccaatacaaataaaataataaagaaatgacccacattttaaaaaaaa

SEQ ID NO: 6756 - DNA, 2812 bp, Homo sapiens; identical to SEQ ID NO: 5416
  misc_feature (199)..(223): n is a, c, g, or t

SEQ ID NO: 6757 - DNA, 1342 bp, Homo sapiens
ttcttcttttttcctctccttctttcatctttctcttgcgtttaactttcttgtactattcacaccagatataactgatgtgtcccctctgttatgtcgttcttgtcctattggacaccagtattccgtgttcctgtggaaaaccccccctactaattctggatgatgacctttcagatgtgaaatagaaattcttctagatggtcatcatatcccacctttattagagtcttgaatttatgtttattacagggaatcatcctgaactcatgggtttgtgttctgttatttttaaattttcaaggaggctcttgtatagcagtttttgtctattttaacattgtagtcatttgtactttgatatcagtattttcttaacctttgtgactgtttcaatattacccccgtgaaagcttttcttaatgtaactttgagtacattttaattgccttctatttttaaaactcaaaatcattagttgggctttactgttcttgctattgtatggcatatacatctgcctggatatatttctactcttgaccaaagttttgtaaagaacaatataagatttcgggtaggggtatggggagggaagatattttattgagaactacttaacaaaagatttatctgtaagcttgaactcaggagtacagttttagctatctagactctaacagcttttgctttaaaattattaaagtgtttcttaatgaaaaagaaaagatcttgctaaagttaaaataaggaacatttcaccttttaaatatttaattcttatgtggacttatttccagaaaactttggtgataattcttgagacaaaaggtggttaagtagcattattatgtaatgcttatataccatagagtttttaatagaagagaaatccatttcctccgagggtcactattaacaatgtacttccttaaatttagtttaatgattgtaatgggtgctgcatttgcacattgcattaagttatgatgagacgaattgttgttaaaaattatagcaaaaagaaatgtaaacttggttaaaatcctttcactctttgtattgttttttttaaggtttttattccttaaatgtaaaatgactacctaattttttgatgtaaatacattaaattcaaagagaaaaaaaaaacccaattgggcgggccgcccttatagttacccctcgagggggccccagtcttaccctgcaccgcagcttcccccggtacaaaggcgggtcccgccaacctggggcgccggtaattttcgagccctcgggcccaccgtgtggccgtggagggttacacgcggccctgttcatggtgccggggggtgtacac

SEQ ID NO: 6758 - DNA, 4459 bp, Homo sapiens
aagtgcggtccgcggagcgtctctggcgcttaccctgctttgggcctgcgtcgctgctgctgctcctccgctcccccgtcgtatcgcctgccctggatcgaagtgatgggggatgccaaggaggccggagccgagggtccgccggccggggccgccgctcgaggagggctcagcctcctgtcccagggagaatccgaggaatcttctgcacagggatcagctttatttcttggaggcaatgaagtgaagagccgagctgtggtgaaatactcttctgcccctcctcgaacagcatttgcacgccttgaagagaaaacagacttgaaactcccacctgccaactggttacgagagagtgccaaactagggccagcaggaactaccattcttggcaacagcaagaaaagcaagccattttcaagctttggcatggcatatgactttattgattcagtgggaaatgatgtggatgttgtctctgactctgaaaacataaaaaaactcctgaaaattccctacagcaagtcgcacgtgagcatggcagtacaccgcataggaaggactctcttactagatgagctagatattcaagaactctttatgagatcgtctcagactggtgactggacatggttgaaagagttttatcaaagactcattgatcagaagtggcagaggaagaaaaagagcaaagagcactggtatcaaaaggcaattctttccaagtttttatattacagtatcaatggtgatggagccgctcagcctgtctcatccaccgcagaacagcaggaatcgtccagttcagatcagacaaatgattcggaaggggcttcatggcctgctcccttcgaaatgccttcttcagtttctgaagatcccagtgcttccagtcagggtcttaaaaatgattttgttcggaatattctatggacatttgaagatatccatatgttggtcggctccaacatgcccatatttggaggaggcagatacccagcagtcagcttacgtctcagggataacaacaaaccaattaatgtgctaactggaattgactattggttggacaacttgatatgcaatgtgccagagcttgtgatgtgttttcatgtaaatggaattgtacagaaatatgaaatgataaagacagaagaaattcccaatttggaaaattctaatttttctactaaagtcataaaagacattgcacagaatattttatcatttttgaaatctaattgtaccaaagaaggacatacctattggctctttaaagcaagtggcagcgatatagtgaagctctatgacctcactactctttgtgaagaaactgaagacaaataccaaaatccattcacaatgccggtagccattctcttgtacaaggttgcttgcaacatgatgatgaagaagaatcaaaataagaaacactatggaactattagaacattgcttcttaattgtctgaaattactggacaaaagtaggcatcctcaaattattgcttccgccaattacatgctttcagaactttttcaattggatgaacctaaaaaggaagaaaattcagaatctcctttaaatgagaattctgatgaaagttatagtgaagaggaggaagagatgcccgacagtgatgaaaatggatcctatagcaccagctctgatccatcagatgatagcaaagcagtagctataatcaagtctgttggagaactatcagtaccagaaaaatacaaatctattcatcaaatcagacccagttgtgcatttccagtttgccatgacacagaagagcgctgtagacttgtgcttagctatgttctagagggtttaaaatctgtcgatagcagcatcaaaaaagaaagcgaccttccagcagctgaccccagcactccaatcccgttaaaatatgaagatgaatcctcaagagggggtcccgaggggctagagaagcagatggccttgtttttggacaaaagtcacagtgggctcccttcagaagggcaattattccagtcaatctggaatgatccctggctcttggcaacataaaatgaaacttcagctgattctcaagtcatcaaaggcctattatgttttgtccgatgctgccatgagtcttcagaaatacggaagagcattacgatacattaaattagctttgcaaagccatgatacttattgctgcctctgcaccaatatgctttccgaagtgctgttgtttctctctcaatatttgacactttgtggtgatatccaactaatgctggcccagaatgcaaataatagagcagcacaccttgaagagtttcattaccaaacaaaagaagaccaggagatcctgcatagccttcacagagagtccagttgccaaggatttgcatgggcaactgatttgtctacagacttagaaagtcaactctctgttagttgtaaatgttatgaggctgctaatgaaatcttgcagtttagtgacttgaaaagccaaaatccagaacactatgtacaagtattaaagagaatgggtaacattagaaatgaaattggtgtgttttacatgaatcaggctgctgcattacagagtgagagactagtgagcaaatctgtgtctgctgccgagcaacagttgtggaaaaaaagcttttcttgttttgaaaagggaattcacaactttgaatcaattgaggatgccaccaatgccgcccttttattatgtaacacgggaaggctcatgcggatttgtgcgcaggcccactgtggtgcaggggatgaactgaaacgtgaattttcaccagaagaaggcttgtattataataaggctattgattactatttgaaagcgctaaggtcattgggaacacgagacatacacccagctgtttgggattcagtgaactgggaattgtccactacttactttactatggcaactctacagcaagattatgctccgttatctagaaaagctcaggagcagattgagaaagaagtcagtgaggccatgatgaagtccctaaaatactgcgatgtggattcagtgtctgctcgacagcccctttgtcagtatcgagctgcaaccatccatcacaggctggcctccatgtaccacagctgtctgaggaatcaggttggtgatgaacaccttaggaaacaacaccgggtgctggcagatcttcattacagcaaggccgcaaagctgtttcagctgcttgaaagatgctccctgcgaactgcttagagtacagctagagagagtagcatttgctgaatttcagatgaccagtcagaatagcaatgttggaaagttgaaaacactatctggggctcttgatataatggtgagaactgagcacgcattccagcttatccagaaggagcttatagaagaatttggccagcctaagagtggtgacgccgctgcagctgctgatgcttctcctagtctcaatcgagaagaagtgatgaaactcctcagtatatttgagtctcggttgtcatttcttctccttcagtccattaaactgctatcttcaactaaaaagaaaacaagcaataacatcgaagatgacacaattctcaaaaccaacaagcacatttactcccagcttttgagagcaactgcaaataaaaccgcgactcttctggaaagaatcaacgttatcgtccacctgctgggccagcttgccgccggcagtgcagcgagcagcaatgccgttcagtgactgcacagagccgtgtcccagacacgctgtcagtgccttcaacacggagccggtttgttcattcggtgctttgtttcattaaataatagggaaatatccattttaaaacaggtatatcagtggaaacacagagttattttaagtgacagacaaattacggttgagttctgtggcttcttcacttgaagtgctaacatcagaatcaaacttaaagcttccactatttatgtctttgagaagtatgtagtacctcggtattaacagacctgctgtgatgcagttacactttcacgtatttttgaagtatgtcaagctacacgggtctaagatatgattattttggataaaatgttactttggtcaagagaacttttatccagatgacattacaggttcaagtgggttaaggagacctcctgtacatctacagtgtttccttttaaattgtccagaaaaaaggtgtgttcttcataagcttcagtgcaggatttttcaaagacgagctgttgtgcaatttgctgtatttaatgcatgttctgaaaggattcacttttgactttatatgacagttgatcaagaacaggtactacccctttttttcatttcaaacttgaaactgtgaataaggtaagaaaactattttgaataaataaactatttatttaaaaaaaaaaaaaaaaaaaaaaaaaggggggaaaaaacccggggggccaatcgccccttttgaaagc

SEQ ID NO: 6759 - DNA, 2199 bp, Homo sapiens
tattttttttttttttttttaatggtaattattattattttacaatacgagcaaacaagcaattttcaggccttattcacttcatccgggtggctggcctccaaagtttgagtgccctctggggctggcaggcaggaccagagctccttctgttgtgtggtgaggagtgggcatctgtaggacttttctgggtccagagggctcttgggcttctcggctcccgcagctcctccaccactcctcagagaggcagctgaatttgtggatttaggggagatattatgaggctgttgtcattagggcgattgcggtggaatcgctgaatcttgactcggcggtggttggctctccctctcctctctccctctccctctccctctctgtctcgggttctctctctgcgcgcgcgcaccgggccgctctcctacctccctctctatgtggctgcgcgggtgtgtgtgtgtgtggatgtgtgtggggtgtgggtgtcccttacgcccttcctcctctccctcctcctcctgctcccccctcctttccttctcctcctcccccctctcctctccctcctcctggtcctcatcgcccctctcctcctcttcctcccctctctcttcctctccctgaattttctcctctcctctcaggtcagtccatggtattccgctcccccctagacctctattcctcccacttcttgttgccaaacttcgccgattctcaccaccgctccatacttctggcgagtagcggcggcgggaacggtgcgggaggcggcggcggcgcgggaggcggcagcggcggcgggaacggtgcgggaggcggcggtgctggcggagcaggcggcggcggcggcggcggctccagggcccccccggaagagttgtccatgttccagctgcccaccctcaacttctcgccggagcaggtggccagcgtctgtgagacgctggaggagacgggcgacatcgagcggctgggccgcttcctctggtcgctgcccgtggcccccggggcgtgcgaggccatcaacaaacacgagtcgatcctgcgcgcgcgcgccgtggtcgccttccacacgggcaacttccgcgacctctaccacatccttgagaaccacaagttcaccaaggagtctcacggcaagctgcaggccatgtggctcgaggcgcactaccaggaggccgagaagctgcgcggccgcccactcggcccggtggacaagtaccgcgtgcgcaagaagttcccgctgccacgcaccatctgggacggcgagcagaagacgcattgcttcaaggagcggactcggagcctgttgcgggagtggtacctacaggacccctaccccaaccccagcaagaaacgcgaactggcgcaggccaccggcctcactcccacacaagtaggcaactggtttaagaaccggcggcagcgcgaccgcgccgcggcggccaagaacaggctccagcaccaggccattggaccgagcggcatgcgctcgctggccgagcccggctgccccacgcacggctcggcagagtcgccgtccacggcggccagcccgaccaccagcgtgtccagcctgacggagcgcgcggacaccggcacctccatcctctcggtaacctccagcgactcggaatgtgatgtatgatagccaaggccgccctcctccctctccttcccctcctcccccactccttcccctccgcctcctagccctcctcctcttcctcctcttccttctcctcctccatccccagaacaaaccgaaatcaggatacccaaccatacacacatacaagtccacacacactcccaccccagccaaaaatatataaaaaacaagaaaataacaaattaaccgcaaactatcaacaacccccaaccaccatctaccactacggccaccccaaaggaccccgacgccaacagacagtcaaacgctgatgttgcgggcagaaaacataaaagaggtgacaattgtatactttctaggacaagcacggcttctcctttcggttcccatggacccggcaccccacctgcatgacgatttatttgtatctgggaaaatattctctctagttaaaaatgatttaaagagtcgactatacaaagatcaatcaccaccacgaggacaagagggcaatgagcatgaacagacagagtaagaaacaagtcgccgtctccgttccg

SEQ ID NO: 6760 - DNA, 4589 bp, Homo sapiens
gatttgtttggacaccgagcaggagctggcggcgctgcagacgaaaggcaggaaagggcaggccgggtgagcagacggatcggcgactagacagccaaccagcaacaacgaactgagctcgcatactaccggttacgcatctaaccaaccgcccatctagctaacccgagcccctccaccgtcaactcaggttcggccggtccccggcccgcctgccggagccgtggtggcagccccgggaggagcactggcgtctgtttccttcgattctcgggattcgaagatggctgccacagtcagcgccgaaaagttgtgctaaaaaagcaccaccaagatgtctctaaatgagcgctttactaatatgctgaagaactaacagccgacgccagtgaatattcgggcttcgatgcagcaacaacagcagctagccagtgccagaaacagaagactggcccagcagatggagaatagaccctctgtccaggcagcattaaaacttaagcagaagagcttaaagcagcgcctgggtaagagtaacatccaggcacggttaggccgacccataggggccctggccaggggagcaatcggaggacgaggcctacccataatccagagaggcttgcccagaggaggactacgtgggggacgtgccaccagaaccctacttaggggcgggatgtcactccgaggtcagtgctgtgtaccctgataattgtcgggccctactcccttcccttttctcttgggctgcttatggacacgtttgtttaacatctttaagcctgaatttgtattaatataataacttctgaaatcacatatttttaatagtgctgcatgtcttttatcaataccattccttttctgataatgtgcaatggtgagaggctatgacctgcgtaacaacaggtaattcatgtcatctccattccattttaaaacaccctgctgttgcttgaatcaaagcacattcaagttctagaaacaagtcaaacataagaaatttataggtcttttggcctatatctctttgttcctggtgctagtaaaacactgatacagctggagaggacaagttgacccacagcacttacctatatatgttcatttggggcactattactctgttccctgtatagttcttgttccctagaagaatctgttgagatcaggaaccatagcatttatttttaaatttaccataatgctaggcatctatctgattattcagtagatatttattaaatgtatgtacttactaattgaattaactcccaacttccaaaaatggatttgtggtcagacttgttgaattgattgaataaagagtagcttaatctgttcacagtatgcagcttgccccagccaacctaaaaactaactgaattaccttcatttaaccctcaccgccttcctttggttagaatctactttgtgtctcttggatttacctgcatatacattgtatgcctcctctctaaggtcaaaacctgctccgaggtggacgagccgtagctccccgaatgggcttaagaagaggtggtgttcgaggtcgtggaggtcctgggagagggggcctagggcgtggagctatgggtcgtggcggaatccggtggtagaggttagtcagctaccaacttcagagagtagctcccccttactttcctcccttaaaaactcagagccacctttctgcacagcttcaagtcataggcaggcttctttgtttgccttgttttgttatttgaaactggcttatttttcaaattaccatgctggtagtgcaaaagtctcatgatttttccaagaatcaatcaagtgcatattatagagccagattatatgccatcttcctccaagctcttgcaaatttaaattgtatagttgaaaataccccccaaaatggtcagtttagggttttgcctttctctgcccctgtcccaccaccatcaccaccacataccaccctgtagctccaaatcctggtttgagtcacatgagaatatagaagagagagagagatacaaagatgaagtagagttaagagggtggtgagacttggagctgggcattggctctgaaaccaaataaattcaatgtcacatttggtgcctgtggagaaccagagatgactttttttgcttaaggtagagagcaagatggaattattatcagttaactaactggctcttctgatcaatcttgcctttgacactttattgatgtttgtcttgtgacctcatgacccagattgggaaagagtttaatgatgttgctgctgttaatactaaatctcatgggagccttctggtttagagcttagtggaaaactcccaacacctgtccagaaaaaaaacactattgaagcccctgtgtatatttgctttggttctcttaaaaggtgtcttgggtcttccataacttatgaccttgaagttgccaaggaataataactgttaggaaagaaaagttgataaccaagggcttgttttcttctctcccattatatgatacttactgagtgaagtgcaagctagtttgggtttcaggatgaaataacatgtttccaaattatcttgacttggatcctgagagacatcacgagggtgggagagactaaaatagcttttcaaaaagctgagtttgttttgttaactgaattcacactgcttctcagataaccacaattgtcagttgtcataaggtaactagaattaaaggtagaaatagctaggacaactcaaaatattttttcaaatctcccctacattgttcctgtgtcagaaaaactcagtctcctgacacatgaggtcagctagctcattagacttgataagtttaaggacaggtgagatgactttccagaagggtctccaataaacttaatttgaaaactgtcttgtcttcacacccctgatgctctgtgctcttgttaccacctccctatcttaccaaatggggttatctgtcatgtattttaattatgaacttagtgaatctcaaatgttaggtaattttatcttaggattgattaaggttttttaaaattatagttgccagttaattattttcctttattgatagaataaaatttgttaaaatagcatttagagatgatcatgtgatagaggattcattatgtgtgctttccatgtgttgctttctacccattgtgtttcctttttttccagatttctcctctttgccctgcccttcagcttttctcagctaggccccactgctctaaggggcatttactacagcacctattaaacttacttgtaactgtctctttttttttttttttcccctttgggccaggtcggggtatgataggtcggggaagagggggctttggaggccgaggccgaggccgtggacgagggagaggtgcccttgctcgccctgtattgaccaaggagcagctggacaaccaattggatgcatatatgtcgaaaacaaaaggacacctggatgctgagttggatgcctacatggcgcagacagatcccgaaaccaatgattgaagcctgcccatcctcccatgagagactcttgttagtcaacacatctgtaaataaccttgagataacagatgagaagaaatctgattgatgctggatggacctatcacaataggctgtggacttacttgccaccagcttgtgcatttagtgtgttccttttactttttgatactgtgttgtatgaaacccttttgtcctttgatttggttttttgtttttgtttttttaggggggagggggggtttcccctcctttgcccagacttctctttgaacacaaacgcattagccttgtggctagaacaccctcttcctacctctgtctcccctcacttgtcatatgctctgacatgctaacatttcttttgttcatccctgttgcccccacagaaacatcccagaaaaaccggtcagtgttccttcctccctgatccttaggtttctgaaatagggttctgttacatcctcttcgatagcctgtttaaaatgtttagaaggtctggagctcaaaaatgcgttcttccacattgataatttagtaaactgagaacattgacatcactacagggcagcataagaggttgcttacatgtggtagcagctctggtttgattcaagttgctaccatgtacattgacagcacatataccataaccagcgtgttgggttgaattgcactttctacctttgtatgagatttacagactttccttctgggtttgtatcatgaccagaggggtactatagggttggtttatactgcaatatagaggatcagaagccatttgatttggtaggtgtgtcagaagggagaatgatggcagacgaactgctggaagaggtcagaagatagccatgctaaaatgcaattatatcctcatgtttatcccaaactaatcttggacttttccactcattagctttgttttgcccttgtttcccttgaaggtttaagttcaaccatattctgtcaactgttcagtttcagtggaatcttgtatttctggttcattataacaaactgttcgcttaaaaaaaaaaaaaaaaaaaaaaaaaaaaa

SEQ ID NO: 6761 - DNA, 1353 bp, Homo sapiens
  misc_feature (177)..(206): n is a, c, g, or t
  misc_feature (1217)..(1222): n is a, c, g, or t
  misc_feature (1225)..(1225): n is a, c, g, or t
  misc_feature (1227)..(1227): n is a, c, g, or t
ccacgcgtccgcccacgcgtccggccgccagggcctggccgaattccggcggcctctctcctctccctcagtgactcctgagccacagcccctccatggcccagaaggaagaggctgctgtggccactgaggctgcctcccagaatggggaggatctggagaacctggacgaccctnnnnnnnnnnnnnnnnnnnnnnnnnnnnnnccctttgagattgtcacaggagaacggctgcctgccaacttctttaaattccagttccggaatgtggagtacagttccgggaggaacaagaccttcctctgctatgtggttgaagcacagggcaaggggggccaagtgcaggcatctcggggatacctagaggatgagcatgcggctgcccatgcagaggaagctttcttcaacaccatcctgccagccttcgacccagccctgcggtacaatgtcacctggtatgtgtcctccagcccctgtgcagcgtgtgctgaccgcattatcaaaacccttagcaagaccaagaacctgcgtctgctcattctggtgggtcgactcttcatgtgggaggagccggagatccaggctgctctgaagaagctgaaggaggctggctgtaaactgcgcatcatgaagccccaggacttcgaatatgtctggcagaattttgtggagcaagaagagggtgaatccaaggcctttcagccctgggaggacattcaggagaacttcctatactacgaggagaagttggcagacatcctgaagtagggcaactgggctttgcctcacgtattcctgctgccaccaagagacagcaatgacatgtacagccatctgggacatgcctgtcttcctaataccatttggagctggacaacatttgacaccaaccaatcatactggacaaggcccttagaggacttgaaatatacttctcatgctgtagtttatttaggctgtgactctctctctaatgctgctctcgggaaggacgaaagtgacctgcaaggagagaaatgcaaccatacatgggctccagtcaactatgggactgaaggtcctaattgctcacccaagggggctgcttaacacaaacagcctcagacccgaggtttagatttctgaaatatgcattttatgttaagttgggtatttttttaaaaaaagaaaaacagcaacattaataaaagaagtggtgtggcaaaaaaaaaaaannnnnnttntnttttttttaaatttttttaaaaattaaaaactcggggggggcccggcccccattcccccttaggggagtgtattcgcgcgctccctggccgggtttacaacgcggggatgggaaaaacctggggta

SEQ ID NO: 6762 - DNA, 504 bp, Homo sapiens
ttttttttttttttttgtggtttgggtcaggtttattagattgttatgaatcccagcttttcctcctaaagcaggcccacacaatgagatctgcaaatccagaaacctaacaaaggcattaagttccaaaagcctgtttcctcctacaaaattcccattatcagtactgtgatttctgcttttcagtgttgaccccaagccatgttcctgagtcatggctctgagtggcccagcattaataagcccagcgtgcaagggcttgttgacagaactctgaaccgctttcaggcagctgattagaaaaaactggcgagtctccaagttgagtgatttagaggccttctgggggtcagaacatgagaacagagaccaggaacctgagtagggctgtctggagattttttgccccattttctgagaagctctgtccttgggaggtaaaagctactttggttcatccaactgggtgattatgaaatggggtttctgaagactgggcttcct

SEQ ID NO: 6763 - DNA, 5040 bp, Homo sapiens
  misc_feature (864)..(871): n is a, c, g, or t
  misc_feature (3601)..(3615): n is a, c, g, or t
tcctctccttgctcgcggtacgggggtggtgccgcgctcctggccccgcgcgggcggacggcggaggcgcctcccagcctgctatgggatggatgaagaagagaaccactatgtctcgcagctcagggaagtctacagcagctgcgacaccacggggactggctttctggaccgccaggagctgacccagctctgccttaagcttcacctggagcagcagctgcccgtcctcctgcagacgcttctcggaaacgaccatttcgccagggttaactttgaggaatttaaggaaggttttgtggctgtgttgtcttcaaatgctggtgttcgcccctcagatgaagacagtagttctttggaatcagctgcctccagtgccatccctccaaagtatgtgaatggttctaagtggtatggccgtcggagccggcctgagctatgtgacgctgccacagaagccagacgcgtgccggagcagcaaacccaggccagcctgaaaagtcacctctggcgctcagcgtctctggagagcgtggagagtcccaagtcagatgaagaggccgagagcactaaagaagctcagaatgaattatttgaagcacaaggacagctgcagacctgggattctgaggactttgggagcccccagaagtcctgcagcccctcctttgacaccccagagagccagatccggggcgtgtgggaggagctgggggtgggcagcagcggacacctgagcgagcaggagctggctgtggtctgccagagcgtcgggctccagggactcgagaaagaggaactcgaagacctgtttaacaaactggatcaagacggagacggcaaagtgagtcttgagaatccagnnnnnnnnctcttcagtcatgagcccgcgctacttctagagtcttccactcgggttaaaccgagcaaggcttggtctcattaccaggtcccagaggagagcggctgccacaccaccacaacctcatccctcgtgtccctgtgctccagcctgcgcctcttctccagcattgacgatggttctggcttcgcttttcctgatcaggtcctggccatgtggacccaggaggggattcagaatggcagggagatcttgcagagcctggacttcagcgtggacgagaaggtgaaccttctggagctgacctgggcccttgacaacgagctcatgacagtggacagtgccgtccagcaggcagccctggcctgctaccaccaggagctgagctaccagcaagggcaggtggagcagctggcaagggagcgtgacaaggcaaggcaggacctggagagggccgagaagaggaacctggagtttgtgaaagagatggacgactgccactccaccctggagcagctcacggagaagaaaatcaagcatctggagcaggggtaccgggaaaggctgagcctcctgcggtctgaggtggaggcggagcgagagctgttctgggagcaggcccacaggcagagggccgcgctggagtgggacgtggggcgcctgcaggctgaggaggctggcctccgcgagaagctgaccctggccctgaaggaaaacagtcgcctacagaaggagattgtggaagtggtggaaaagctttcggattcggagaggctggccctgaagctgcagaaggacctggagtttgtgctgaaggacaagctggagccacagagtgcagagctcctggcccaggaggagcggttcgcagcagtcctgaaggaatacgagctcaagtgccgggacctgcaggaccgcaacgatgagctgcaagctgagctggaaggcctgtgggcgcggctgcccaagaaccggcacagcccctcatggagcccggatgggcgcagacggcagctccctggactcggcccagcaggcatttcattcctgggtaattctgctccagtgagtatagaaacggagctgatgatggagcaggtaaaggagcattaccaagacctcaggacccagctggagaccaaggtaaattactacgaaagggaaattgcggcactgaaaaggaactttgagaaggagaggaaggacatggagcaggctcgcaggcgcgaggtcagcgtgctggagggtcagaaggccgacctggaggagctccacgagaagtctcaggaggtcatctggggcctgcaggagcagctgcaggacacagcccgcggccccgagcctgagcagatgggcctggcaccctgctgcacccaggcactgtgtggcctggccctgcggcatcacagccacctgcagcagatcaggagagaggctgaggcggagctgagtggagagctgtcggggctgggagccctgcccgctcgcagagacctgaccttggagctggaggagccgccgcagggacccctgccacgcgggagccagaggtcggagcagctggagctggagagggcactgaagctgcagccctgtgcgagcgagaagcgcgcccagatgtgcgtatcgttggccctcgaggaggaggagttggagcttgcccgcgggaagcgagtggacgggccctccctggaagcagagatgcaggccctgccgaaagatgggctggtggcaggaagtggccaggagggcacacgtggcctcctaccactgcgtccgggctgtggggagcggccactggcctggctggccccaggtgatggcagagagtctgaggaggcggcaggagccgggcctcgccgcaggcaagcccaggacacagaagctacgcagagcccggcccccgcccctgccccggcatcccacggcccctcagagaggtggtcacgcatgcagccctgtggagtggatggggatattgtcccaaaggagccagagcctttcggcgcgagcgcagcggggctggagcagcctggagcccgggagctgcctctgctgggaacagagagagacgcctcgcaaacccagccacggatgtgggagccacccctgaggccggccgcttcgtgcaggggacaggctgagaggctacaggccattcaggaagagcgagcacgaagctggagcaggggcacccaggagcaggcctcggagcagcaggcccgggccgagggcgccctggagcctgggtgtcacaagcacagtgtggaggttgccaggagagggtccttgccatcccacctccagctcgcagacccgcagggttcctggcaggagcagcttgctgccccagaagagggggagaccaaaatagcgctggagagagagaaggatgacatggaaaccaaacttctacatctggaggcactgtctgtcctggctctggggcatcatggacatctgcagagagatcgacagactggagttccatagactttctgaagaaaacactttgttgaaaaacgatctgggaagggttcggcaagagcttgaagctgcagaaagtactcacgatgcacagaggaaggaaattgaggttttaaagaaagacaaggaaaaggcctgctctgagatggaggtgctcaacagacagaatcagaactacaaggatcaattatcccagctcaatgtcagggttcttcaactgggacaggaggcttctacccaccaggcccaaannnnnnnnnnnnnnntgaccattcagatgttaacacagagcctggaggaggtggttcgcagtgggcagcagcagagtgaccaaatccaaaaacttagagttgaacttgaatgcctgaatcaggaacatcagagcctgcagctgccatggtcagagctgacccagacccttgaggaaagtcaagaccaggtgcagggagctcacctgaggctgaggcaggcccaggcccagcacttgcaggaggtccggctggtgccccaggaccgtgtggccgagctgcatcgcctgctcagccttcagggagagcaggccaggaggcgcctggatgcacagcgggaagaacatgagaaacagctgaaagccacagaagagcgggtggaagaggcggagatgattctgaagaatatggaaatgctcctccaagagaaagtggataagctgaaggagcagtttgaaaagaacacgaagtccgacctgctgctgaaggagctgtacgtggagaacgcccacctggtgagagcacttcaggccaccgaggagaagcagcgaggcgccgagaaacaaagccgcctcttggaagaaaaagttcgcgctctcaacaaactcgtcagtaggattgcccccgcagccctctctgtgtaaagacagattattttctaggattcattcgaaagcacatcttttaaattaagccactgtgctgccttagattccgtgggtcatgagccatgagtcctgggacatctgaggattgggattctttgttcaccccgcagatagttaatgaatggtctgccctgggcaagatggaggtgggggctgggggaatatgcatgttgcagaagccggcgtttttattagcggtcctgagtaatttcccttggcaaaattcccagttttgccactctctggagccagatcctgggagctgtcagcaaggagcaggtaagtgagcagttatggacagcactttccatgtggtgcttccgaccctggctgtcagagtgaaatgtaaagtcagggctctgtacagttttgccatttcactgttctgctttaagcttagcttattagaactcttggtggagggtgcgtacacacattccagaaaaggcttcactcgctgggaacgtcaacccagcgagaaaggaggggaagccccttctccggggaccttatctgtggactcaggaatgatggtgtttattgcaaatgcacaatctttttcccattgaaatgtcatcacactggaaattgtactatatgtaaaaaaaaaaaaaaagtatagttttatatttgaaatgtatgcaaattatggccatatggctgattggaatgtactactgtaatataaaaagtcactgtatttgcaataaattcttttctattaaaattgaaaaaaaaaaaaaaaagaaaaaaaaaaaaaaaataaaaaaaaaaa

SEQ ID NO: 6764 - DNA, 922 bp, Homo sapiens
tgggagcgtgggatggcggatctctctcgggtggagtcttctgacagctggtgcgcctgcccgggaacatcctcctggactcaatcatggcttgtggtctggtcgccagcaacctgaatctcaaacctggagagtgccttcgagtgcgaggcgaggtggctcctgacgctaagagcttcgtgctgaacctgggcaaagacagcaacaacctgtgcctgcacttcaaccctcgcttcaacgcccacggcgacgccaacaccatcgtgtgcaacagcaaggacggcggggcctgggggaccgagcagcgggaggctgtctttcccttccagcctggaagtgttgcagaggtgtgcatcaccttcgaccaggccaacctgaccgtcaagctgccagatggatacgaattcaagttccccaaccgcctcaacctggaggccatcaactacatggcagctgacggtgacttcaagatcaaatgtgtggcctttgactgaaatcagccagcccatggcccccaataaaggcagctgcctctgctccctctgaaaaaaaaaaaaaaaaaaaaaaaaaaaaaaaaaaaaaaaaaaaaaaaaaaaaaaaaaaaaacaaaggggggagccagcacactttttgaaaagggggcccaagggggggaaaaaaagggggggggggtaaaacagttggtggggagaagccctcttgtggtttggggaagaccccctctgggcgtggcgtatggggacgccaccagaaattaggtccgggattaaaattggtgtgatgtgaccggttttgtgcggattgtcggtttttattatgctcgtccgagtataataaagggggaagacagtaggaggaacaacgagaagagaagaatatgaaaggagagagagtagagcagatgtcacgaagagtgataggc

SEQ ID NO: 6765 - DNA, 882 bp, Homo sapiens
cggcacagggtgactgaaataggagaaccacgtccaggggtcaggggggattcctctgaaatcgcagctggaacatttcgtaatagttctggtactgcacccatagatactgtcacctctactctttcttccaatcaccattagcagatgccacaggattcctacttctgaaagtttttgggccccgcagtggcaagaccggagaagccaataaagtttaaggctacatgtttattccatccacaaatttggtgaaggaggaaatgtttacaattctgccatgccatgaataggagttttccaccgggtgtacactgctgttaacaaggtgtaaatacttgtccagtaaagagaccgtacggtactgctgatggacgtcccaacacaatgccagatgcaaaaacttctttggtgattgcttttgataacactgagtggctaaaggtcttctttcacatctttgcccacctcaaatcctgaaggcaaggtctctggaatttgaggctgtgccctcacatgcctccaaggcaccaacaaagcaaaatgaagagtctgcactgcttatcagttgacccaacactcagtccacattggaggggaaggggtggtgggctgaggatgtcttcttcctgtccaggatgcaatatggtcaaggatgaaaggaaagagatgctgggagcaagtctgcattgaagatgtatttctgttgctttactaccaaccctggttataaatgatgaaactataatgggtctgtaatagctactttcccatatagctcttgtctgtacatacataaaattaaaaataatagaatacttccattactaaaaaaaaaaaaaaaaaaaattcatttaccatttttattccaaaaacatgatt

SEQ ID NO: 6766 - DNA, 3580 bp, Homo sapiens
  misc_feature (96)..(104): n is a, c, g, or t
cttcatctgctcatcctcaaaattgggccaatgctacctcctatccagctagtgtatgcaaggccctgacacagggcccaggacacagtaagtctnnnnnnnnngcagctactgctacttttaaaagtggtaaacagtaccatttcgttcaagtttagccagtatgacctaaagtgtcacaaaagcatcaccgtaagaataatgtaagaatgctatcattttataaatcccattgttctgcctatatgcccgtggcacgtgttcagtgattatttacaaatgtttgacctgccctgctccctactgagattcttgaggaagtcctggctcatttttatggccacatctctactgctttccctcagctcactgcctttcacgtatttgtgggtttgcctgggtgccatggatctccaagggttctgtgaatagagttcaggggttgatgaattgggacagggggaaaaaaatgcattttcagtgactctgatatttagcatttccttcaattatggatgtaggccagaaacttcagtagtatttgtagtgcctgtcactttgtcaccagtagaagtcacagatattgtcatcacacatcacggttacttagctacctcaaaataccacttatgctcatcacaactttgaaattacagtggttattagacctgccgctagggtttgttgcttgaagtgttaacaaagaagtacatgcatcactatctcataaattgctttataatattttgataacaggctgggcaaggtggctcacgcctgtaatccttaacactttgggaggctgaggtgggaggatggcctgagcctaggagtttgaggctgcagtgagccacgatggtgccactgcactgcagcctggatgacagggtgaaacccttctcaaaaaaaaaagttgatcactgaattaaaaagcataaactaagtcagtgtccatttggggaaatgggcctagaagctcccctctgtctgagtgtcaaatgatcaagtgactgaggagccaaatcaagcttctctatgcaggagccccccaggcaggcagagagctgctgcagtgcagcgtgttggccaaggcagttatgtttgctgtgactctgtcctttctgctgtttttcttacattcaaaggatgtgaaatattggagggataaaaaaaattcccaccccattcttttttccccttagtaaaaactgtgctagttgttggaagattgagtctactcagtttcattagcagcagctttgtagggactgggaatgtcctgttgtcccagccagagggaggaggagacttgagtgtgtgcagcccacggtgaaggagtaaaccaggagcagcactaatagctaatgggtattgagtggcttttttctttccttctaccaagcattgttccaaactttatgaaagaattcttattgatgtctccattttcaggtaaagagacaaagatatccttgcctaaagtcaagagctagtgaatgggagaatgggtctggtctcctaaccactaactctaccatgctactctacctcttgagtgctaaggtgcaaaaccttccctgggccagagaaatggtcaccgtacaaagcctggcacagagcatgtgctcagatagcacctgttatcaggtgaatggataaagatcagaagagaagggaaagacatgcctttcgaacaaattaaaagagtagtggaaaacatcaaaatgaaaccaataatgcctcctcaggaagctgaccgtcgggaaggatgaatagcaattcagtctacaaatatttcctgaacacttctggctggaaaccttggaccaattaatgactatgctgtagacagcacatacagacagtgctggctgcagtctgggcaagtgaggctcctgcctggccaggacaggaaggctgacccagaggctcaactctctctcaaaggctctgtgaccttaggttgcttaacctcttaggacctcaggctcctcactgtccactgagcaccccttttgcaatggcattgtatagttctccctttgaagttcttaagcaattctgccctgatatatcgtctcagggagccatttagttctgtccaaagtagtgcctgcagaggcactgtgggttcctctggcctatctctccctttgtagtcatgagggtcctgtgtggcaagtggcctgggctcaccccatgtacggcaatgatcctggcatcgtgctcctatgaccggaaagtcattatctggagagaggaaaacggcacctgggagaagagccacgagcatgcgggacacgactcctcagtgaactcggtgtgctgggccccccatgactacggcctgatcctggcctgtgggagctcggatggggccatctccctgctgacttacaccggggaaggccaatgggaagtaaagaagatcaacaacgctcacaccattggctgcaatgccgtcagctgggcccctgctgttgtacctggaagcctcatagaccacccatcggggcagaaacccaattacatcaagaggtttgcatcaggtggctgtgacaacctcatcaagctgtggaaggaggaggaggacggccagtggaaggaggagcagaagctagaagcgcacagtgactgggttcgagatgtggcctgggccccctccatcggcctgcccaccagcaccatcgccagctgctcccaggatggtcgtgtgttcatttggacctgtgatgatgcctcaagcaatacgtggtcccctaaattgttgcacaagttcaacgatgtggtgtggcatgtgagctggtccatcacagccaacatcctggctgtctctggtggagacaataaggtgaccctgtggaaggagtcagttgatgggcagtgggtgtgcatcagtgatgtcaacaagggccagggctccgtatcagcatcagtgacagagggccagcagaacgagcagtgacaagacaggtggggcctggctccccacccgccagctccaggactgccccttcctgggccaactaaccaaacaactgggaagagcccccaactccaacaggattattttcccaggaggagttacagatgcagccacagattgatcatctgccttaacgtgatcggagatgctttgtaatctactgtccagctgaaagcactcatgttacgaggaagaaactacaagtgatgttcaaatctattttgggtcatttttatgtacctttgggttcaggcattatttggggggttttgtttccaaaggaactaaataaagtcatattgcttataaaaaaaaaaaaaaaaaaaaaaaaaaaaaaaaaaaagggggggggggaagaaagataacccccgagggggccacgtttacgggggtaccagggtttctggacaagggcgcccaatagggggccgaaaaaagcgaagcaagggcggggttaacaacgccggggggacaccggacgggatctctggagaggactactcgggcggcgaaagggacacaacacagggaatagcgcacgacaaaactcagggaagggacaccggaagctggcgaaattggacggtggtggct

SEQ ID NO: 6767 - DNA, 2437 bp, Homo sapiens
ctctacggatcctattagctgtgtcattacaggatgtacctattactaggtgcattttagaatgaaatattgatattttattagcatataattgtggccatatatctcagattttctgaggcagatctaattttagataattctgttggtagaccatgtgatccttctttttggttttggaaatataatcattgttaatgttttccctccaaatagaatactgttttatccatacaaatcataacagcatctatcccatgctagggttggaaactgatattggtattacttgtgttttttcttagtgtgttttatttcccagtttcatcttcttctaaaaatgaaaatatggtgccttccctccctccaggaagactggcaaatatttccttttatttactgctgctgtggagtgatgagatatgcactttactctttaagattcagcaaaaagcttttcacttctcagtatatccagaatacatcatatctgggacttaggaaaatttgccaagcaatctttgtttttatagatactaatgttgaccctctccagcgttcaatgttataaatagaacaagtcaagctagtgtttatctcctccccctccccaaaactgtggcacagcatataaaaatgtacctcaataatgttctattaaaaatgggacaggggccttatgttttcataatttcccaacaatgtgccgccatatttttgcctcaaggtaaaggttttaacagatgaaaaagtacttcccaattcccccgtgctattcctaacctataatgcccaaatgttttgtgcaatgtgtagtgtgtgtgtataaatacatatattcttgaaatagacataccatcagagacatcattcacaagtaactgatgtattggcatctcattcatatttctgatgtgtgaggtatatggtactaattaccttttccttgatgtttgccaaatttgaataaaggcattggtacgaaattacagaatgtaaagaaaatgtttttggcttgaaaaattaacatattttatgacgtaccacagtatactctgcccaaaccagcaccctatctatctttcctgttctttacatccctgttccccatccctacttcctcatttttggtataacacagttcttttgtagcatcattataattgcagttctatggcaattggacagttatagcatggaaacagactggtataaatagtacagtagtcaccagtgtgccacatttgcattagtaatgcaaaatatacattttataaaggacaaactttgtgttatgttttattttcattacattgtataatattgtaagactattgtatgtcctaatttgcattataaatgtttttttcctacgtaaaggcataaatatagcaactttgtataaaggtagcttattagatttttaattttttcttttataaaaaattgtccaacagtgggactaccattgccaaattgtatatgaaatatgaattttacccccatggttaatttcttttataaacattccatatttctctaataaaaagacataagtgatactgtactatgcatacattgtatcttaatgctgtttcagatcagcattttaaattttggtttgcatttttaatattggcaaaacgtaaccactgttaattaaaataaaaccttgttgtatatgtaacaacataattttccctctatcccttcccaccctttgttctctatttctccctatcagtgccaacttcatacattttgtagcatggcaataaaatataacttttacactgaggccgagtgtggctttttggaggaagtggggatgggacgattgccctctagttgtcctttgcatatgactgttttttgccatataagccatgtcatcaggcatgaaaagttttctcatatatgatgtaaacttgcttttaaggacaagtgtgaatgtgctttttaagcttaatttttgtcatgacaactaattttttttatctttggagaagtcagagttctttacaatcaaacgtttattaactggagtacttagaataagctagtaattgaatttagttcaagggctaagcaacacatttttaaatccttatttattgtagagtattagtatactgtcctacaaattatgtaaaatatggtttaatattagatgactttggattttgcaatgccttactgttgtcattctagcataaatatccataatgaggtactcaagttgatactggaagctgagctgatcatacactgacctgaagcattcatgaaaagctgctttattgaataaagtctgattggagttcttttcatgctcactttccccttattgctgaaagtagattgcaataaaaccccaataaaacgtttggtcggatatctaaaaaaaaaaaatatttaaaaaaatttggtcgtaaaa

SEQ ID NO: 6768 - DNA, 7059 bp, Homo sapiens; identical to SEQ ID NO: 5545
  misc_feature (138)..(168): n is a, c, g, or t
  misc_feature (245)..(268): n is a, c, g, or t
  misc_feature (499)..(519): n is a, c, g, or t
  misc_feature (598)..(612): n is a, c, g, or t
  misc_feature (834)..(872): n is a, c, g, or t
  misc_feature (1136)..(1156): n is a, c, g, or t
  misc_feature (1591)..(1611): n is a, c, g, or t
  misc_feature (1709)..(1741): n is a, c, g, or t
  misc_feature (1892)..(1944): n is a, c, g, or t
  misc_feature (2606)..(2683): n is a, c, g, or t
  misc_feature (3736)..(3755): n is a, c, g, or t
  misc_feature (4269)..(4297): n is a, c, g, or t

SEQ ID NO: 6769 - DNA, 4091 bp, Homo sapiens
gtctccccgccccgcccctcgtctcctccaagatggcgagcggcggcagcgggggggtgtcagtacctgcgctgtggagtgaagtgaaccggtatggccagaacggcgacttcacgcgcgctctcaagaccgtcaataagatactacagatcaacaaagatgacgtaactgccctgcattgtaaagtggtatgccttatccagaatggaagtttcaaggaagctttgaatgtcatcaatactcacaccaaagtgttagccaataactctctctcctttgaaaaggcatattgcgagtacaggctgaacagaattgagaatgccttgaagacaatagaaagtgccaaccagcagacagacaaactgaaggagctttatggacaagtgttataccgtttggaacgctatgatgaatgcttagcagtgtatagagatctcgtccgaaactcccaagatgattatgatgaggagaggaaaacaaacctttcagcagttgttgcagctcaaagcaattgggaaaaagtggttccagagaacctgggcctccaagaaggcacacatgagctgtgctacaacactgcatgtgcactgataggccaaggccagctgaaccaggccatgaaaatcctacaaaaagctgaagatctttgccgccgttcattatcagaagacactgatgggactgaggaagacccacaggcagaactggccatcattcatggtcagatggcttatattctgcagcttcagggtcgaacagaggaggctttgcaactttacaatcaaataataaaactaaaaccaacagatgtgggattactagctgtaattgcaaataacatcattaccattaacaaggaccaaaatgtctttgactccaagaagaaagtgaaattaaccaatgcggaaggagtagagtttaagctttccaagaaacaactacaagctatagaatttaacaaagctttacttgctatgtacacaaaccaggctgaacaatgccgcaaaatatctgccagtttacagtcccaaagtcccgagcatctcttacctgtgttaatccaagctgcccagctctgccgtgaaaagcagcacacaaaagcaatagagctgcttcaggaattttcagatcagcatccagaaaatgcagctgaaattaagctgaccatggcacagttgaaaatttctcaaggtaatatttctaaagcatgtctaatattgagaagcatagaggagttaaagcataaaccaggcatggtatctgcattagttaccatgtatagccatgaagaagatattgatagtgccattgaggtcttcacacaagctatccagtggtatcaaaaccatcagccaaaatctcctgctcatttgtccttgataagagaagctgcaaacttcaaactcaaatatgggcggaagaaggaggcaattagtgacctacaacagctgtggaaacaaaatccaaaagatattcacaccctggcacagcttatttctgcttactcacttgtagatccagagaaagccaaagctcttagtaaacacttgccatcgtcagatagtatgtctctaaaagtagatgttgaggctcttgaaaattctgctggtgctacatacattcggaagaagggtggaaaagttactggagatagtcaaccaaaggaacaaggacagggagatttgaaaaagaagaaaaagaaaaagaagggaaaattgcctaagaattatgacccaaaagttaccccagatccagaaagatggctgccaatgcgagaacgttcttactaccggggaagaaagaagggtaaaaagaaggatcagattggaaaagggacccagggagcatctgcaggagcttcatctgaactggatgccagtaaaactgtgagcagcccacccacctccccaagacctggcagtgctgcaacagtatctgcctctacaagtaacatcatacccccaagacaccagaaacctgcaggggctccagcaacaaaaaagaaacagcaacagaaaaagaagaaaggtggaaaaggtggctggtgatgagaatattcttgttgcaggctgtttttaaactagtgtcagtgacactaggaatataataaaggtaacacagcaagaagcacagaactactccctcttcatctccatattttcataatttcttgtgtttcaaatagggaaacatcttcctcaaagtctgcctagtgagatatggcctactggttgcctcatagctttgtacagattatgaggactgaaaataattgggcatttacccatcttggtatctgttgtatcctttatctgtgtgtgctgatttgatcttttttcagtttcacataccttatctaaggtttcccaggatttaaacagaaactacttctatgatttcagctggagtctgaagatacttgtttctgttcaagtcccactttaaattatgtcttaggagactgaaagtggaatcttctgagcattcctaaatatctgcttagaaatatcatgtgataaagagggaccttcttaatacactgatgttcttcactaaatggatggccacaagaaaaataaagtaaatgtcttaaataatttaaccataaattttctgtcatgtgatactggaatatgggatacttttcatgtttatatatatatatatatgtatatatatatacatatatatatatataaacatgaaatatatatatatggctcctttgtgccccatgtcattttcagattatggtagcatgctgatacagcaccatgaaagaactcaaggaaaatatatcaatgtaagaagttcactcttagacctagtgttctgaggtcacatgggtttggactgtctcaatcagaaagattaatgactgttatcaagaacatgaacattggcttcctccatagagaagaaatcagtatctgagttgcataccaggcagtattaaaatctaacaggtctgtttggcccattgatagatactcaaatggtgtctccttctggttatggattttgaccattgattacctttctcaatgtaatgaagtattttacagtcaatttgtggtgtaaatgttgctcttgtctttccttgcttacaaactactttcacattgaacagctgtgagacagacatattgagatgcctgcccttgttagtattcattttatgctgcccaagatatcatttaatttagacttaacaagtatttccttgtgattatattactctgtccttgttaataaagtgctgctgtgtttgactctgaacatactaccaaaacttcttcaaagagttttttatgaaagactttcctcctttacaagaaagaaatggggtgctgcctttctgtttagtaaaagcagaatttgcagtggcatctaaagagatcttttttaaataaaaattatgtattgtggcataatcctttttttgagctctacagagaacagtcttttggtaatagtggcaggtatttattccttctgaatatataccccattataggaataactgttacttatttaggattccatcattgaaaattttgaccgagcgcacagcagtgaaatttatagttctcaatttagttgtcattattgacaggcattggtattattagtcattgctaagcaactaaaacttcatcagttcaaataagttttaattgtcaaatgaagtataaacacatgaactttctagaaatatttcctcttttggataggtctttaaccagttcatatatatactttgtcaaatatatggatgtgtatgtgtacatttataagaaccagtatggatacatccattcactgtggtacattttaaaataaaatattttagcagtgaaaaaaaaaaaaaaaaaaaaaaaaaaaaaaaaagggggccggcccgcgtcctagaatattccctccaagggggccccaaggcttaacccggtaacccccactttttcttggtaacaaaagttgggctcccctaataggtgggatccgttatttaataaagcctagggccacttgggcgcccgcccgtttttttacaaacccctccccgggaaaatgtgggagaaaaaacctgt

SEQ ID NO: 6770 - DNA, 5425 bp, Homo sapiens
  misc_feature (1883)..(1901): n is a, c, g, or t
  misc_feature (1929)..(1942): n is a, c, g, or t
  misc_feature (2777)..(2794): n is a, c, g, or t
  misc_feature (3385)..(3405): n is a, c, g, or t
  misc_feature (3641)..(3695): n is a, c, g, or t
tacggctgcgaggagactagagaagttgagacacaagcgagaggatcatggcggatggccccaggtgtaagcgcagaaagcaggcgaacccgcggcgcaataacgttacaaattataatactgtggtagaaacaaattcagattcagatgatgaagacaaactgcatattgtggaagaagaaagtgttacagatgcagctgactgtgaaggtgtaccagaggatgacctgccaacagaccagacagtgttaccagggaggagcagtgaaagagaagggaatgctaagaactgctgggaggatgacagaaaggaagggcaagaaatcctggggcctgaagctcaggcagatgaagcaggatgtacagtaaaagatgatgaatgcgagtcagatgcagaaaatgagcaaaaccatgatcctaatgttgaagagtttctacaacaacaagacactgctgtcatttttcctgaggcacctgaagaggaccagaggcagggcacaccagaagccagtggtcatgatgaaaatggaacaccagatgcattttcacaattactcacctgtccatattgtgatagaggctataaacgctttacctctctgaaagaacacattaaatatcgtcatgaaaagaatgaagataactttagttgctccctgtgcagttacacctttgcatacagaacccaacttgaacgtcacatgacatcacataaatcaggaagagatcaaagacatgtgacgcagtctgggtgtaatcgtaaattcaaatgcactgagtgtggaaaagctttcaaatacaaacatcacctaaaagagcacttaagaattcacagtggagagaagccatatgaatgcccaaactgcaagaaacgcttttcccattctggctcctatagctcacacataagcagtaagaaatgtatcagcttgatacctgtgaatgggcgaccaagaacaggactcaagacatctcagtgttcttcaccgtctctttcagcatcaccaggcagtcccacacgaccacagatacggcaaaagatagagaataaaccccttcaagaacaactttctgttaaccaaattaaaactgaacctgtggattatgaattcaaacccatagtggttgcttcaggaatcaactgttcaacccctttacaaaatggggttttcactggtggtggcccattacaggcaaccagttctcctcagggcatggtgcaagctgttgttctgccaacagttggtttggtgtctcccataagtatcaatttaagtgatattcagaatgtacttaaagtggcggtagatggtaatgtaataaggcaagtgttggagaataatcaagccaatcttgcatccaaagaacaagaaacaatcaatgcttcacccatacaacaaggtggccattctgttatttcagccatcagtcttcctttggttgatcaagatggaacaaccaaaattatcatcaactacagtcttgagcagcctagccaacttcaagttgttcctcaaaatttaaaaaaagaaaatccagtcgctacaaacagttgtaaaagtgaaaagttaccagaagatcttactgttaagtctgagaaggacaaaagctttgaagggggggtgaatgatagcacttgtcttctgtgtgatgattgtccaggagatattaatgcacttccagaattaaagcactatgacctaaagcagcctactcagcctcctccactccctgcagcagaagctgagaagcctgagtcctctgtttcatcagctactggagatggcaatttgtctcctagtcagccacctttaaagaacctcttgtctctcctaaaagcatattatgctttgaatgcacaaccaagtgcagaagagctctcnnnnnnnnnnnnnnnnnnnaacctaccactggatgtagtaaaaaagnnnnnnnnnnnnnngcaagctggacagatttcagtgcagtcttctgaaccatcttctcctgaaccaggcaaagtaaatatccctgccaagaacaatgatcagcctcaatctgcaaatgcaaatgaaccccaggacagcacagtaaatctacaaagtcctttgaagatgactaactccccagttttaccagtgggatcaaccaccaatggttccagaagtagtacaccatccccatcacctctaaacctttcctcatccagaaatacacagggttacttgtacacagctgagggtgcacaagaagagccacaagtagaacctcttgatctttcactaccaaagcaacagggagaattattagaaaggtcaactatcactagtgtttaccagaacagtgtttattctgtccaggaagaacccttgaacttgtcttgcgcaaaaaaggagccacaaaaggacagttgtgttacagactcagaaccagttgtaaatgtaatcccaccaagtgccaaccccataaatatcgctatacctacagtcactgcccagttacccacaatcgtggccattgctgaccagaacagtgttccatgcttaagagcgctagctgccaataagcaaacgattctgattccccaggtggcatacacctactcaactacggtcagccctgcagtccaagaaccacccttgaaagtgatccagccaaatggaaatcaggatgaaagacaagatactagctcagaaggagtatcaaatgtagaggatcagaatgactctgattctacaccgcccaaaaagaaaatgcggaagacagaaaatggaatgtatgcttgtgatttgtgtgannnnnnnnnnnnnnnnnngtagttcattattgagacataaatatgaacacacaggtaaaagacctcatgagtgtggaatctgtaaaaaggcatttaaacacaaacatcatttgattgaacacatgcgattacattctggagaaaagccctatcaatgtgacaaatgtggaaagcgcttctcacactctgggtcttattctcaacacatgaatcatcgctactcctactgtaagagagaagcggaagaacgtgacagcacagagcaggaagaggcagggcctgaaatcctctcgaatgagcacgtgggtgccagggcgtctccctcacagggcgactcggacgagagagagagtttgacaagggaagaggatgaagacagtgaaaaagaggaagaggaggaggataaagagatggaagaattgcaggaagaaaaagaatgtgaaaaaccacaaggggatgaggaagaggaggaggaggaggaagaagtggaagaagaagaggtagaagaggcagagaatgagggagaagaagcaaaaactgaaggtctgatgaaggatgacagggctgaaagtcaagcaagcagcttaggacaaaaagtaggcgagagtnnnnnnnnnnnnnnnnnnnnnaagacaaatgaagcctaatcgtttttctagaaggaaaataaattctaattgataatgaatttcgttcaatattatccttgcttttcatggaaacacagtaacctgtatgctgtgattcctgttcactactgtgtgtgtgtgcgcgtgcattgattactatccatttctttagtcaacgctctccacttcctgatttctgctttaaggaaaactgtgaactttctgcttcatgtatnnnnnnnnnnnnnnnnnnnnnnnnnnnnnnnnnnnnnnnnnnnnnnnnnnnnnnncccctgaaatcaaaacctggagacttttttttcttattttagttgagaagttcataaactgctcaaggattagttttccaggactctgcggaggaacggcaggaagaacctcagagagggcagaggtgacttcaaagtgctggggactccgtcctgagggtcacttggccctgagcccctgcgtgcccttgcggaagcccagaagcttcttcctgctgcacctcccgtttccgctgctgctgacgtttatgcatttcatgatggggtccaacaagaacacctgacttgggtgaagttgtgcaatattggaggctgactgtagggctgggcagctgggagacaggctcatggctcatggctcatggctcagggcggtgcctgccctgggccgggacccccctccccaccccccacctaggctttttgggttttgttcaaggaaggtaaagtgagaggtttaggtcagtgtttttaagtttttgttttttttttaaagcaaatcctgtatatgtatctacatgggagataggtagacactacttatttgttacattttgtactatacgtttgtgttccaggtttcagcttccctcgctcctgttgttaagaagcgtccctgtcagcacaggtgtgcattgaggaaggggccccagggccttcgctccctcagcactggggtggaggcggcaggaaggggcggcccttacctggcaggtctgggcgcacctttagcaggtggactccgtggggctccaccagccagaagcctctggaaggcaacgaaggcaatgctgctccctgagtccagtccccgcccccaaacccagcccaggtgccttcagctacttcggcttcttaaaccctgcagtgttaaacagaggcattgagaaaggggaaaggcgggtatttttaaaagccaaagattgacccaagttacttgagggtagggaggcgggcccagtgcaggaggctgcatccctggcctgctggtgcccaccgggggctgtgcctgtgccgggccgcagggaagctggctgccccattcctggctgcttgctgtttgctgctggctctgtggctgtttcaaagactgggcgaaaggctgtccggagggcagaccaggtgccttgccgcagagaaaacaccaaagtctcctgttcgctcataaagaagtttttgggatgggagagaatccagaccatcttggggcagccaggcccttgccttcatttttacagaggtagcacaattgattccaacacaaaactccttcccctttttaaaatgatttctgttctaatgccatagatcaaaggcctcagaaaccattgtgtgtttcctctttgaagcaatgacaagcactttactttcacggtggtttttgttttttcttattgctgtggaacctcttttggaggacgttaaaggcgtgttttacttgtttttttaagagtgtgtgatgtgtgttttgtagatttcttgacagtgctgtaatacagacggcaatgcaatagcctatttaaagacactacgtgatctgattgagatgtacatagtttttttttttaccataactgaattattttatctcttatgttaacatgagaaatgtatgccaaatgattagttgatgtatgttttttaatttaatatttaaataaaatatttggaaggaaaaaaaaaaaaaaaaaaaaaaaacaatcactctcttccaaaaaaaaaaaaaaaaa

SEQ ID NO: 6771 - DNA, 824 bp, Homo sapiens
gcaaaaagaaaatcagcaaatctcatttagaaaaaaaaaaatagttcctgaaataaagatgttgattttcttaaagaaaagataatattctcaagagaaaagggtattcctgaatctattttctaacatcagtctgtctctcagatgaatagagaattccatgtaattggggaatatttttgtgcttttagcaaagatggaaaacagcttcctttctcctcttcttttcatgtcatccttggagcattcctttaatgccccatttttctgttcaagagggtatgaaattaagcaggtggagtaagaacttcctggttatgcattaacactgattaaaatgcatagcccagaatggaatcccaccattatttcaaagtcaggatctctgcatttttccagtactatttttgggcaggaaaggatgagactagacaacttccaggatcctctcaaatactaacgttctattatggaaaaggattgtcaatgccagtacctgttctgagggaagataaggatcagcggtgtgcaaacctggcagagatgcagttccattcaaaagagacttgcggaaaacctaccatgtgctgggcatgagataaggcattgcagggcatagaaagaaaagcaaaaagtacttcctgtccttgaggttattatctcaaagtgaaaagagactactaaaaattgaagctttactactatgacaatactgaataggacttttacatttgcagattattccagtatctcaaatggcaataaccctgtgattgaattattactgcctctacaacacagggaaagaaattcagcacatagag

SEQ ID NO: 6772 - DNA, 3467 bp, Homo sapiens
  misc_feature (370)..(386): n is a, c, g, or t
  misc_feature (476)..(517): n is a, c, g, or t
  misc_feature (3411)..(3460): n is a, c, g, or t
agcggaacggcggatagcggagctgcaggaggcgcgcggcccggcggagcagccctagccgccaccgtcgctctcgcagctctcgtcgccactgccaccgccgccgccgtcactgcgtcctggctccggctcccgcgccctcccggccggccatgcagccccgccgcgcccaggcgcccggtgcgcagctgctgcccgcgctggccctgctgctgctgctgctcggagcggggccccgaggcagctccctggccaacccggtgcccgccgcgcccttgtctgcgcccgggccgtgcgccgcgcagccctgccggaatgggggtgtgtgcacctcgcgccctgagccggacccgcagcacccggcccccgnnnnnnnnnnnnnnnnncagctgcacctgccccgccgggatctccggcgccaactgccagcttgttgcagatccttgtgccagcaacccttgtcaccatggcaactnnnnnnnnnnnnnnnnnnnnnnnnnnnnnnnnnnnnnnnnnnttttgcaatgaaggctatgaaggtccaactgtgaacaggcacttcccagtctcccagccactggctggaccgaatccatggcaccccgacagcttcagcctgttcctgctactcaggagcctgacaaaatcctgcctcgctctcaggcaacggtgacactgcctacctggcagccgaaaacagggcagaaagttgtagaaatgaaatgggatcaagtggaggtgatcccagatattgcctgtgggaatgccagttctaacagctctgcgggtggccgcctggtatcctttgaagtgccacagaacacctcagtcaagattcggcaagatgccactgcctcactgattttgctctggaaggtcacggccacaggattccaacagtgctccctcatagatggacgaagtgtgaccccccttcaggcttcagggggactggtcctcctggaggagatgctcgccttggggaataatcactttattggttttgtgaatgattctgtgactaagtctattgtggctttgcgcttaactctggtggtgaaggtcagcacctgtgtgccgggggagagtcacgcaaatgacttggagtgttcaggaaaaggaaaatgcaccacgaagccgtcagaggcaactttttcctgtacctgtgaggagcagtacgtgggtactttctgtgaagaatacgatgcttgccagaggaaaccttgccaaaacaacgcgagctgtattgatgcaaatgaaaagcaagatgggagcaatttcacctgtgtttgccttcctggttatactggagagctttgccagtccaagattgattactgcatcctagacccatgcagaaatggagcaacatgcatttccagtctcagtggattcacctgccagtgtccagaaggatacttcggatctgcttgtgaagaaaaggtggacccctgcgcctcgtctccgtgccagaacaacggcacctgctatgtggacggggtacactttacctgcaactgcagcccgggcttcacagggccgacctgtgcccagcttattgacttctgtgccctcagcccctgtgctcatggcacgtgccgcagcgtgggcaccagctacaaatgcctctgtgatccaggttaccatggcctctactgtgaggaggaatataatgagtgcctctccgctccatgcctgaatgcagccacctgcagggacctcgttaatggctatgagtgtgtgtgcctggcagaatacaaaggaacacactgtgaattgtacaaggatccctgcgctaacgtcagctgtctgaacggagccacctgtgacagcgacggcctgaatggcacgtgcatctgtgcacccgggtttacaggtgaagagtgcgacattgacataaatgaatgtgacagtaacccctgccaccatggtgggagctgcctggaccagcccaatggttataactgccactgcccgcatggttgggtgggagcaaactgtgagatccacctccaatggaagtccgggcacatggcggagagcctcaccaacatgccacggcactccctctacatcatcattggagccctctgcgtggccttcatccttatgctgatcatcctgatcgtggggatttgccgcatcagccgcattgaataccagggttcttccaggccagcctatgaggagttctacaactgccgcagcatcgacagcgagttcagcaatgccattgcatccatccggcatgccaggtttggaaagaaatcccggcctgcaatgtatgatgtgagccccatcgcctatgaagattacagtcctgatgacaaacccttggtcacactgattaaaactaaagatttgtaatctttttttggattatttttcaaaaagatgagatactacactcatttaaatatttttaagaaaataaaaagcttaagaaatttaaaatgctagctgctcaagagttttcagtagaatatttaagaactaattttctgcagcttttagtttggaaaaaatattttaaaaacaaaatttgtgaaacctatagacgatgttttaatgtaccttcagctctctaaactgtgtgcttctactagtgtgtgctcttttcactgtagacactatcacgagacccagattaatttctgtggttgttacagaataagtctaatcaaggagaagtttctgtttgacgtttgagtgccggctttctgagtagagttaggaaaaccacgtaacgtagcatatgatgtataatagagtatacccgttacttaaaaagaagtctgaaatgttcgttttgtggaaaagaaactagttaaatttactattcctaacccgaatgaaattagcctttgccttattctgtgcatgggtaagtaacttatttctgcactgttttgttgaactttgtggaaacattctttcgagtttgtttttgtcattttcgtaacagtcgtcgaactaggcctcaaaaacatacgtaacgaaaaggcctagcgaggcaaattctgattgatttgaatctatatttttctttaaaaagtcaagggttctatattgtgagtaaattaaatttacatttgagttgtttgttgctaagaggtagtaaatgtaagagagtactggttccttcagtagtgagtatttctcatagtgcagctttatttatctccaggatgtttttgtggctgtatttgattgatatgtgcttcttctgattcttgctaatttccaaccatattgaataaatgtgatcaagtcaaagaaaaaaaaaaaaaaaaaaaaaaaaaaaaaaaaaaaaaaaaaaaaaaaaaaaaaccggggggggccgaaagtttattccctttagggagggttaattttagtttggaacgggccgtcgttttaaaacgtcgggannnnnnnnnnnnnnnnnnnnnnnnnnnnnnnnnnnnnnnnnnnnnnnnnnttttcgc

SEQ ID NO: 6773 - DNA, 2307 bp, Homo sapiens
tgggaaggggctcagcgtgggaaaggatggttgagttttaaccagaggcaaagcgtgagcgggatcagtgtgtgcggaacgcaagcagccgagagcggagaggcgccgctgtagttaactcctccctgcccgccgcgccgaccctccccaggaacccccagggagccagcatgaagcgagctcaccccgagtacagctcctcggacagcgagctggacgagaccatcgaggtggagaaggagagtgcggacgagaatggaaacttgagttcggctctaggttccatgtccccaactacatcttcccagattttggccagaaaaagacggagaggaataattgagaagcgccgacgagaccggatcaataacagtttgtctgagctgagaaggctggtacccagtgcttttgagaagcagggatctgctaagctagaaaaagccgagatcatgcagatgaccgtggatcacctgaaaatgctgcatacggcaggagggaaaggttactttgacgcgcacgcccttgctatggactatcggagtttgggatttcgggaatgcctggcagaagttgcgcgttatctgagcatcattgaaggactagatgcctctgacccgcttcgagttcgactggtttcgcatctcaacaactacgcttcccagcgggaagccgcgagcggcgcccacgcgggcctcggacacattccctgggggaccgtcttcggacatcacccgcacatcgcgcacccgctgttgctgccccagaacggccacgggaacgcgggcaccacggcctcacccacggaaccgcaccaccagggcaggctgggctcggcacatccggaggcgcctgctttgcgagcgccccctagcggcagcctcggaccggtgctccctgtggtcacctccgcctccaaactgtcgccgcctctgctctcctcagtggcctccctgtcggccttccccttctctttcggctccttccacttactgtctcccaatgcactgagcccttcagcacccacgcaggctgcaaaccttggcaagccctatagaccttgggggacggagatcggagctttttaaagaactgatgtagaatgagggaggggaaagtttaaaatcccagctgggctggactgttgccaacatcaccttaaagtcgtcagtaaaagtaaaaaggaaaaaggtacactttcagataattttttttttaaagactaaaggtttgttggtttacttttatcttttttaatgtttttttcatcatgtcatgtattagcagtttttaaaaactagttgttaaattttgttcaagacattaaattgaaatagtgagtataagccaacactttgtgataggtttgtactgtgcctaatttactttgtaaaccagaatgattccgtttttgcctcaaaatttggggaatcttaacatttagtatttttggtctgtttttctccttgtatagttatggtctgtttttagaattaattttccaaaccactatgcttaatgttaacatgattctgtttgttaatattttgacagattaaggtgttgtataaataatattcttttggggggaggggaactatattgaattttatatttctgagcaaagcgttgacaaatcagatgatcagctttatccaagaaagaagactagtaaattgtctgcctcctatagcagaaaggtgaatgtacaaactgttggtggccctgaatccatctgaccagctgctggtatctgccaggactggcagttctgatttagttaggagagagccgctgataggttaggtctcatttggagtgttggtggaaaggaaactgaaggtaattgaatagaatacgcctgcatttaccagccccagcaacacaaagaatttttaatcacacggatctcaaattcacaaatgttaacatggataagtgatcatggtgtgcgagtggtcaattgagtagtacagtggaacctgttaaatgcataacctaattttcctgggactgccatattttcttttaactggaaatttttatgtgagttttccttttggtgcatggaactgtggttgccaaggtatttaaaagggctttcctgcctccttctctttgatttatttaatttgatttgggctataaaatatcatttttcaggtttattcttttagcaggtgtagttaaacgacctccactgaactgggtttgacctctgttgtactgatgtgttgtgactaaataaaaaagaaagaacaaagaaaaaaaaaaaaaaaaaaaaaaaaaaaaaaaaaaaaaaaaaaaaaa

SEQ ID NO: 6774 - DNA, 3230 bp, Homo sapiens
  misc_feature (629)..(644): n is a, c, g, or t
  misc_feature (3073)..(3073): n is a, c, g, or t
gctgctcgctgcgccaccgcctcccgccacccctgcccgcccgacagcgccgccgcctgccccgccatgggtcgacagaaggagctggtgtcccgctgcggggagatgctccacatccgctaccggctgctccgacaggcgctggccgagtgcctggggaccctcatcctcgtgatgtttggctgtggctccgtggcccaggttgtgctcagccggggcacccacggtggtttcctcaccatcaacctggcctttggctttgctgtcactctgggcatcctcatcgctggccaggtctctggtaaggccttaaccctgcccccagcccttggccctcaatagcattcccactaggtgtcctggcattcctaagggcaggtcacagctgtggcctctgctttggccccttgggaaaggagggtggagaagaaacttgacacttagaactttcgactctcaccttggaatcagagattatcagctgacctgttacatagaccaaccgccatcctgtgcaagaaacccctctctgcaccccttctcaggggaccctagcctgccgactgtggcaggctgcagctaataggtcccttgtcccctctgcccaggggcccacctgaaccctgccnnnnnnnnnnnnnnnngcttcctggctcgtgagccctggatcaagctgcccatctacaccctggcacagacgctgggagccttcttgggtgctggaatagtttttgggctgtattatggtaagcattccccaccctgtcctcctccactacccccgtccctctgttcaggacctgctggcaccaggccttttgatgacagacggctaggacctgcccaggccccgggctcatgactcactcattcacgcacagggtcaaggtagggggcacgaagggaaagaaacaagttgggcaataacagagtctcaggccctccaccccaccccacgtcaccccctctgcctgctgcaatacagcagtattgctacttacccataactcatgggagggtggggagggcacacctgagagggaagtctgggctcaggcctctcccccgactcactgtgggtctaatctgtcaccagatgcaatctggcactttgccgacaaccagctttttgtttcgggccccaatggcacagccggcatctttgctacctacccctctggacacttggatatgatcaatggcttctttgaccaggtatgggctggggacgtgtgaggggaacgcagggaggggaccgagttgccttggtagctcatgggctggttgggggacaggactcctcgactgtagcagggtttctccaatctgtggggtaacccgcatcagaacatggtggcaagtacttacaaaacatgcggctctccagcgggttcttgtcacgcagacattctagcaccattgctttcaggagaagagcatgggcgggcgctgacaagagtttaagagctagagggaagacgggggatggaaggaggggtcagagaaagggagggagctgcagctcaccctgttctccccactccccagttcataggcacagcctcccttatcgtgtgtgtgctggccattgttgacccctacaacaaccccgtcccccgaggcctggaggccttcaccgtgggcctggtggtcctggtcattggcacctccatgggcttcaactccggctatgccgtcaaccctgcccgggactttggcccccgcctttttacagcccttgcgggctggggctctgcagtcttcacgtgagtacagcccccacccagctcaccccagcctgcctctcctctgccctgccccccatgtccctgactatgagtgtctgtccccccaggaccggccagcattggtggtgggtgcccatcgtgtccccactcctgggctccattgcgggtgtcttcgtgtaccagctgatgatcggctgccacctggagcagcccccaccctccaacgaggaagagaatgtgaagctggcccatgtgaagcacaaggagcagatctgagtgggcaggggccatctccccactccgctgccctggccttgagcatccactgactgtccaagggccactcccaagaagcccccttcacgatccaccctttcaggctaaggagctccctatctaccctcaccccacgagacagccccttcaggatttccactggaccttgcccaaatagcaccttaggccactgcccctaagctggggtggaaccggaatttgggtcaatacatccttttgtctcccaagggaagagaatgggcagcaggtatgtgtgtgtgtgcatgtgtgtgcatgtgtgtgcatgtgtgtgcaggggtgtgtgtgtgtggggggggttcccagatattcagggcaagggaccagtcggaagggattctggctattgggggagcccagagacaggggaaggcagcctgtccatctgtgcataaggagaggaaagttccagggtgtgtatgtttcaggggcttcacatggaggagctgcagatagatatgtgtttctgtgtatgtgtatgtctgcctttttttctaagtgggggcttctacaggcttttgggaagtagggtggatgtgggtagggctgggaggagggggccacagcttaggtttggagctctggatgtacatacataagtaggagcagtgggacgtgtttctgtcataatgcaggcatgaagggtggagtgaagtcaggtcataagtttcatgtttgcttttgttttgttttgtttttaatgtatgtagcagatgttacagtcttagggatccgggatgggagaccccactttagaaagggtcgtcactcctttaatcctctactcaacaatgtactcttttacttttatattaaaaaaaataaaataaatatgtgcctaaaaaaaaaaaaaaaaaaaaaaaaaaaaaaaaaaaaaaaaaaaggcggaacaacggggtattagacagggccagggccaaaggtgttcccccgcacccccttttcgttccacgtggggggaaacgcgcggggccccatagggggggcgaaaattgcaaaagcggtacgantctaggaggacacagcaagcaaaaaaactcaaacaacaaaacaaaaaaaaacaaaacaaagagacaacaaacaacacaaagatcaagcaaacatcacaaaaaacaacataaaaaaagaaacaaaaacaacaaacaacaatcagcaaacagacaacaa

SEQ ID NO: 6775 - DNA, 943 bp, Homo sapiens
  misc_feature (454)..(473): n is a, c, g, or t
  misc_feature (527)..(563): n is a, c, g, or t
ccgcttccccttccccccaacccccaagttccacaaaaccgtgcatctggaaagctacgtgctcttcagtggaagccgcatttccattgtgcaaaagcgcggtaaggctacacaccactctgctgatcagcccctccggggccggcctctcccgccgaacgcagctgcagtttgacttgcacttttcctcccccagtgccggttcctgccggggtgggtcagtttcccgccagcactcttccccagttcccgcctccccgctcccgcctgtggctgaccgcccccctccccacaggcagcggacagatccagctgtggcagtttctgctggagctgctggctgaccgcgcgaacgccggctgcatcgcgtgggagggcggtcacggcgagttcaagctcacggacccggacgaggtggcgcggcggtggggcgagcgcaagagcaagcccaacnnnnnnnnnnnnnnnnnnnnccgcgccctgcgctactactacgacaagaacatcatgagcaaggtgcatggcannnnnnnnnnnnnnnnnnnnnnnnnnnnnnnnnnnnngcaggcctgccagccgccgcccgcgcacgctcatgccgccgccgcagctgctgccgccgccgctggccggcccaggacggcgcgctctacgaaggctgcccgcctggcctcgccccggtgcccttccccggcctctccaaactcaacctcatggccgcctcggccggggtcgcgccctgccggctttctcctacttggcctgggccctgtggccctggctgcaccgttgccgccggcacctgccgggctctacccctagtcccagcttgctgcccccggccgggcccttcggggccgtggccgcagctcgcacttgggcgccattcccactagacgggcgggcgggtgcctgggctcgcccgagccaagagttcgccgac

SEQ ID NO: 6776 - DNA, 628 bp, Homo sapiens
  misc_feature (60)..(69): n is a, c, g, or t
cagggacgtgtctgtgctcctgcgtgtgaccagggttgactaaactctgccaggatgtcnnnnnnnnnnaaacagcagcagtgccagccccctcccaagtgtcctcccaagtgtaccccaaaatgtccacctaagtgtccccctaaatgcctgccccagtgcccagctccatgttcccctgcagtctcttcttgctgtggtcccatctctgggggctgctgtggtcccagctctgggggctgctgcaactctggggctggtggctgctgcctgagccaccacaggccccgtctcttccaccggcgccggcaccagagccccgactgctgtgagagtgaaccttctgggggctctggctgctgccacagctctgggggctgctgctgacctgggctaagaagaactctttggacagaatgtttaagaacctcctacagcctgatgcttaaccctttccatttcctctcattccattcatgggtggacagcgaccacaaagactcatggggcttccctgggagaactttgcacttgatggaacacctcaattgcaggttttgttttcctcctttacctcatgtttgttaataaactctgtttctgactctcaaaaaaaaaaaaaaaaaaa

SEQ ID NO: 6777 - DNA, 1138 bp, Homo sapiens
  misc_feature (76)..(93): n is a, c, g, or t
ctatagtggtgtttcttccataggcttgtgaccaagtctgggtttctttccgggtaagatatgccttggttgtggnnnnnnnnnnnnnnnnnnggatggacacggcaagtcgacacttaagaactcctttcctccgcaccttgaacggttctacttaacacgtggggccgcgctgttcttgtgctacccatcatcaaaagaatccagtatgaagcaggtaccagaagacatcaagagaatataaagaatagttctgtcccaagaggactccgaagatgattcagcattcctgcatctggatctctgtggaagagaaaatgagctgtccgcagtcttgtcccaaaaggggacatctgggatgaccacttaacatctacaacttccagccctggggtattgtcccagaatctagtgaaaataaaaatcttggaggagtcacccaggagtcatttgatcttatgattaaagaaaatccatcctctcagtattggaaggaagtggcagaaaaacggagaaaggcgctgtatgaagcacttaaggaaaatgagaaacttcataaagaaattgaacaaaaggacaatgaaattgcccgcctgaaaaaggagaataaagaactggcagaagtagcagaacatgtacagtatatggcagagctaatagagagactgaatggtgaacctctggataattttgaatcactggataatcaggaatttgattctgaagaagaaactgttgaggattctctagtggaagactcagaaattggcacgtgtgctgaaggaactgtatcttcctctacggatgcaaagccatgtatatgaaatgcattaatatttgactgttgagaattttactgccgaagtttacctccactagttctttgtagcagagtacataactacataatgccaactctggaatcaaatttccttgtttgaatcctgggaccctattgcattaaagtacaaatactatgtatttttaatctatgatggtttatgtgaataggattttctcagttgtcagccatgacttatgtttattactaaataaacttcaaactcctgttgaacattgtgtataacttagaataatgaaatataaggagtatgtgtagaaaaaaaaaaaaaaaaaa

SEQ ID NO: 6778 - DNA, 6617 bp, Homo sapiens
gcgagtgactgcaccgagcccgagaagtcgccgcgccccgcagccgccccgactggttccccgccttgcccgtgggccccgccgggatggggaaccgccgggacctgggccagccgcgggccggtctctgcctgctcctggccgcgctgcagcttctgccggggacgcaggccgatcctgtggatgtcctgaaggccctgggtgtgcagggaggccaggctggggtccccgaggggcctggcttctgtccccagaggactccagagggtgaccgggcattcagaattggccaggccagcacgctcggcatccccacgtgggaactctttccagaaggccactttcctgagaacttctccttgctgatcaccttgcggggacagccagccaatcagtctgtcctgctgtccatttatgatgaaaggggtgcccggcagttgggcctggcactggggccagcgctgggtctcctaggtgaccccttccgccccctcccccagcaggtcaacctcacagatggcaggtggcaccgtgtggccgtcagcatagatggtgagatggtgaccctggtagctgactgtgaagctcagccccctgttttgggccatggcccccgcttcatcagcatagctggactcactgtgctggggacccaggaccttggggaaaagactttcgagggagacattcaggagctgctgataagcccagatcctcaggctgccttccaggcttgtgagcggtacctccccgactgtgacaacctggcaccggcagccacagtggctccccagggtgaaccagaaacccctcgtcctcggcggaaggggaagggaaaagggaggaagaaagggcgaggtcgcaaggggaagggcaggaaaaagaacaaggaaatttggacctcaagtccacctcctgactccgcagagaaccagacctccactgacatccccaagacagagactccagctccaaatctgcctccgacccccacgcctttggtcgtcacctccactgtgactactggactcaatgccacgatcctagaggggagcttggaccctgacagtggaaccgagctggggaccctggagaccaaggcagccagggaggatgaagaaggagatgattccaccatgggccctgacttccgggcagcagaatatccatctcggactcagttccagatctttcctggtgctggagagaaaggagcaaaaggagagcccgcagtgattgaaaaggggcagcagtttgagggacctccaggagccccaggaccccaaggggtggttggcccctcaggccctcccggccccccaggattccctggcgaccctggtccaccgggccctgctggcctcccaggaatccccggcattgatgggatccgaggcccaccgggcactgtgatcatgatgccgttccagtttgcaggcggctcctttaaaggccccccagtctcattccagcaggcccaggctcaggcagttctgcagcagactcagctctctatgaaaggcccccctggtccagtggggctcactgggcgcccaggccctgtgggtctccccgggcatccaggtctgaaaggagaggagggagcagaagggccacagggtccccgaggcctgcagggacctcatggaccccctggccgagtgggcaagatgggccgccctggagcagatggagctcggggcctcccaggggacactggacctaagggtgatcgtggcttcgatggcctccctgggctgcctggtgagaagggccaaaggggtgactttggccatgtggggcaacccggtcccccaggagaggatggtgagaggggagcagagggacctccagggcccactggccaggctggggagccgggtccacgaggactgcttggccccagaggctctcctggccccacgggtcgcccgggtgtgactggaattgatggtgctcctggtgccaaaggcaatgtgggtcctccaggagaaccaggccctccgggacagcagggaaaccatgggtcccagggactccccggtccccagggactcattggcactcctggggagaagggtccccctggaaacccaggaattccaggcctcccaggatccgatggccctctgggtcacccaggacatgagggccccacgggagagaaaggggctcagggtccaccagggtcggcaggccctccgggctatcctggacctcggggagtgaagggcacttcaggcaaccggggcctccagggggagaaaggcgagaagggagaggacggcttcccaggcttcaagggcgatgtggggctcaaaggtgatcaggggaaacccggagctccaggtccccggggagaggatggtcctgaggggccgaaggggcaggcggggcaggctggcgaggaggggcccccaggctcagctggggagaagggcaagcttggggtgccaggcctcccaggttatccaggacgccctggacctaagggatctattggatttcccggtcccctgggacccataggagagaaagggaagtcgggaaagacagggcagccaggcctggaaggagagcggggaccaccaggttcccgtggagagagggggcaaccgggtgccacagggcaaccaggccccaagggcgatgtgggccaggatggagcccctgggatccctggagaaaagggcctccctggtctgcaaggccctccaggattccctgggccaaagggcccccctggtcaccaaggtaaagatgggcgaccagggcaccctggacagagaggagaactgggcttccaaggtcagacaggcccgcctggaccagctggtgtcttaggccctcagggaaagacaggagaagtgggacctctaggtgaaagggggcctccaggcccccctggacctcctggtgaacaaggtcttcctggcctggaaggcagagagggggccaagggggaactgggaccaccaggaccccttgggaaagaagggccagctggactcaggggctttcccggccccaaagggggccctggggacccgggacctactggcttaaagggtgataagggccccccagggcctgtgggggccaatggctcccctggtgagcgcggtcctttgggcccagcaggaggcattggacttcctggccaaagtggcagcgaaggccccgttggccctgcaggcaagaaggggtcccggggagaacgtggcccccctggccccactggcaaagatgggatcccagggcccctggggcctctgggaccccctggagctgctgggccttctggcgaggaaggggacaagggggatgtgggtgcccccggacacaaggggagtaaaggcgataaaggagacgcgggcccacctggacaaccagggatacggggtcctgcaggacacccaggtcccccgggagcagacggggctcaggggcgccggggacccccaggcctctttgggcagaaaggagatgacggagtcagaggctttgtgggggtgattggccctcctggactgcaggggctgccaggccctccgggagagaaaggggaggtcggagacgtcgggtccatgggtccccatggagctccaggtcctcggggtccccaaggccccactggatcagagggcactccagggctgcctggaggagttggtcagccaggcgccgtgggtgagaagggtgagcgaggggacgctggagacccagggcctccaggagccccaggcatcccggggcccaagggagacattggtgaaaagggggactcaggcccatctggagctgctggacccccaggcaagaaaggtccccctggagaggatggagccaaagggagcgtgggccccacggggctgcccggagatctagggcccccaggagaccctggagtttcaggcatagatggttccccaggggagaagggagaccctggtgatgttgggggaccgggtccgcctggagcttctggggagcccggcgcccccgggccccccggcaagaggggtccttcaggccacatgggtcgagaaggcagagaaggggagaaaggtgccaagggggagccaggtcctgatgggcccccagggaggacgggtccaatgggggctagagggccccctggacgtgtggggcctgagggtcttcgagggatccctggccctgtgggtgaaccaggcctcctgggagcccctggacagatgggccctcctggccccctggggccctctggcctcccagggctgaagggagacactggccccaagggggaaaagggccacattggattgatcggtctcattggccccccgggagaagctggtgagaaaggagatcaggggttgccaggcgtgcagggaccccctggtcccaagggagaccctggtccccctggtcccattggctctctgggccaccctgggcccccaggtgtggcgggccctctaggacagaaaggctcaaaagggtctccggggtccatgggcccccgtggagacactggacctgcaggcccaccaggccccccgggtgcccctgccgagctgcatgggctgcgcaggcgccggcgcttcgtcccagtcccgcttccagtcgtggagggcggcctggaggaggtgctggcctcgctcacatcgctgagcttggagctggagcagctgcggcgtcctcccggcactgcggagcgcccgggcctcgtgtgccacgagctgcaccgcaaccacccgcacctgcctgatggggaatactggattgaccccaaccagggctgcgcgcgggactcgttcagggttttttgcaacttcacggcgggaggagagacctgcctctatcccgacaagaagtttgagatcgtgaaattggcctcctggtccaaggaaaagcctggaggctggtatagcacattccgtcgagggaagaagttctcctacgtggacgccgacgggtccccagtgaatgtcgtgcagctgaacttcctgaaactgctgagtgccacagctcgccagaacttcacctactcctgccagaatgcagctgcctggctggacgaagccacgggtgactacagccactccgcccgcttccttggcaccaatggagaggagctgtctttcaaccagacgacagcaaccactgtcagcgtcccccaggatggctgccggctccggaaaggacagacgaagacccttttcgaattcagctcttctcgagcgggatttctgcccctgtgggatgtggcggccactgactttggccagacgaaccaaaagtttgggtttgaactgggccccgtctgcttcagcagctgagagtgtccggggtgggagggaccgtgagggagccccagaatggggtgcatttggtgctgaggctttgaagccaccgtatttttcgttacctgtgactatggagccaatgggatgtgacttcgctcatcacggtcagtcattccttctcctttccagggtgctgggggctggggttccctggcccaagggtccagcctcctctcaccccattccaggtggcatactgcagtctggctctttctcccctccctccccacccaagcctcacctccccaccccttgaacccccatgcaatgagcttctaactcagagttgatgaaaaaaagcccccccacccccaatgcctgcctcctcactcctccgtcgctgcccttcacaccttttggtgctacccctccccagagttaagcactggatgtctcctgatcccaggctgggacccctacccccaccccctttgatcctttctacttccacggtgaaaggactgaggtcggactacagagggaagagggacttcccttgactgggttgtgtttcttttcctgcctcagcccagctctgcaaatcccctccccctgcccctcacctccccaggctcaccttgccatgccaggtggtttggggaccaagatgttgggggggtgaatcaggatcctaatggtgctgccctatttatacctgggtctgtattaaaagggaaagtcccccctgttgtagatttcatctgcttcctccttagggaaggctgggatatgatgagagattccagcccaagcccggccccccaccgccaggccatagggcataatttgcatctcaaatctgagaataaactgatgaactgtgaaaaaaaaaaaaaaaaaaaaaaaaaaaaaaagggggggggcgcggcactaaaaatggtttccttgggggggccgagtgttataccgtgttaccacgaggttttctttggttccaagtggggccctaaatagggggcgccgcattctaataagctaagagcaagtgggaccagtaggatattaaacaaaacgatgtggggattggggggcaaaaacgtgggtcagactgggggagatcttgtgtggaagcggaacccttaaacattcggggggggtgtggaccacatatttgggcacaactcttcactctcggaacatttacacgctcaagggagtaaaattattaacttgcaaaggcattaggctggtaaccacgatggaatatgactgctcgatgaaagagtatgtacaggggagtatgatgtatgaaacttttttcaggac

SEQ ID NO: 6779 - DNA, 2795 bp, Homo sapiens
  misc_feature (2539)..(2558): n is a, c, g, or t
agcggaaccggcttgtgcgcgtcccaggagcgcgctataaaacctgtgctgggcgtgatcggcaagcaccggaccaggggaaggcgagcagtgccaatctacagcgaagaaagtctcgtttggtaaaagcgagaggggaaagcctgagcatgcagagtgtgcagagcacgagcttttgtctccgaaagcagtgcctttgcctgaccttcctgcttctccatctcctgggacaggtcgctgcgactcagcgctgccctccccagtgcccgggccggtgccctgcgacgccgccgacctgcgcccccggggtgcgcgcggtgctggacggctgctcatgctgtctggtgtgtgcccgccagcgtggcgagagctgctcagatctggagccatgcgacgagagcagtggcctctactgtgatcgcagcgcggaccccagcaaccagactggcatctgcacggcggtagagggagataactgtgtgttcgatggggtcatctaccgcagtggagagaaatttcagccaagctgcaaattccagtgcacctgcagagatgggcagattggctgtgtgccccgctgtcagctggatgtgctactgcctgagcctaactgcccagctccaagaaaagttgaggtgcctggagagtgctgtgaaaagtggatctgtggcccagatgaggaggattcactgggaggccttacccttgcagcttacaggccagaagccaccctaggagtagaagtctctgactcaagtgtcaactgcattgaacagaccacagagtggacagcatgctccaagagctgtggtatggggttctccacccgggtcaccaataggaaccgtcaatgtgagatgctgaaacagactcggctctgcatggtgcggccctgtgaacaagagccagagcagccaacagataagaaaggaaaaaagtgtctccgcaccaagaagtcactcaaagccatccacctgcagttcaagaactgcaccagcctgcacacctacaagcccaggttctgtggggtctgcagtgatggccgctgctgcactccccacaataccaaaaccatccaggcagagtttcagtgctccccagggcaaatagtcaagaagccagtgatggtcattgggacctgcacctgtcacaccaactgtcctaagaacaatgaggccttcctccaggagctggagctgaagactaccagagggaaaatgtaacctgtcactcaagaagcacacctacagagcacctgtagctgctgcgccacccaccatcaaaggaatataagaaaagtaatgaagaatcacgatttcatccttgaatcctatgtattttcctaatgtgatcatatgaggacctttcatatctgtcttttatttaacaaaaaatgtaattaactgtaaacttggaatcaaggtaagctcaggatatggcttaggaatgacttactttcctgtggttttattacaaatgcaaatttctataaatttaagaaaacaagtatataatttactttgtagactgtttcacattgcactcatcatattttgttgtgcactagtgcaattccaagaaaatatcactgtaatgagtcagtgaagtctagaatcatacttaacatttcattgtacaagtattacaaccatatattgaggttcattgggaagattctctattggctccctttttgggtaaacagctctgaactttccaagctccaaatccaaggaaacatgcagctcttcaacatgacatccagagatgactattacttttctgtttagttttacactaggaaacgtgttgtatctacagtaatgaaatgtttactaagtggactggtgtcataaactttctccatttaagacacattgactcctttccaatagaaagaaactaaacagaaaactcccaatacaaagatgactggtccctcatagccctcagacatttatatattggaagctgctgaggcccccaagttttttaattaagcagaaacagcatattagcagggattctctcatctaactgatgagtaaactgaggcccaaagcacttgcttacatcctctgatagctgtttcaaatgtgcattttgtggaattttgagaaaaatagagcaaaatcaacatgactggtggtgagagaccacacattttatgagagtttggaattattgtagacatgcccaaaacttatccttgggccataattatgaaaactcatgatcaagatatatgtgtatacatacatgtatctggtttgtcaggctacaaggtaggctgcaaaattaaatctagacattcttttaatgccaccacacgtgttccgcttctctcttttaaagtatttataaaaatataaattgtacattttgtaaaatattatgtttgatttctctacttgtcatatcactaaataaacacgattttattgctgaaaaaaaaaaaaaaaaaaaggtgcataaaagttgaacattgttgtttactgaaaataaaattaaaatttatgaattaacacccgaacaattnnnnnnnnnnnnnnnnnnnncaaaaacggagcaagccggtcgagcaatgtctaactggaacgcaactagctacaacagacgtgccctacgacaactggagcaaaaaattacgttcgtaggcccatacctatcggagagaggaagtgtaaaaacatgagcaggagtggcgatagcagtgtggtgaagaacagacacaagcgtaggagttaatacacgagtacgagtaatatgaatattgagcacacttcgagtactac

SEQ ID NO: 6780 - DNA, 1357 bp, Homo sapiens
  misc_feature (213)..(234): n is a, c, g, or t
  misc_feature (1193)..(1193): n is a, c, g, or t
agcacagtgctgccacaaaccccccttccagagtcatctctggtccaccttgtaagtccccaggaaaatgacctcgtcctccgcgggtgtgagccactaggcctgagaggacgccgggacggagctttcagagagggaggtgtcgggatggcttgagggtcaccaggtattaattaagcacttgctgtgtgccaggcactttcccacacaggnnnnnnnnnnnnnnnnnnnnnnagctcctgcccggcagacgctggccttgtggagggaggcaggcagcaggagcagtgctttctgggcctctgtagccagagctggccctgctgcagcttacgtctgcctgcagcccagacgtcctcctggtcctcctgatgcccccgacctccacggaggacgagcatttccagcccagccctccccatcttcacctcgcactcccctgacacactgggagcctcctgatccgtgaacccgcgctggcgggagtagctactgaccgctggggacccctgcccaggctgttcgcatgtggaaaggattcagggagcaggcgatgcccaaagcgtggagaccagcactgctctctccccagtgacaggtgcacgcccagatcacggatgtgtcgggaacagctgtgctcctgctgctcagcgtccgtcactccaggctgggagcgggtccccaagcttctggctgggcctatccgtctccactctcagtgtgggggtggggggcgccaacagcacgcatttgctctctgcacttctcgtctgataatgggcagagggtccttctgcagccccaaaacatccctaggcaggagccctggggccccaagcagccagggaggtgagcaccaaggacctcccagagagcgtcaccttccgtcgagggaggcccagcctgggggcggtgtctgagacttggaatcaacgcttccgttggtggcagtaaatcctgtccctaaccctgcagtacagcttgtgccgtgtacaggagggtgctgtcttgacgccagacacctggactacagatcgcagcctgattcctggtcatttgctccacttgaaccccagaccccagcctcgttctgggccctcatccccctagatccagggaacccaagccccatttcagcccttgggcccttgtaggatgcgaagccctgggcccagcccccagccatccggggnctcaggcacgggggggctgaggcctctggacagggacacagggccgggggggctctcttcagccaacagcggagaggactggctccaaaaaaatcaggtttgtcccactcaaggtggcaaaacctgtgtcggcctcaagctcaacttcaaagtcaaggaggcca

SEQ ID NO: 6781 - DNA, 2359 bp, Homo sapiens
  misc_feature (5)..(5): n is a, c, g, or t
  misc_feature (19)..(19): n is a, c, g, or t
  misc_feature (2353)..(2353): n is a, c, g, or t
agccngccaacccctaatnttttgtttaatttattggtggagcccttttttaactttaatttaagattttaaccagccgaaaacccttacatgagtaaattgaaatgaaattaaatgagattacagcataatgaagaagaaaactagaatctaacaggtatgacacattcagttattctaacagggcacagtactgtgctatatgtagccgcctttacagatgttattaacctatagtagtttactattaactaggaagactggtgtatgaggagggagacattctgtaataagattaaaacctaaagtcagctgtgtaacattccatgaaagatgcattcatttattgaagatgacaaaaaagggagtcagatatattctggaagctattttaattttaggcacacaatctcatacattttgagacccttgggtcatttattactttttacaaactagttcctctctttttttctgccaagtcctgaattgaaaactgtaggcttccttgcacagatgttgcagccagcctcaggagtaaagtgcccgctgactgctgccgccacctctgtctcgctccctgtcagtgctgctggcacgtgggacgcggcaggtgacagccgttctcagcatgttttagaagcttgcctcacagacttccatgcctctccattcagccgatgacttcagggtgtcaaactgttttaatttttcaaacaaatggaacagaagccattgtggttcatcctgattacttgaacgttgcacttggtggaccgtgcctgggagcgctcgcatgccccctggcttcagaagtcatgtcagtgtctctgtagacaaactccactgtacatcttggattaatcttctgattcattgttcattttctcaagactttttgtggaattctctgataaaggaagcttttaggatggtatctatcaggccaccagcaggaattgaaaatgttttcacaaaaatccttttccttagaaataaaagctggtgacagagatggtttccttgtaccgataaaaacaaaaccaaatccatattatacatcaaaaccttgtgagacattcacttgctcttttgccatatttagatgtgttagtggaatcagaaacctgttttgatatgtgttctccatgagttaagtctgatttgtctttttatttcatgatgcatgtcttttttttcttttgtcaggataacgtcatatagcatcttgtttgtttttccttatctctatgtacatatctatctacttctgactgtagatgggtatatagatagatgccaagcttcttatgttctgggggtagtatgcatcattattgggtctctgccttaaaacacatcaaaattcattttagacaaaaaaacttctgctttgtctttggtcattagggagctctaatgtgtgtttgtggctccaagttacattttgtgtttcattgatctatatgtatatatgtgatgttttcatatatatatgtgtgtgtgtttaaattttgtatcatcaggactgacacccaatttgacactttttgtatctagaagaccctccaaaaaaggaaccacataagcacacaagaaaagagtgctatgatgttcttagcatttgctatcatgcctatttttatctagatttttaaatgtagcttgtcataacaaaattttaattacaattggcttgtatgagaagaaaaagtatttttattgttttgagtgatgacgcagagactcaatgaacttgaaaatagcattgcttcgtgcactttgaataccaatcaggtgttttctgtgctactagttgtcacgttgcattcatgttcacctcctgatttaagtatctcgggtgtgcccagccactaaagcactctggactaatcgctaaagagaagcaacgtggggggtggggttgcgagggatgtgttcacatgtacccatcatttgatcatagcactgtgattgcttttgatgtgtgtctctagtggtgtgttgtctgttggcatgcttaaagcacatgtccattaaaattcattttgttccttttaaaaaaaaaaaaaaaaaaaaaagtgattcatttgcataaacattaatgatctctgcatactggtttggggttttctctttccttctaactctaaagaaaaaatttttgctgcagaattatcctcagaagaggcttccctggccttcatctaccttgcagtctgaccaagtatgataaattttagccgttttcaaggaaacatctctctacccaggtcattgctgtcactagcagctttcaaggtcaaacctgcaggcactaaatttttgtttatcctggtttctctacatactnaacccc

SEQ ID NO: 6782 - DNA, 1875 bp, Homo sapiens
aggtgtatggatgtgggtagtgatgtggtgtgtttcctaacacctccggcagtgagccaggctttgagtggctgcgtctaaacacttctttccctgaggactggaagacattagaataagctccagacaattcaaacattgagattcctgggaactaccagatagtagcatcagttcaccaagaaatgaagctggtgaggcagtgaaaatccagggcctagaaagctgggaatgccatgacgtgggcacattgaaagacaagaggcaggcatgatcagccttgaactttaggaagatcccaggaagctgatggaagacaagatgtggagtgaatgtgaaggtccagaaatgtccttggtgtgtctgacagactttcaggcccatgcgcgagagcagctgtctaagtcaactcgggattttattgaaggtggagcagatgacagcatcacgcgggatgacaacattgcagcatttaaaagaattcgcctccgtccgcggtacctgagagatgtgtctgaggtggacaccagaaccacaatccaaggggaggagatcagtgcccctatttgtatcgcacccacagggttccactgccttgtctggcctgatggggaaatgagcacagcaagagctgcccaagcggctggtatctgctacatcaccagcacatttgccagctgtagccttgaagacattgtcattgcagctcccgaaggcctccgatggttccaactctatgtgcatccagacctgcagctgaacaaacagttgatccagagggtagaatccctaggtttcaaagctttggtaataactttggatacacctgtatgtggcaacaggcgacatgacattcgaaaccagttgaggaggaacttaacactaacagatcttcaatcacctaaaaagggaaatgcaataccttatttccagatgactcctatcagcacttctctctgctggaatgatctctcctggtttcagagcataactcgattgcccatcatcctgaaagggattttgacaaaagaggatgcagagttagctgtgaagcacaatgtccagggtatcattgtttccaaccatggtgggaggcagcttgatgaggttcttgcttcaattgatgctttgacagaagtggtggctgctgtaaaggggaaaattgaagtctacctggatggcggggtccgaactggcaatgatgtgctgaaggctctggcccttggagctaagtgcatttttcttgggagaccaatcctatggggccttgcctgcaagggtgaacatggtgttaaggaagttttgaacattttaacaaatgagttccacacttccatggcccttacaggctgccggtcggtcgctgagatcaatcgaaacttggtccagttttccaggctgtaagaaaaaagggccaataaccagactgctgaggttgcccacaggaggatcacaaactcacagcacagtgtgtgatgctgtccttcctggaccccattctgtccggaggctcatggcccatatttcccacatttctaataccaccacccctgtgcttcaggccctccaaacccctgtgttccccaaatgttccatgcccttctttgtatcactgactattatatgttgctctcttgcctaaatcttcctctgaagtaaaagatctcaaaaggacagatcattaatgactggaaaaaaaaaaaaaacagagggggcgcccagaaaaaatcaccgagagagacaccaaaaagcagataccgagatacataaccagggaccccaataagacgcatatacacgaagacaagacatcataaacggctagagggaacacgcacgaaaaagaagagaaccaaaagagggacaagagcaaac

SEQ ID NO: 6783 - DNA, 2389 bp, Homo sapiens
  misc_feature (1775)..(1793): n is a, c, g, or t
ggacagtcgcggatcctgtgacacctccgggcagcccggcacttgttgctcccacgacctgttgtcattcccttaacccggctttccccgcctcctcccggcttcgctccttttcatgtgagcatctgggacactgatctctcagaccccgctgctcgggctggagaatagatggttttgtgaaaaattaaacaccgccctgaagaggagccccgctgggcagcggcaggagcgcagagtgctggcccaggtgctgcagaggtggcgcctccccggcccgggacggtagccccgggcgccaacggcatgacagactcggcgacagctaacggggacgacagtgaccccgagatcgagctctttgtgaaggctggaatcgatggagaaagcatcggcaactgtcctttctctcagcgcctcttcatgatcctctggctgaaaggagtcgtgttcaatgtcaccactgtggatctgaaaagaaagccagctgacctgcacaacctagcccccggcacgcacccgcccttcctgaccttcaacggggacgtgaagacagacgtcaataagatcgaggagttcctggaggagaccttgacccctgaaaagtaccccaaactggctgcaaaacaccgggaatccaacacagcgggcatcgacatcttttccaagttttctgcctacatcaaaaataccaagcagcagaacaatgctgctcttgaaagaggcctaaccaaggctctaaagaaattggatgactacctgaacacccctctaccagaggagattgacgccaacacttgtggggaagacaaggggtcccggcgcaagttcctggatggggatgagctgaccctggctgactgcaatctgttgcccaagctccatgtggtcaagattgtggccaagaaataccgcaactatgatatcccggctgagatgacaggcctgtggcggtacctcaagaacgcctatgcccgtgatgagttcaccaacacctgtgcagctgacagtgagatcgagttggcctacgctgatgtcgccaaacgcctcagccgatcctgagcacagccattttgccccatccccgctgcagaaggactcaaccactcccctaagactccagcttcatagactcctctgtatcactgccttgaggcgcactttttataatcaagcctcatcttgctggtatcatgggaactccagcctgctatctttcatgaaggtcagcaccatccctggcctcctcacataggaatctagcagaaatgatagacacagtccacctttcggccggccagcctgatctgggctcagcatgtttggggtcagtcagtgttggagagcccacatatgggattgccactagcttcttctgccaatatcaaaataccttctcagatgctttagaaacatgcaacaccaactccttttctaccctcctctctgtccatacctacaaggccaaggacaaacgccatcttcatccttcttagaaagagatctattaccccattaggggagacagagagagtgaatggaggagtaccgagctggctatggacttgggtgtctggcaaacacagcttcagtctcactacttctgacactctggttattgggcactaagggccagactggaaagtcacttgagacacattctcagtttgttgcagtgccaggaatgctgcgctgctgctgctgcgcacctggcccatgctgtccctggcttccatgccgtccaggccctgccagaaaaggaaattggcatgcannnnnnnnnnnnnnnnnnngggatgggaggggaggggagcagtgttgatgccaaaatacccacggggtctaccagccatggggtttgcttgcttaggagtagttgtttcagaggtgattacaggcctgggtttgactgtgcttaccaatgagtggtttttgagctatgagaaagtggatgggagtgggaggaggagagatgggtgaagacaaaagagttctttatgagcctcgatgttccctggtaaacttttaaaaaggccttctctcatgatctaagtcttggactggtggcatcatgtaactgctaaccttacagtaaaaacccaagaatgggtcaaaaatgtcttcccagtttctccaagctgcttctggaatgcaggtctgtcggctgggtgctctccagcagctgctcctgcctgattcaactgtagcctgtaatgggtaaaagccacatttaggaggtggtctgatcatagaacaccttaggaagaaagtccatgagactttctgactaggaaaccatgtggtttgaacttgaagaaaaatgtagacccatctgggttaattttcctacaatctgactcaactgccaggtgaaaaaaaaaaaaaaaaa

SEQ ID NO: 6784 - DNA, 1921 bp, Homo sapiens
tgtgtgtagctgtagctcactcatttatattgctatgtataatattgtgctgcatgaatatgctacagttttctatttcactgttggtgggcatttgggtttctggattttttgctgttatgcataatgttctatgaacattcttatctatgtctcttatgcatttgcatgtatttctgtttgatatatactcagaagtaaaattgctgggtcatagagcatgtgtatattcaaatacagtagatattgccaaagaatttttcaaaggattgtgtcaatttaagtactcacaggcaatgtaggagagttatggttgctctgcattcttacgaacgcctagtattgtcgatcttttttattataacaattctgatgagtaaatttagtgttatctcatttctttacaattccctagtgagtaatgaggttgagtaccttttcatatgctatttagatatcttttttgtaaagtctgttcaggcatcttgctgttttcttctcttatttgtctttttcttactgattctaggaattaaaaagaaaaactattctgggaatcagttttctgtccattatgtgcattgcaaatattttctcatatccatggtttgctttttcccacttgatgatggcttttgataaacagaagtttttcattttcatataatccttttatcaataattagtctttccccttataattagtgctttttgtgactatttaatgaaagcaacttcagaatgctttaattttattcataattgagaggatttggagaaggctaatcttttctgatttacttgtctctaaaggcatcacacttttgggtcccaaccttaagcttcaggtctgagtgggggtggttactagaatctcttttccttggacgcctaagattccatttttttgtttcccacctatacaagtctgtgaaatctctgcccagtttcttagactctcaaatgcttttctgtaatttgcagacatctcagggagaaagcacaccccaaaccaggtttcatctgagactcccatactatcctagatggggtgtgagggggtctctgtaattcctcactgtcttgatatctctctgatgcttacgaggagatttttaacaaaacatttcatccagctatcctaattgtcatctgatgagctgttttgagtcacccagtctgctgcctactgaaagtggaactctgggaatctgataaaagagtgggtaatttcatgtgtcattacactggggattattcagtctttgatgaagcaacaacttgctagcttgtaagagccctaccaagtgagggtctttcctctgttacagggtaccaatatgtgaataactatcattgtcttgttagcagtggggccctgactcacgtgaaggaattatagcattttgaggtggcacatgtttagttgatcacataaatatttaaaaaattgaaattcagatgaagtaataactattttttgatacttattttttgaaaaacaggatcgtgaacttccgagactgattagaggccgagttcatagatgtgttggcaactatgaccagaaaaagaacattttccaatgtgtttctgtcagaccggcgtctgtttctgaacaaaaaactttccaggcatttgtcaaaattgcagatgttgagatgcagtattatattaatgtgatgaatgaaacttaagtagtgataaaaggaagtttagcataaattatagcagttttctgttattgcttaatttaccatctccatagttttatagctactattgtatttcacttgttgaattaaagtatttgaattcttttaaatgtggaaagagtttttgaagtataattttaatgtttttattaaaatggtatatttgctaaaattccacaaccatcctagataaaaatgctcactgt

SEQ ID NO: 6785 - DNA, 4731 bp, Homo sapiens
  misc_feature (739)..(753): n is a, c, g, or t
  misc_feature (1866)..(1884): n is a, c, g, or t
tcagcactgttggcctactggggttttctccccgcttgccggggtggtcctcttccctttgtcggaccaaagaagtaaacactgtgtggagagggactgacgtgtttggagggaaatgggaatgtacacgataattaaagagtaaagttgtgctcaacgctgtttacttctaattatttcctgattcacaaattaatttttgcaattcacaacttcaagaatacttggactattggattcaatccatagtaatctgcaaaagaagagaagcagaattatacctagaagtctactaatggacagttagtcacccacctacatgttgagattcctgacattcagacaactgacttgtaactgacttataactgacttgtaatacactgctactatatcaaaccgacaatgaattggaatgaaaaaccaaagagtgctacattaccaccactgtatcctaaaagccagccaccttttttgcaccagtctttaataaaccaaattaccacaacatctcagagttctttcagctatcctggaagtaaccaagaagcatgcatgtatcccggtaattcaaatccaatttcacagccactgctgaatatccaaaattatcctcaacaaatttctgtttctgatatgcataatgggacagttgtggcctcacacacttcagtagaaagaataacatatgcaaatgttaatggacccaaacaactaactcacaatttgcagatgtctnnnnnnnnnnnnnnnaatgtatggttgaactcaccaatgaggaatcctgtgcattctcatataggggcaactgtatctcatcaaactgattttggagctaacgtacccaatatgccggcactacagagtcaactgataacatcagatacctattctatgcaaatgcagatgatcccttctaattctacacgacttcctgtagcttaccaaggaaatcagggacttaaccagtctttttcagagcaacaggttgattggacacaacagtgtatatctaagggactgacttacccagattacagaccacctccaaagctataccgttactcaccacaaagctttttaccagattctaccattcaaaaacaaaactttataccacatacatcattgcaagttaaaaatagtcagcttccaaattctgtattaactttaccatcaaggcagacctcagctgtaccatcacagcagtatgccacgcaaactgacaaaagacctcctcctcctccttacaactgtagatatggaagccagcctttgcaaagtactcagcatattactaaacacttgtctatggaagttcctcagagtcgagaaatgctgtcatctgaaataaggaccagctttcaacagcagtggcaaaaccctaatgaaaatgtcagcacaattggaaatttcactaacttgaaagtaaataccaacagcaaacagccttttaacggtcccattagatcttctgtggatggtgttcagactcttgctcaaactaatgaagagaaaataatggattcttgcaatccaacttcaaatcaagtactggacacaagtgttgcaaaagaaaagctagtaagggatattaaaacattagtagagataaaacagaagttttcagaacttgcaaggaaaattaaaatcaataaagatcttttgatggcagcaggttgtattaaaatgactaatacttcttatagtgaaccagctcagaattctaaattgtctctaaaacaaactgccaaaatccagtctggaccccagataactccagtaatgccagagaatgcagagagacaaacaccaacagtagtggaatctgcagaaacaaataagactcaattcgacgcggccgcnnnnnnnnnnnnnnnnnnnttgcagaaggttaaccaagttgattctgttttaccaaatcctgtctattctgaaaagcggccaatgccagacccatctcatgatgtgaaagttctcacttcaaagacatcagctgttgagatgacccaggcagtattgaatactcagctttcatcagaaaatgttaccaaagttgagcaaaattcaccagcagtttgtgaaacaatttctgttcccaagtccatgtccactgaggaatataaatcaaaaattcaaaatgaaaatatgctacttctcgctttgctttcacaggcacgtaagactcagaagacagtattaaaagatgctaatcaaactattcaggattctaaaccagacagttgtgaaatgaatccaaatacccaaatgactggtaaccaactgaatttgaagaacatggaaactccaagtacttctaatgtaagtggcagggttttggacaactccttttgcagtggacaagaatcctcaacaaaaggaatgcctgctaaaagtgacagtagctgttccatggaagtgctagcaacctgtctttccctgtggaaaaagcaaccttcagatactgcaaaagaaaaggagtgtgataaactcagaacaaacacaacagcagttggaatttcaaagcctgctaacatccacgttaagagtccttgttcagttgtgggaaattcaaattctcagaataaaataagtaatccctcacagcagacagctttgtcgatggtaatgcacaattatgagtcttcaggtataaatataacaaagggaacagaacttcagatagctgtagtgtcaccgttagttctgtcagaggtcaaaacattgtctgtcaaaggaataacacctgcagtgttacctgaaacagtgtatcccgttattaaagaaggcagtgtttgtagtttacaaaatcaattggcagaaaatgcaaaggcaactgctgctttgaaagttgatgttagtggaccagtagcaagtacagcaacatcaaccaagatttttccactaactcagaaggaaaagcagaatgagtcaactaatggtaattcagaagtcacacctaatgtcaatcaaggaaagcataacaaattagagtcagctatccattctcctatgaacgatcagcaaatctcacaggagtcaaggaatagtactgttgtgagtagtgatacattacagattgacaatatttgttctctggttgaaggtgatacctcttacaattcccaaatagcaaagatattcagctctcttcccttgaaaatggttgagccacagaaaccttctctacccaatcagcaagggattggcagcagagaaccagaaaaacaattagataataccactgaaaataaagactttggttttcaaaaagataaacctgtacagtgcacagatgtttcacataaaatatgtgatcagtcaaagtcagagccacccttagagtcatcttttaacaatcttgaaacaaacagagttattctagagaaaagtagtttggagcatgccactgaaaaaagcacagctaacgatacgtgctcgtcagctgctattcaggaggatatttaccctcaggaaatagatgcatccagcaactatactccccaagatcctgcaagaaatgaaatccacagtgataaggcacctgtcttatacctacatgaccagctgtcagaacttctaaaagagtttccttatggcattgaggctgtgaatacacgtgaaggttctgtgggccagcaaactacataccagacctcagaagatcaaactgctgataaaaccagttctgactccaaagacccagcagatcaaatacaaattacaatattaagctcagagcaaatgaaagaaatatttcctgaacaggatgatcaaccctatgtagtagacaagttggcagaacctcagaaagaagagcccatcacagaagtagttagccagtgtgacctgcaggcacctgcagctggacaaagtcgtgattctgtgatactggactctgagaaagatgatatccactgctgtgcattgggctggctctccatggtttacgaaggagtaccccagtgtcagtgtaattccatcaagaactcatcttcagaggaagagaaacaaaaagagcagtgttctcctttggataccaacagttgtaaacaaggagagagaacttctgatagagatgtcactgttgttcaatttaagagccttgtaaataatccaaagactcctccagatgggaaaagtcattttcctgaactacaagacgacagtagaaaagatacacccaaaacaaaacataaaagcttaccaaggacagaacaagaattagttgctggtcagttttcatctaaatgtgataaactaaatcccttgcaaaatcacaaaagaaaaaaattgaggtttcacgaggtaacctttcactccagtaataaaatgacagcatcttatgaacaagcttctcaggaaacccgacagaagaaacatgtaacacagaactcacgtccactaaaaacaaaaacagcttttttgccaaataaagatgtgtataagaagcatagttctttgggacagtcattatcaccagaaaagataaaattgaaactcaaatcagttagcttcaaacaaaaacgaaagttagaccaagggaacgtattagatatggaagtaaagaaaaagaaacatgatactcaagatgctgaaaaaaatgatttggcatccaaagggcattcaccacacccgcagagattgaaataaaatatttggcttgtttggttgattttacaactcatctagacactatgaataaaaacagcattgttcagaaataccttc

SEQ ID NO: 6786 - DNA, 3606 bp, Homo sapiens
  misc_feature (1168)..(1184): n is a, c, g, or t
  misc_feature (1253)..(1267): n is a, c, g, or t
cgcggccgcagccgcattgcccgctcggcgtccggcccccgacccgcgctcgtccgcccgcccgcccgcccgcccgcgccatgaacgccaaggtcgtggtcgtgctggtcctcgtgctgaccgcgctctgcctcagcgacgggaagcccgtcagcctgagctacagatgcccatgccgattcttcgaaagccatgttgccagagccaacgtcaagcatctcaaaattctcaacactccaaactgtgcccttcagattgtagcccggctgaagaacaacaacagacaagtgtgcattgacccgaagctaaagtggattcaggagtacctggagaaagctttaaacaagaggttcaagatgtgagagggtcagacgcctgaggaacccttacagtaggagtccagctctgaaaccagtgttagggaagggcctgccacagcctcccctgccagggcagggccccaggcattgccaagggctttgttttggacactttgccatattttcaccatttgattatgtagcaaaatacatgacatttatttttcatttagtttgattattcagtgtcactggcgacacgtagcagcttagactaaggccattattgtacttgccttattagagtgtctttccacggagccactcctctgactcagggctcctgggttttggattctctgagctgtgcaggtggggagactgggctgagggagcctggccccatggtcagccctagggtggagagccaccaagagggacgcctgggggtgtcaggaccagtcaacctgggcaaagcctagtgaaggcttctctctgtgggatgggatggtggagggccacatgggaggttcacccccttctccatccacatggtgagccgggtctgcctcttctgggagggcagcagggctaccctgagctgaggcagcagtgtgaggccagggcagagtgagacccagccctcatcccgagcacctccacatcctccacgttctgctcatcattctctgtctcatccatcatcatgtgtgtccacgactgtctccatggccccgcaaaaggactctcaggaccaaagctttcatgtaaactgtgcaccaagcaggaaatgaaaatgtcttgtgttacctgaaaacactgtgcacatctgtgtcttgtttggaatnnnnnnnnnnnnnnnnntcctatgtttttggtcaaagccagcgtcctcctctgtgaccaatgtcttgatgcatgcactgttccccnnnnnnnnnnnnnnngcgaggagatgctccttgggccctttgagtgcagtcctgatcagagccgtggtcctttggggtgaactaccttggttcccccactgatcacaaaaacatggtgggtccatgggcagagcccaagggaattcggtgtgcaccagggttgaccccagaggattgctgccccatcagtgctccctcacatgtcagtaccttcaaactagggccaagcccagcactgcttgaggaaaacaagcattcacaacttgtttttggtttttaaaacccagtccacaaaataaccaatcctggacatgaagattctttcccaattcacatctaacctcatcttcttcaccatttggcaatgccatcatctcctgccttcctcctgggccctctctgctctgcgtgtcacctgtgcttcgggcccttcccacaggacatttctctaagagaacaatgtgctatgtgaagagtaagtcaacctgcctgacatttggagtgttccccttccactgagggcagtcgatagagctgtattaagccacttaaaatgtttgtcactttgccaaggcaagcacttgtgggttttgtttgttttcattcagtcttacgaatactttttccccttgataaagactccagttaaaaaaaattttaatgaagaaagtggaaacaaggaagtcaaagcaaggaaactatgtaacatgtaggaagtaggaagtaaattatagtgatgtaatcttgaattgtaactgttcttgaatttaataatctgtagggtaattagtaacatgtgttaagtattttcataagtatttcaaattggagcttcatggcagaaggcaaacccatcaacaaaaattgtcccttaaacaaaaattaaaatcctcaatccagctatgttatattgaaaaaatagagcctgagggatctttactagttataaagatacagaactctttcaaaaccttttgaaattaacctctcactataccagtataattgagttttcagtggggcagtcattatccaggtaatccaagatattttaaaatctgtcacgtagaacttggatgtacctgcccccaatccatgaaccaagaccattgaattcttggttgaggaaacaaacatgaccctaaatcttgactacagtcaggaaaggaatcatttctatttctcctccatgggagaaaatagataagagtagaaactgcagggaaaattatttgcataacaattcctctactaacaatcagctccttcctggagactgcccagctaaagcaatatgcatttaaatacagtcttccatttgcaagggaaaagtctcttgtaatccgaatctctttttggtttcgaactgctagtcaagtgcgtccacgagctgtttactagggatccctcatctgtccctccgggacctggtgctgcctctacctgacactcccttgggctccctgtaacctcttcagaggccctcgctgccagctctgtatcaggacccagaggaaggggccagaggctcgttgactggctgtgtgttgggattgagtctgtgccacgtgtttgtgctgtggtgtgtcccctctgtccaggcactgagataccagcgaggaggctccagagggcgctctgcttgttattagagattacctcctgagaaaaaaggttccgcttggagcagaggggctgaatagcagaaggttgcacctcccccaaccttagatgttctaagtctttccattggatctcattggacccttccatggtgtgatcgtctgactggtgttatcaccgtgggctccctgactgggagttgatcgcctttcccaggtgctacacccttttccagctggatgagaatttgagtgctctgatccctctacagagcttccctgactcattctgaaggagccccattcctgggaaatattccctagaaacttccaaatcccctaagcagaccactgataaaaccatgtagaaaatttgttattttgcaacctcgctggactctcagtctctgagcagtgaatgattcagtgttaaatgtgatgaatactgtattttgtattgtttcaattgcatctcccagataatgtgaaaatggtccaggagaaggccaattcctatacgcagcgtgctttaaaaaataaataagaaacaactctttgagaaacaacaatttctactttgaagtcataccaatgaaaaaatgtatatgcacttataattttcctaataaagttctgtactcaaatgtaaaaaaaaaaaaaaaaaaaaaaaaaaaaaaaaaaaaaaaaaaaaaaaaaaaaaaaaaagaaaaaaaaaaaaaaaaaaaaaaaaaa

SEQ ID NO: 6787 - DNA, 1961 bp, Homo sapiens
attcttcaggtgaatgttttactttccaaagtgctctcctctgcaccagcagtaataaatacaatgccataatcccttaggtttgcctagtgcttttgcaattttcaaagcacttccataagcattccttccacctccttgataggcatttatggaaagcctgctacatgtcaatcatactgttaggcacaggggacctaaagacacataaaaggatggcattctgcctcataaattgcaaaacctaatgaaagtgactgcttggtaaacaaattattattatattataaaatgctataaaagagccatattgaaagtgccctgttggagacagggcaaatgccacaaaaatgatgtaaatttacatggaggaaaagtagaatctgcctggtttgtaggcagcagaagacatttttcatcagtgggcaggtgttctttaccttttgtagaaatgggagtcaagtctcaaataggaggctccacaaaatctcatgccaggtctctgataccttattcacagaagttctttgaagtatttattgttattttctttgacttatgggaaaactgggacacaggaagacaggtaaattacccaacctcacacgttaagtcagaactgggagccataattttgtatccctggtataaatagacaatctcttgaagaaatgaagagatgaccatagaaaaacatcgagatatctccagctctaaaatcctttgtttcaatgttgtttggcatatgttatctttggaatttagtgtctgagcctctgtctgttactgtagtatttaaaatgcatgtattataatcatataatcataactgctgttaattcttgattatatacctagggacaatgtgtaatgtaagattactaattggttctgcccaatctcctttcagattttattaggaaaaaaaaataaacctcctgatcggagacaatgtattaatcagaagtgtaaactgccagttctatatagcatgaaatgaaaagacagctaatttggtccaacaaacatgactgggtctagggcacccaggctgattcagctgatttcctaccagcctttgcctcttccttcaatgtggtttccatgggaatttgcttcagaaaagccaagtatgggctgttcagaggtgcacacctgcattttcttagctcttctagaggggctaagagacttggtacgggccaggaagaatatgtggcagagctcctggaaatgatgcagattaggtggcatttttgtcagctctgtggtttattgttgggactattctttaaaatatccattgttcactacagtgaagatctctgatttaaccgtgtactatccacatgcattacaaacatttcgcagagctgcttagtatataagcgtacaatgtatgtaataaccatctcatatttaattaaatggtatagaagaaaaaaaaaaaaaaaaaaaaaaaaaaaaaaaaaaaaaaaaaaaaaaaaaaaaaaaaaaaaaaaaaaaaagaaccaacacaggaggagagcacaacaaaaagctattccaggcgaagacccgacgcaacgacggtatgaaaaacgacgcggcggcactcattagaacgagggagcgcagggaccgactacaaccagaggagaagcggcgccaactcaaccacaaacagctgctccgcgccgcggcgacaacggcctccctgcggggagaaaatccgcgcaggagaagcccccccagaccaccaggtggggggggagacccataacacggggcaagcaggaccactcaacgtgctgttcgacacgacctccgacgagacaactaacacaccccgcagagagctaacggcgtcaaaacagaacgatattgacagcgccacacgaaagcatcgcgacccggcaaagaccacggacaaccgacctccagggacggctaaaaagagaacggcgcgacacgcacgcccg

SEQ ID NO: 6788 - DNA, 1907 bp, Homo sapiens
  misc_feature (1768)..(1768): n is a, c, g, or t
agagagagagagagagagagagagagagagagagagagagagagagagagagagagagagagagagagagagagagagagagagagagagagagagagagagagagagagttcggcacgaggggctaggtgcgctgcgagcgcgcgcggaccgcgcacaggcggcggagccggtatgggcccgcctggccctgggcgccgcgccgcacgagcaccagcctagagccaggactgaagcttcaagatggctgaccaggaccctgcgggcatcagccccctccagcaaatggtggcctcaggcaccggggctgtggttacctctctcttcatgacacccctggacgtggtgaaggttcgcctgcagtctcagcggccctccatggccagcgagctgatgccttcctccagactgtggagcctctcctataccaaatggaagtgcctcctgtattgcaatggtgtcctggagcctctgtacctgtgcccaaatggtgcccgctgtgccacctggtttcaagaccctacccgcttcactggcaccatggatgccttcgtgaagatcgtgaggcacgagggcaccaggaccctctggagcggcctccccgccaccctggtgatgactgtgccagctaccgccatctacttcactgcctatgaccaactgaaggccttcctgtgtggtcgagccctgacctctgacctctacgcacccatggtggctggcgcgctggcccgcctgggcaccgtgactgtgatcagccccctggagcttatgcggacaaagctgcaggctcagcatgtgtcgtaccgggagctgggtgcctgtgttcgaactgcagtggctcagggtggctggcgctcactgtggctgggctggggccccactgcccttcgagatgtgcccttctcagccctgtactggttcaactatgagctggtgaagagctggctcaatgggttcaggccgaaggaccagacttctgtgggcatgagctttgtggctggtggcatctcagggacggtggctgcaggcctgactctacccttttgaacgggggtaaagacccaacgccaggtcgctctgggagcgatggaggctgtgagagtgaaccccctgcatgtggactccacctggctgctgctgcggaggatccgggccgagtcgggcaccaagggactctttgcaggcttccttcctcggatcatcaaggctgccccctcctgtgccatcatgatcagcacctatgagttcggcaaaagcttcttccagaggctgaaccaggaccggcttctgggcggctgaaaggggcaaggaggcaaggaccccgtctctcccacggatggggagagggcaggaggagacccagccaagtgccttttcctcagcactgagggagggggcttgtttcccttccctcccggcgacaagctccagggcagggctgtccctctgggcggcccagcacttcctcagacacaacttcttcctgctgctccagtcgtggggatcatcacttacccaccccccaagttcaagaccaaatcttccagctgcccccttcgtgtttccctgtgtttgctgtagctgggcatgtctccaggaaccaagaagccctcagcctggtgtagtctccctgacccttgttaattccttaagtctaaagatgatgaacttcaaaaaaaaaaaaaaaaaaaaaaaaaaaaacgagggcttcatattggccggggtggcgggaaaaagggggtattgagaatctgggccctttggncccaaaaggttgtgtctcctggagccccgttttttttggccccaagcggggtaagatctggcgcgggtccccctattagggggagggccgtattaattccggataagcccggtttaccctggttagattgtctcacagg

SEQ ID NO: 6789 - DNA, 704 bp, Homo sapiens
ctatagatttgtaatttgtggtttggggtctggccctcatccacctctgctccgagccagtctgcccccaatcccacccaagggagaacatgtagaaagggaaaggtttctcaacttagttctgtttttttttttttttaaaggcaaagaaggtttttatttaagtgacaacatttgagagctaaaaaccagctcacatcaaaatcaagacccagttgtaaaaatcttttaactccataatgctgtttttgtcttgttagaaatctgatatcttacattagcgtttctaacggattttgtacaaggcagccataaggaatataataaacctttttcaccacagaaccatctgtcacagataatactgaaagttacacacttagggaacagttcagaccacagacaaggtcagactggctgccaccaccaagtaaacaactagaaaaggacagcggggtccaagggtgggggtccctgtgcacgagtcgccctcctctggcctgccccccctcgggtcacctgtttctcctttgccccaaagagggtggagtcaaatgcagattttcctcccaactgcctgttagtgtctcaacaaggagagcagagcccaggtcaggcctcactgcttggacttaaccctaactaggatttttacgagggttcccccaaaccccggaaggaaaggaaggagggaatgtttcttt

SEQ ID NO: 6790 - DNA, 788 bp, Homo sapiens
tctgttctaatgtatcattaagctccttaaaatactggagaacagcttccttatcgccttggatcattttctcagaatgagatttttgttctttcagcttttcaataagatgggtaagatctgtccagtgtgtgtcagtcaactgttcaagcagtttttgaggagtgtccttttctttcaaataggcactttgaaggtcatctataggatgaccatgatgttgacctatggtaaggcaatgaccacaaactaattttttatctaatagacagtaaacatttaatggttgcctgtaatgttcagggcaggtgacaatatctggatggtcttcttgctggtacttttcaataatagcccttagtgcaaaattaacaggtaaagattcaatgccagttggagcaatttcagtaatacttctgcaattagggcacttgagtggaattcgtaaaggtctccatatataaaagttaccagatgcctgaagaatgttttccaaacaatttctacaaaatgtatgagagcatggcagtacacgaggatcttcaaaaatactataacatatgggacaagttaactcttcctcaaaattgtgcatttctttgttgatctcgtggtttgggggctgaatacactcttctccaactcctccagaatcttttattcttattcgcggggaggaagcggaccaggcaactccacagcacggaaacacagcgccacgagctccaggcggatgctgagagccgccccgagtccccgccctcctctgcccacgaagggctaccgct

SEQ ID NO: 6791 - DNA, 1714 bp, Homo sapiens
gccgctcggcctggccgccccccgcgagcaccgcgctgcagacgaagcgggcgcgtgatcccgctccgggtgacctcaaagcagaagctctgaaggcacgagctcatctgacgactgacagctgatggcaccgccagcctctgtcccttggccaggactgtcacacggctgactctcagcaggggcagtagaatgaaagagggcatgtctaataacagcaccactagcatctcccaagccaggaaagctgtggagcagctaaagatggaagcctgtatggacagggtcaaggtctcccaggcagccgcggacctcctggcctactgtgaagctcacgtgcgggaagatcctctcatcattccagtgcctgcatcagaaaacccctttcgcgagaagaagttcttttgtaccattctctaactccgtgtgtgatgaaaacgcctccttttctgaccttcaaagtcccctgtagagaccatgcatgctctaagccttagggagtgagaccaacacccatccctgcccagccaacagtggccggggcttgtcttatgtttccatctgttttcttcgtggcattcaatttcatttttttccttttcattttcatgttattttcattattggcaaagaaaatcaaaatgtttatagccaaataacaaatgtgccatgtaaaagtaagtctggacttaagagtttaaaatttttaaacatcagtttccaagtttatatcatattaatacatttcagtggataatttatttaaaaaaaaaactatgcctaaatatcccttatttgtaatattcagtatcaaattagagcattttgaccaactgaaacatataacgttttcatctcctttcctggagaaagcagctgcagaggttctgtatttcctgcatttccatcatcctagtaaaaagacaacaacccacaggattgggaatggttttcttttgtttttttgttgttgttgttgttttgagagatggagtctcgctctgtcacccaggctggagtgcaatggcgtgacctcagctcactgcgacctccacctcctgggttcaagcgattctcctgcctcagcctcctgagtagctgggatcataggcacgcgccaccacacccagctaattttttgtatttttagtaaagacggggtttcaccatgttggtcaggctggtctcaaactcctgacctcgtgatccacccgcctcggcctcccaaagcgctgggattacaggcgtgagccaccgcgcccggccgtggaatggttttcttagcatatcctcctggggccgtggcgccccggctgtgggccgtggtggatgtcccttgtttcagtggtcctacaaaggtagatggtgggcggacaccgaagtcaacttgactgtaaaagtaccccataccgttgacgcgctgtggcagacctgtgggtgcggtctcccctctccaaatgccacctcttcctgctccctcctcttttggctcctactcagtagttccattgtgggctgcagtaatataaggacctgttctggacacagcactgggcccgctggggttttagtagggcagccccttccctgcaggagtgaggcatggtgacagcagtcccctatgtgcccccaagtcatctgagcattggtgtgcattaaggtactcaatcttccaacaataaataccataagtgcaaaaaaaaaaaaaaaaaaa

SEQ ID NO: 6792 - DNA, 2267 bp, Homo sapiens
  misc_feature (75)..(130): n is a, c, g, or t
  misc_feature (2026)..(2026): n is a, c, g, or t
  misc_feature (2109)..(2110): n is a, c, g, or t
agcctgttgctgatgctgccgtgcggtacttgtcatggagctggcactgcggcgctctcccgtcccgcggtggtnnnnnnnnnnnnnnnnnnnnnnnnnnnnnnnnnnnnnnnnnnnnnnnnnnnnnnnncaagaaggaggccacggaagtatgggattatgtgacggtccgcaaggatgcctacatgttctggtggctctattatgccaccaactcctgcaagaacttctcagaactgcccctggtcatgtggcttcagggcggtccaggcggttctagcactggatttggaaactttgaggaaattgggccccttgacagtgatctcaaaccacggaaaaccacctggctccaggctgccagtctcctatttgtggataatcccgtgggcactgggttcagttatgtgaatggtagtggtgcctatgccaaggacctggctatggtggcttcagacatgatggttctcctgaagaccttcttcagttgccacaaagaattccagacagttccattctacattttctcagagtcctatggaggaaaaatggcagctggcattggtctagagctttataaggccattcagcgagggaccatcaagtgcaactttgcgggggttgccttgggtgattcctggatctcccctgttgattcggtgctctcctggggaccttacctgtacagcatgtctcttctcgaagacaaaggtctggcagaggtgtctaaggttgcagagcaagtactgaatgccgtaaataaggggctctacagagaggccacagagctgtgggggaaagcagaaatgatcattgaacagaacacagatggggtgaacttctataacatcttaactaaaagcactcccacgtctacaatggagtcgagtctagaattcacacagagccacctagtttgtctttgtcagcgccacgtgagacacctacaacgagatgccttaagccagctcatgaatggccccatcagaaagaagctcaaaattattcctgaggatcaatcctggggaggccaggctaccaacgtctttgtgaacatggaggaggacttcatgaagccagtcattagcattgtggacgagttgctggaggcagggatcaacgtgacggtgtataatggacagctggatctcatcgtagataccatgggtcaggaggcctgggtgcggaaactgaagtggccagaactgcctaaattcagtcagctgaagtggaaggccctgtacagtgaccctaaatctttggaaacatctgcttttgtcaagtcctacaagaaccttgctttctactggattctgaaagctggtcatatggttccttctgaccaaggggacatggctctgaagatgatgagactggtgactcagcaagaataggatggatggggctggagatgagctggtttggccttggggcacagagctgagctgaggccgctgaagctgtaggaagcgccattcttccctgtatctaactggggctgtgatcaagaaggttctgaccagcttctgcagaggataaaatcattgtctctggaggcaatttggaaattatttctgcttcttaaaaaaacctaagattttttaaaaaattgatttgttttgatcaaaataaaggatgataatagatattattttttcttatgacagaagcaaatgatgtgatttatagaaaaactgggaaatacaggtacccaaagagtaaatcaacatctgtatacccccttcccaggggtaagcactgttaccaatttagcatatgtccttgcagaatttttttttctatatatacatatatattttttaccaaaatgaatcattactctatgttgttttactatttgtttgacatatcagtatatctgaaacaccttttcatgtcaataaatgttcttctctaacatttttaaaaaaaaaaaaaaaaaaaaaaaaaaaaaaaaaaaaaaaaggcggcgggaaaaagggcgcggaaggggccctggatcccttagctgtttccctgaacccgnttctctcgttccacaagtgtggagaaccggcgcgccccctaagggggtcgtttttaatttcgcataagccgggtcatcacaanngcgcgaacaagaaaaaacgggcaacgagcgagagcgacaaaactccaacaaagagcaaaaaacgaaaaacccacaacaacaaacacatataaaaaaaacaaacaaaaataagccatcaaagaaaacacaacaaaaaaaaagaagaatacgaacagca

SEQ ID NO: 6793 - DNA, 3043 bp, Homo sapiens
  misc_feature (139)..(165): n is a, c, g, or t
  misc_feature (1745)..(1781): n is a, c, g, or t
ccacgcgtgcgcgcagggcagggcctacggcaacctgggcaacacccactatttgttggggaacttcacagaggccacgaccttccacaaggagcgcctggccattgctaaggagtttggagacaaggcagccgagagnnnnnnnnnnnnnnnnnnnnnnnnnnngaacgcccacgtcttcctggggctgctttgacgtggcctgccgagtactacaagaagacgctgcaactgtctcggcagctcagggaccaggcagtggaggcgcaggcctgctacagtctgggcaagcacctacacgctgctgcaggactacgagcgcgcggccgagtaccacctggcggcacctgctcattgcccaggagctggccgacagagtgggcgagggccgggcgtgctggagcctgggaaatgcctacgtgtccatggggcgcccagcgcaggccctgaccttcgccaagaagcacctgcagatctcccaggagatcggggaccgccatggggagctcacggcccgcatgaacgtggcgcagctgcagctggtgctcggccgcctgaccagcccggcagcctcagagaagcctgacctggccggctatgaggcccagggggccagacccaagaggacgcagaggctgagcgcggagacctgggacctgctgagactccccctggagcgggagcagaatggagacagccaccattcaggggactggcgggggcccagcagggactcgctacccctccccgtgaggagcaggaagtaccaggaaggcccggacgctgagaggaggccccgggagggcagccactccccgctggacagcgccgacgtccgggtgcacgtgccacgcacgagcatcccgagggccccgtcttcggacgaggagtgcttctttgacctgttgaccaagttccagagcagccgcatggacgaccagcgttgtcccctggacgatggccaggccggggctgccgaggccacggccgcccccaccctggaggacaggatcgcccagccctcgatgacggcctcgccccagaccgaggaattcttcgacctcatcgccagctcccagagccgccggctggacgaccagcgggccagcgtgggcagcctgccggggctgcgaatcacccacagcaatgcagggcacctccgaggccacggcgagccccaggagccgggggacgacttcttcaacatgctcatcaagtaccagtcctccaggatcgatgaccagcgctgcccaccacctgacgtactgccccggggccctaccatgccggacgaggacttcttcagcctcattcagagggtgcaggctaagcgcatggacgagcagcgggtggacctcgccgggggcccggagcagggggcaggcggcccgcccgagccccagcagcagtgccagcctggtgcgagctaaggccctgtgcccaccgccaggcccaccctgcccccactcctggacgccggtctcacagtcacagccacgtcctcccgaggccattgccgaggacaggcactgggcatgcagccccacggcctccccgacccagggcgacaggctcaggccaagctgcccgtggtgggagggcgtgcttccatcccgggctggcccccatggccctcagcttcctcccttctgcccctgccgcaggccggacggggccttcggcatgtcggccccgacctggtgctgtcagactcccgcatcctctcccccaagcccttcccgttnnnnnnnnnnnnnnnnnnnnnnnnnnnnnnnnnnnnntctcccccaccctccccaaaggtgtctctgagccgcctcttggggccaccaaggacagggccatgttctgtccccccagagctggtcttgggatggccgtgtgacaggcatgctccacccctccagcttcgtcctggggcagggctccctccaagcctgtctccccactccccggccagaggtcagcaaccacagaaggccccccagaccacgcatggcagaccaggctgcagtggcagccctgaggtgccccccgccgagtcccagggccctgcaggggcctcgacaggagccgggcctatctctaaagcagagggaatggctgggcatgaacttcgacattccaaaaccccaagccaggaaaaagggcagggcctggtcctagggatgcttactggcagcaagagcagtgcccagtcagggtgggaggtagcaccaggctctgtgaccctcacccaagtgggggggtggtcagtggaagctggggaggcttcactcagctcaaccctgcagaccccccatatgagaacccccctcctcccaccagctgggggagatgacatcactgctctctccatggggagggggctcacagggcaccaagttcgggatcctaggactggcaggacctgctggagcctgagatgggccccaggggcctgaggttgcctcctcctgtccagacccagccttggcacctcccaagactgccaagggccctaccatggccccacagcccccagggctggcagttccatctaggagggtgcctctaggccccactctcaggctaggatggagaggcagatctgggcctggtgaggtgacctgcttctggaggggcagggccgcacccgagagcagggacaggtgcccgaacacagggtctccaggacgtagcgcccccccgcatacttgaatgtatgtgcgtatttattgctcacgtctgtgccatgttgtcaatgggtcctttccaacccaagaggtacatttgtttttctgtttttcctgaaaaataaagtcggccaagtgagaaaaaaaaaaaaaaaaaaaaaaaaaaaaaaaaaaaaaaaaaaaaaaaaaggggcgcgccctcaagaggtatgtcccgcgtgggggggccgccatatggcgcaaccccagtatgttagtagcaggaggccccaagaagaggcgcgattagtcacagggcacaggcgccggtaaaccagtgggcatgggacactggtcgagggggcactgggcagcaccccactcctggg

SEQ ID NO: 6794 - DNA, 2482 bp, Homo sapiens
catcttgtattggggtttcattgttcccgctgggccgggcggtttagtgtaattgccgccggaggaggaggcggagtaacctctggtcagccgagaaaccccactatcctgtagccataaccgcttaaacgatttgggaggtagtgaagggcagggagctggacctggaggcgccgccgcgacagcagcagccatggaggacgagatgcccaagactctatacgtcggtaacctttccagagatgtgacagaagctctaattctgcaactctttagccagattggaccttgtaaaaactgcaaaatgattatggatacagctggaaatgatccctattgttttgtggagtttcatgagcatcgtcatgcagctgcagcattagctgctatgaatggacggaagataatgggtaaggaagtcaaagtgaattgggcaacaacccctagcagtcaaaagaaagatacaagcaatcatttccatgtctttgttggtgatctcagcccacaaattacaactgaagatataaaagctgcttttgcaccatttggaagaatatcagatgcccgagtggtaaaagacatggcaacaggaaagtctaagggatatggctttgtctcctttttcaacaaatgggatgctgaaaacgccattcaacagatgggtggccagtggcttggtggaagacaaatcagaactaactgggcaacccgaaagcctcccgctccaaagagtacatatgagtcaaataccaaacagctatcatatgatgaggttgtaaatcagtctagtccaagcaactgtactgtatactgtggaggtgttacttctgggctaacagaacaactaatgcgtcagactttttcaccatttggacaaataatggaaattcgagtctttccagataaaggatattcatttgttcggttcaattcccatgaaagtgcagcacatgcaattgtttctgttaatggtactaccattgaaggtcatgttgtgaaatgctattggggcaaagaaactcttgatatgataaatcccgtgcaacagcagaatcaaattggatatccccaaccttatggccagtggggccagtggtatggaaatgcacaacaaattggccagtatatgcctaatggttggcaagttcctgcatatggaatgtatggccaggcatggaaccagcaaggatttaatcagacacagtcttctgcaccatggatgggaccaaattatggagtgcaaccgcctcaagggcaaaatggcagcatgttgcccaatcagccttctgggtatcgagtggcagggtatgaaacccagtgaataaggactccagaatctaaagccagtggcttgaggctacagggagtgtagtaaagccgttgtttacttaaagatttatcaaatcagtcagtgcaaatgtcagatacaatgtattcatttaaaagattcatttttaatcatgaaattacttatcatccacattgttttaaaaagaaacaagatgctggatgtctgccaatttttgccttcattaccttttttgataaagtttctcagatccttgtttcaaacacaaatgcagggattgctgccactttttaactattaagaggcagaaaattgcacaatattgaacttttttccactgaagtagtgtgcagttctagtttgcattcctgatatgatttaaaacatgtaatataaagatgttaaaaaaaaaaaccaaaactgtgcagagtctagaagttgtttgtcatcttcagcttgtgcacaattctgttttaggttaaaaaaaggcattgtttgagctgtcccatctccactgttatccctttgggttttttaatataaattattagtttacatcatttttgtatctacatcttttttcacaaatttgtcttgccttattaaagttctgtaaaatatacttaaatggaaaaaatgatgttcatttagattgaaaacttttctcagatggattgataattgcattcatcttgtgttttatatgagaaggtgcctcaagaatttcctgttggatttgtttaaaaggatttttatctttcgtgataaactttgctgtgtaccaggaactataaaaacaaaaacttgttactaaagaaaatatctgaaatgtgataagttcttatgccatgttaatttcatgtgtcaacttcaacatttacatgtattatttcattatgtaaaatgttttagcaatttaatattttgcacagttagcaaactttgtatgtcatttccttcaaggcatcatgcagagttgacatgagatttataaggttttaagttgtttgcatgtgaaaatcaaatacatactttggtagtctttgaaaaaaaaaacatctactcttgtttttcaaaatttttagacacatacttatatttaaagaatattttaatttaccactttctaacaaatttactctttttaaactttgattcattttaccttcaaat

SEQ ID NO: 6795 - DNA, 5766 bp, Homo sapiens
  misc_feature (1236)..(1278): n is a, c, g, or t
  misc_feature (2009)..(2027): n is a, c, g, or t
gcaattaaagtcaagagctaaggagggagggagagggtttagaaataccagcataataagtagtatgactgggtgctctgtaaattaactcaattagacaaagcctgacttaacgggggaagatggtgagaagcgctaccctcattaaatttggttgttagaggcgcttctaaggaaattaagtctgttagttgtttgaatcacataaaattgtgtgtgcacgttcatgtacacatgtgcacacatgtaacctctgtgattcttgtgggtatttttttaagaagaaaggaatagaaagcaaagaaaaataaaaaatactgaaaagaaaagactgaaagagtagaagataaggagaaaagtacgacagagacaaggaaagtaagagagagagagagctctcccaattataaagccatgagccccctttggtgggggtttctgctcagttgcttgggctgcaaaatcctgccaggagcccagggtcagttcccccgagtctgcatgacggtggacagcctagtgaacaaggagtgctgcccacgcctgggtgcagagtcggccaatgtctgtggctctcagcaaggccgggggcagtgcacagaggtgcgagccgacacaaggccctggagtggtccctacatcctacgaaaccaggatgaccgtgagctgtggccaagaaaattcttccaccggacctgcaagtgcacaggaaactttgccggctataattgtggagactgcaagtttggctggaccggtcccaactgcgagcggaagaaaccaccagtgattcggcagaacatccattccttgagtcctcaggaaagagagcagttcttgggcgccttagatctcgcgaagaagagagtacaccccgactacgtgatcaccacacaacactggctgggcctgcttgggcccaatggaacccagccgcagtttgccaactgcagtgtttatgatttttttgtgtggctccattattattctgttagagatacattattaggaccaggacgcccctacagggccatagatttctcacatcaaggacctgcatttgttacctggcaccggtaccatttgttgtgtctggaaagagatctccagcgactcattggcaatgagtcttttgctttgccctactggaactttgccactgggaggaacgagtgtgatgtgtgtacagaccagctgtttggggcagcgagaccagacgatccgactctgattagnnnnnnnnnnnnnnnnnnnnnnnnnnnnnnnnnnnnnnnnnnnttggatgactacaaccacctggtcaccttgtgcaatggaacctatgaaggtttgctgagaagaaatcaaatgggaagaaacagcatgaaattgccaaccttaaaagacatacgagattgcctgtctctccagaagtttgacaatcctcccttcttccagaactctaccttcagtttcaggaatgctttggaagggtttgataaagcagatgggactctggattctcaagtgatgagccttcataatttggttcattccttcctgaacgggacaaacgctttgccacattcagccgccaatgatcccatttttgtggttcttcattcctttactgatgccatctttgatgagtggatgaaaagatttaatcctcctgcagatgcctggcctcaggagctggcccctattggtcacaatcggatgtacaacatggttcctttcttccctccagtgactaatgaagaactctttttaacctcagaccaacttggctacagctatgccatcgatctgccagtttcagttgaagaaactccaggttggcccacaactctcttagtagtcatgggaacactggtggctttggttggtctttttgtgctgttggcttttcttcaatatagaagacttcgaaaaggatatacacccctaatggagacacatttaagcagcaagagatacacagaagaagcctagggtgctcatgccttacctaagagaagaggctggcnnnnnnnnnnnnnnnnnnngctgacaataaaggaactaatcctcactgttccttcttgagttgaagatctttgacataggttcttctatagtgatgatgatactcattcagaagagcttagctggtagttccgctttgcttgcttgtttaacaaacccaactaaagtgcttgaggctacctctaccttcaaataaagatagacctgacaatttgtgatatctaataataaccccccccccaatattgattaagcctcctccttttctgaaagcatttaaaaaaaaaaaaaaaaatcccaaaacattgatccaggggagtcatttaaatttgcaggtcagtgcaatgtgagacctggccaagaccatacatcaatctttcttagccccagtgtctttattggtaatgccatggaggtgggagttggtaggtgctagatgagtctccaagatcccttttagctataaacatctctgcttctaggcaccctcctgattatcttccttgggcttctttttcttcttttctctatatttttcctctccagcttagaagatgagaataagccttgttttctttacaggatggaaaatgactaaatgaaggatcaattccactctattgtgtaaactagattttacggattttacttaaaatctgcagttttaaacagtagacctatattacaggattcaatagctggatacacattgattctatagtgataaatagagaagataataaaattatagagtttcctggttagttgatatgctactgtaaacctattaacaaatacagaattactctttccaaggaaggctgactgaaggctggtgaggctgtaaacctgaacatgagacaatttgacttgagtcccattactctgaggtctctttggctgatcctctaccaatttctttactaggtagcctcagatgaaaaattattcccacataatgcactgggcttatttttaagcattgatgttagattgattaatgttgccgaatactcacagttacttatgaatgctgatcaattaagtcttatcatttgaaagcaaaccatctgtacaaaacatgacaattcagaattaagtggttatattctgctatgcaatcatcagatcatgaggaataagaatgagacaatctttactacgatgttcagacttatcatgatggaccccacttcagagaagttaatggctcttgagatttccaggcaaatttcatctgctcatatctggtttctgtgcatcaggagtgagactgaagttctagggcgtggcttgtctgtcgaggcccctctctactggaatgaatgaatgtaaagaatgggtgttaagaggtccctggagctgccttcaacataagggtcctagagggtgcaagactcatcaagaaccagtttaccccatgcaaaaggactgctaaagccagagaaatggacaaagcccagttggaactgaatttgaatctcataaagctacaggtgcatctgagagcaggctcagtggtgaagatcaagatagcccggtaaagccctgcttgggctttttagcctcagccacatggatacctctcagttcctgccattaacaatattcatggaaaatacagcactgtgtctttcacatgctccactctggaaggtttatgctctgagctcaggatagttggggaacacatttttaaatcttggttttaaacaaaaagagaaatttattaaaatggagatataattgtgcatggtacatatatttctgaaaagttatgtataaatcaattatgttaaaagcgccagaagttactttttataagtgaactattacgaataatttcataaagcaaataaccacctctagcttatctgtcaggtatatcagaattctcatatatcatagtctcataagacttggttaaagcagatctatcttaggtaggaaaaaatagtaatcgattatacttagctgcttttatctgtagtgtgggtgactttttataactattatgttttataatgtcttcctgagagaatttcctaattttgtagttcatataagagaaatacaattttctagcattttctgaccttacaataaatcaattatgaatgcattttaacaaatattaaggtaggataaaccaacagaataaaaagttggtatttacttacattgaatatcatgcaaataaactcagaaaatgtcaaaaaaaaaaaaaggctatatttctcaatgatagggggaagaattcaaccttggagaaaatgaccagatcactttactgcttatatcttcagtattagaaaaactgcatgtatgattttaatagaaatgctttttataaagctaacattcagaaatgggataaaatgcaataacatctttcctttgtgcattaaattcccttctaattctaaaattgacatttgtatcttgcttaggatttaacattgttaattataatacttttaatgactagttttaatctcattattaagaagtagaaaacttactaaaaaggaaactaaaaataaatgttgttttgcagattaaaaaaaaaaaaaaaacaaaacaaaaaaaaaaaaaacaaaaagaaaaacaacacaacaaacaaaacaaaagaagagagaagagagaaacacacaacaacaaaaagaacaaagaagaacaacacacacacaacagaaaagaaaagagaaaaacgaagagagagagagggagcacaacagagacgacaacccacagcaaggagaacacgatcagaaaaaaaacaacaacagaagaagaagggaaagatagcaaagagcaacggaaatacgagcagaagacggaaaaaaagaagaagaacagcggcggagaagcagacaaacacaaacaaacacagaagaggagcagacaggacagcaaaaattagcagcaaatagaacccaaacaacagcgcgagagcaggagaagcaaagcacaccataacaagacggagaaagaaaagctgaaaagaaaaaacgaagagaaaaaacaaaaagaaaaaaaaacaacaaagaaaacaacggagatacaaagcagagagaggaagaggacacgaagaaaacatacacgaagacaagaagaggaaaacaaggaaaacaaaccatccgagcaaatcaaaaatgcgacagcccacgaagaaaaaaaaaagacaagaatcacagccaacagcacgagcaagacaatagaaaagacgcaaaaacataacagacaaggcaagaaaagacaagagatagacaggcgaggacaaaaaaaacgaagacagaaaaacaaaaaaaaaaaacagagaacaaacgaaaagagaaagagaagaaaggagaaggcacgataaacaagaaaacaacaaagaagaaaaagcgagaaaagacagagcagaagagagagcgaaaaaaaggagcgaggagaaatacgaggaaggaaggaggaggaaagaggagaaagaaagcaaagagaaacaggcagcggcagaggaaaacggaggcggaggaacacggagagagaaagacgaaaccagcgagaccagaagcaaacaacaagaaggagagagaagaacagagaagaaagagcacgacggaaagcagaagaggggaacaggcaaaaaaaaagacgagaaagagagagagaaagcaagaggaactgagagggaaaaggagaagcgaagagaggacacaagagagctaagaagaaaagaataaaagaggaaaagaaacgggaactgaacaaccg

SEQ ID NO: 6796 - DNA, 2452 bp, Homo sapiens
  misc_feature (337)..(381): n is a, c, g, or t
ggaagtcagcaggcgttggggaggggtggcgggggaatagcggcggcagcagccccagccctcagagagacagcagaaagggagggagggagggtgctggggggacagccccccaccattcctaccgctatgggcccaacctcccactcccacctcccctccatcggccggggctaggacacccccaaatcccgtcgcccccttggcaccgacaccccgacagagacagagacacagccatccgccaccaccgctgccgcagcctggctggggagggggccagccccccaggccccctacccctctgaggtggccagaatggatttgtggccagggnnnnnnnnnnnnnnnnnnnnnnnnnnnnnnnnnnnnnnnnnnnnnctgcccaccctgtggttctgcagccccagtgccaagtacttcttggacgcgtgggtcgacccacgcgtgatcctcttcctggctgtgctcgccatccctgtgtgtgccgtgcgaggacgcaacgtcgagaacatgaagatcttgcgtctaatgctgctccacatcaaatacctgtacgggatccgagtggaggtgcgaggggctcaccacttccctccctcgcagccctatgttgttgtctccaaccaccagagctctctcgatctgcttgggatgatggaggtactgccaggccgctgtgtgcccattgccaagcgcgagctactgtgggctggctctgccgggctggcctgctggctggcaggagtcatcttcatcgaccggaagcgcacgggggatgccatcagtgtcatgtctgaggtcgcccagaccctgctcacccaggacgtgagggtctgggtgtttcctgagggaacgagaaaccacaatggctccatgctgcccttcaaacgtggcgccttccatcttgcagtgcaggcccaggttcccattgtccccatagtcatgtcctcctaccaagacttctactgcaagaaggagcgtcgcttcacctcgggacaatgtcaggtgcgggtgctgcccccagtgcccacggaagggctgacaccagatgacgtcccagctctggctgacagagtccggcactccatgctcactgttttccgggaaatctccactgatggccggggtggtggtgactatctgaagaagcctgggggcggtgggtgaaccctggctctgagctctcctcccatctgtccccatcttcctccccacacctacccacccagtgggccctgaagcagggccaaaccctcttccttgtctcccctctccccacttattctcctctttggaatcttcaacttctgaagtgaatgtggatacagcgccactcctgccccctcttggccccatccatggactcttgcctcggtgcagtctccactcttgacccccacctcctactgtcttgtctgtgggacagttgcctccccctcatctccagtgactcagcctacacaagggaggggaacattccatccccagtggagtctcttcctatgtggtcttctctacccctctaccccacattggccagtggactcatccattctttggaacaaatcccccccactccaaagtccatggattcaatggactcatccatttgtgaggaggacttctcgccctctggctggaagctgatacctgaagcactcccaggctcatcctgggagctttcctcagcaccttcaccttccctcccagtgtagcctcctgtcagtgggggctggacccttctaattcagaggtctcatgcctgcccttgcccaagatgcccagggtcgtgcactctctgggataccagttcagtctccacatttctggttttctgtccccatagtacagttcttcagtggacatgaccccacccagccccctgcagccctgctgcaccatctcaccagacacaaggggaagaagcagacatcaggtgctgcactcacttctgccccctggggagttggggaaaggaacgaaccctggctggaggggataggagggcttttaatttatttctttttctgttgaggcttccccctctctgagccagttttcatttcttcctggtggcattagccactccctgcctctcactccagacctgttcccacaactggggaggtaggctgggagcaaaaggagagggtgggacccagttttgcgtggttggtttttattaattatctggataacagcaaaaaaactgaaaataaagagagagagagaaaaaaaaaaaaaaaaaaaaaaaaaaaaaaaaaaaaaaaaaaaaaaaaaaaaaaaaaaaaactcgggaatttgaaaaaaaaaaaaaaaaaataaaaaaaataaaaaaaaaaaaacaggggggggcccagaacccaaaaccccccggggggggccggggccccaatcccccctttagggaagttttttaccccccccttttgggcggttttttaaaaat

SEQ ID NO: 6797 - DNA, 5239 bp, Homo sapiens
  misc_feature (5160)..(5178): n is a, c, g, or t
  misc_feature (5180)..(5199): n is a, c, g, or t
  misc_feature (5202)..(5223): n is a, c, g, or t
  misc_feature (5226)..(5231): n is a, c, g, or t
  misc_feature (5233)..(5235): n is a, c, g, or t
  misc_feature (5237)..(5238): n is a, c, g, or t
gctggatcctgcagtaaccacaacagcatcctctccctgcgccagggacctgccagccggagagatgactgattagatcagattagatccggagccccgctctgcagaagggggccccaggggcgggggaggaggaccccagctggcctgagctggggggaggggtgccttggggctcgcagagttagagctttccagcgcggggatcacacctcagaagccgccacaatgaaagacggaacacatttctacacccagtgactggccaggtcccagaggaaaacaaaaaatttgacttgaaaatatcgaccttggacatgtccaataaaacaggtgggaaacgcccggctaccaccaacagtgacatacccaaccacaacatggtgtccgaggtccctccagagcggcccagcgtccgggcaactcgcacagcccgcaaagccatcgcctttggcaagcgctcacactccatgaagcggaaccccaatgcacctgtcaccaaggcgggctggctcttcaaacaggccagctccggggttaagcagtggaacaagcgctggttcgtcctggtggatcgctgcctcttctactataaagatgagaaggaagagagtatcctgggcagcatccccctcctgagcttccgggtagccgcagtgcagccctcagacaacatcagccggaaacacacgtttaaggctgagcatgccggggtccgcacctacttcttcagtgccgagagccccgaggagcaagaggcctggatccaggccatgggggaggctgctcgagtacagatccctccagcccagaagtcagtgccccaagctgtgcggcacagccatgagaagccagactcggagaacgtcccacccagcaagcaccaccagcagccaccccacaacagcctccctaagcctgagccagaggccaagactcgaggggagggtgatggccgaggctgtgagaaggcagagagaaggcctgagaggccagaagtcaagaaagagcctccggtgaaagccaatggcctcccagctggaccggagccagcctcagagccgggcagcccttaccccgagggcccaagagtgccagggggtggggaacagcctgcccagcccaatggctggcagtaccactccccaagccggccagggagcacagctttcccgtctcaggatggagagactgggggacaccggcggagtttcccaccacgcaccaaccctgacaaaattgcccagcgcaagagctccatgaaccagcttcagcagtgggtgaatctgcgccggggggtacccccgcctgaagaccttcggagtccctctaggttctatcctgtgtctcgcagggtccctgagtactatggcccctactcctcccagtaccccgatgattatcagtactacccgccaggagtgcggccggagagcatctgttccatgccggcctatgatcggatcagcccgccctgggccctggaggacaagcgccatgccttccgcaatgggggtggccctgcctaccagctgcgagagtggaaggagcccgccagctacgggcggcaggatgccaccgtctggatcccaagcccctcccggcagccagtctattatgatgagctggatgccgcctctagctccctgcgccgcctgtccctgcagccccgctcccactctgtgccccgctcacccagccagggctcctacagccgtgcccgcatttactcccctgtccgctcacccagtgcccgttttgagcggctgccacctcgcagtgaggacatctatgctgaccctgctgcctatgtgatgaggcgatccatcagctcccccaaggtccctccatacccagaagtgttccgggacagcctccacacctacaagttaaacgagcaagacacagataagctgctgggaaaattgtgtgagcagaacaaggtggtgagggagcaggaccggctggtgcagcagctccgagctgagaaggagagcctggaaagtgccttgatggggacccaccaggagctggagatgtttggaagccagcccgcctacccagaaaagctgcgacacaaaaaggattcactgcagaaccagctcatcaacatccgcgtggagctgtctcaggcgaccacggccctgacaaacagcaccatagagtatgagcacctcgagtctgaggtctctgccctgcacgatgacctctgggagcagctcaatttggacacccagaatgaggtgctgaaccggcaaatccaaaaggagatctggaggatccaggacgtgatggaggggctgaggaagaacaacccctcccggggcacggacaccgccaagcacagaggaggacttggcccctcagccacctacagctccaacagcccggccagccccctcagctctgccagcctcaccagccccctgagccccttttcactggtgtcgggctctcaggggtcccccaccaagcctggctccaacgagcccaaggcaaactatgaacaaagcaagaaagacccccaccagacattgcccctggacacccccagagacatcagccttgtgcccaccaggcaagaggtagaggcagagaagcaggcagctctcaacaaagttggcgttgtgccccctcggacaaaatcgcccactgatgatgaggtgaccccatcagcagtggtaagaaggaatgccagtgggctcaccaatggactctcctcccaggaacgccccaagagtgctgtgtttcctggcgaggggaaggtcaagatgagcgtggaggagcagattgaccgaatgcggcggcaccagagtggctccatgaaggagaagcggaggagcctgcagctcccggccagcccggcccccgaccccagtccccggccagcctacaaagtggtgcgccgccaccgcagcatccacgaggtagacatctccaacctggaggcagccctgcgggcagaggagcctggcgggcatgcctacgagacaccccgggaggaaattgcccggcttcgcaaaatggagctagagccccagcattatgacgtggacatcaataaggagctctccactccagacaaagtcctcatccctgaacggtacattgacctggagcctgacactcccctgagccctgaggagttgaaggagaagcagaagaaggtggagaggatcaagacactcattgccaaatccagtatgcagaacgtggtgcccatcggcgagggggactctgtggacgtgccccaggactcagagagccagctgcaggagcaggagaagcggattgaaatctcctgcgccctggcgaccgaggcctcccgcaggggccgcatgctgtctgtgcaatgtgccaccccaagccctcccacctcccctgcttccccggctcctccagcaaaccccctgtcgtctgaatccccacggggcgccgacagcagctataccatgcgggtctgagctctgactgcaagccctggctgaggccaatgctgtgaagctccacagagccacattctgaagccgtcctctgcccacctgaggtcctggctccccaccctggccccctgcccctgcactcccatgggaatgccgcagggagccaggctggggccatgggctgctgccagaggaccgtggatacctcagtgtccacacacccaccatgcccagccctggagccatcactactcacaccgtggtcctgggccagggcctgagatgacagtggggagcaccatcctcattaatgtccaagtcacagggagcctcagccttgccctggctggggttgtggtgactccagtggaacattccctgatgggggacatgccgtggtggagaacacacctgtggctatcttatgtgaggactagaggtgaagaggagatggacactgcctctggagccagcctgacaccaaggacagcacttgtcatcatccctatcctcgtcagccccaccctgctgcctcagctggacccagggctttgacacaaacccagtgctttgcttatgggtgctcgctggggtccggtggagactgaccaccctgcttgagccaaagacaaggtgatgagagatggggagaggccattggctcccagagggaacagtgctggctgtggctagagaacagcaggtctgtgcagtgtctgagggcaggttgggaagggtagcagagagagagagacagaaagagagagagagagagagagagagagagagagagagagagagagatcctcagagtggaaggagggggaagcagcaggacacattggcaagtcaagcaggaaggagggagatggaaaggggatatcagattggtttcccccggtggagccttaggttagtgcccagtgcagtgccagactgtctcctctgctcctcccacctcatccctaggaggacccaccagtggagcacatgcagcctcagtggagatgcttggtgtggggatctgggtgaagggggttgagtagcgactgcctgggagatggctgttagtaggtctgcgcctggtgtctgcctcgccatcctggggtaaggggcagagagaaggacttgtcttatgtagggtgtggtcagccttggggccttacctacccagttccatgatatttcttgccctgttccccctggaatgtgcagtgggccagctgagagtacgccttgaggaggggggatgaggccttaatctgggaggcctatccccctatcccaggcatcccagacgaggactggctgaggctaggcgctctcatgatccacctgccccgggagggcagcggggaagacagagaaaagcaaacacattcctcctcagctccacccacctggagacgaatgtagccagagaggaggaaggagggaaactgaaaacaccgtggcccctcggccttctctctgctagagttgccgctcagaggcttcagcctgacttccagcggtcccaagaacacctactaattcctctccactccttcatggctgggacagttactggttcatatgcaagtaaagatgacaatttactcaacaaatatttatcgagcaccttttatgtaccaggcactgttgtaggtgcttaggatattctcatgtttctgagggattacagcctgggaggattccaccgatcttcacttctagnnnnnnnnnnnnnnnnnnngnnnnnnnnnnnnnnnnnnnnccnnnnnnnnnnnnnnnnnnnnnnccnnnnnncnnncnnc

SEQ ID NO: 6798 - DNA, 3243 bp, Homo sapiens
  misc_feature (975)..(993): n is a, c, g, or t
  misc_feature (3227)..(3239): n is a, c, g, or t
tttttttctctggaggatctccgcgcgtggcgagtctgtgtcctccctgtcccccagagcagacaccctctctgtgtctggaccggggaggagcagactctggacagggtgtgtgtgttcagcagtggattgtcagacttggggtcccggctgctcccttttgggtctctccccgggcccgctgatctgactgtaattccttctgctggagctagggttcggccaccttgacgcgccccctctgcccctggagcgtgtctttgggttttgtgtgtgtgggagtggggtgtatgtgtgtttcttatccgagacacctctgggtcgtttgcttggaaaccggctgagggcccgcataccctggagcatttggttgcaaagtgaggcaggtagcgcccaaggctcctgtaccagggccaggttaggcaccaacgcgtcccttatgtctctgcagcctgcagtgtggtggaaccgtttcatagactgaagtgtgaacgtaggaggggatggatatcagagatctgtttatccacattttcagagagtggtattgctctgatgtgagcgtaggcaggttactctctgtgtctcgtgttctttacctgtaatttgaggtttgttgtacctactattaagtggtggttgtgaggattaaatggaattttgacatgcaacagttgacacagggccagacaccaagtaagggatcaatcagttgttgcttttattaatagtaggcatccatctgcccatttgcacgtaagaaggaaacacccaagaatgaaaagtagcttgttgtaggtcacccagccaactagcacatagtggaaattagaatccaggcactcccagcagggcactttccaccaccctgcacttttgtattcatcaggcacagtatccttactgttgtctgtaactgtctatgttcccagtgtctgactctgcagggccctagtggtataaaggtactggaannnnnnnnnnnnnnnnnnnttcctgaagattaaatggctgccgaagttcttgagtttagctttagctcaaaagatactgcgtcagactctgcgttctgagtagagtctcagagaatgaaaaaagaaatacaatgaaaaaggggaaaacttcaatccagaacctcttaccacagtttctggtagaatgctggcaatttccaggaagatacgtggagaacggaaaggttgctacacccaaatagtgaagcaaaggctatgattatggaggattggacctgcaaactccagaacagagttctgccctctgaggaccctgccctttcccaaaaggggtatcttaagaaggaaaatatggctgctctttgccggacagcagagtcccaggctgaactccagtgcacccagttagacttggagcggaaactcaagttgaatgaaaatgccatctccaggctccaggctaaccaaaagtctgttctggtgtcggtgtcagaggtcaaagcggtggctgaaatgcagtttggggaactccttgctgctgtgaggaaggcccaggccaatgtgatgctcttcttagaggagaaggagcaagctgcgctgagccaggccaacggtatcaaggcccacctggagtacaggagtgccgagatggagaagagcaagcaggagctggagaggatggcggccatcagcaacactgtccagttcttggaggagtactgcaagtttaagaacactgaagacatcaccttccctagtgtttacgtagggctgaaggataaactctcgggcatccgcaaagttatcacggaatccactgtacacttaatccagttgctggagaactataagaaaaagctccaggagttttccaaggaagaggagtatgacatcagaactcaagtgtctgccgttgttcagcgcaaatattggacttccaaacctgagcccagcaccagggaacagttcctccaatatgcgtatgacatcacgtttgacccggacacagcacacaagtatctccggctgcaggaggagaaccgcaaggtcaccaacaccacgccctgggagcatccctacccggacctccccagcaggttcctgcactggcggcaggtgctgtcccagcagagtctgtacctgcacaggtactattttgaggtggagatcttcggggcaggcacctatgttggcctgacctgcaaaggcatcgaccggaaaggggaggagcgcaacagttgcatttccggaaacaacttctcctggagcctccaatggaacgggaaggagttcacggcctggtacagtgacatggagaccccactcaaagctggccctttccggaggctcggggtctatatcgacttcccgggagggatcctttccttctatggcgtagagtatgataccatgactctggttcacaagtttgcctgcaaattttcagaaccagtctatgctgccttctggctttccaagaaggaaaacgccatccggattgtagatctgggagaggaacccgagaagccagcaccgtccttggtggggactgctccctagactccaggagccatatcccagacctttgccagctacagtgatgggatttgcattttagggtgatttgggggcagaaataactgctgatggtagctggcttttgaaatcctatggggtctctgaatgaaagcattctccagctgctctcttttgctccatatggtgctgttctctatgtgtttgcagtaattctttttttttttttttgagacggagtctcgcactgttgcccaggctggagagcagtggcgcgatcttggctcactgcaagctccgcctcccgagttcaagcaattctcctgcctcagcctcccgagtagctgggattacaggtgcctgccaccacacccagctaatgttttgtatttttagtagagatggggtttcaccatgttggccaggcagatctcaaactcctgacctcgtgatgcacccacctcggcctcccaaagtgctgggattacatgcgtgagccactgcgccctgcctgtttgtagtaatttttaggcaccaaatctccctcatcttctagtgccattctcctctctgttcaggtaaatgtcacactgtgcccagaatggatgaccaggaaccttaaagagtggctgaaaagattgcagagttatcataataaattgctaacttgcgtatttcctaaaaaaaaaaaaaaaaaaaaaaaaagggcggccgctnnnnnnnnnnnnnactt

SEQ ID NO: 6799 - DNA, 1334 bp, Homo sapiens
ataaatggggaggggagagcccactgggtagaaggaacagggagtggccaggatgctgaatctgctgctgctggcgctgcccgtcctggcgagccgcgcctacgcggcccctgccccaggccaggccctgcagcgagtgggcatcgtcgggggtcaggaggcccccaggagcaagtggccctggcaggtgagcctgagagtccgcggcccatactggatgcacttctgcgggggctccctcatccacccccagtgggtgctgaccgcagcgcactgcgtgggaccggacgtcaaggatctggccgccctcagggtgcaactgcgggagcagcacctctactaccaggaccagctgctgccggtcagcaggatcatcgtgcacccacagttctacaccgcccagatcggagcggacatcgccctgctggagctggaggagccggtgaacgtctccagccacgtccacacggtcaccctgccccctgcctcagagaccttccccccggggatgccgtgctgggtcactggctggggcgatgtggacaatgatgagcgcctcccaccgccatttcctctgaagcaggtgaaggtccccataatggaaaaccacatttgtgacgcaaaataccaccttggcgcctacacgggagacgacgtccgcatcgtccgtgacgacatgctgtgtgccgggaacacccggagggactcatgccagggcgactccggagggcccctggtgtgcaaggtgaatggcacctggctgcaggcgggcgtggtcagctggggcgagggctgtgcccagcccaaccggcctggcatctacacccgtgtcacctactacttggactggatccaccactatgtccccaaaaagccgtgagtcaggcctgggttggccacctgggtcactggaggaccaacccctgctgtccaaaacaccactgcttcctacccaggtggcgactgccccccacaccttccctgccccgtcctgagtgccccttcctgtcctaagccccctgctctcttctgagccccttcccctgtcctgaggacccttccccatcctgagcccccttccctgtcctaagcctgacgcctgcaccgggccctccggccctcccctgcccaggcagctggtggtgggcgctaatcctcctgagtgctggacctcattaaagtgcatggaaatcaaaaaaaaaaaaaaaaaaaaaaaaaaaaaaaaaaaaaaaaaaaaaaaaaaaaaccccaccttaaaccctacccccgctttttttgtgcaaaaagaggcccctaaacgggacgccccccccttgagccgtagcgcccgtgcg

SEQ ID NO: 6800 - DNA, 1202 bp, Homo sapiens
ggttcaacttcaacatggccgaagcaagtagcgccaatctaggcagcggctgtgaggaaaaaaggcatgaggggtcgtcttcggaatctgtgccacccggcactaccatttcgagggtgaagctcctcgacaccatggtgacacttttcttcagaagctggtcgccgccggcagctaccagagattcactgactgctataagtgcttctaccagttgcagcctgcgatgacacagcgaatctatgacaagtttatagctcagttgcagacatctatccgggaggaaatctctgacatcaaagaggaggggaacctagaagctgtcttgaatgccttggataaaattgtggaagaaggcaaagtccgcaaagagccagcctggcgccccagcgggatcccagagaaggatctgcacagtgttatggcaccctacttcctgcagcaacgggacaccctgcggcgccatgtgcagaaacaggaggccgagaaccagcagctggcagatgccgtcctcgcagccaccgagacaccatgagagccctcacactcctcgccctattggccctggccgcactttgcatcgctggccaggcaggtgcgaagcccagcggtgcagagtccagcaaaggtgcagcctttgtgtccaagcaggagggcagcgaggtagtgaagagacccaggcgctacctgtatcaatggctgggagccccagtcccctacccggatcccctggagcccaggagggaggtgtgtgagctcaatccggactgtgacgagttggctgaccacatcggctttcaggaggcctatcggcgcttctacggcccggtctagggtgtcgctctgctggcctggccggcaaccccagttctgctcctctccaggcacccttctttcctcttccccttgcccttgccctgacctcccagccctatggatgtggggtccccatcatcccagctgctcccaaataaactccagaagagcgaaaaacaaaacacacacacacacaataatcacaaaatgtcagaaaaaaaaaacaccctcgggggaccaattttcgggggggccgcaaaaaagaggtttaaataaagggcccgtggtgtcatgagtgttccgggcacccgttttttttgcaacaggggggaaaaacggggggcccccccaaaagggggcctataattggaaacgcggtcccgtag

SEQ ID NO: 6801 - DNA, 1238 bp, Homo sapiens
gctgcagaggattcctgcagaggatcaagacagcacgtggacctcgcacagcctctcccacaggtaccatgaaggtctccgcggcagccctcgctgtcatcctcattgctactgccctctgcgctcctgcatctgcctccccatattcctcggacaccacaccctgctgctttgcctacattgcccgcccactgccccgtgcccacatcaaggagtatttctacaccagtggcaagtgctccaacccagcagtcgtctttgtcacccgaaagaaccgccaagtgtgtgccaacccagagaagaaatgggttcgggagtacatcaactctttggagatgagctaggatggagagtccttgaacctgaacttacacaaatttgcctgtttctgcttgctcttgtcctagcttgggaggcttcccctcactatcctaccccacccgctccttgaagggcccagattctaccacacgagcagcagttacaaaaaccttccccaggctggacgtggtggctcagccttgtaatcccagcactttgggaggccaaggtgggtggatcacttgaggtcaggagttcgagaccagcctggccaacatgatgaaaccccatctctactaaaaatacaaaaaattagccgggcgtggtagcgggcgcctgtagtcccagctactcgggaggctgaggcaggagaatggcgtgaacccgggaggcggagcttgcagtgagccgagatcgcgccactgcactccagcctgggcgacagagcgagactccgtctcaaaaaaaaaaaaaaaaaaaaaaatacaaaaattagccgggcgtggtggcccacgcctgtaatcccagctactcgggaggctaaggcaggaaaattgtttgaacccaggaggtggaggctgcagtgagctgagattgtgccacttcactccagcctgggtgacaaagtgagactccgtcacaacaacaacaacaaaaagcttccccaactaaagcctagaagagcttctgaggcgctgctttgtcaaaaggaagtctctaggttctgagctctggctttgccttggctttgccagggctctgtgaccaggaaggaagtcagcatgcctctagaggcaaggaggggaggaacactgcactcttaagcttccgccgtctcaacccctcacaggagcttactggcaaacatgaaaaatcggcttaccattaaagttctcaatgcaaccataaaaaaaaaa

SEQ ID NO: 6802 - DNA, 1581 bp, Homo sapiens
cggaggtgggtagatagacccggagagacggcgaaggagctggaaaccgagccagggctgagccggctgacaacagttgcaggttccgatctttgggtactccaggagctgttctatagcccctgcttctggacctatggattctccatctagcgtttcttcctattcctcctactctctctcttcgtcttttcccacctccccagtgaacagtgactttggcttcccctctgatagtgagagggaggacaagggggcccatgggcccaggccagacactgttgggcagaggggaggttcacggcccagcccgggtcctatccgctgcaggcatcgatcgaaggtttccggtaaccagcatacaccatctcatccgaaacagcggggttcggcttctcctatggcaggatctggggcgaaaagatcaagagatggtgaactggagaccagtctaaacacccaaggttgtaccacagagggagacctgctgtttgcccagaagtgtaaagaactccaaggatttatacctcctctcacagacctactcaatgggctgaagatgggtcgttttgagagaggattaagcagttttcagcagagtgtggcaatggacaggatccagcgtattgtaggtgttttgcagaagccacagatgggggaacgttacctaggaaccttgctacaggtagaagggatgttaaagacttggtttccacaaatagctgcccagaagtcatcattgggtggtggcaagcatcagctgaccaagcattttccaagccaccacagtgattcagctgcttcctctcctgcatctcctatggaaaagatggaccagacacagctaggacatctagctttaaaaccaaagcagccttggcacctcacacaatggccagctatgaacctcacctggatccacaccactccaatttgcaacccccctctcagctccccaggtactatctcctttagccatggtcctttaggcactggaaccggcattggcgtcattcttttcctccagcatggagtgcaacccttcacccactctgccccaaccaccccagtcccacctactacagcatctcctgtcatccctggtgagcctatgaaactatctggagagggtcctcgttgctacagtttgccagtaactctgccatcagactggagctataccctatcccctcccagtctacccaccttggccagaaagatgaccataggacaccgggagcagcagagaagccatcctccagttgctgctgatgctcatcttctcaacctctagcccagggcatacagctgtccactgtgacttctactttgtgtaaatatttatgtatatatgtatttttactattaatgtgtgcatttgtgttgagggaagataaatcctttctgattaaagaaatttttttatacctaaaaaaaaaaaaaaaaaaaaaaaaaaaaaaaaaaaaaaaaaaaaaaaaaaaaaaacaaaaaatacaacaaacaacaaaaggacgcaataacaaaacacacagagagacacacacaagaacacccacagaaaagaacaacaaggagcccata

SEQ ID NO: 6803 - DNA, 2448 bp, Homo sapiens
  misc_feature (946)..(963): n is a, c, g, or t
ttttttttttttttttttttttttttttatcacacaaataatgtcttttaatggagtgatttttttctaatcgaggtattatgtacttttcatttactaattattgtttacatttgaagtgttttatgaattaatatttaattgcatagatgaagattactagttataggcattttactaaccaatactcattaagcatagcgtggattcatatgacatcaaggggctattttatttggtaaaacgaaaaagcacaagaatgaacgaacgcgagaactgaaacagtggagacacctagaatgacttgtctaagatctaaatcattttgttctcttcccagcgtacttattatcctgatcattgtcatcagcattgtttgggtccttttagcacagatttctcaaaaggggtaactccataacagttggaagcttacaaattcatataatttgtaagaggtcaatttggaagtacctatctattttaaaattccagtaacctgggaatttcatcccatgtctagagtcttttaggtaaaatatttccacaattaggagaaatatgtgcatggggattttttatgtagcggtgttttgatagaatagaaaattgggataaaccaaatttccatcatgaaggaaatagtaataggctgaataataacacagcgaatattatgcaggctttaaacatcaaaaaagagttcaacttatgacttccgatgatggtgttgaagcagggcactgctggttaacatttgattttctcgttagcgatgccgtggacggcatcctcgttagcgatgccgtggagggcgtcctcgttagcgaagccgtgggcggcgacctcgttagcgatgccgtgggcggcgtcctcgttagcgacgccgtgggcggcgtcccagttagcgacgccgtggacggcgtcctcgttagcgacgccctgnnnnnnnnnnnnnnnnnngacgccctggacggcgtcctcgttagtgacgccctggacggtgacctctttagggataccatggacggtgtcctcgttagcgatgccctgggcggcgtcctcgttagcgatgccctgggcggcgtcctagttagcgatgccctgggcggcgtcctagttagtgatgccctgggcggcgtcctcgttagtgatgccatggacggggtcctcgtcagcgatgagctggactgcgtcctcgtcagcgatgccctggatggtgtcctcgtcagcgatgccgtggacgacgtccccgtcagggatgccctgggcggcgtccccgtcagcgatgcccttgacggcgtcccgatcagcgatgcccttgacggcgtcccgatcagcgatgcccttgacggcgtccccgtcagcgaggccctggacggcgacccagtcagcgaggccctggacggcgtccccgtcggcgaggccctggacggagtcccagttggcgatgccctgggcggtgtcctcgttatcgataccgtggactccatcttcattagcgatgccctggacggcgtcgtcgttggcgatgcccaggacggcgtcctcgttagcgatgccctggacggcgtcgtcgttggcgaagccctgggcggtgtcctcggcgatgccctgggtggcgtcattggcgatgccctgggcggcgaccctgttggcgatgccctgggcggcctcctcgttggcgatgccctgggcggcatcctcgttggcgatgccctgtgcgacgtcctcagcgattccctgggcggcgtcctcgttggcgatgccctgggcggcctccttgttggcgatgccctgggcggcgtcctcgttggcgatgccctgtgcgacatcctcggcgattccctgggcggcgtcctcgttggcgatgccctgggcggccacctcgttagcgatgccctggacggcgtcctcgttagcgatgccgtggatggtgacctcgttgcccatgcccttggtggcgtccccgttggcgatgccctgggcggcgtccccgttggcgaagctgaggacggcgtccccgttggcgaagccgtggacggcgtcccagttggcgatgccctgggtggcgtcctcattggcgatgccctgtgcggcgaccccattggcgatgccctgggcaacctcctcgttggcgatgccctggatggcgtcctcggcgatgccctgggcggcttcctcgttggcgatgccctgggtggtgtcctcattagcgatgccctggtcggcgtcctcattagcgatgccctgggcagcgtcctcagcaatgccgtagactccatctttgttagcgatgccctgaacggtgtcatctttagcgatgccctggatggcatcctcgttggcgatgccctggacggcgtccgcgttagtgacgctgtggacggcctcctcattagcgatgccctgggtggcgtccttgttagcgatgccctggatggcgac

SEQ ID NO: 6804 - DNA, 1079 bp, Homo sapiens
  misc_feature (83)..(101): n is a, c, g, or t
ccacgcgtccgcggacgagagagcgctgggagccggaggggagcgcagcgagttttggccagtggtcgtgcagtccaaggggnnnnnnnnnnnnnnnnnnncaagctcagctcagcgtccggacccaataacagttttaccaagggagcagctttctatcctggccacactgaggtgcatagcgtaatgtccatgttgttctacactctgatcacagcttttctgatcggcatacaggcggaaccacactcagagagcaatgtccctgcaggacacaccatcccccaagtccactggactaaacttcagcattcccttgacactgcccttcgcagagcccgcagcgccccggcagcggcgatagctgcacgcgtggcggggcagacccgcaacattactgtggaccccaggctgtttaaaaagcggcgactccgttcaccccgtgtgctgtttagcacccagcctccccgtgaagctgcagacactcaggatctggacttcgaggtcggtggtgctgcccccttcaacaggactcacaggagcaagcggtcatcatcccatcccatcttccacaggggcgaattctcggtgtgtgacagtgtcagcgtgtgggttggggataagaccaccgccacagacatcaagggcaaggaggtgatggtgttgggagaggtgaacattaacaacagtgtattcaaacagtacttttttgagaccaagtgccgggacccaaatcccgttgacagcgggtgccggggcattgactcaaagcactggaactcatattgtaccacgactcacacctttgtcaaggcgctgaccatggatggcaagcaggctgcctggcggtttatccggatagatacggcctgtgtgtgtgtgctcagcaggaaggctgtgagaagagcctgacctgccgacacgctccctccccctgccccttctacactctcctgggcccctccctacctcaacctgtaaattattttaaattataaggactgcatggtaatttatagtttatacagttttaaagaatcattatttattaaatttttggaagcaaaaaaaaaaaaaaa

SEQ ID NO: 6805 - DNA, 1524 bp, Homo sapiens
tatcccccatctattgtcgttggacacttcgttgctcactagatatgatggcaatctccagtttgaaacgttctcaggctaaaaaggggggtaccactaaaggtgtattttagtacggacgacctcaccggaaacagtgtcgctttggggactcacactctccagagtgtcaacccccatccatgtccctcaggatagggaacttatacacaaatcgttggcacccatgcacacggagaaatgggggtctcggaggaaggagcaaaaggcaaagcagctgcagcagttgtcaggacagaaggagtagagcacaggggcatatgctgaccaatgcagccgaagaaagacagaggcagcaacaggaggaaggaggacttgaacctagaagatagaggtgaggaaactgttttaggtggtggaaccagggaagcagagagcagagcatgcagtgatggaagaagcaggaaaagcaagaagaaaagacagcagcatcaagaggaggaggacatcttggatgtaagggatgagaaggatagcggggctagggaagcagagagcagagcacacactggctcaagcagcagaggtaagaggaagaggcagcagcatcccaagaaggaaagagctggagtcagcactgtccagaaagccaaaaagaaacagaagaagagagactaaaggtctggtaaaggtagggctcaattgattgattttcaggagttgaagcctcaaagaccagggttgatgcaggtctgcaggtcttctgcacccccctcaatgaggagtccctcccagaaaggaaactgatctctgggatgtcagctgctgagaggagcaagcggtagtaccaccccttagttgagggagtcagcacagtcctttctgcagcttctaacccaggaccatgaactcaggtgcctagagaagccaggcagctaaaggacaaggaatgctgggggctgtgggaacaggaatgcagataccctttgaaggagcattcctgctaaaagaagctgaaaatgtagacctatgtgaagtgctctgatttctaaatattgtgaaggttaagaaaaacataaatttaggtctatgggctagatttagcccacagttgccagtttctagcgctaccaaatgaatgaataaacatgagcttgcgctcctagcctagagataaaaaaaaaaaaaaaaaaaaaaaattttaaaaaatttagaaaaaaaaaagaaaaaaaaaaaaaaagaaaaaagaaaaagaaagaagaaacagagccaaaaaaaaacagaacaaaataagaaaaggaggaggcaaaaaaagacacgggagagaagaaagagagagacacaagaggacagaagagcaacaagaggggaagcataagagaagcacgacgagacataaacaacacggggccaaaagcacaggagaaataagagaacaaccactaggcggcaaacggacacaccacggagagccggagagaaaagggcaagaagcaaaagatgatcgcaagacgcggagtatac

SEQ ID NO: 6806 - DNA, 1571 bp, Homo sapiens
ttttttttttttttttgtagaatgatttgtgctaaagcaatacatctctttctatcatatactgatatcttgaaaacttttataacgtttcttgtcacattcagtattttaaaaataggattgattctaagttttgagtttatggtgtatttgaatattagagatattatctcttatacatttcaaagctttgctgcattctaaactcagtcctgccttagccttagtaatggcaatgaagtgcggggatagaatgttcactatttttttatgtgctgttaaaatttcatacctcctgttctatcttgaagtcttacagttttggaatggtgagtgggggaaacaagcataaaactattacataattcatgcagttttcactgggcaacagtatctatcctctgaatggtgaaatggctacttttcatttatttatttttttctctcctggggtaaagcgcttgaaaactgcaccactgggaaattgcagctatagtccatgtttcaacatagtccatgcttctttgagttggccacttactgtttactctcatctccttaggtttagcagtaaagacctgtaagatttcttctgttaggatcatctagccattccaaacatttctcttagatttgattctttcaagacaaatcaacccaataaaaatctcataaataaaggtgagctagctaccacatttggtgttctcatctgaccaaaccaaattttatgtatacattcaattctcaatccaacccagtctgtttgcctaagccattccagacaaacttccactttgaaggttttaaatgcataagtcagatagcaatccttcagttgccccagaggcacatcacgttctttgaatgcttcagtatagtcctcttcatttagcaatcagtgagtgcaatacactggcatcatgatccctttttttaggaactctgtacaaaattccctttgaaaatataaattttggaaatgagtgatgagcaaaggggtttcattaacattatcacaatctcttgatatatctgcttgataatgtagcacctattatttggggccattaggaccttggcagaaattctggtaaatgtaaagaaaccacatttaacatccagttaatttagtttgtttgtttgttttgtttttgtttttgtttttgagacgttgtcttactctgtcacccaggctagagtgcagtggtgtgatctcgactcactgcaacctccacctcccaccttctgggctcaagcaattatcttcctcagcctgggattacaggaacccaccaccatgcccacgtaattttgtatttttagtaaagacggggtttcaccatcttggtcaggctagtcttgaacgcctcacctcgtgatccacccacctcgacctcccaaagtgctggaattacaggcgtgagccaccttgcctggcctcaatattgtttttaataatttctgctttacttgcagttaatcctatcaggccgtctaccatacccagttgtgtcagcaagaagatctgtacaatgataaataacacatggctcccagggctaaacata

SEQ ID NO: 6807 - DNA, 1262 bp, Homo sapiens
agcgggggaccagatgttatgggcatcgacgagttaccgtctcggaaactctcaatcacgcaagcgaaaggagaggaggcggctaattaaatattgagcagaaagtcgcgtggggagaatgtcacgtgggtctggaggctcaaggaggctgggataagcgccgcaaggcactgagcaggcgaaagagcgcgctcggacctccttcccggcggcagctaccgagagtgcggagcgaccagcgtgcgctcggaggaaccagagaaactcagcaccccgcgggactgtccgtcgcaaaatccaacatgaaaatcctcgtggccttggcagtcttttttcttgtctccactcagctgtttgcagaagaaataggagccaatgatgatctgaattactggtccgactggtacgacagcgaccagatcaaggaggaactgccggagccctttgagcatcttctgcagagaatcgcccggagacccaagcctcagcagttctttggattaatgggcaaacgggatgctgattcctcaattgaaaaacaagtggccctgttaaaggctctttatggacatggccagatctctcacaaaagacataaaacagattcctttgttggactaatgggcaaaagagctttaaattctgtggcttatgaaaggagtgcaatgcagaattatgaaagaagacgttaataaactacctaacattatttattcagcttcatttgtgtcaatgggcaatgacaggtaaattaagacatgcactatgaggaataattatttatttaataacaattgtttggggttgaaaattcaaaaagtgtttatttttcatattgtgccaatatgtattgtaaacatgtgttttaattccaatatgatgactcccttaaaatagaaataagtggttatttctcaacaaagcacagtgttaaatgaaattgtaaaacctgtcaatgatacagtccctaaagaaaaaaaatcattgctttgaagcagttgtgtcagctactgcggaaaaggaaggaaactcctgacagtcttgtgcttttcctatttgttttcatggtgaaaatgtactgagattttggtattacactgtatttgtatctctgaagcatgtttcatgttttgtgactatatagagatgtttttaaaagtttcaatgtgattctaatgtcttcatttcattgtatgatgtgttgtgatagctaacattttaaataaaagaaaaaatatcttgaaaaaaaaaaaaaaaaaaaa

SEQ ID NO: 6808 - DNA, 4208 bp, Homo sapiens
  misc_feature (2229)..(2268): n is a, c, g, or t
  misc_feature (3710)..(3776): n is a, c, g, or t
  misc_feature (3778)..(3885): n is a, c, g, or t
  misc_feature (3899)..(4028): n is a, c, g, or t
actctggggaaaggagggtacaaccacatgtaaattttattataatgatggtataatgaacttggggtgacctgagggcatgtttttgtgttactgggcatgtgcccctttaggagacttccacctgtgccttactttctctttctttgggatgtgctggccacagactttaccaaaaactccatccattaggatggcattaggacggttctggggctaaacttaggtgggccaggggctgtttcactgtcagcctttctactctcttttcttacccactcctagctgctaatgtctatttaactacctaatatttccccctttagagaaaaaaagccaaatttttgggtagatcggtgacaattaatctggctacttcctgctgacaagaggcagtggtaataattgggttctcttttttgctctcttgtagctggtaggttgggcagagaaaagtggtggccatccaaggggcccacgtagatatcagacatggttgagacctcgcggtaaccttgtgtagaatcatttggagttttatggattctaggtgggaagaaacaaaacaaccttgtaaatcaaatgagcatcgtttgaaagctataagttgtataaagctgttttaggaccaagaaagggggctaaccaggaaaaccaggaccagttgttaaatttccaccagtcaaagcctcctgaaactctgttttccattaacttgttggccctgtctgtaatttttttaagttggtttgcactttacctgattggttgatgaaaacagcaatgtttatcaagtgttgcacaagctcccccttgattggctgtgagcaaattaaaagctcatcaatttcataagactatgcttgctaatgaagcaatttgttctgaaagggtattgacctggttagttagattaataatttgttgagtaatttttaagaagagtttctgggcagtaaaaatggagttaaggaggtcctccagttcccgtgccaataccagccagaacgccaattatagtcagtgctgttaaaactcctctttcagttttaccagattgagcgtgtatagggaggggaatgctatcgataagagtgagtttggggatgatgtaaactagggccaaatccccgtttaattagcagacaagcagagatatgccttgtttctatacaaaaatgtgatttgtcatgttaagacaaatatcaacagtgatactaaagtagggtttttccatgctgtgtaagtctgctttaataccctcagaagtggaagtcaaggctagttcatgtaatgggggaacacaggcagtacttgacagaatgaaagaggaatcaaaagcccaattagaggaaggagtgatgggatcccaaccaatattgtgaaattatggggagctgcagttttttgcaatgattttgcccgaagttgtgagactgaaaccagaagttgttatgtttaaaatgatattctggtgtgggtctggggaaaagggtagatccagaatagctggcttctttccacatagtggttctgttggggggcttgggaaatgaataaaacacaaagaagaattagaatatcaggtgaaggtagcaggtgctcctggcagaagaacccacataaggaagtgtccagaagccacacagggtatatctcagagactggagaacgtgtctggttattatgcagatgcacggctggaggtgggatccacacagctcagaacagctggatcttgctcacactctttcaagagaagcttccttgaaaagaaacgctttactgaagaggccaccaaatacttccgggagagagtcagcccagtgcatctgcaaatcctgctgactaacaatgaagcctggaagagattcgtgactgcggctgaattgcccagggatgaggcagatgctctctacgaagctctgaagaagcttagaacatatgcagctattgaggacgaatatgtgcagcagaaagatgagcagtttagggaatggtttttgaaagagtttccccaagtcaagaggaagatccaggagtccatagaaaagcttcgtgcccttgcaaatggtattgaagaggtccacagaggctgcaccatctccaatgtggtgtccagctccactggcgctgcctctggcatcatgtcccttgctggtcttgttttggcaccatttacagcagggacgagtctggcccttactgcagctggggtagggctgggannnnnnnnnnnnnnnnnnnnnnnnnnnnnnnnnnnnnnnntggagcactcatacacatcatcagcagaagctgaagccagcaggctgactgcaaccagcattgaccgattgaaggtatttaaggaagttatgcgtgacatcacacccaacttactttcccttcttaataattattacgaagccacacaaaccattgggagtgaaatccgtgccatcaggcaagccagagccagggcccgactccctgtgaccacctggcgaatctcagctggaagtggtggtcaagcagagagaacgattgcaggcaccacccgggcagtgagcagaggagcccggatcctgagtgcgaccacttcaggcatcttccttgcactggatgtggtcaaccttgtatacgagtcaaagcacttgcatgagggggcaaagtctgcatctgctgaggagctgaggcggcaggctcaggagctggaggagaatctaatggagctcactcagatctatcagcgtctgaatccatgccatacccactgaccccagaccagtgcagccagcaggggaggtgagccatacacaggccacgacaaaatgcaggcattttattagggggataaagagggcaaggtaaagtttatggagctgagtgttagtgactttggcatttctgtagctgagcacagcaggggaggggttaatgcagatggcaagtgcaccaaggagaaggcaggaatgctggagcctggaataagggaggagaggggactggagagtgtggggaataggaagaagaaatttcctttagactaacgaatatattggggggaggaatagaggggaggtgtgcaggaaccagcaatgagaaggccaggaaaagaaagagctgaaaatgcagaaagccgaagagttagaacttttggatacagcagaagaaacagcggctccactaccgacctgcccccggttcgatgtccttccaagaatgaagtctttccctggtgatggtcccctgccctgtctttccagcatccactctgtcttgtcctcctggaagtgtatctcagtcagccagtggcttcttgatgatggcggtggaggtggtggttgtagtgtgatggatcccctttaggttatttaggggtatatgtcccctgcttgaaccctgaaggccaggtaatgagccatggccattgtccccagctgaggaccaggtgtctctaaaaacccaaacatcctggagagtatgcgagaacctaccaagaaaaacagtctcattactcatatacagcaggcaaagagacagaaaattaactgaaaagcagtttagagactgggggaggccggatctctagagccatcctgctgagtgccctgtgtgtaagtcctaataaactcacctactcaccaaaaaaaaaaaaaaaaaaaaaaaaaaaaaaaaaaaaaaaaaaaaaaaaaaaaaaaacaagtaaaacgaataaaaacaaaaannnnnnnnnnnnnnnnnnnnnnnnnnnnnnnnnnnnnnnnnnnnnnnnnnnnnnnnnnnnnnnnnnnannnnnnnnnnnnnnnnnnnnnnnnnnnnnnnnnnnnnnnnnnnnnnnnnnnnnnnnnnnnnnnnnnnnnnnnnnnnnnnnnnnnnnnnnnnnnnnnnnnnnnnnnnnngttaattttgttannnnnnnnnnnnnnnnnnnnnnnnnnnnnnnnnnnnnnnnnnnnnnnnnnnnnnnnnnnnnnnnnnnnnnnnnnnnnnnnnnnnnnnnnnnnnnnnnnnnnnnnnnnnnnnnnnnnnnnnnnnnnnnnnncccaaaagccgaaattgtaaaaccccttgtaaataaggggatagcccctttatgggaaaagggttgcccagtttggacaaaagccttttttaagacagggccccaacttaaaaggcgaaaacgcccttaagggggggccaatttttgaacgtggcctaaaaagtttttgcggcccgggca

SEQ ID NO: 6809 - DNA, 1001 bp, Homo sapiens
ttttttttttcagactcagacatttattactcaaaatggaaagaggtgagtatgggggatggggtacatatgggagcctggatttggggagtcagctctgtacagtgaggtcatcaggtccttgtgggagccttcactggggacaacacagaagccccatttcaggcccagatcccaatccctcctcaagtaggggacagcagagtataggaagcaaagtggggagcccttctaggagccaatggaggtcctggaaggaagtgggaagggacccagaaaaaggagagtgaagggtgtgaggtgggaaggacggatgaggagaccactcggaacagtgtttaattaaagaaatgggagctagggagagacgattctgtaaagccaggggatacagagacacagggagagaggctcaggccaaggcaggtgggaggaggggcagccaatggaatgagtctcagtgcagcagccagaggccaaggccagccaaggaggtaaggaagacaaggcccagggctggagtgggccggggtcctgcgctgttgcagttgtccttgttgcagcaggtggtgttatatgtcagacccagcttacggttggtttggttgaaggcctcctgacagggctcttctggtgtgccacagcgcagattggagaaaacccacatcttaccaaggtatgcatgtgttgtcaggcattgctgtcctggctccaggcggcaggactgccggtccacacagcccagcacagggaccttgtagcaggagtgacagcgaatgtcagctgagacccagcagagcagaacagacagggtgagcagcataagggctttcatggcgagggtcctgagaatggtggcaaccacagcagctgatagagtagattttcaaggatccagctctaggagttgagtggcctttttggaatttataaacccaaaggctcctcccttccctgcctctggtagcccctcccttctcacttactacgcagctgaccag

SEQ ID NO: 6810 - DNA, 7133 bp, Homo sapiens
  misc_feature (20)..(46): n is a, c, g, or t
  misc_feature (1089)..(1106): n is a, c, g, or t
  misc_feature (1512)..(1526): n is a, c, g, or t
  misc_feature (1869)..(1891): n is a, c, g, or t
  misc_feature (5358)..(5377): n is a, c, g, or t
  misc_feature (7039)..(7042): n is a, c, g, or t
  misc_feature (7053)..(7053): n is a, c, g, or t
  misc_feature (7055)..(7055): n is a, c, g, or t
  misc_feature (7068)..(7068): n is a, c, g, or t
  misc_feature (7085)..(7085): n is a, c, g, or t
  misc_feature (7088)..(7088): n is a, c, g, or t
  misc_feature (7110)..(7110): n is a, c, g, or t
  misc_feature (7117)..(7117): n is a, c, g, or t
  misc_feature (7119)..(7119): n is a, c, g, or t
  misc_feature (7121)..(7121): n is a, c, g, or t
  misc_feature (7127)..(7127): n is a, c, g, or t
ggagaggcaggagcagctgnnnnnnnnnnnnnnnnnnnnnnnnnnncgctgcttgtcacgaatcgaggattgcaatgagctcatcgttttctccttgcagcttcacaactgccctggcttcctggctactgtctgctgctgtcttctcacacatagacacgcacacacaccctttctcgcacacacacacacacacacacacactctcacacattctcacatgctagacccttctaagcagcttgtccgtttttacacatgtatctgaactctcctgcatcactcttggccattttctcgcattcgattgcttttgccgttttttatttagatcagtacttgatttcattttcattttccagtctactttggggttctcgcagtggataatttagccaaaatgtttttcttgtggagacattagctgacaattcccaccacagactggcttgtacgtcctcccagggagacctaaacctggctcccctcccaccgcagttcttaatattgtggataagagatccatctttctcattctggatacctacttagtgctcatggaagaaggggtgccctgcccagccccagctgctaagctcacacctcctgtcaaaaagtcccaggacatgcacgacgagaggagcaagctggtgaatgagtatgcgtgtcgagtgctggaacttctggggatggggcatcgtctgtttgtgcctcggcttctggcgacctcaaaggaagaccttctgcaggctgattttgaaggtgctttaaagttctttagagttcagcttccaaagagatacagggcagaggaaaatgcaagaagactgatggagcaggcttgcaatattaaagtaccaaccaagaagctgaagaaatatgagaaagaatatcagacaatgcgagagagtcagctgcaacaggaagacccaatggatagatacaagagggagaaccgaagattacaggaggccagcatgaggttggaacaagagaatgatgaccttgcccatgaactagtaacaagcaaaattgctctacggaatgacttggatcaggcagaagacaaggcagatgtgttgaataaannnnnnnnnnnnnnnnnnacagaggctggtggagactgaagaggagaagaggaagcaagaggaagagactgcccagctaaaagaagtcttcaggaaacagctagagaaggcagaatatgaaataaagaagactacagctatcattgctgagtataaacagatctgttcgcagttgagtaccaggctggagaaacagcaagcagccagcaaggaggagctggaagtggtaaagggtaagatgatggcatgcaaacactgcagtgacattttcagcaaggagggtgctttgaaactagcagccacaggcagagaggaccagggaattgaaacagatgatgagaaggactcacttaagaagcagctgagagagatggaactggaactggcacaaaccaaactgcagttggtggaggccaagtgtaannnnnnnnnnnnnnnacatcagagaggagcccttatgaatgaaatccaagctgcgaaaaactcttggtttagcaaaaccctgaactctatcaaaacggccacgggcacccagccattgcagccagcaccggtcacccagccacccaaggagagcacatagttccagccttacccaagcacaagagcacaatgttcaaaccaatggaaatctgggaggattcttcctggtgtccctttgaaggaaagtcaaggaggccagaaaacaagccagaatttttcagtagctctcactctttcttgtatgacacttttcaaagggatgctatttaaactgacctgttctatgttgaatacctannnnnnnnnnnnnnnnnnnnnnnatgttcagatccatcatagtattacacattattttgtttgcctgatgtttagttggaaataagtaattcagaactaaatgcttttttatttagaattattcataattatttttatcttacataaaaatggagacatctgttattccaaggttgaagtgataagaagatctttgtcacaggaaaaaaaaaaattgaaacctaaacatcttaagttttcaggatttattcagataaagcacactgtggggccaggcatgaccactctcaggtttcctcctgagcctgattcccagggaagtgttaatcctgtccaaaggaaagaaccaatcagcgatcattggtttactttcattttctgttcggtacatctggaaatgaagtgccaggaatagacgggctgttcagattatacgctaggtaaaaggaactgaaattttaataagtgtaggtcaggatcatttgggctgtggtattctaacagatccttttaagaatgccacataggacttgtgagttcctaagtacaccaaagtatggacacagatgtgacttctggcaattataaagttaaaggtggatattgcaccttacagacttagggagcctttaccagagacgcctaaaaagccccaggttcagccattgtgctgaatagagtggaatatagaaccagggacagagtatttcatttaacgttgatatatacttgctaaggaaacactaacaatactgtaactttgttaaaggacatagtattgaaatgggaaatagaggtcaggctcacatcatcttagtttaatgctgggcaacttttttctgatttctgtagttccctgaaaatgtgtccttcgtacccataaagagatacaaatgcatttgtaacatttttgattgaatataaaacctttacagaaatacttatctcatggaaaggtaaagctattgtttaaaaattagtggaaatattttttcaattatatttaacatgcctataaaaatagtccttgcaggaaattatttgataagagcaaaactatttttattttataaactattttggaggcctctgatcctttcaaaccaaccaaactactattagatatgtacaataacatttgttgatattaatcattggcctcattgttgaacatattatttgcaaagaatcttaaactctgtagtgccagaatgattctcatctgtgccatattttgcaattaaaagtaacacacccttagaagaatcaaataagagccatctacatcccaggaggatgcaccaagttgctcacagtggatcttttcctctaaaatgatcttttatgttctaaaaagtgaaatcccctttatctgtgtttatattctctacagcccataaaactgatgtgattgttatgttatactcatcagataatacttttcttacataaatctttcattgttgttctgacatctttcattacaaaatttattttcttaacaaaaaggaacataacccagcattccaagtgtctgtgttggctttaacattctctacatggtggtctagataagctaattttttttttttttttttttgtaaaatgtaatagctagaaaatgttatcttcgcgcttgtttttgtaaatcatttagtataggctgttagctttactggtactttacgctttgattccaagaagccttgtgcagttgccttatcaaatggccagctaaattaaagatgctcttttgtgttgtgaatttcatagttctgtacagagcttgtttcaatttacaaaaataagtacattccacagaatgcctaaattgtgtaattttctttaaataatagtaggtgagggagaaacataatggctctaggtcaatcccttatctaaagaccttgttcaacttcatagtccctttccttttaaagaggagaagagaaaaatcccccctggccaggcatggtggctcacatctgtaatcccagcactttgggaggctgaggtgggtggatcacctaaggtcaggagtttgagaccagcctggccaacatggtgaaaccctatctctactgcaaaatacaaaaattagccgggcttggtggcgggtgcctgtaatcccagctactcgggaggttgaggcaggagaatcacttgaacccaggaggcagaggttgcagtgggccaagattacggcattacattccatccagcctgggcgacaagagcaaaattccgtctcgaaaaatcaccaggtacatacctctcaagtttgataagtccatcttttgagttttcttttagctctttcaaaagattacgagggcaatacatattttttttttttttattctccagccccatatcatacttgggtatgcctgttggtaccataagcctaaactctccttcactgcaatgcctttgagtcagtagcaatagtaaagactagaaacaaagaaaattcagaatttggtatgtgatatgattgttcatacaatatgttataatagcaatattccaaacaatatgtccttcactgtctattgttggaaaactcatgcatcccagcatgaagtaactcctagttttaattttagttattttgagatatatttgagaattgcatctcttctcttgaatttcacttagaagagattaaccagccaaatatccaggaaagtttcaaaacattctagtgtttttcatcctttgctaggatgcactctgtacaaaacattcctctgaaaatctaatatttgcagtatctaagaattgatcatttctattttcattaaattctgtggaaaaaattaaatgaatgaaattcaacttcataattcagttcatcagcttttgtatcttgagaatctaaacacgtctttaaatctgaaagaaaccaagctggattttgcagtgcatatgtttgctagcttcccacatcctgaaccatgtcaaaatttggttttatttagttacatataatttaatgcaaagaaattctgttacttaatgttctgtttatttatgagtgcctatcaggaacactaataggaatgccattcaaccagtgtcttctgcccctctcccagctgttaaattagtacttcttcattggctttctgaaatgtcctgagtaaagtagaaaagcaacctttgtatggatgtggggatatttaatagtatgtatcttgtttcatttttttcctatgatgtattaatatttatttttctccaacccctgctccattttcttaaaatattttccagttaataactagttgctttatttcctagctgaagtgagaaaaccaacggaaaacaatacagatttgggcagaggagatagagttacatctttaaaggagtgagccagtcacccaggagaatcacatgtgtaactgatgtaggggtttaagtcttcatactttcactaaaatctgtctactaactctcccaccaacctttgcatcaaacactnnnnnnnnnnnnnnnnnnnnggggcccctttaagggaaaaaacttttaaaaaattaaatgccttggttttgttttatcttctgggaaagaacacttttacttgattagcaagatgattatattatataacttgcccttaaaaacactccaaaatactgactccttttctccaattacaaatgagtgtgaagaaattctgttgtatgatttgaacactattaggtttgtatgtgtgtttaattggaagaattttatatagagtatctctgctgcttttgtttacctgggtaccacacaaccaaatacacattgagatttcaagaaatgatgatgaaagccagaaggccagaccacagctctgcagcctgtttcctacaaccagatataaaactctttctcgtcgccatgctgatagtcacactgaactagaactgtcccaacacattcttcctctctcataatggcttccatttaatacaggcaaagccctttaccttagcaaattctttatctttcaaaagtgaccaaaatgaggacttcaaccttggctgcacctcaataggagatgctgatcttgagttgtaatgagaaaagtgggcatataggagattttagtgactgcagtcagctgtctggcattcctttctcagtttgcatctaaaagactacatatgtcaagcttatctccacctgaatttgctgcctgctataaaaacatttcattaatatatcccattcttcctacctccatctctggtttgtcattagtggtattctgaaaagcttaagaaaaaagaatcattgagtagaaagtgaacattttaagttattttcctttttcattggcaattagttaacatgtaaaatcttttccattaaactgtataacttttaataactatatattatatatgggataaaatatatggactgaattgtgagaatataaatgcatcgaaagactctggtgtcatgaaagcacaagaataaggctggagatggtcccagatccaagatgtcccaaaagccttttgtatcagtttctctatttttggtattttgcataatgcatggatccttagttcaaatgagggacaaagtttctcagtcagccccacttcctttctttctaactcctacctttcccttgcagaggaggtagtagagattctggaattgtctatttttatgaattccattattttgtccatggcatctctaatgaaaacaggttctagaataaaggagttgattagtctgaacagtactaattaactacaaaataaacgttagtgatcagcctcttcctctataaacaatgaccaattagacgtttccgtaattccatgtattatgtatagtacactctataaatgtaaatgtaatgcttgtctaaaaagtgcaatttattgtacattgtcccaacaaatgtttacttttataatcgttatgaacttgaattggattagtatcttgtttttatgtgtgaatgaagccttgtgaaataaacaaatgcaactgagaaggtaacaaggtgactgtttttgtgagccagtgatgttttcaatgctttgtgttgcccctttggccccattaagcagtaataaacatttgttctgaagtccaaaaaaaaaaaaaaaaaaaaaaaccccgagggggggcccgggccccaatccccccannnnaagggggcggnanaaaaaccccgggncgcggtaaaaacgcggnccnggggaaccccgggggacccaancaaaccncntngggaanccccct

SEQ ID NO: 6811 - DNA, 5092 bp, Homo sapiens
  misc_feature (4334)..(4348): n is a, c, g, or t
gggaccatcctggctaacacgcggtaaaacatcatctctactaaaaatacaaaaaaattagccaggcgtggtagcaggcacctgttgtcccagctactcgggaggctgaggcaggagaatggcgtgaacccaggaggcggagctggcagtgagctgagatcacaccactgcaatccagcctgggcgacaaagcaagactctgtctcaaaaaaaaaaaatcaattcaggccaagtgtggtggtgcacacctgtagtcccagctactgggaaagctgaagaagtgggaggatagcttgggcccaggagatggatgctgcgggaaggggctgccatttgctgcccctgccagcggcgcgcggacctgcccgcgctcctgcagccgccgccgccgccgccgccagcccgcccggcccctgcagcggcgccgcctgcgctccctccgcggccgccggagcgggcgccatgaaccccagctcctcggcgggagaggagaaaggggcgacgggcggcagcagcagcagcggaagcggcgccgggagctgctgcctgggcgccgagggcggcgcggacccgcggggcgcagggtcagccgcggcggcgggggccgctgccctggacgagcccgcggccgccggccagaaggagaaggacgaagcgctggaggagaagctgaggaacttaactttccggaagcaggtctcgtacaggaaagcaatctcccgggcaggcctccagcatctggctcctgcacatcccctcagccttcctgtggcaaatggtccagccaaggagcccagagcgactttggactggagtgagaatgccgtgaatggagaacacctgtggctggagaccaacgtctcgggagacctctgctaccttggagaggagaactgccaagtcagatttgcaaaatcagctctcaggaggaagtgtgcagtctgtaaaatcgtcgtccacaccgcctgcattgagcagctagaaaagattaatttcagatgtaaaccaacatttcgagaaggaggctcaaggtcaccaagagaaaattttgtacgtcatcactgggtgcacaggcgtcggcaggaggggaaatgtaagcagtgtggtaagggcttccagcaaaagttctccttccacagtaaagagattgtggctatcagctgttcctggtgcaagcaggcgtttcacaataaggtgacctgcttcatgctgcatcacattgaagaaccctgctccctgggggctcatgctgctgttattgtcccgcccacttggatcattaaggtgaagaaacctcagaactccctgaaggcttcaaatcggaagaagaagagaacaagctttaaaagaaaagccagtaaaagagggatggaacaggaaaacaaaggtcgtccttttgtgataaaacccatctcttctcctctcatgaaacccttgcttgtatttgtgaatcccaagagtggaggcaaccagggaaccaaagtcctgcagatgttcatgtggtacctgaatccacggcaagtctttgatctttctcaggaagggccaaaagatgcgcttgaattgtataggaaagtaccaaatctgcgaattctggcctgtggtggggatggaacggtgggctggatcctttccatcctggatgaactgcagctgagccctcagcctcctgtgggggtccttcctctggggactgggaatgacctggctcgaactctcaactggggagggggctacactgatgaacctgtttctaagatcctgtgtcaagtggaagatgggacagttgtacagctagatcgctggaacctccatgtggaaagaaaccccgacttgcctccagaagaacttgaagatggcgtatgtaagctccctctgaatgttttcaataactacttcagccttggatttgatgcccatgtcacactggagttccatgaatccagagaagcaaatccagagaaattcaacagtcgttttcgaaataaaatgttctatgcaggggcagctttttctgacttcctacagagaagttctagagatctatccaaacatgttaaagttgtttgtgatggaacagatctcaccccaaagattcaggaactgaagttccagtgtatagtatttttaaatatacccagatattgtgctggcacaatgccctggggaaacccaggtgatcaccatgatttcgaacctcagcgtcatgatgatggttatattgaagtcattggatttaccatggcctctttggcagccctgcaagttgggggccatggagagaggctacaccagtgtcgagaagtcatgcttctaacttacaaatccatccccatgcaagtggatggggagccctgtaggttggccccagctatgattcggatctccctgaggaatcaggccaacatggtacagaagagcaagaggagaacatccatgcctttactcaatgatccccagtctgtcccagatcgtctgaggatccgggtgaacaaaatcagtttacaagactatgaaggattccactatgacaaggagaaactccgagaagcttctatttcagactggttaagaaccattgctggggaactagtgcagtcatttggagcgatacctctgggtattctagttgtgcgtggagactgtgatttggagacttgccgtatgtacatagaccgcctacaggaggacctacagtcagtttcttctggctcccagagagttcattaccaggaccatgaaacctccttccccagggctctctcagcacagaggctctctcctcggtggtgcttcctagatgacagatctcaggaacatttgcactttgtgatggagatttcccaagatgagatttttattctggacccagatatggtggtgtcacagccggcggggacacctccgggcatgcctgacctggtggtggaacaagcctcggggatctcagactggtggaatcctgccctgcggaaacgcatgctgagtgacagtgggctggggatgatagctccctattatgaggactcagatctgaaagatctcagccactcccgcgtgctacagtcaccagtctcttcagaagatcatgcaattttgcaggcagtaatagctggtgatcttatgaagctaatagaaagctataaaaatggaggcagtctgctaattcagggaccagaccactgttcactccttcactacgcagctaaaaccggcaacggggagattgtgaaatatatccttgaccacggaccttccgagttattggatatggcagacagtgaaacgggtgagactgcactgcacaaggctgcctgccagcggaaccgggctgtgtgccagcttctggtggatgcaggagcatctctgagaaagacggactccaagggtaagacacctcaagaaagagcacagcaggctggggacccagacttggctgcttacctagaaagccgtcagaactataaggtcattggccatgaggacctggaaactgctgtttgaccctggtattcgggcaaagaggacatgagcaagcgtatcacatctgccctccctgcaattgggcagctcccctggaagaagctgatggaattcatatatctgtctctctcctgcaagaatctacctgagaccatgccactagcttttaagggctaccaagatgtacaacagaacatgatagcccattgagaaggaggcaggatacctggagatttgtggaatacagtacgagttccacaaaatttgatccttattgcttccagcaagtagcatgaacttctgtgttcacctgtataatttattttaaagattcaaaggatgttcgtataaatggcactgctccatcctccccctatgcattggtttttttccctgtaccatacaattctactgtaactacccatcaacttaaagaaaaatattatctcttctctttacattcagtcttggaagaccacaagattgtctgaaggccttctaaaaccttctgaatgtcctgcagaaatataactgtaaaaccacttccatttctaagactaaatatatcaagactatttagtgactctctctgcatgtccccctcacccgccaaccctccgtttcattatataggagctgggaagtgccacatggataatgtcaacttgtgtgctatatctctgaggaatggtgaggtggcatgggagatgtctgtgcttggaggtacctcagagaggtaacccaggggtcagcccaggctgctgggctgtagccaatagccatgcaggactggttcagcttgggctgtctgtacagctccgtactgcctatgtgtagccatctttgccttnnnnnnnnnnnnnnnatgagcaaaggattaaacagaggcccacagctagtttgcagaaccactcaattttaagtgctgtttaaattgcagagcaaataatcctgtgtgggaactgtggttacaggaaatggagcactctaacaatgtttacttctaaactttgttgaatgataatagaaagcaccctaattgacttggaaaaaaaaaacagcaaaagcaaaagtagcaacatatgtcaacatatgtcactgaaataggaaacagtcattggaatgttgcacagaggctaatagctatggactgttggatacaggatacagtggtgagaggagccccattttaggtctttcttttaggtttttggttttcattactccaagtagcccttgacccaagaacaaaggcttgttgtatgagttccactgccagatttatgggatgcctggatcattcagaaggatgcttcaactattatttgtcaggtccaaaggtcgtacttgataaccccattttctatgtatggggtagtctaatatattattttatctactttatttttcccttttcagaaagtccttagtgcaaaccaccattggaatctagtcagaaatgtctgtcagatagttagaattgtaacatctaaacctgccacggatcgaatggtacttacaggtacctctcttagggactctgtgatccctaaaatatcagaagaaaatgtctgtctttctgtccaaatatctacttgacttgggggta

SEQ ID NO: 6812 - DNA, 845 bp, Homo sapiens
  misc_feature (71)..(73): n is a, c, g, or t
  misc_feature (75)..(75): n is a, c, g, or t
  misc_feature (386)..(407): n is a, c, g, or t
gggttccccggtaaaaatttgggggccccccctggggggggtatttttttgggggcgggcccccctctttnnntntttttttttttttaatcttattttgttttttttttttttttttttttaaataattggctgaatctgccttggagcactgctggttttatatattagccaaaggttttgttctggccttctgtactgatctggtgttcctgatcctaattcctatctgtctaacgtggaggtgatcaagtgtggctgtaggcctttgttttccaatggtgctatattctgttttcaaacacttcactgaacccagctgtcttgcaaactttcagtggtgctgtccctggatgggggctacaaaaacaagaattggtgaagannnnnnnnnnnnnnnnnnnnnntggatgatggactttggctgtgagccaggcctaggatggttcttgtcctatatccacctagtcttcacctggggctataattctgtcctggaaaaagaactctgaaaacctgggtcaggggaatgattcctaaggaaaacggtctgcatttgagctctggtttgaaagtagccaaggggactgatggtggacactccagatgtggttggaagcatatgtggggaggctggctggttgagttttgttattttctgtatagaaaggttgagatatatcaacacttggaattgttacccatctgcagaattgacttctcaaataaagatgctaaaaatctcaaaaaaaaaaaaaaaaaaaaaaaaaaaaaaaaaaaaaaaaaaaaaaaaaaaaaaaaaaaaaaaaaaaaaaaaaaaaaaaaaaaaaaaaaaaaaaaaaaaa

SEQ ID NO: 6813 - DNA, 5059 bp, Homo sapiens
  misc_feature (885)..(924): n is a, c, g, or t
  misc_feature (1646)..(1663): n is a, c, g, or t
gcccgggctcgcctcacctccccgcctgcttaagccctcccggagcgctcggggttcgacccccgagcacggcgggaggagggcgcccccctgcggcacagccacgtccacgaagcccctcccggggttctagaaagcggaggcctccgaaggaaagaccaagatgcagagagatgtctaaaaggtgccagaaggtgactatccagccctggtatcactgcctggtgatttcgtttctttgatcttcacgaatggcctcactggctgtgatttggacagaaatcagctgccacgtgcaacattctcccatgggaacatgtgtccgcagtacctatctcagagcccaaatccttcctgccccacagccttctgcgatgattcccccacaggaggcatccgctcgacggcgggagattgaggacaagctgaagcaggaggaggagactctgtccttcatccgagacagcctggagaagagcgaccagctcactaagaacatggtgtctatcttatcatcctttgagagccgccttatgaagctggagaactccatcatccctgtgcacaagcagacggagaatctgcagcggctgcaggagaatgttgagaagacgctgtcctgcctggaccatgtcatcagctactaccatgtggccagtgacactgagaagatcatcagagagggccccacaggtaggctggaagagtacctgggaagcatggccaagattcagaaggcagtggagtatttccaggacaacagcccagacagcccggaactcaacaaagtgaaactgctctttgagcgcgggaaggaggccctggagtccgaatttcgcagcctgatgacgcggcacagtaaggtcgtctcgcccgtgctcatcnnnnnnnnnnnnnnnnnnnnnnnnnnnnnnnnnnnnnnnngaggacgtgaccctggagcacctgcccgagagcgtgctccaggatgtcattcgcatctcccgctggctggtggaatatggccgcaaccaagatttcatgaacgtctactaccagatacgctccagccagctggaccgctccatcaaaggacagaaggagcatttccataagagcagttcttcctctggggttccctactcccctgctatccccaacaagaggaaagacacacctaccaagaagccagtcaagcggccagggagagatgacatgctggacgtggagaccaatgcctacatccactgcgtcagtgccttcgtcaagctggcgcagagcgagtaccagctgctggccgacatcatccccgagcaccaccagaagaagaccttcgactccctgatacaggatgccctggatgggctgatgcttgaaggggagaacatcgtgtctgctgcccggaaggccattgtgcgacacgacttctccacggtgctcaccgtcttccccatcctgcgacacctcaagcagaccaagcctgagtttgaccaggtgctccagggcacggctgccagcacaaagaacaagctgcctggcctcatcacatccatggagaccatcggtgccaaagcgctggaggacttcgcagacaacatcaagaatgacccggacaaggagtacaacatgccgaaggacggcaccgtacacgagctcaccagcaatgnnnnnnnnnnnnnnnnnncagcttttggacttccaggagacggcaggcgccatgctggcctcccaagagaccagctcttcggccaccagctacagctctgagttcagcaagcggctgctaagcacctatatctgtaaagtgctgggcaacctgcagttgaacttgctgagcaagtccaaggtgtacgaggacccagctctgagcgccatcttcctgcacaacaactacaattacatcctcaagtccctggagaagtctgaactgatccagctggtggcagtgacacagaagactgctgagcgctcctaccgggagcacattgagcagcagatccagacctaccagcgcagctggttaaaggtgactgattacatcgcagagaagaatctacctgtgttccagccgggagtcaagctccggggcaaggagcggcagattatcaaggagcgttttaagggcttcaatgatggcctcgaagaactgtgcaaaatccagaaggcctgggctattccagacacagagcagagggacaggattcgccaggcccagaagaccattgtcaaggagacctacggggcctttctacagaagtttggcagcgtgcccttcaccaagaacccggagaagtacatcaagtacggggtggagcaggtgggcgacatgatcgatcgccttttcgacacctctgcctgagcctgctgctagccctgcctggttccaccagactggcgtgtcattggacagataaaccagtgttagcttgcctctgggctgggtgagcttgaagtcctctgggacagagacctgtctccacgcctccgggagctgtgtccctgagccccctagtcctggctcctgctttttccccacagcccgtgttcccagccgaaccagcactctcccggaagcctggggtccctccacaccttggcttttatgaccctgatggcttctgaaacaggaaaagagagaaggaagacagaggcctgtgcccactgctgctccatgtgtaccaagagcagcagggcagaagggccctccctccagcctaggtcagaggtggggacagagaactcccctacagcccagagatgtggcagggctcagagaagcagccagagctcctggaggaaaggcagtcgggactgaccccctctcttaaaacacattcccgcccgcccacaggcctgaggtctgggacctttccctcccaggagccccctaggtggctgggggaggcaggctcactggccattttccctagagtccagcacactgcaggaggcgttcggaggaggagttccgccccaccctctacagccttcctcaggcccctgtctctggtccccagcctcagtgcctcttggcccagggccaggcagtcgtggttgcagaaggagcaattaggctgcctgcctgtgggctgggagacagggacaatggggaaaagttaaggagcaaaatgggggttggaagcaaaaaatagggccccacctatttaggacgagattgaagactgacccttgaggcacacttgcactggagatgggtttatttcacgctctgtgcttgtgtgctagcggagggagagctcagggtggcttaattcagaggccctgtcatggcccgcccccagccatgggaaagcaaacttcatcctaaggtgtgcagcccaggccctgcccctttacagtctaggccgcctgccatggggtgcagcctctccaggggctgcgtcagacttgcacgctgcccacatccagattcctgcaaagacgaattgggtgcacagcaccccaaccacatacacgaggaagaagatgcggtcagcagtctcaggccagcttctctgtgacccctttactcctctggagggctctgtggggagaggtacagggaaaggagctgttcttcaaggtcccctcaacatgagcggaagagcgaaccccaggggtcatcagcctgtatcgcttcctttcttagattctcagctgatgaaaatttgggtctggcccatttcaggccatcttcagttgaagaaacaccctcttaggctgtgcaaggcatgggttatcaggggattgaggtcacctgggacttcagggaggctcagcttgctccctgccccagacctgtttcttctaagggaggaggacatggtggagaccagggacaggagagccagcagggtggatgcaaggggcctctacccacacctggacctccgtgccctcaccccagccctaggtgtgcacctaggcctcattccttaccccccagcccctgcccaccttcagcaggatgaggccctgggttgccgtgctctcgctgttcccctctcggggctgggctggggccgctcttggccccaaggttgccccgggccagcagcccagccagcagcacagtctctatggtgctgaggaagagcagcagcagcaggatggtgaagtagtaaactgggggaggcagggcacagggagatgctcaggggccagtccctgtgtctctggtgcccagcgagctgagcaccagtgggtgaccggggagaaacagggcagactgggtaagggagcagggcttactgagcagtgggttgcaggaggaggagctgggcagggcctgcaccagggaggagtggaggacgaggtatctcagcagcaatgtcaccttgtagcctatgcgctcaatggcccggaggggcagcaaccccccgcacacgtcagccaacagcagtgcctctgcaggcaccaagagagcgatgatggacttgagcgccgtgttcttcagcctcagctggaaggggaaaagtcagggccttcccggcgggggggaaggaggtgggcatcgggggcatggggcctggcctctggccgtgcatcctcactcccacccgcctccagcagccctctgtcggcctcctcgcgacttgactcaccgtcacctggaagcagggcaccagctgctggggtgggacttgggtcttcagatcataaactacgtattccctcttgacactcacaatctcgttcaccacgtgggcctggaactctaactccatcgctgaggggtgggaatgagaactatgaaccaggaaggagagatcccagctgccaagtctgggggtagcagactggagcccaggggtgatggagacttttgatggcttttggcagggacagacttggacacaaaaccgatccatagaagggcttcccaaaccttgttttgcaacatcccaaattgtctccagttgaaggaaggcctttatcagattcatagatgagctttcattgtaaaaataaatgtactttgcaccacttcaaaaaaaaaaaaaaaaaaaaaaaaaaaaaaaaaaaaaaaaaaaaaaaaaaaaaaaaaaaaaaaaaaaaaaaaaaaaaaaaaaaaaaaaaa

SEQ ID NO: 6814 - DNA, 11122 bp, Homo sapiens
  misc_feature (51)..(77): n is a, c, g, or t
  misc_feature (657)..(676): n is a, c, g, or t
  misc_feature (1072)..(1124): n is a, c, g, or t
  misc_feature (5070)..(5091): n is a, c, g, or t
  misc_feature (6695)..(6710): n is a, c, g, or t
ggcacgaggggctagggatgggtgctgaagtatcaggctctggctctagcnnnnnnnnnnnnnnnnnnnnnnnnnnngagtctgggtctgagtctggcagcccgaagcctggacaccttttcttgattctctaggcgggggctgcctgcgtccaagcagctggtttgcagcgttccaacgctgggagggagttcccttacctggggtccagtctgtaaagttgtcgccgctttctagggaccccgccccaccggctgggactcttccatgcagttgaaactggttgacaaccattaacctgggttgcaactacaggtggcactggaagcagactggttcctggacatgcccggtggaaggaggggccctagtcggcaacagctaagccgttcagctttaccttctttgcagactttggttggtggaggctgtggcaatggaacaggcttgagaaacaggaatggtagtgctattggccttccagtcccacctatcacagccttaatcaccccaggtcctgttcgtcattgccaaattcctgacttgcctgtggatgggagcctactctttgaattcctttttttcatctacctgttggttgctcttttcattcagtacatcaacatttataaaacagtgtggtggtatccttacaannnnnnnnnnnnnnnnnnnntcactgaattttcatctcattgattatcatctggcagcattcatcacagtgatgcttgcgaggaggcttgtatgggctctcatctcagaggtctgtgtgtgtaagctctgattttcaggaaccctatttctggaagcagagtaactggaaatactaagtcaagatctgaaaaccatttgaagttaaccaaaaagcacaggctactaaggcaggtgcagcatcaatgattcactacatggttctgatatcagctcgcttggtactactcactttgtgtggatgggtactttgttggaccctcgtcaatctctttcgaagccattcagtcctcaatctccttttccttggctacccgtttggtgtttatgttcctctttgctgttttcatcaagatannnnnnnnnnnnnnnnnnnnnnnnnnnnnnnnnnnnnnnnnnnnnnnnnnnnnagtagaggaaagtgcctcgactgtgggaggcttggccaaatccaaagactttctctccttgttgctggagtcgctaaaagaacagtttaataatgccacacccatccccacccacagttgtcccctatctccagacctcattcgcaatgaagtagaatgtctgaaagcagatttcaaccacagaatcaaggaggttctcttcaactccctcttcagtgcctactatgttgcatttctccccctgtgttttgtgaagagtacccagtactatgacatgcgctggtcatgtgagcacctcattatggtgtggatcaatgcttttgtcatgctcaccacgcaactgttgccatccaaatactgtgatttgctacataaatcagctgctcacctgggcaagtggcagaagttggaacatgggtcctacagcaatgctccacagcacatttggtcagaaaatacaatatggcctcaaggggtgctggtgcggcacagcagatgtttatatagagccatggggccttacaacgtggcagtgccttcagatgtatctcatgcccgcttttatttcttatttcatcgaccattaaggctgttaaatctgctcatccttattgagggcagtgtcgtcttctatcagctctattccttgctgcggtcggagaagtggaaccacacactttccatggctctcatcctcttctgcaactactatgttttatttaaacttctccgggacagaatagtattaggcagggcatactcctacccactcaacagttatgaactcaaggcaaactaagctgcctctcaacaatgagggagaactcagataaaaatattttcatacgttctatttttttcttgtgatttttataaatatttaagatattttatattttgtatactattatgttttgaaagtcgggaagagtaagggatattaaatgtatccgtaaacaaggtgatgtgatctttcatgtgttagtatattcgaataatatacatatgagaggtatgcctgtccagtaaagagattgatttgtttgtatggctctggaataactcattcgtttatgaacacatctcatgtattacttgacacagtacctttggtatgtctgcttttctttcaatcctcattatctttagccctcagctggccagtacttattgctaaagaaagggagatcaatggagttgcctaccagcacccattctcttttagttcagctggctaatagtattggaatacattgggaaaagagtgggttaaagtcctaggtggggttctctttgttgcctaccaggagaaagcagtaggcttcctttctaagatacggactcagctggtctattttaccctgtgacatttaaatatacttttgaataagctactatcctgaggctgagggttttgctgccacttttcctgtgtttccacttctgcttccaaagattttcctcttagttgtttgaaataatactttgccagacaggaagtctttagactgcccacattcatgaagaagatgatgtgtggctggatcagtaggagaagctgaggtgcaaaatgcccatgtgggcctagagtatgggaaggttgaaaattccaagtaactgggagagtgggcaagtcctcagctgaacaatcttggatgtagtctagcagcaacccacctacaatggcgttatgtttggagttatgaggggaagtgaaagataagaattacctacagctttgtactcagataatttatatccaaaatttgtgttttaaatttcatactccagaactttcatgtttatgagtattagccttttaagttatgggaggtgatatacttagtccattgatgttgtcacttgtcatctaaacttatgagaccttgtcttagagaatctaaaatatattgtcatatgttttctgtgctgagtttggtttgttacactgtgaagcttttggtgaaacaaaataagacttatgaagtaaaaagaccaatcatgtcgttgacaagctggctctgaaaataattcttgcagaagagttcctgaaaggcttcaccaaggggaagtattgtgaggagtgtttgtaaaaccaaggtacccaatatcagttttatgtttaaatcaataattgtttctttaaatattttgatgtgtatactttttttttaagttaacattatttggcattcagtctgagtctgttcaaccattcaacaaatatatattaaccagtaggcactatattaggccctggggatatagcagtgaatgagaaatgcaaaggtcctacttgcacagagcttacaatatgcgtgggggtgggggagttaggtggtgcagaaaatacagcaaataaatttatgtgtaatataacattccctggtagtagtgataagtgtagcaaagggaaatcaggacaaggaaatagtggtaagaatagcactgctagaaggcatctttgaggagatgatttttaagcaaagaaaaagcaagactgaatcatataaatagctttggggagaattccatgttacagtagcagaaagggcagtgccctgaggtggggacaagttggtatattggaagaatagcaagaaaatatattaggttagttgctttttaaagtagttcagcctaaatatagtggttcttgaggtaggggtgggaagggtagggaatctgccatctttctattctttctgtaggatcttgaaaatatgcttctcttggcagcaacattttcatgagattactcagcagttgagagcaaaatgggtggcatgggcacagagatatctcatcaaaattgccccaacttggctccagcttgggaaagtaacccagaaaaccctgattagagataacagaccagtcttatgaactaatatgatgccccttctggcttgatctgtcttggtcctatcctaagggaatagcacagaaccagatgctggcttggctaaataagtaagtggatataagaaataaataaaaattaattttggctaatggaattgcaaagttcctcctaccctcacctccagatatggcagcatacggggcataagaccgtttagttcaacgtgttctacacattccagctgttttttgtttgtttgttttgttgttttgtttttgtaggggccacgttcatggaagagagaaaaattactagttacccggatatcctattatagttcatgtaacagaagggacactatatttgctcactgatagtagaaaaatgtgtaatcattaaagaatgacctttttttgtaaataattaatagaaaaattaaaattgtttgtggaaagcatggtatagcaaaagttcagttgggtgaactgggatactggaaaaggaaagaagatacttgactagtctgggtggtctaaggtgggtaaataaaggagtagaggagggtagttcacaggaatgagcatgacagaagttttcctcaatatcctgtttactctgattccatgtttatattcctaatcctcctttccttcctgtccctatcagtcaccaccactgccacctgttgtgccgtttctctctcttttttttaattaatttttttatttctattaagctagccaggcatctcatttctatgtactgggcaattatatgccaaacactgctgggtgccggagatagtgatgttcgagttcattaactaatagaagacagacaagtaaaccagttgtcacactagggtgttcattaacagaaatatgtatgagatacgtaatagatatcagatctattaacaatcttgagtgtgaagcccaataaagtgctcttttcataagtacttcaaataagcagacagatgtcttggaacttttgtagacagaagacagctaatgaaagattataagctaagaataacttatgatccactggtttctagttcccaaagtaatctctagnnnnnnnnnnnnnnnnnnnnnnaactgatcagctgacccttctggaatcataggatagactaaatagtgaaggtctatcccttcccaagaacacctgtaacggccagaagagggggctgtctcctcaaatgcactgacaacaatacaagaacatacagattatgaagaatcagggaatcatgacacctacaaaagaaactaataaagctccaataatagaccccaaagaaatggagatttatgaaataactgacaaagaattcagaataatacccataaagaagttcagtgaactattaatatatacagataaaaaatttaatgaaatttgaaaacagtacactaaaaagaaagttgacaaatagaaacaataagaatgggatagaaattcaagagactgaaaaattcaacagaaagcttcaacagctgactcagccaagaagaagaaagaatcagtgtgctgggagacagaacgtttgaaattatctagccaggagcaaaaaaaaacaaaagaatttctaaaattaaagcctacagattatggaacaccatcaagagaccaaaccttcacataatagtggttggagaaggagaaagaggtgcctgaaaagcatatttaaaggggccaaaaagcatatttaaagaaataatggctgaaaacttccttaatctgtggtatatgccaacatccaggtacaagaactgcagaggtttccaatcaaattcaacccaaagaggagtacaccacaacacataataaactatcaaaaatcaaaggcaaaaaattttgagagcatcaagaggcaagaaacataacacataaaaaggagtgccatacaatcatcagcagagttctcagcataaaccctcaggtcaggagagagtaggataaattcaaagtgctcaagagaacaactgccaaccaacaatactttatccagcaaagctgtctttcataaatgagggagaagtaaaaaaaaagaaaagaaaaaagaaaagtgtgttttcccagacaaacaaaagctaaaggaattcatcatcactggacctgccttgcaggaattgctaaatggagttatttaaactgaaacaaaaagctactaattaataacataaaacatgcacgaaactcaaacatataaataaagcagagcccattcagaatactattggattgtaatgatggtgtaaaagtatagagttatatgcaaagttaagttgttataagcttgaaataggtggttgtaagtataagatgttccatgtaagcctaatggtaaccacaaagcaaaaatctttagaagcacaaaacaaaaatatcaaagcatactactatagaaaacaaaccacaaaggaatacagcaagagaggaggaaagaaatgaagtatgtacaaaacaatcagaaaacaactaacaaaatggcagtagtaagtccttacctagcaacgattgaatgtcaatggattaatttctccaataaaaagacatagagtggctgaatggataaaataagacctaattatatgctacctacaagagactcacctcacttttagacgtagactgaaagtgaagggatagaaaagaatactccacacaaatggaaaccaaaagagagtggggtnnnnnnnnnnnnnnnngacaacatagactttaagttaaaaactctgaaaaaaaaataaagaaggacatcatatgataaaagggtcaattcatcaagaggacataacaattgtaaatttatgtgcactcaatgttgaagtacctaaatatatagcacaaatattgaaggatctgaagggagagatagattgcaacacaagaatagtaggggacttcagtaccctatctcaacaatggacagatcatctaaacagaattaataaggaagcattagactctagcaacactgaaccaaacggacataacagacatatacagaacattgcatctaatagcaacagaatacacactctcaagtgcacacagagcattcagcagaatagatcacatgttagggcacaaaaaaagccttggcaaatttaagaagactgaaattatatcaaatatcttttccaatcacaatggtatgaaacgagaaaagaataccaagaggaattttggagaattcacaaatacatggaaattaaacattctcctgaacaaccaatacatagatgaagaaattaaagggaaaattttaaaggatcttgagacaaaaatggaaacacaacatattaaaacttacgggatgcagcaaaagcagttttaaaagtaaagtttatagcaataaatgcctacgtcaaaaaagaagttctcaaaagctgcttttttgaaaagataaaattgacaaacctttagctagactaagaaaaaaagaatagatcaaataaataaaatcacaaataaaggacattacagctgatactccagaaatacaaaggatcatgaaagactactataaacaaatgccaacaaattggaaaatctacaataaatggataaagtcttagatgcatgtaatcccaagaccaaataatgaagaagtagaaaaatctgaacagaccaataacaagtaaggagattgaatcagtaataaaaagtctgtcatcaaagaaaaacccaagacttgatgagttcacagcttaattctaccaaacatataaagaataccaatcttgttcaaactcttccaaaaaaaaaaaaaaattgggagaggagggagtacttccaagctctttttggagggcagcattaccctaatactaaagccagacaaggaaattacaagaaaataaaattacaggccaatatccatgatgaacatggaagcaaaaatcctcaacaaaatactagcaaactgaattcaacaacatattaaaaggattatccacaatgatcaagtggaatttatccctggtatatgaggatggttaacaatatgcaaatcaatacatgtaacataccacattaacagaatgaaggacaaaatctatatgatcatctcattagatgaagaaaaagcatttgacaaaattcaacatcctttcatgatagtaagtctcaccgaaataaggaatagaagggttgtacctcaatacagtgaatgccacatatgagaagcccatagctaacattatactgaatgatggaaaattgaaagcctttcctctaagatctggaacaacataaggatgctcactcttgccatttctagattatacagtattggaaatctttgcctgagcaattaggcaagagaaagaaataaatagcacacaaatagaaaggaaccagtgagattgtcagtttgctgaaatgacataatcttatagaaaatccaacagtcttcaccgaaaaaccgttggaactaataaatacagtaatgttgcaggatccaaaatcgacacacaaaatcagtagcatttctatacactaacaacaaactatctgaaaacaaatcaagagaacaatcccacttacaaagctacaaaaagaaatacttaggaataaatttaaccaaggacttgaaagacctgtaccaaaaactataaaatgttggtgaaataaattgaagatgatacaaataagtggaaagagttcttgtgtttatggggtggaagaatcaatattgttaaaatgtccacactacccaaagtaatctaaagatttagtgcaatccctatcaagattctaatgtcatttttatagaaacagaaaaaataatcctaaaattcatacaaaaccacaaacacccccaaatggccaaggcaatcaagcaaaaagaacaagtctggagatgccacactacttgatttcaaactgtactacaaagctataacaaaacagtacagtactggcaaaaatagacccattgacaaatggaatagaatagggagtccagaaatgaacccacacatgtacaatcagttgattttacaaaggttccaagaatacccaatgggaaaagaatagtctctctaataggtggtattgggaaaactggatatccacatgcagaagaatgaaattgaactcttatcttacaccatatacaaaaatcaacctaaaatagattaagagatgtgaatgtaggacctgaaactataaaaccaccaaccccgtctctactaaaaataccaaaaaaaaaaaaaaaaaaaaaaactagccaggtgtggtggcagttgcctgcagtcccagccactcgggaggccgaggcaggagaatggtgtgaacccgggaggcggagcttgcagtgagccgagatcgtgtcactgcgctccagcctgggcaacaaagcgagactccatctgaaaaaaaaaaaaaaaaaagaagaagaaaacacatgaggaaaactacatgacattgatctgtgcaatgattttttggatttgatccaaaaagcacaggcaacaaaagcaaaaacagacaaatgggattacatcaaactaaaaggattctgcaccataaaggaaacaattaacagtgttacaattggaaacagttaaatgcaccacaaaagggaacaattaacaggaaacaatgaacagcagagacaacctatagatggggagaaaatttctgcaacttatacacccaatagagagttaatctccaaaatatataaggagctcaaacaactcaattgtaagaaaataaaaactgaattaaaaaataggcaagggatcaaaatagacatttttcaaggaagaactgcaaatggccaagagacatatgaaaaattgctcaatattgttaatagagaagtgcaaattaaaactacaacaagagatcactacacttttcagaatgagtaggatggtagttacagaggctgggaaggtgatggtcaaagtgtacaaagtctcagaaggaatatggtcttttttttagttctattgcacagcatggtgaatacagttaatagagtattacacatttcaacattgctgagaataaattccaaatgttctcaccacaaaaattttaaccagttcaatttaattaacattatattcagaaatcttaatatcagtttgtacccccaataaaagtatgcaattatatactttcaatttccatgcaagaaaaaatagtggtgaggtgggtcaccagtgtgagggtggtagaagcagctatgggcataaataagatagtgcagggaaagcatatgaagtgaaaagggaaagaaggacagaattctggcaaataatagcttttaaggaaacttgttttagggagacagagtcttgttctattgcccaggctcaggtgattctcctacctcagcctcccgagtacctgggaccacaggcatgcgccaccacgcccagccaattttttgtttgtttgtttgtttgtttttgttttttgtagagatggggtcttcctgagttgcccaggctggtcttgaattcctgggctgaaacaatcctcctgcctcggcctcccaaagtgctgggaccgcaggcatgagccacagtgcctggccaggaagaggaaacttttaagtgaacaaagctaagaaaatgaatggccatggaaggaggcaaagcagaaagtttcaaaagaggaatgatcaataggatcacatataacagggaagtctagagactgagaagtgaatgttggatttggatattagactattggtgacgttagcaagagaaattttagcggagctatgcgggccgaggtcaggctgccattggtccagaatagtgaattgtaatgaagaagtagaaattgagcattgatgacactgatgactcttccaagaacctagacacaaggtgataaaagtggacagaattgaggaagacttttgtttaagatagaataggctttggcatgtttatatgctgagggattaaagatcaaagagggcaaggctcaatacatagtggattacaggagactgggaacacagaagcctgggagctcttggaaagaggggtaacacttcctctgaactagaagggaggttaggtacacacatatacaggtaaggggaaatagcagtgggagcttgaataaagatgtctgatattat

SEQ ID NO: 6815 - DNA, 2792 bp, Homo sapiens
ggcacgagggtgacgttatttcattacacggcttctcggcattccacaggtttccctccgcctcctgagggcctttcctaacccacagagtggattcctggctccagaaaatgggcttggagcgggggccacgttgaggaaggcgaagggcattgtgggggcgttatgtaaaagtaggaccccaaccgacagatcctagtgctcgcgccacctgggcgcgcggagctttgctcgtttactattgaaaaagttccagcgcgggaaactgaacccggagctttgcgcacgcccgagccctcaagtaatgtgggttgtggtttttgttgttgttgtcgccacgcatgcgtcttcgtgccgtgtggctatttgattgtgtcaactcttctgattagaatggcgccattttgcggtacggaagctacacagcaacacgtataggagactctccccgagatcttctagggagtgacccatctatttttgtttgggaagaggaaactccgaaatgggatcgcggaagacttaaagggccaggctgatttttttttcctactggtctctgaggctgtggttgctacagggtcaccacgagcttggcttacttgtctcatccttcccttgcctggtatcattttctcagttctcccaaaagccatgtcccggcccttgctcatcaccttcaccccagccactgaccccagcgacctctggaaggatgggcagcagcagccacagcccgagaagccagagtccaccctggatggggctgcagcccgagctttctatgaggccctgattggggatgagagcagcgctcctgactcccagagatctcagactgaacctgccagagaaagaaagagaaagaaaagaagaataatgaaggcaccagcagcagaagcagtggcagaaggagcatcaggaagacatggacaagggagatcccttgaggctgaggataagatgactcaccggatactgagggcagcccaggagggggacctgccagaacttaggagactgctggaaccgcatgaggcaggaggagctggggggaatatcaacgcccgggatgccttctggtggaccccactgatgtgtgctgctcgagcgggccagggggcagctgtgagctatctcctgggccgtggggctgcctgggtgggggtctgtgagctgagtggcagggatgcggctcagctcgctgaagaagctggcttccctgaggtagcccgcatggtcagggagagccatggagagacaaggagcccggaaaaccggtctcctactccctccctccagtactgcgagaactgtgacacccacttccaagattccaaccaccgcacatccactgctcacctgctgtcactgtcgcagggtcctcagcctcccaaccttccacttggggtgcccatctccagcccgggcttcaaactgctgctgagggggggctgggagccaggaatggggctgggaccccggggtgagggccgtgccaatcccatccccactgtcctcaagagggaccaggaaggactaggctacagatcagcaccccagccccgagtgacacatttcccagcttgggatacccgagctgtggctgggagggagagaccccctcgggtggccacactgagctggagggaggagagaaggagggaggagaaagacagggcttgggagcgggatctaaggacttacatgaacctcgagttctgactttggtaaagtctgaccctagtctgctgctgaagtctgaacttgggcctctgacctgggccctttgacttccccttcctgggatctgctcagatgcagatcctgaagtttttggtcaataggctctgtcttcgtgagagacgggctgagagtcagaaataaatcaaccatttgtggtttaaaaaaaaaaaaaaaaaaaaaaaaaaaaaaaaaaaaaaaaacttttggggcacgcgccagcgcgacgccaccgaagaagaatctttctagagacaacaccaatcgacgtagaggagcggcgcggcgaggcccccaatggggtgacaggtgacaaactgcgtggtccgaacgcaactgacgtgtcccacgtgcgagaaaaccgcgctgggacgaagcacagaacgaggcgaggggccatctccacaccagaaatacaaagaacaccgccgcggcgggcacaccacacgcggggcaggcccgaggaacaagaacaccccacagagcagggagcccccggcgagagaatcaaaacgagcggaacacataacaaaaggaggggacacccaaagacaacagctggccgaaaaacataaaaacgatgatgggcgcccaaacggcagagggagaaccaccagcaacaagcacgagaacacacatatccagacgactttgcctcgaacacataatcggcacacaaaggaactaacgacgagtctagaacgccaccgtgtacggctatacagccactcaactatcacttagagacacccgaacccaaaaaatcatgaaaatcactcaactactgcagacgatttaatgacacagagatgaagtgctctagcaaatataaggagagcgcaaagcggaggcagagaaaggaagcggcgggacagcagcggcagaagagcgcggagcggggcgcgcgacaagcgacgagctgggacgaggcaggaatagcagccatcaggagagcgcgggacaagtggctgagagacagcacacgcgggacaaaagcgacggaagggggagcgcgacggaggaggggcccggacaggagagggaagccc

SEQ ID NO: 6816 - DNA, 1065 bp, Homo sapiens
  misc_feature (1009)..(1039): n is a, c, g, or t
atgtcccgcctgctgcatgcagaagagtgggctgaagtgaaggagttgggagaccaccatcgccagccccagccgcatcatctcccgcaaccgccgccgccgccgcagccacctgcaactttgcaggcgagagagcatcccgtctacccgcctgagctgtccctcctggacagcaccgacccacgcgcctggctggctcccactttgcagggcatctgcacggcacgcgccgcccagtatttgctacattccccggagctgggtgcctcagaggccgctgcgccccgggacgaggtggacggccggggggagctggtaaggaggagcagcggcggtgccagcagcagcaagagccccgggccggtgaaagtgcgggaacagctgtgcaagctgaaaggcggggtggtggtagacgagctgggctgcagccgccaacgggccccttccagcaaacaggtgaatggggtgcagaagcagagacggctagcagccaacgccagggagcggcgcaggatgcatgggctgaaccacgccttcgaccagctgcgcaatgttatcccgtcgttcaacaacgacaagaagctgtccaaatatgagaccctgcagatggcccaaatctacatcaacgccttgtccgagctgctacaaacgcccagcggaggggaacagccaccgccgcctccagcctcctgcaaaagcgaccaccaccaccttcgcaccgcggcctcctatgaagggggcgcgggcaacgcgaccgcagctggggctcagcaggcttccggagggagccagcggccgaccccgcccgggagttgccggactcgcttctcagccccagcttctgcgggagggtactcggtgcagctggacgctctgcacttctcgactttcgaggacagcgccctgacagcgatgatggcgcaaaagaatttgtctccttctctccccgggagcatcttgcagccagtgcaggaggaaaacagcaaaacttcgcctcggtcccacagannnnnnnnnnnnnnnnnnnnnnnnnnnnnnnacagtgactcggatgaggcaagttag

SEQ ID NO: 6817 - DNA, 7543 bp, Homo sapiens
  misc_feature (1171)..(1210): n is a, c, g, or t
  misc_feature (2482)..(2559): n is a, c, g, or t
aaagattgctttcttctgggacgctgcttgaacgctaaccgcgttgattggaacagattttgtgtcttggctggctttgggtgaagaccggggagaaaaggttgcgctgcgattctcaagatctctggacctggattatcattgcaaatccattaaagaaggagaagcaagcggatttcagagaggttgttcttcagaaaaaaatggttatttctttgaactcatgcctgagctttatttgtttattgttatgccactggattgggacagcatcacctctgaatcttgaagaccctaatgtgtgtagccactgggaaagctactcagtgactgtgcaagagtcatacccacatccctttgatcaaatttactacacgagctgcactgacattctaaactggtttaaatgcacgcggcacagagtcagctatcggacagcctatcgacatggggagaagactatgtataggcgcaagtctcagtgttgtcctggattttatgaaagcggggaaatgtgtgtcccccactgtgctgataaatgtgtccatggtcgctgtattgctccaaacacctgtcagtgtgagcctggctggggagggaccaactgctccagtgcctgcgatggtgatcactggggtccccactgcaccagccggtgccagtgcaaaaatggggctctgtgcaaccccatcaccggggcttgccactgtgctgcgggcttccggggctggcgctgcgaggaccgctgtgagcagggcacctatggtaacgactgtcatcagagatgccagtgccagaatggagccacctgcgaccacgtcacgggggaatgccgctgcccaccaggatacaccggagccttctgtgaggatctttgtcctcctggtaaacatggtccacagtgtgagcagagatgcccttgtcaaaatggaggagtgtgtcatcacgtcactggagaatgctcttgcccttctggctggatgggcacagtgtgtggtcagccttgccccgagggtcgctttggaaagaactgttcccaagaatgccagtgccataatggagggacgtgtgatgctgccacaggccaatgtcattgcagtccaggatacacaggggaacggtgccaggatgagtgtcctgttgggacctatggcgttctctgtgctgagannnnnnnnnnnnnnnnnnnnnnnnnnnnnnnnnnnnnnnncggcgcatgcctctgtgaagcaggctttgctggcgagcgctgcgaagcacgcctgtgtcctgaggggctctacggcatcaaatgtgacaaacggtgtccctgccacttggaaaacactcatagctgtcaccccatgtctggagagtgtgcctgcaagccgggctggtcaggactctactgtaatgagacatgttctcctggattctacggggaagcttgccagcagatctgcagctgccaaaatggggcagactgtgacagtgtgactggaaagtgcacctgtgccccaggattcaaaggaattgactgctctaccccatgccctctgggaacctatgggataaactgttcctctcgctgtggctgtaaaaatgatgcagtctgctctcctgtggacgggtcttgtacttgcaaggcaggctggcacggggtggactgctccatcagatgtcccagtggcacatggggctttggctgtaacttaacatgccagtgcctcaacgggggagcctgcaacaccctggacgggacctgcacgtgtgcacctggatggcgcggggagaaatgcgaacttccctgccaggatggcacgtacgggctgaactgtgctgagcgctgcgactgcagccacgcagatggctgccaccctaccacgggccattgccgctgcctccccggatggtcaggtgtccactgtgacagcgtgtgtgctgagggacgctggggccccaactgctccctgccctgctactgtaaaaatggggcttcatgctcccctgatgatggcatctgcgagtgtgcaccaggcttccgaggcaccacttgtcagaggatctgctcccctggtttttatgggcatcgctgcagccagacatgcccacagtgcgttcacagcagcgggccctgccaccacatcaccggcctgtgtgactgcttgcctggcttcacaggcgccctctgcaatgaagtgtgtcccagtggcagatttgggaaaaactgtgcaggaatttgtacctgcaccaacaacggaacctgtaaccccattgacagatcttgtcagtgttaccccggttggattggcagtgactgctctcaaccatgtccacctgcccactggggcccaaactgcatccacacgtgcaactgccataatggagctttctgcagcgcctacgatggggaatgtaaatgcactcctggctggacagggctctactgcactcagagatgtcctctagggttttatggaaaagattgtgcactgatatgccnnnnnnnnnnnnnnnnnnnnnnnnnnnnnnnnnnnnnnnnnnnnnnnnnnnnnnnnnnnnnnnnnnnnnnnnnnnnnnagcagaagtgcccttcaggaacatatggctatggctgtcgccagatatgtgattgtctgaacaactccacctgcgaccacatcactgggacctgttactgcagccccggatggaagggagcgagatgtgatcaagctggtgttatcatagttggaaatctgaacagcttaagccgaaccagtactgctctccctgctgattcctaccagatcggggccattgcaggcatcatcattcttgtcctagttgttctcttcctactggcattgttcattatttatagacacaagcagaagggaaaggaatcaagcatgccagcagttacctacacccctgctatgagggtcgtcaatgcagattataccatttcaggaacccttcctcacagcaatggtggaaacgctaatagccactacttcaccaatcccagttaccacacgctcacccagtgtgccacatcccctcacgtcaacaacagggacaggatgactgtcacgaagtcaaaaaacaatcaactgtttgtgaatcttaaaaatgtgaaccctgggaagagaggccctgtgggggactgcactgggacattgccggctgactggaaacatggcggctacctcaacgagctcggtgcttttggacttgacagaagctatatgggaaaatccttaaaagacctgggaaagaattctgaatataattcaagtaactgctccctaagcagttctgagaacccatatgccactattaaagacccacctgtacttatcccgaaaagctcagagtgtggttatgtggagatgaaatcgccggcacgaagagattccccatatgcagagatcaataactcaacttcagccaacaggaatgtctatgaagttgaacctacagtgagtgttgtccaaggagtattcagcaataatgggcgtctctcccaggatccatatgacctcccaaagaacagtcacatcccttgtcattatgacctgctgccagtccgagacagttcatcctcccctaagcaagaggacagtggaggtagcagcagcaacagcagcagcagcagtgaatgacaccaaaggaccgcttggtagccactggaaccctttccagaactgctgtttggttcttctccatcctcaattttgccactttcatgtgaatgttagtcaattcggtgggcaatttttggacatgaaccagaaagctgaaagctgaggctgacacggactgtaggtgctttttgttcaggtggattcgaaggagttagagatgtgatttgccattgctgttagttttagaactatacccgtgaagcatgacttattgtaagatgttggctgaaagcatgaacttgcagaactccctcggagacgcaggttgcagtggacattgggattgttgcttgaaaaattaaaatttgaatattttctctctcatttgcatcatacagctctacctaggattgtacagtttaccataaaatttacttcatgaaagtgggaatcactgaacatgtagaagacaaggaacatattgttaactcctgattcttaactttattcaactggactcagaattgtagggataatatgaatgcaggaggaaacattctgtcaggcggtatgactggacagactttgaatatactctaaaagtggacagaaaatttacgaaaatcttagattttgtttagaatgagaaaatatacaattagaattattttagaaatagtaggaagtattgcagaagtcaatacacaaatgtgccaggcagaggtggttttctctgtttgactctcaaccaacttcagatctatgacattattctgatcactggctccatcatacatattcaccacttgagattcataacatatcaatagttatttcataaatatagaaatgaaataattttatttttgacagactggatggaatgagtgtgtaatgattgataaaggttgtaaattttaaatgcaagatgacgcttacgttctgtaaaccattagtaatacatgctgtaatatagaattagtggaacattttgattaatctttccctagaagtgactgaaatatttttgtgcatatttgagaaagggaactttccttttattaattgtcaatttagagaaactatgcttaagctggtcttttgcattgctaatgtgacatgtacccaacttttcattaatttgtatttccatttttaaattgcatattctatgttttgtagtgtttggattgttaatgaaaaaatattatatgttcgttattccttgtattattgccacttatcttttgcttgataaaaatgcgttgttcttttttcttttggagggacaagatgaaaatatataatttgaattgattaaaattggtcgttactaaaatagtatagtaaccacaagtgattggcttataaatgaagtagaaatgctttttaatattccaaaatagagttccttttgatctgttggtgctgagccttggttaaaccagggagaaggggagcagaaaggaaacgttgttactgatgagtaccacagactcatcttaaaaaaaactctcattatggtgatcatagaattgaccatccaaactgggacactcttgagagtaaatggagggcattattaataattatcttgtaatgaacttaaatctggactgttccaggcaaaccagacttatcttgcaatatgagaatgctgacacaatgcaggaaagccagtttcccttttgttgatctacttgaccaagcaaaggggctgaaaaactgaataaggaaacaactttataagagaaacagtggtcttcaatcttttaaagacatgaaatcctatatggcattctgtctcagtgagtcagttaacaaatacgtatgtgcaacccttctgctagtagtgcacataagtgattatccctgccaggtatcgagttggaatatccagttatttcatgtcacacatcggcacgtatgatggtggtttggtcagatggataatacagcagacacacttagaacactcactgcactggtggctgttcattttgaggaactccaaagtcaattcaaggaaataaggaatgacctggaacaggccttagaaacaattgatttattccaatagttaaccactggctggctcccaactctaggtgataggcatctaattgagacatgtgtgagtcaatagccatcggggtcctttttggtgagaagaaataagacattttctcccttttaaagatcatctcttcagagctgcatggtaaatttgaatttccccattgttctctagagataggtcaaaaaaacaactgtttcttttcttattccactattaataaattgaaagcttgctgtacaaaggcaacagcaacttaaaaaagaaaatctggacaatagatgtggactccaaggggccactgccatcccttcctgtgtgctctttttgacaagtaaatcactccagttagctgatgtcctgaaatgacatttgtacctgaggcaattcttattagagcttactcaggacttttcaaacatcaggacacacatagcaatttggatgttgtaaaactacgtgttacatttggagaggtcttgttgagaaggcaaaattttctaaatattttgatatcaatttgggtaaagaaaggaatacttttgttagaatgagaattaaagagaaaacaaaagaatcttggcaaaattttccctctgaaattacaaactttaggaacttttccagatgtatcgaatttaatttgacattgatgtcactcttcataccaagtgaatctattctcatgaactttgaacccatgttaattttggaccctataactaatttcctttctgtatcccatggtggtcaaagcagtaaaggagtttagagatacttagcaaatgccattcatatagtattgttagccaaactattattccttccttagaagttgatgtatcagaaaatttataagttatttgtatttatatataagtacatcagaacttgcccacatgataactcatgtttgctttaataaggaaaatatgttatttgaggttaattatatgatagtgaggaacattttacaattatttacagtgtttgacattaattgctgtcctatgatacagtagtaatgttaacagagagtttaatatgtttagcattatctttatggaatttatattcaccaatttcaggaaaaccaaccatagaactttataataggacagttataacctgactgaaccaaatccatcagcataatgactgtgtgttctgagaaatgcaaacaactttatgaaagtgtggtcatcttgacccccaaagagccacagtagctgtcaattattgagatttttaaatggtaaatattgcaaaagttaaacaagggtaccacaatatcatttataattgatgtcaatattagtagtccactttatgcttaaaataaaatcataaaaaatcaagttttaaggttatattttttaaaataatgaattttctatctctaggcaacatgtctttattattcaagctgaatgtttaagagagattttggtcttaaaggcttcatcatgaaagtgtacatgcatatgcaagtgtgaattacgtggtatggatggttgcttgtttattaactaaagatgtacagcaaactgcccgtttagagtcctgttaatattgatgtcctaacactgggtctgcttatgctagttcagtatttggtctaggcttcattttgatatgactgaattgcaatctatatttttaaaaagaaaaatcaaaatacattagggtttacttggttgtggcaaacaaacaaaaaatgctttcagtgttgaaatatctctattttccaaagatgataaactttcatcgttcttagcctacattgtcatttatatcaccaaatgagtttatagattaatgcaataaactttctaataaaaaaaaaaaaaaagtcgac

SEQ ID NO: 6818 - DNA, 682 bp, Homo sapiens
ttttttttttttttttttaactgtttcttatactttatttacaagagccttgccctaaggcccccaccccgcgagaacccacaaggcagggtgtaggggaattgggcagcagggccgcaagcttgaaaaggctgagttcagctttggggcatgtcggtccagggagccacagaccccagggaaaatgctcgacaacacccatacggtaacttaagtgtgcatatgtgtagggggaggatttaggggtgagggtcttgtgggtgtatgtacaggtggtccagccacaatgagactgtcagcatgccccctcattctcccaggttccaggggccacccatctaaggacgtggggatatgcgtcctcactccgcagccagcagtggccctggctgctctggatataaagtttcagctgcgaggcctgccttgcctcacctgtgctccggtccacaccaaatcaccctctcaggacccagtgcctctcacattactatctccagctcgcccctctcctgagagctccagacccttacactcagtgtcctgtcatgtcctacaaacactgccagcctaacctttccaaagagcacacgtggttctccccctacccgaacccaatctctctatctttagtctctccaccatccaaagccaaggagtcctctccctcgtgccgaattct

SEQ ID NO: 6819 - DNA, 604 bp, Homo sapiens
  misc_feature (544)..(602): n is a, c, g, or t
ctaatttgtgtccacttgaagagtttctttctttgcttttgatgctattctgtaaacaatggttccctacataattgtaatagtgttttacgttgtcacaacaccaggcaaaacccaagtgctattgcaggcttttgtaatctatcactgtcctcatccaccttatcagattcttctcttctttgtgtatgcactggtctttttaaaatctgtgatgtgtactgattgtagatttattccatactttcaagtgaatgctaataatatctaagagtaatgatttccctgagaaaactttatccatttgaatataatgaatgttcatatttcttggtgtaccaaagttataaaaaaagacagaaacaattttacatttaaaatcaatgaagtaaaacagaagatttagttaacacaattgtatttaattatttgcttaatatgtatttttaaaataacttatttgcatatgttgactaagtcatgctgttgaccctcaataaatgttaaattatgataatattctacaaaaaaaagcgaaattagnnnnnnnnnnnnnnnnnnnnnnnnnnnnnnnnnnnnnnnnnnnnnnnnnnnnnnnnnnntg

SEQ ID NO: 6820 - DNA, 474 bp, Homo sapiens
atgtttgatgtaggtggacagagatctgagagaaagaagtggattcactgctttgaaggagttacatgcattatattttgtgctgcacttagtgcctatgacatggtcctcgtggaagacgaagaagtgaatagaatgcatgaaagccttcacctgttcaacagtatctgtaatcacaagtatttttcaacaacctccattgtcctgttcctcaacaaaaaagatatctttcaagaaaaggtaaccaaggtgcatcttagtatctgctttccagaatacactgggccaaatacatttgaagatgcaggaaactacatcaagaaccagtttctagacctgaatttaaaaaaagaagataaggaaatttattcccacatgacctgtgctactgacacccaaaatgtcaagtttgtgtttgacgcagttacagatataataatcaaagagaatctaaaagactgtgggcttttctaa

SEQ ID NO: 6821 - DNA, 4721 bp, Homo sapiens
  misc_feature (1100)..(1123): n is a, c, g, or t
cccagcccaagtttttagggtggggatccagactggttatacgtaccttcagtccttctcccagaggaaggcagaaacacctcaaagcctgcatgtaagaacatctactgagaaattattttaatcagacaccagctgagtgggagaaaggaaaagaacagagaagaacaaacaaaactcccttggtcttggatgtaagagaatccagcagagatggactggagtttcttcagagtagttgcagtgctgttcatttttctggtggtggtagaagttaacagtgaattccgaatccaggtaagagattataacactaaaaatggcaccatcaaatggcattcaatccgaaggcagaaacgtgaatggatcaagttcgcagcagcctgtcgtgaaggtgaagacaactcaaagaggaacccaatcgccaaaattcactcagattgtgctgcaaaccagcaagttacataccgcatctctggagtaggaattgatcagccaccatatgggatctttgtcattaatcagaaaactggtgaaattaatataacatccatagttgatcgagaggtcactcctttcttcattatctactgccgagctctgaactcaatgggccaagatttagagaggcctctagagctcagagtcagggttttggatataaatgacaaccctccagtgttttcaatggctacatttgcaggacaaatagaagaaaattctaatgcaaatacactggtgatgatactcaatgctactgacgcagatgaaccgaacaatttgaactcaaaaatagccttcaagattataagacaagaaccttcagattcaccaatgtttattatcaacagaaatactggagaaattcgaacgatgaataattttctagacagagagcaatacggccagtatgctcttgctgtaagaggctctgaccgagatggtggggcagatggcatgtcagcggaatgtgagtgcaacattaaaatcctcgatgtcaatgataatatcccttacatggaacagtcttcatataccatagaaattcaagaaaatactctaaattcaaatttgctcgagattagagtaattgatttggnnnnnnnnnnnnnnnnnnnnnnnntggcagtaattttctttatctctggaaatgaaggaaattggtttgagatagaaatgaatgaaagaacaaatgtgggaattttaaaggttgttaagcccttagattatgaagctatgcagagtctgcaactcagtattggtgtcagaaataaagctgaatttcatcattcaattatgtctcaatataaactgaaagcatctgcaatttctgtgactgtgttaaatgtaattgaaggcccagtgtttcgtccaggttcaaagacatatgttgtaactggtaatatgggatcaaatgataaagtgggagactttgtagctactgacctggacacaggtagaccttcaacgactgttaggtatgtaatgggaaataatccagctgacctgctagctgttgattcaagaacaggcaaactcactttgaaaaataaagttaccaaggaacagtacaatatgctcggaggaaaataccaaggaacgattctctctatagatgataatcttcaaagaacttgcactggtacaattaatattaacattcaaagttttggtaatgacgacaggactaatacagagccgaacactaaaattactaccaatactggcagacaagaaagtacttcttccactaactatgataccagcacaacttctactgactctagccaagtatattcttctgaacccggaaacggagccaaagatttgttatcagacaatgtacattttggtcctgctggcattggactcctcatcatgggattcttggtcttaggattggtcccatttttgatgatctgttgtgattgtggaggtgctcctcgtagtgcagctggctttgagcctgttcccgaatgttcagatggagcaattcattcatgggcagtagaaggaccacagcctgaacccagggatataaccactgtcataccacaaataccacctgataacgcaaatataattgaatgcattgacaactcaggagtttatacaaatgagtatggtggcagagaaatgcaagatctgggaggaggagagagaatgacaggatttgaactaacagagggagttaaaacttcaggaatgcctgagatatgtcaagaatactctggaacattaagaagaaattctatgagggaatgtagagaaggaggtctgaatatgaatttcatggaaagctacttctgtcagaaagcatatgcttacgcagatgaagatgaaggacgcccatctaatgactgtttgctcatatatgacatcgaaggtgtaggttcccctgctggctctgtgggttgttgtagcttcattggagaagacctggatgacagcttcttggataccctgggacctaaatttaagaagttggcagacatcagcctaggaaaagaatcatatccagaccttgatccttcttggccaccacaaagcactgaaccagtttgccttcctcaggaaacagagcccgttgttagtggacacccaccaatctccccacatttcggcactaccacagtaatttctgagagcacctatccctcgggacctggtgtactgcatcctaagcctattctcgatcctctgggctatggtaatgtcactgtgaccgagtcttacaccacctctgacactctgaagccctctgtgcacgttcacgataaccgaccagcatcaaacgtggtagtgacagagagagtggtcggcccaatctctggcgctgatttgcatggaatgttagagatgcctgacttgcgagatgggtcgaatgttatagtgacagaaagggtaatagcaccaagctctagtctacccacctctctgactatccatcatcctagagagtcttcaaatgtggtagtgacagaaagagtaatccaaccaacttccggcatgataggtagtctgagtatgcaccccgagttagccaatgcccacaatgtcattgtgacagagagggttgtttctggtgctggcgtaactggaattagtggcaccactgggatcagcggtggcataggcagcagtggcctggttggcaccagcatgggtgctgggagcggtgccctgagtggagctggcataagtggtggtggcattggcctgagcagcttgggagggacagccagcattggccacatgaggagttcctctgaccatcactttaaccaaaccattgggtccgcctcccctagcacagctcgaagtcgaatcacaaagtatagtaccgtgcaatatagcaagtagtcaggaccccagctcactttttcatagtcattgtggtttagatccaattcccaccactaaaaaactaacaatgtgatttataacgcacaacttcgtgctcaggtcatctaggagcaaggtgagaaatcacaatgagaaaaataaatggaaacaccactgctaggggagagctctccttagcattcataaacttttctcttatattaggactaaggaactaaaacttgaggcagagtcttctttgtgcctgagtggcctgtagtccatctccagcatgtaactggccttacgatggcaattggcatcattctccttgctctgttttgcttttccatatagctcgagcaaaattcaaaaagaactaaatatgcaatatatgttcatatctatgggaaaaatctaaaatgtgtgccagatgccctgttggtttcacagataacataaataaaaattcaaccacagatttatacaagggttaaccattttttttaagtttgactacatagtcaagtccacaagccatcaagcactcctaccttaattattgcactagagaaaataaattccaaattaggaagtgtttcctaggaggaaaattccattagagagtggcaataggatgaggtttcttcagggtaaactagcaatgcctgagcctgaaccttaatgtggggcctcagttaatatccctgtggagtcaaggattcttctgattctagtgtgtgtttagtgatagatgtagtcttgacgaatattgcttactggtgaggttgaggaatatcacactcgtctttccctttaccactgtggttttgacttaagaaagcaaaactcactaagtttacttctcgaattgaagcaagtgaggcctgacatggttgtcatcactagtggcaaatgaccttccaagtaagcagatgggaactgaattgtgttttcaggttttgtttttagtaggtgatattcattcgtatccagctctttattacatagctctgaagttaaaatgatttacataggccgagctgtggacaaaaaaaaagaagcagcagcttgtagtatgcttaagctttggggaatttttttttaaggggatctaaaaaaatgtttttagaacatgtaaaatgtttaatggtgaaagttggaaaagaattcttctgtaaagtaataccatgctaattattcgcttttagtaagtaaagtagtggtgtgctttagcaaaacctctgctgccatttgtgcaggaatcaaccaggaacctttagcagaatggacaatatggtgttggataagcatgaattcatatagaaacctaattctgctagttaatctcacctctaatttttctcactagctaa

SEQ ID NO: 6822 - DNA, 1094 bp, Homo sapiens
ggtccggaatccctgccatcgtcgaccacgcgtccgcggcccgagcctccggccgcccgccgggtttgtcccgcgatccccgaccatgcccgccgacctcagcggtacttggaccctgctcagcagcgacaacttcgagggctacatgctggccctagatggagttttgctcttgttgcccaggctggagtgcaatggcgggatctcggctcaccgcaacttccgtctccccggttcaaacaattctcctgcttcagcctcctgagtagctgggattgcaggcatgccccaccacgcccagctaattttgtatttttagtagagacggggtttctccatattggtcaggctggtctccaactcccgacctcaggtattgactttgccactcgtaaaatagccaagttgctgaagccacagaaagtgattgagcagaatggggattcttttaccatccacacgaacagcagcctaaggaactactttgtgaaatttaaagttggagaagaatttgatgaagataacagaggcctggacaacagaaaatgcaagagtttggttatctgggacaatgacaggctcacctgtatccagaagggagaaaagaagaacagaggctggacccattggatcgaaggagacaaactccacctggaaatgttctgtgaaggtcaagtgtgcaaacagacattccagagagcctgatccacatccagcagcagagcccacttgtggctgcagctttatgccaaattatattgcagactgaacagacgtttatctatcccatttggcgacgaggactcgtggctggagagagccacacagcgtgtaacctgaagtcatctagattatggggaaactgctcagcttcaataaacctgtccaaatgaaaaaaaaaaaaaaaaaaggggcggcccgcctcctagaggaatcccctcccagggggccccaagtgttaccccggaaccccaagcttttttttggtaacaaagggggggtcccccaataaatggaggccgcaatttattaacccttaaggcccgttggcccggcccattttttcaaaaccatccgctggaactgggggaaaa

SEQ ID NO: 6823 - DNA, 4247 bp, Homo sapiens
  misc_feature (835)..(858): n is a, c, g, or t
  misc_feature (4195)..(4195): n is a, c, g, or t
acagcattaacatttagtgggagtgcagtgagaattgggtttaacttctggcatttctgggcttgtggcttgtggttgattttttatttactttgcaaaagtttctgataggcggagcatctagtttcaacttccttttgcagcaagttctttcctgcactaatcacaattcttggaagaggagaactggacgttgtgaacagagttagctggtaaatgtcctcttaaaagatccaaaaaatgagacttctagcaaagattatttgccttatgttatgggctatttgtgtagcagaagattgcaatgaacttcctccaagaagaaatacagaaattctgacaggttcctggtctgaccaaacatatccagaaggcacccaggctatctataaatgccgccctggatatagatctcttggaaatgtaataatggtatgcaggaagggagaatgggttgctcttaatccattaaggaaatgtcagaaaaggccctgtggacatcctggagatactccttttggtacttttacccttacaggaggaaatgtgtttgaatatggtgtaaaagctgtgtatacatgtaatgaggggtatcaattgctaggtgagattaattaccgtgaatgtgacacagatggatggaccaatgatattcctatatgtgaagttgtgaagtgtttaccagtgacagcaccagagaatggaaaaattgtcagtagtgcaatggaaccagatcgggaataccattttggacaagcagtacggtttgtatgtaactcaggctacaagattgaaggagatgaagaaatgcattgttcagacgatggtttttggnnnnnnnnnnnnnnnnnnnnnnnngaaatttcatgcaaatccccagatgttataaatggatctcctatatctcagaagattatttataaggagaatgaacgatttcaatataaatgtaacatgggttatgaatacagtgaaagaggagatgctgtatgcactgaatctggatggcgtccgttgccttcatgtgaagaaaaatcatgtgataatccttatattccaaatggtgactactcacctttaaggattaaacacagaactggagatgaaatcacgtaccagtgtagaaatggtttttatcctgcaacccggggaaatacagccaaatgcacaagtactggctggatacctgctccgagatgtaccttgaaaccttgtgattatccagacattaaacatggaggtctatatcatgagaatatgcgtagaccatactttccagtagctgtaggaaaatattactcctattactgtgatgaacattttgagactccgtcaggaagttactgggatcacattcattgcacacaagatggatggtcgccagcagtaccatgcctcagaaaatgttattttccttatttggaaaatggatataatcaaaatcatggaagaaagtttgtacagggtaaatctatagacgttgcctgccatcctggctacgctcttccaaaagcgcagaccacagttacatgtatggagaatggctggtctcctactaccaggatggcatccgtggtcagctttaccctctggaagttctggatcgaagagaatgggtttatttctgaatctcagtatacatatgccttaaaagaaaaagcgaaatatcaatgcaaactaggatatgtaacagcagatggtgaaacatcaggatcaattagatgtgggaaagatggatggtcagctcaacccacgtgcattaaatcttgtgatatcccagtatttatgaatgccagaactaaaaatgacttcacatggtttaagctgaatgacacattggactatgaatgccatgatggttatgaaagcaatactggaagcaccactggttccatagtgtgtggttacaatggttggtctgatttacccatatgttatgaaagagaatgcgaacttcctaaaatagatgtacacttagttcctgatcgcaagaaagaccagtataaagttggagaggtgttgaaattctcctgcaaaccaggatttacaatagttggacctaattccgttcagtgctaccactttggattgtctcctgacctcccaatatgtaaagagcaagtacaatcatgtggtccacctcctgaactcctcaatgggaatgttaaggaaaaaacgaaagaagaatatggacacagtgaagtggtggaatattattgcaatcctagatttctaatgaagggacctaataaaattcaatgtgttgatggagagtggacaactttaccagtgtgtattgtggaggagagtacctgtggagatatacctgaacttgaacatggctgggcccagctttcttcccctccttattactatggagattcagtggaattcaattgctcagaatcatttacaatgattggacacagatcaattacgtgtattcatggagtatggacccaacttccccagtgtgtggcaatagataaacttaagaagtgcaaatcatcaaatttaattatacttgaggaacatttaaaaaacaagaaggaattcgatcataattctaacataaggtacagatgtagaggaaaagaaggatggatacacacagtctgcataaatggaagatgggatccagaagtgaactgctcaatggcacaaatacaattatgcccacctccacctcagattcccaattctcacaatatgacaaccacactgaattatcgggatggagaaaaagtatctgttctttgccaagaaaattatctaattcaggaaggagaagaaattacatgcaaagatggaagatggcagtcaataccactctgtgttgaaaaaattccatgttcacaaccacctcagatagaacacggaaccattaattcatccaggtcttcacaagaaagttatgcacatgggactaaattgagttatacttgtgagggtggtttcaggatatctgaagaaaatgaaacaacatgctacatgggaaaatggagttctccacctcagtgtgaaggccttccttgtaaatctccacctgagatttctcatggtgttgtagctcacatgtcagacagttatcagtatggagaagaagttacgtacaaatgttttgaaggttttggaattgatgggcctgcaattgcaaaatgcttaggagaaaaatggtctcaccctccatcatgcataaaaacagattgtctcagtttacctagctttgaaaatgccatacccatgggagagaagaaggatgtgtataaggcgggtgagcaagtgacttacacttgtgcaacatattacaaaatggatggagccagtaatgtaacatgcattaatagcagatggacaggaaggccaacatgcagagacacctcctgtgtgaatccgcccacagtacaaaatgcttatatagtgtcgagacagatgagtaaatatccatctggtgagagagtacgttatcaatgtaggagcccttatgaaatgtttggggatgaagaagtgatgtgtttaaatggaaactggacggaaccacctcaatgcaaagattctacaggaaaatgtgggccccctccacctattgacaatggggacattacttcattcccgttgtcagtatatgctccagcttcatcagttgagtaccaatgccagaacttgtatcaacttgagggtaacaagcgaataacatgtagaaatggacaatggtcagaaccaccaaaatgcttacatccgtgtgtaatatcccgagaaattatggaaaattataacatagcattaaggtggacagccaaacagaagctttattcgagaacaggtgaatcagttgaatttgtgtgtaaacggggatatcgtctttcatcacgttctcacacattgcgaacaacatgttgggatgggaaactggagtatccaacttgtgcaaaaagatagaatcaatcataaagtgcacacctttattcagaactttagtattaaatcagttctcaatttcattttttatgtattgttttactcctttttattcatacgtaaaattttggattaatttgtgaaaatgtaattataagctgagaccggtggctctcttcttaaaagcaccatattaaatcctggaaaactggaaaactaaaaaaaaaactcgaggggcgggcaagaagacgttcaacgacgggctaccgcatagggngaggggagaggagactaggaagggatagggcgtgaggaaaggagatatagag

SEQ ID NO: 6824 - DNA, 1904 bp, Homo sapiens
  misc_feature (366)..(369): n is a, c, g, or t
ttggcgtgctgcagggcgcggtgcactgcgccgccaccgtcaataggtggaccccctcccggagataaaaccgccggcgccggcgccgccagtccctctggctgagacctcggctccggaatcactgcagcccccctcgccctgagccagagcaccccgggtcccgccagcccctcacactcccagcaaaatgggcaaggagaagacccacatcaacatcgtggtcatcggccacgtggactccggaaagtccaccaccacgggccacctcatctacaaatgcggaggtattgacaaaaggaccattgagaagttcgagaaggaggcggctgagatggggaagggatccttcaagtatgcctgggnnnntggacaagctgaaggcggaacgtgagccgggcatcaccatcgacatctccctctggaagttcgagaccaccaagtactacatcaccatcatcgatgcccccggccaccgcgacttcatcaagaacatgatcacgggtacatcccaggcggactgcgcagtgctgatcgtggcggcgggcgtgggcgagttcgaggcgggcatctccaagaatgggcagacgcgggagcatgccctgctggcctacacgctgggtgtgaagcagctcatcgtgggcgtgaacaaaatggactccacagagccggcctacagcgagaagcgctacgacgagatcgtcaaggaagtcagcgcctacatcaagaagatcggctacaacccggccaccgtgccctttgtgcccatctccggctggcacggcgacaacatgctggagccctcccccaacatgccgtggttcaagggctggaaggtggagcgtaaggagggcaacgcaagcggcgtgtccctgctggaggccctggacaccatcctgccccccacgcgccccacggacaagcccctgcgcctgccgctgcaggacgtgtacaagattggcggcattggcacggtgcccgtgggccgggtggagaccggcatcctgcggccgggcatggtggtgacctttgcgccagtgaacatcaccactgaggtgaagtcagtggagatgcaccacgaggctctgagcgaagctctgcccggcgacaacgtcggcttcaatgtgaagaacgtgtcggtgaaggacatccggcggggcaacgtgtgtggggacagcaagtctgacccgccgcaggaggctgctcagttcacctcccaggtcatcatcctgaaccacccggggcagattagcgccggctactccccggtcatcgactgccacacagcccacatcgcctgcaagtttgcggagctgaaggagaagattgaccggcgctctggcaagaagctggaggacaaccccaagtccctgaagtctggagacgcggccatcgtggagatggtgccgggaaagcccatgtgtgtggagagcttctcccagtacccgcctctcggccgcttcgccgtgcgcgacatgaggcagacggtggccgtaggcgtcatcaagaacgtggagaagaagagcggcggcgccggcaaggtcaccaagtcggcgcagaaggcgcagaaggcgggcaagtgaagcgcgggcgcccgcggcgcgaccctccccggcggcgccgcgctccgaaccccggcccggcccccgccccgcccccgccccgcgcgccgctccggcgccccgcacccccgccaggcgcatgtctgcacctccgcttgccagaggccctcggtcagcgactggatgctcgccatcaaggtccagtggaagttcttcaagaggaaaggcgcccccgccccaggcttccgcgcccagcgctcgccacgctcagtgcccgttttaccaataaactgagcgaccccaaaaaaaaaaaaaaaaaaaaaaaaaaaaaaaaaaaaaaaa

SEQ ID NO: 6825 - DNA, 545 bp, Homo sapiens
gcaaatgtctctgtcttctatgtgatacattctgctgtttttttctctatggtgaaaatatgtaaaccggttttgggtaccaaccaccaggctgtatatggaggctctcctcctttctaaccctgctgctgatttggaattaccttgccaagcccctttgtgccttatagtgaactttctctaagggacctgtcatctcttatcattgtttatccattttctagattctgaacccaagaaagaacaaagttcaagattttccatgtctttgtaacacttagccctgtgcaaatcagagtatgtgagtggaagaaggggtgagtcctaactgtacatctcggatataacaaatgtgcaaattctgattgattgccctgtaaaatgaattattctcatgcagtgctctacttgacttttatctttgaattcacaactaaaaacccatagcccagaaatctaaaaaaagtaattttagtggagcctttgaaaataaaagaccattggaaaaagtaaaaaaaaaaaaaaaaaaaaaaaagtccctcgtg

SEQ ID NO: 6826 - DNA, 481 bp, Homo sapiens
  misc_feature (449)..(449): n is a, c, g, or t
agttttttttttttttttttgcatatggacatacaattgttctagaatcatttgttgaaaaggttgtccattctccacagaattacctttctaaatctgtcaaaaaccagttgtccataaatatgtgggtctatgtgcggacactattgtaccatgcatctatttgtttaccattaaggaaatacaatcctgtcctgatttctgaggctttgtaatagatctgaaattaggtggtgttaaccatcccacatttcctttctattctaacatccttgtggtttttcttgatattttgcattcccatatgaactttaggatcagtttgtccatctctatgataaaagacatcagggatttacaatgagattgtgctgaatgtatacatccacttgggggagaactgggcatcttaacaacattaaggtcttccactggaacactgtgtatgngtctctccacctacttaggttcttggattaat

SEQ ID NO: 6827 - DNA, 1484 bp, Homo sapiens
  misc_feature (1113)..(1135): n is a, c, g, or t
ggcaattagcccaggacccacagcggggcggtccgcacgcacctcggtaacatcacagcaggtccaggccaatgataaccttataagaggccatgtcgaagcgcgacatcgtcctcaccaatgtcaccgttgtccagttgctgcgacagccgtgcccggtgaccagagcaccgcccccacctgagcctaaggctgaagtagagccccagccacaaccagagcccacaccagtcagggaggaaataaagccaccaccgccaccactgcctcctcaccccgctactcctcctcctaagatggtgtctgtggcccgggagctgactgtgggcatcaatggatttggacgcatcggtcgcctggtcctgcgcgcctgcatggagaagggtgttaaggtggtggctgtgaatgatccattcattgacccggaatacatggtgtacatgtttaagtatgactccacccacggccgatacaagggaagtgtggaattcaggaatggacaactggtcgtggacaaccatgagatctctgtctaccagtgcaaagagcccaaacagatcccctggagggctgtcgggagcccctacgtggtggagtccacaggcgtgtacctctccatacaggcagcttcggaccacatctctgcaggtgctcaacgtgtggtcatctccgcgccctcaccggatgcaccaatgttcgtcatgggtgtcaatgaaaatgactataaccctggctccatgaacattgtgagcaacgcgtcctgcaccaccaactgtttggctcccctcgccaaagtcatccacgagcgatttgggatcgtggaagggttgatgaccacagtccattcctacacggccacccagaagacagtggacgggccatcaaggaaggcctggcgagatgggcggggtgcccaccagaacatcatcccagcctccactggggctgcgaaagctgtgaccaaagtcatcccagagctcaaagggaagctgacagggatggcgttccgggtaccaaccccggatgtgtcttgccgtggacctgacctgcccgcctcggccagccttgccctaatcaagcatcaaaggaggctgtaaaagcagcagcaagggnnnnnnnnnnnnnnnnnnnnnnntacaccagaggatgaggtcgtctctacggacttcctcggtgatacccactcgtccatcttcgatgctaaggccggcattgcgctcaatgacaatttcgtgaagctcatttcatggtacgacaacgaatatggctacagtcaccgggtggtcgacctcctccgctacatgttcagccgagacaagtgaaacgggaaggtcctttctttccttcccaggggccggggccggaacatgtgcctcccgttccagcatctggctgcccgggggaggaaggacacccggggcgggcgccccacgccgatgggtccatggtgaaataaaaaacagtgctcgaaaaaaaaaaaaaaa

SEQ ID NO: 6828 - DNA, 1017 bp, Homo sapiens
atgatggccatgaactccaagcagcctttcggcatgcacccggtgctgcaagaacccaaattctccagtctgcactctggctccgaggctatgcgccgagtctgtctcccagccccgcagctgcagggtaatatatttggaagctttgatgagagcctgctggcacgcgccgaagctctggcggcggtggatatcgtctcccacggcaagaaccatccgttcaagcccgacgccacctaccataccatgagcagcgtgccctgcacgtccacttcgtccaccgtgcccatctcccacccagctgcgctcacctcacaccctcaccacgccgtgcaccagggcctcgaaggcgacctgctggagcacatctcgcccacgctgagtgtgagcggcctgggcgctccggaacactcggtgatgcccgcacagatccatccacaccacctgggcgccatgggccacctgcaccaggccatgggcatgagtcacccgcacaccgtggcccctcatagcgccatgcctgcatgcctcagcgacgtggagtcagacccgcgcgagctggaagccttcgccgagcgcttcaagcagcggcgcatcaagctgggggtgacccaggcggacgtgggcgcggctctggctaatctcaagatccccggcgtgggctcgctgagccaaagcaccatctgcaggttcgagtctctcactctctcgcacaacaacatgatcgctctcaagccggtgctccaggcctggttggaggaggccgaggccgcctaccgagagaagaacagcaagccagagctcttcaacggcagcgaacggaagcgcaaacgcacgtccatcgcggcgccggagaagcgttcactcgaggcctatttcgctatccagccacgtccttcatctgagaagatcgcggccatcgctgagaaactggaccttaaaaagaacgtggtgagagtctggttctgcaaccagagacagaaacagaaacgaatgaagtattcggctgtccactga

SEQ ID NO: 6829 - DNA, 3215 bp, Homo sapiens
  misc_feature (1442)..(1464): n is a, c, g, or t
  misc_feature (1934)..(2005): n is a, c, g, or t
  misc_feature (2549)..(2559): n is a, c, g, or t
  misc_feature (2561)..(2576): n is a, c, g, or t
agcggagttttttccaggatggatggaaagaaggaaggaaggatggatggatggatgaatgaatgagcgggtgagcggatggatggatggattgatggatggatggatagatgggccagagactgggaacggtaatgccggccagacgggtccgagcgcctcgggagccccagccctcctccggctgcggggccgctgctcctgctcccgggccgtcacggagccctgagggagggggcgggcgagcgggggccttggggcggccagggcgctgggagggaggactgggcggtggggaccggaggggagggagggcttcggaggcggagaggagggacgggctgggagagggcccggactaggggcggcgggcaccgcaggagctccgcgcggctgcagcgcgggcgggagcggggacgcgatgtcgccgccgccgcctccttgcgggccggggctgcgcctccggggctgagccgccgccagagccgacagccgagcagccgctgggcgctcccgcggcgcaggaggatgggctgcggcgggagccgggcggatgccatcgagccccgctactacgagagctggacccgggagacagaatccacctggctcacctacaccgactcggacgcgccgcccagcgccgccgccccggacagcggccccgaagcgggcggcctgcactcgggcatgctggaagatggactgccctccaatggtgtgccccgatctacagccccaggtggaatacccaacccagagaagaagacgaactgtgagacccagtgcccaaatccccagagcctcagctcaggccctctgacccagaaacagaatggccttcagaccacagaggctaaaagagatgctaagagaatgcctgcaaaagaagtcaccattaatgtaacagatagcatccaacagatggacagaagtcgaagaatcacaaagaactgtgtcaactagcagagagtccaagcagaagggcagatggacttcttcagtgtccttcacggcactggatcccatcaaagaaccttgaagaagtggctgccccttgctggacctgaattctactgagtccctggcaagactgtcttacctggcagcaaactgctgcctgatttgttgggaccttctgagccttctacttatcatgtaaatgtattggcacagtgcttacatatgttaataaactgcaaatgtgcagttcagtttgtctctttgcaactcctgtaatacggtctggtgtaaaagtagtgagttaaagctacaggtcagtttatgaaacagaaaagtaggaatgcattttctgggtgaaagagtcacaccttagtgctataactctcctgcccatgatagtgtattctgtttcaggcaagcttattctttccttccttcattttaaatattgtcattacaaatcttaccaggttcacttnnnnnnnnnnnnnnnnnnnnnnncaactctaaacccacatattgaaaaaatcaaggtacaggaaaactccttgttatccttgtttccttagcttggtatgagacagatcggatccagtttcccatgcaccaacccactgcccatggcatgtctttgggaggtgtctgtgaagcagtcatacctgctcctcatctgcctggaaagtcctcctattccagtgtccatgttggcctccagtccttaatgtcaccatgcttgtggccaatgcatccaaataaggatacccctcagggctcagctagacattgcaattttgcatagctttccagttccctttgcttgtcttcttgactgtcttccctctctaccggggtcacttgcaattgttaatcaaagattgaacactgcgtaggagagggagatgatccagagacatgtggcagcaggcatggcttccccttggcctctctgtacactgccccaggactgtcannnnnnnnnnnnnnnnnnnnnnnnnnnnnnnnnnnnnnnnnnnnnnnnnnnnnnnnnnnnnnnnnnnnnnnnacattagattgatgtgcactgcattagaaatgaggtagctgacacagaaaaaggatgttttgataggaataattttctagtatgtcttgaaacatgttcatctggaagtattttcctccaaagtaatgtagcatgatttttcaaggattgttaacatgcctgggattgggaaagataggactaaagttgtgccaaactatatcaataaattccatgtttagcagaaataggcagcctattggtgttatgtttatgtaacatagtccagagaactgacatgcaggtcaaaagtcagatacgcaacctccttatctgctaactctgttattcttcaaacacaagtgggtagtgtcatttttccttccttccttccattggcagattgtatatttattcacaaaacattaaatgtccatcctgtgccaggtactatgcagatgttgagggatttggggtctggttagtcgtgactatctatcctgaatctaacagtgacttcataactaggagactgaattagacccttaaggtatagtgtgtgttnnnnnnnnnnntnnnnnnnnnnnnnnnntattcagggtaggtttgtgtcttaaactaggtgttctaatcaatgtacaagactttaccatacacgcaactatagtttttctaaaccttcatcattttgtgattctttgagaaagggcttttaggaactttatgttctaaaaaatgtttttaacaataataagataaaagaaaaacctgtgattcatatgtccccactggcattactcagcaggagcccccagctgccaaaggttggcagtgatcctgcaagttcaagggctctttctccctggggatgtgctttgtggcttctctttacagctttgtttctgcatcagttcactgctgcatgttgtttggaatttatcaccttaagaaagtgtctctgttttatatagaaacactttctcacttacaggggagaaggaaatgcagggcacatgatctggccctccccagaacaatctggatttcacggagacagcaaccagaagttaaaccatgtgactaaaaatgcatctggctactttttcatgtatgtatgagacagaaactaatccttactatcctattaggataccacttttcattgcaaagtttgtgtcaataaagtcattaattttaaacataaaaaaaaaaaaaaaaaaaaaaaaaaaaa

SEQ ID NO: 6830 - DNA, 551 bp, Homo sapiens
actgcaacctcctcttcccaggttcaagtaagtctcctgcctcagtgtcccaagtagctgggattacaggagtgaaccactgtgcccagcctttattctgtttccaatgtggcttttaatcctgtgataattttagttttctcttccactactttcctgtgtgctctgccagctgatgttatattttctctttgccatgccttattttacccaatcctctatatctctgcttgaagttctgtattttcttaagttctttgaactcacagtggtaggactgacaattatttttcaaccaagctaaaaacatctttttagtatgggtactttatctgccacttattttccatttccccccatcctttctaatagcatctttctacagctattgtgctgattccatttgttttgtttttttggttttgagatgggggtctcgctctgtcacccagcgggagttcagtggcaagatcttggctcactgcagccttgacctcctgggctcaagtgatctacctgcatccacctcccaagtgcagtacactcaagca

SEQ ID NO: 6831 - DNA, 2395 bp, Homo sapiens
  misc_feature (1273)..(1273): n is a, c, g, or t
agcggagtatccgagagaggcgcgggcgggtggccgggggcgccgccggccccgccatggagctccgggcccgaggctggtggctgctatgtgcggccgcagcgctggtcgcctgcgcccgcggggacccggccagcaagagccggagctgcggcgaggtccgccagatctacggagccaagggcttcagcctgagcgacgtgccccaggcggagatctcgggtgagcacctgcggatctgtccccatgtccgtacacctgctgcaccagcgagatgtaggagaacctggccaaccgcagccatgccgagctggagaccgcgctccgggacagcagccgcgtcctgcaggccatgcttgccacccagctgcgcagcttcgatgaccacttccagcacctgctgaacgactcggagcggacgctgcaggccaccttccccggcgccttcggagagctgtacacgcagaacgcgagggccttccgggacctgtactcagagctgcgcctgtactaccgcggtgccaacctgcacctggaggagacgctggccgagttctgggcccgcctgctcgagcgcctcttcaagcagctgcacccccagctgctgctgcctgatgactacctggactgcctgggcaagcaggccgaggcgctgcggcccttcggggaggccccgagagagctgcgcctgcgggccacccgtgccttcgtggctgctcgctcctttgtgcagggcctgggcgtggcagcgacgtggtccggaaagtggctcaggtccccctgggcccggagtgctcgagagctgtcatgaagctggtctactgtgctcactgcgtgggagtccccggcgccaggccctgccctgactattgccgaaattgtgctcaagggctgccttgcaaccaggccgacctggacgccgagtggaggaacctcctggactccatggtgctcatcaccgacaagttctggggtacatcgggtgtggagagtgtcatcggcagcgtgcacacgtggctggcggaggccatcaacgccctccaggacaacagggacacgctcacggccaaggtcatccagggctgcgggaaccccaaggtcaacccccagggccctgggcctgaggagaagcggcgccggggcaagctggccccgcgggagaggccaccttcaggcacgctggagaatctggtctttgaagtaaaggccataatcctcgacgtccagaacttattgatcagcttccaagggacactgtgcagtgagaagatgnccttgagaactgcaagtgatgaccgctgatggaacgggatggctcagaggccggtacctcccagaggtcatgggtgacggccttgctaactagatcaacaaccccgaggtggaggtggacatcagggagccggacatggagggtctgggggcagctgtcctgaaccgactgaccctgaggaggccgcttagtgctgctttgcttttcatcaccgtcccgcacagtggacggaggtccccggttgctggtcaggtccccatggcttgttctctggaacctgactttagatgttttgggatcaggagcccccaacacaggcaagtccaccccataataaccctgccagtgccagggtgggctggggactctggcacagtgatgccgggcgccaggacagcagcactcccgctgcacacagacggcctaggggtggcgctcagaccccaccctacgctcatctctggaaggggcagccctgagtggtcactggtcagggcagtggccaagcctgctgtgtccttcctccacaaggtccccccaccgctcagtgtcagcgggtgacgtgtgttcttttgagtccttgtatgaataaaaggctggaaacctaaaaaaaaaaaaaaaaaacccaacaaacacgtcgaggggcactccaacgtccccgcgcgtgcggcgccaacacccgcggctcccgcgacaactggccccagtggacaccagcgcgggacccggtgaaccacagagctccagtggcccacaagcggggagagaacctaggcgacggcaccacactagaacgcggacgcgagaagaagacgagctacgcacgaacaaagcacagcggctaaaacccgtgacataccatgcagcagagcagacaaaacagcggacccacccacaccccgcgcgccgcaaccagagagccagcgacgagcgacgccgacacgcggccaggacgcggcggagcggcggcggcgcggcggccgcgagaggcacgccgcagaggcagaccgggcgacgggcgcgacgcggcagaggcgcagccgaggacaagccgagcacgcacccgacgcacgccagacgagcgcaaccggcagcgacaaggagcgacagcgagacgccctg

SEQ ID NO: 6832 - DNA, 1002 bp, Homo sapiens
  misc_feature (957)..(971): n is a, c, g, or t
atgcaggccgctgggcacccagagccccttgacagcaggggctccttctccctccccacgatgggtgccaacgtctctcaggacaatggcactggccacaatgccaccttctccgagccactgccgttcctctatgtgctcctgcccgccgtgtactccgggatctgtgctgtggggctgactggcaacacggccgtcatccttgtaatcctaagggcgcccaagatgaagacggtgaccaacgtgttcatcctgaacctggccgtcgccgacgggctcttcacgctggtactgcccgtcaacatcgcggagcacctgctgcagtactggcccttcggggagctgctctgcaagctggtgctggccgtcgaccactacaacatcttctccagcatctacttcctagccgtgatgagcgtggaccgatacctggtggtgctggccaccgtgaggtcccgccacatgccctggcgcacctaccggggggcgaaggtcgccagcctgtgtgtctggctgggcgtcacggtcctggttctgcccttcttctctttcgctggcgtctacagcaacgagctgcaggtcccaagctgtgggctgagcttcccgtggcccgagcgggtctggttcaaggccagccgtgtctacactttggtcctgggcttcgtgctgcccgtgtgcaccatctgtgtgctctacacagacctcctgcgcaggctgcgggccgtgcggctccgctctggagccaaggctctaggcaaggccaggcggaaggtgaccgtcctggtcctcgtcgtgctggccgtgtgcctcctctgctggacgcccttccacctggcctctgtcgtggccctgaccacggacctgccccagaccccactggtcatcagtatgtcctacgtcatcaccagcctcacgtacgccaactcgtgcctgaaccccttcctctacgcctttctnnnnnnnnnnnnnnngaagaacttccgcagcatattgcggtgctga

SEQ ID NO: 6833 - DNA, 4153 bp, Homo sapiens; identical to SEQ ID NO: 5810
  misc_feature (2451)..(2467): n is a, c, g, or t

SEQ ID NO: 6834 - DNA, 2921 bp, Homo sapiens
agcgggagattgtttggtactgttttctctctgggcacctctcatttcggaaggccatcagaggcgcccactactgagcggccccggccgccgcagcagcacccggagccccagtcccggtttccccgcggtgccggagcccggagctcgccgccgcccatttttttttaattcctgaggggtggttgctgcttttgctacatgacttgccagcgcccgagcctgcggtccaactgcgctgctgccggagcgctcagtgccgccgctgccgcccgcgccccccgcgccccgttcggcacccaccggtcgccgccccgcccgcgcgccgctgtcccgctcccgcgccgccgccgccgtttccccccgacgactgggtgatgctggacatgggagataggaaagaggtgaaaatgatccccaagtcctcgttcagcatcaacagcctggtgcccgagggcctccagaacgacaaccaccacgcgagccacggccaccacaacagccaccacccccagcaccaccaccaccaccaccaccatcaccaccacccgccgccgcccgccccgcaaccgccgccgccccgagccgcgcagcagcagcagccgccgccgccgccgatcgacgcgcaggccggcggcgccgcgcaatcgacgacgaaaagggcccccagcagctgctgctcccgccgacgcgacccaccaccggccgccgtccggagggctaacggcagctggcggaaggctgaccggcgcggcctggggagctggggcccgtcgggccggacgagaaggagaagggcgccggcgccgggggggaggagaagaagggggcgggcgagggcggcaaggacggggaggggggcaaggagggcgagaagaagaacggcaagtacgagaagccgccgttcagctacaacgcgctcatcatgatggccatccggcagagccccgagaagcgcctcacgctcaacggcatctacgagttcatcatgaagaacttcccttactaccgcgagaacaagcagggctggcagaactccatccgccacaatctgtccctcaacaagtgcttcgtgaaggtgccgcgccactacgacgacccgggcaagggcaactactggatgctggacccgtcgagcgacgacgtgttcatcggcggcaccacgggcaagctgcggcgccgctccaccacctcgccggccaagctggccttcaagcgcggtgccgcgctcacctccaccggcctcaccttcatggaccgcgccggctccctctactggcccatgtcgcccttcctgtccctgcaccaccctcgcgccagcagcactttgagttacaacgggaccacgtcggcctaccccagccaccccatgccctacagctccgtgttgactcaaaactcgctgggcaacaaccactccttctccaccgccaacgggctgagcgtggaccggctggtcaacggggagatcccgtacgccacgcaccacctcacggccgccgcgctagccgcctcggtgccctgcggcctgtcggtgccctgctctgggacctactccctcaacccctgctccgtcaacctgctcgcgggccagaccagttactttttcccccacgtcccgcacccgtcaatgacttcgcagagcagcacgtccatgagcgccagggccgcgtcctcctccacgtcgccgccagccccctcgacccctgccctgtgagtctttaagaccctctttgccaagttttacgacgggactgtctgggggactgtctgattatttcacacatcaaaatcaggggtcttcttccaaccctttaatacattaacatccctgggaccagactgtaagtgaacgttttacacacatttgcattgtaaatgataattaaaaaaataagtccaggtattttttattaagcccccccctcccatttctgtacgtttgttcagtctctagggttgtttattattctaacaaggtgtggagtgtcagcgaggtgcaatgtggggagaatacattgtagaatataaggtttggaagtcaaattatagtagaatgtgtatctaaatagtgactgctttgccatttcattcaaacctgacaagtctatctctaagagccgccagatttccatgtgtgcagtattataagttatcatggaactatatggtggacgcagaccttgagaacaacctaaattatggggagaattttaaaatgttaaactgtaatttgtatttaaaaagcattcgtagtaaaggtgcccaagaaattattttggccatttattgttttctccttttctttaaagaactgtttttttttcttttgtttacttttagaccaaagattgggttctagaaaatgcgccttggtatactaagtattaaaacaaacaaaaaggaaagttgtttcagttggcaacgctgcccattcaattgaatcagaaggggacaaaattaacgattgccttcagtttgtgttgtgtatattttgatgtatgtggtcactaacaggtcacttttattttttctaaatgtagtgaaatgttaatacctattgtacttataggtaaaccttgcaaatatgtaacctgtgttgcgcaaatgccgcataaatttgagtgattgttaatgttgtcttaaaatttcttgattgtgatactgtggtcatatgcccgtgtttgtcacttacaaaaatgtttactatgaacacacataaataaaaaataggctaaattcataaaaaaaaaaaaaaaactcgagttttttttttttttttttcaatctgaatcgctttcactttaatcaacctctggatgaaggcatcatacaacgttttccttagagaaaccccattctttatcggcagggacacaaagacccacaggccccagttttcgtccgagctcatcatgccc

SEQ ID NO: 6835 - DNA, 1351 bp, Homo sapiens
ggcgcccgcgggcagagcgaatcccgtcccgcgcctcctcaccctcttgcagctgggcacaggtaccaggtgtggctcttgcgaggtgcgcgggcgtctgcaaaccaggtgacagctggcgagtggctgcatgcatctctggccgctgctgcagtcgcgggcgcagaagagggtccggtcccaggaaccccgagcaaagcttccgcgatgcgaggggaccgggcttctgggggtcctggaaatcacaacgggagctgggcgcgggaggggcccaggcttggcccctcctggaagcgcgggctctggtctccgaggggaggccccaaccgtctatgcaggagccctcatcaggcccctgacatttatgggatcacagactaagcgagtcctgttcaccccgctcatgcatccagctcgccctttccgggtctccaaccatgacaggagcagccggcgtggggtgatggcaagcagcctgcaggagctcatcagcaagactctggatgccctcgtcatcgctaccggactggtcactctggtgctggaggaagatggcaccgtggtggacacagaagagttctttcagaccttgggagacaacacgcatttcatgatcttggaaaaaggacagaagtggatgccgggcagccagcacgtccccacttgctcgccgccgaagaggtcgggaatagcgagagtcaccttcgactgtacagggctgaaccccaaggacttcatcggctgcccttaacgtgaagggccaccatgtatgagatgtactccgtgtcctacgacatccggtgcacgggactcaagggcctgctgaggagtctgctgcggttcctgtcctactccgcccaggtgacgggacagtttctcatctatctgggcacatacatgctccgggtgctggatgacaaggaagagcggccatccctccggtcacaagccaagggcaggttcacgtgtggatagggatgcaggctgtcgccggctcttgagccaaacactgtgtttcgtttggctcaatgacgaatgttgaagatgcttttatgttctgagccacatgcacttggaggccgctggtcacgctgctcaggagtggtgcccagaaaaggaaagggcttggtggtacatgaagtgggggcagtgggcagggtgccctgggggggaggcatagagggccctgggggtcatgggaagcgagcacgcagcaggcgtgcccatcgttgtgccttgtgtcagaagccatttgggtccatcattctcctgcaataaacccatcgcaagaatgaccttcaaaaaaaaaaaaaaaaaaaaaaaaaaaaaaaaaaaaaaaaaaaaaaaaaaa

SEQ ID NO: 6836 - DNA, 3528 bp, Homo sapiens
  misc_feature (2955)..(2974): n is a, c, g, or t
aggcgcagtcccgcgttccctcggcggctgccggcgtagtgagcccgccgccgtggagtgtagcggaaagggctcgccgtcctcctccgtttctcgctgcttcgggacgcgctctctgcggctctgtgagcgcccctgagcgccggcagcggccgcggtgggttcttcaggttatcttatgatgaggcttttgctatggctaatgatcccttggaaggcttccatgaagtaaaccttgcttcacctacttctccggaccttcttggtgtgtatgaatcaggaactcaagagcagactacctcaccaagtgtcatctaccggccacacccttcagctttatcctctgtacctatccaggcaaatgcattagatgtttctgaacttcctacacaacccgtgtattcatcccccagacgtttaaattgtgcggaaatatctagtatcagctttcatgttacagacccagccccttgctctacctctggagtcacagctggattaactaaattaactacaagaaaggacaactataatgcagagagagagtttttacagggtgctactataacagaggcttgcgatggcagtgatgatatttttgggttgagtactgatagtctgtctcgtttacgaagcccatctgttttggaagttagagaaaagggctatgaacgattaaaagaagaactcgcaaaagctcagagggaactgaagttaaaagatgaagaatgtgagaggctttcaaaagtgcgagatcaacttggacaggaattggaagaactcacagctagtctatttgaggaagctcataaaatggtgagagaagcaaatatcaagcaggcaacagcagaaaaacagctaaaagaagcacaaggaaaaattgatgtacttcaagctgaagtagctgcattgaagacacttgtattgtccagttctccaacatcacctacgcaggagcctttgccaggtggaaagacaccttttaaaaaggggcatacaagaaataaaagcacaagcagtgctatgagtggcagtcatcaggacctcagtgtgatacagccaattgtaaaagactgcaaagaggctgacttatccttgtataatgaattccgattgtggaaggatgagcccacaatggacaggacgtgtcctttcttagacaaaatctaccaggaagatatctttccatgtttaacattctcaaaaagtgagttggcttcagctgttctggaggctgtggaaaacaatactctaagcattgaaccagtgggattacaacctatccggtttgtgaaagcttctgcagttgaatgcggaggaccaaaaaaatgtgctctcactggccagagtaagtcctgtaaacacagaattaaattaggggactcaagcaactattattatatttctcctttttgcagatacaggatcacttctgtatgtaacttttttacatacattcgatacattcagcagggactcgtgaaacagcaggatgttgatcagatgttttgggaggttatgcagttgagaaaagagatgtcattggcaaagctgggttatttcaaagaggaactctgatgctctgcgtgggaccatgcctgaactccccgaataactgaaaaatggctgaatatttttatggttacttgatatttatttccaaggagtgagcctaagacttttttccccttttgcaaattgctctaagaagtaccatgatttcttttaaactgatctatgctgtgtttgcttattctttagttgaacacactatgaagaattccaggtgtactagtgaatgtaatttatagttgccaaaaaaaaaaaaaacctgaaataaataaatgttagattgaaaaaaaaaaaaaaaaaaaaaaaagctctgacatggcatttagggttagcagaatgtattaaatagtaattttcaaactacacagtagcttccttccttgtgagaggcaagaaagaagtctgagtggatagtactcactttccaaggcccccacctctagaatggctttatttttatctgttttctatattgggtttcaaaaaagattttatttgaagaaatacttctgctgctacaaagtttgaaagttactattttaattattctgctctctgtaactgaaagaatccctttattttggttattcattaaaatataatagaaggcagtcagattttatcccagagatgtattcctgagtgtcttgatatagtgtattcatgttttatatgtgttgaccactatattgtcattggagggacatagatgtaaatgagtttgacgtgtgtcaaaggggtttaaaggggtgtggattgaatgaatggtacgtgcgaagtatatgctgattatagaaccacttgatctctgcattccaaattgtaaaactgactcaactggagaaattataacaaagaggtttgtggtagaaatgtaataagtatagaaaagcaaaaagaaaagagaaactgctttagtttctgtttagagaaagctgctgttaatatttttggatagtagcctttcagctttcagatattttctacttacatatgcatatttttgaaacaaaaagtaggctttttttttgctttttaaacctaaacattaaatatattttcccttgggtaaacctacacatcctaatccctgtttatagaattttaacataatttaattgtgtttggagatgaggtggttttcagtttatttttcatattataatgctgtgacgagtatccttatctgtacacttctgaacattgtggagttctttcatgtggatgcctggagataaaattgtgtcgagatatatatgtatttttaaatgtttgatctgcattgctagattgccatccagaaaagttaatcaatttgtattcacagcagcagtgtacaagagggctggttttctgaagataacatttttttcagtcctgttnnnnnnnnnnnnnnnnnnnntacctgtagatgacttcagccaccaggctggatgggagcccacagacaaaaggacattggtgtatgttatggtgaaaaccatcagtaccatgcctagctcaagaatgtgaaattgaacctgaaaaaaactttgaacctacaattttatgttctgaaaatagttattctaatgtgagggcattaataagaatatgtaccatcaaagcttcagaagattttccatacaaactaaaatcacttttggagaaagtacctaaataaaaagagaaacaaatccaggagatactgtatggtttgaaagaaaggtaatcaaatactcagaaaaagtttgttgatgacttaaaaaggataaataaaaagtaagactaaagaaaatcagtatacccattaataataaatctttagtaatctataaggggaagaatgcttttcaaccttatacactagaagcatgctctttaaaattaatgcaacaggatgacgacttgatgtagaaactatatgtggaattatagattaaaatgtgattgaaacataaaaaaaaaaaaaaaaaa

SEQ ID NO: 6837 - DNA, 3554 bp, Homo sapiens
cacgaggggcttcttggctgtcaaacagatgcagcaacgtcgtctcctgccgaggagcccaaggggtcccgggatccgccgcacaggctggcactgcttgaagaggaggctactcggagactgcgccgcgcggattggaggctccccaaatattttgcgatctgaggatccagctcaagtgaggtgccataggacgtgttcctgagtttgcattgcacggagaccttcctggaatttttcatttgcaagtcggcttaaccaattttgcattgagtcctaggctgcttgcactctgaatttgggctattcaggtagtgtgctcaaagttgaaaccgcatacagcacaactcaagtttgcatcagactgggaagcgaacttaagccagcggtgcgtggcccaggagtgggaaaggaaatggatgcctgaagtggaagaggtggtgcagagggggcaccgcccatgctgccctgcttccaactgctgcgcatagggggcggcaggggcggtgatctctacaccttccacccccccgccggggctggctgcacctatcgcttgggccacagggccgacctgtgtgatgtggccctgcggccccagcaggagcctggcctcatctctgggatccacgccgaactgcatgccgagccccggggtgatgactggagggtcagcctggaagaccacagcagccaaggtactttggtcaataatgtccgactcccaagaggtcacaggctggaattgagtgatggagacctcctgacctttggccctgaagggcccccaggaaccagcccctcggagttctacttcatgttccaacaagtacgagtcaagcctcaggactttgctgccattaccatcccacggtctaggggagaagcccgggttggggctggtttccggcctatgctgccctcccagggggctccacagcggcctctcagcaccttctcccctgcccccaaggccacactgatcctaaactccataggcagcctcagcaagctccggccccagcccctcaccttctcccctagttggggtggaccaaagagcctgcctgttcccgccccacctggggaagtggggaccacgccttctgctccaccccaacgcaatcggaggaaatctgttcaccgagtgttggcggaactggatgatgagagtgagcctcttgagaacccgccaccggtccttatggagcccaggaagaaactccgtgtagacaaagccccactgactcccactggaaatcgacgtggccgtcctcggaagtacccagtgagcgctcccatggctccccctgcagttgggggcggggagccctgtgcagctccttgttgctgcctgccccaggaagagacagtggcctgggttcagtgtgatggctgtgacgtctggttccatgtggcctgtgttggctgcagcatccaggctgccagggaggccgacttccgatgcccagggtgccgggctggcattcagacctaaggtccaccgccaaggcaccatcggacacacctgcccatgagtagacacagcagcgagcaaataggtctgataaataccccccttcccttccctccccaggagggaatgactacagggaagaaggatggattgatgtggactcattcagggcctggagcagaccctggtggccaagacagaagagatggtttcctgccaaagatattgccacctccaggaaattgccagtgagctggaagttcccactattacaagccataaggccatgttgccatggacaccagaatatctgtagtcagagcacctatcagttgcaaaagccatgcctgcaaccgatggaaaatgtaagagggagttcttaaggttcttgatggcatcacccaaggcattctgggaaaacctagggcctggccccaaaacttccctactctgtggctagtcctgctgccaacaaaatcgtagcgacctggcttttcacagctttgcttttatttccaagtcaaggacaagccgcttcattcactcctgggcatttactcttcttgtgggtctgtgatattccttgctttccagggagaatgtgcttggcaaggtctggagaactaattcagaatcttaggggaaggggagagatggaaatacaaacctgcttactggaaaggtgcaaatatatgggttgagctggaggtaggaatacaggtaattaaggtttctggtttaagggaaaacagatctattgccatttaaataaggtaactgggatttggttaagttcacaaagatagcagaagatttatttacaggcttcacctgtactgtcagggcaagagaaagcctggtaaaccagctacagcagtttaccagtgtgatggctgtgacacagctccactccacgggtggacacagcagagggcaactgggctggcctggttcagtgtgaatcaaaccgcttaacccacacatggtacatgtgattttcttttgtgagccttacaccaagccaaactattgtcaaagcatcatttctatagaaataaagccttatcttgacctgttctattaaaacctgccacatccgccctttcctacctagatttaatgagcccaagtttttttacatggaagaaatgactctggggcaaagacccctaatgaactagtggcagagccaggaataaaacttgagtaactaatgagtcacttatgggcagagtatgcaaaaaccttaagtggaaaccaaatagaccctggtatcaagaaagcacaaagtattaatagaagtttctggttggggtgatctaggttcaacagaaataagatgatttctaagtataaagccattttagaattccagagtagggtgggaaagcaaaaagccagctctgaacaggtaacagctacatggtgactgagtctatgggcaaaagttcttgcatcacaggcttttgggaactagcctatcacagggccctgtacaaataaacttggctgcaatcccaaaaaaaaaaaaaaaaaaaaaaaaaaaaaaaaaaaaaaaaaaaaaaaaaaaaaaaaaaaaaaaaaaaaagcaaaaaaagaaaccaaaaaaagaacaaaaaaagaataaacaaaaaagaaagacaaaaagaacaagaagaaacaaaagagagaaaccaaacaaagaagaaaacaaaaaaagaaagtgtataagaggaggagagagagagtgtgggtagtgtagtagagagtggaaatatgaaaaataggaggaggctaataatgtggagaagagaatagaaacaaagggtgaagtagaaaacgatagaagatagtataaataacagaacgggaggagtgagacaagtaggcaggccggagccgacgtacagcagagggtgagacgcacgacgtcacggctagctgagcggcgagagagaagagcagagacgagagccgaagagcgcgtagacgggagacagacgactagagagcgacagaggcaaggacagagccggggcaagaacgcgaagcagcagagcccgaagcgaggacgaggggagcggaagagagggagggg

SEQ ID NO: 6838 - DNA, 636 bp, Homo sapiens
  misc_feature (450)..(469): n is a, c, g, or t
gtcgaattatcctcaaatggaatcgaatggaattatcgaatgcaatcgaatggaattatcgaatgcaatcgaatagaatcatcgaatggactcgaatggaatcatcgaatggaatggaatggaacagtcaatgaactcgaatggaatcatcattgaatggaatcgaatggaatcatcgagtggaatcgaatggaattatgatcaaatggaatcgaatgtaatcatcatcaaatggaatcaaaaataaccatcatcaattggtattgaatggaattgtcatcaaatggaattcaaaggaatcatcatcaaatggaaccgaatggaatcctcattgaatggaaatgaaaggggtcatcatctaatggaatcgcatggaatcatcatcaaatggaatcgaatggaatcatcatcaaatggaatctaatggaatcattgaacagaattgaatgnnnnnnnnnnnnnnnnnnnngaatgcaatcatcgaatggtctcgaatggaatcatcttctaatggaaaggaatggaatcatcgcatagaatcgaatggaattatcatcgaatggaatcgaatggtatcaacaccaaacggaaaaaaacggaattatcgaatggaatcgaatagaatcttcgaacgga

SEQ ID NO: 6839 - DNA, 3137 bp, Homo sapiens
gtctgcgctttgcaaagcatgcagttaggggagcagctcttggtgagctcagtgaacctgcctggcgcgcacttctacccgctggagagtgcgcgaggcggcagcggcgggagcgctggccacctccccagcgcggccccctctcctcagaagttggacttagacaaagcgtccaagaagttttccggcagtctctcctgcgaggcggtgagcggggagcccgcagccgccagcgcaggggcccccgcggccatgcttagtgacaccgacgccggggacgcatttgccagcgctgcggcagtggccaagccggggcccccggacggccgcaagggctccccctgcggggaggaggagctgccctccgccgctgcagccgccgccgccgccgccgccgcggctgcggccactgcgcgctactccatggacagcctgagctccgtgcggtactacctccagtcccccggtcctcaggggtcggagctggctgcgccctgctcactcttcccgtaccaggcggcggctggggcgccccacggacctgtgtacccggctcctaacggggcgcgctacccctacggctccatgctgccccccggcggcttccccgcggctgtgtgcccacccgggagggcgcagttcggcccaggagccggtgcgggcagtggcgcgggcggtatcagcggcgggggcggcggcccgggcacctatcagtacagccagggggctccgctctacgggccgtaccctggagccgcagcggcgggatcttgcggaggactggggggcctgggggttccaggttctggcttccgtgcccacgtctacctgtgcaaccggcctctgtggctcaaattccaccggcaccaaactgagatgatcattacgaaacagggcaggcgcatgtttcctttcttgagcttcaacataaacggactcaatcccactgcccactacaatgtgttcgtagaggtggtgctggcggaccccaaccactggcgcttccaggggggcaaatgggtgacctgtggcaaagccgacaataacatgcagggcaacaaaatgtatgttcacccagagtctcctaatactggttcccactggatgagacaggagatttcattcgggaaattaaaactcaccaataacaaaggcgcaaataacaacaacacccagatgatagtcttacaatccttacacaaataccaaccccgactgcatattgttgaagttacagaggatggcgtggaggacttgaatgagccctcaaagacccagacttttaccttctcagaaacgcaattcattgcagtgactgcctaccaaaacaccgatattactcaactaaagattgatcataacccctttgcaaaaggcttcagagacaactatgattcatcccatcagattgtccctggaggtcggtacggcgttcaatccttcttcccggagccctttgtcaacactttacctcaagcccgctattataatggcgagagaaccgtgccacagaccaacggcctcctttcaccccaacagagcgaagaggtggccaaccctccccagcggtggcttgtcacgcctgtccagcaacctgggaccaacaaactagacatcagttcctatgaatctgaatatacttctagcacattgctcccatatggcattaaatccttgccccttcagacatcccatgccctggggtattacccagacccaacctttcctgcaatggcagggtggggaggtcgaggttcttaccagaggaagatggcagctggactaccatggacctccagaacaagccccactgtgttctctgaagatcagctctccaaggagaaagtgaaagaggaaattggctcttcttggatagagacacccccttccatcaaatctctagattccaatgattcaggagtatacaccagtgcttgtaagcgaaggcggctgtctcctagcaactccagtaatgaaaattcaccctccataaagtgtgaggacattaatgctgaagagtatagtaaagacacctcaaaaggcatgggagggtattatgctttttacacaactccctaaagagttattttaacctcaaaaattagctaactttttgcagatggacttggtggtgttttttgttgtcttctttgcctaggttgccaaaaagatgtttgccttccaccttgatgcatcctgttttgtgcaattctctaaaagaaggtgccaaagctttttgattgctgcaggtaactgaaacaaacctagcatttttaaaaaataagattaatggaagactttaaggtattttaaaattcgaagggtatccaaggttctgtatttatttattggggagacactaacccttcaaagaagcaggctgtgaacattgggtgcccagtgctatcagatgagttaaaacctttgattctcatttctatttgtaaattcttaagcaaatagaagccgagtgttaaggtgttttgcttctgaaagagggctgtgccttccgtttcagaaggagacattttgctgttacattctgccaggggcaaaagatactaggcccaggagtcaagaaaagcttttgtgaaagtgatagtttcacctgactttgattccttaacccccggcttttggaacaagccatgtttgccctagtccaggattgcctcacttgagacttgctaggcctctgctgtgtgctggggtggccagtgggactcaggagagagcaagctaaggagtcaccaaaaaaaaaaaaaaaaaaaaaagggagatttaaaaggtgtcccagggggttttgaatccttataaaatacgggggttattgtggccaaattaggtctaccatcggtggccgggctactggaacaccgggggtggggtttggaaaagacttgggccatctcccttaaccaggtggggggcgcggggagagttcaacatccccatgatttggggaacttccgggactcctatgattgctaaagtgtttccggcatatgtcttacttgacgcgggtgaagggaacccatattatctttgttggcacctttcctagtggaggtggagaattaacgtaccgtcataggttagactggttagcagctgcttccaatgttgggggcaaaaca

SEQ ID NO: 6840 - DNA, 2860 bp, Homo sapiens
  misc_feature (327)..(343): n is a, c, g, or t
  misc_feature (854)..(1143): n is a, c, g, or t
  misc_feature (2809)..(2809): n is a, c, g, or t
gaattcggcacgagctgcagggtcaggaggagaatcgtggggccaggagggcagaggcacactccatcttcgtgctcctcacaggccctgcctccctgcctgctaaggacacagggaagggggtccccacctcagtgcctgcctcccttccctgtgcctgtgtacctggcagtcacagccacctggcgtgtcccagaaaccaaccggctgacctcatctcctgcccggccccacctccattggctttggcttttggcgtttgtgctgcccgaccctttctcctgtccggatgcgcagggcagggcctgagccgtcgagctgcacccnnnnnnnnnnnnnnnnnggtgactcaccgggtgaacgggggcattgcgaggcatcccctccctgggtttggctcctgcccacggggctgacagtagaaatcacaggctgtgagacagctggagcccagctctgcttgaacctattttaggtctctgatccccgcttcctctttagactcccctagagctcagccagtgctcaacctgaggctgggggtctctgaggaagagtgagttggagctgaggggtctggggctgtcccctgagagaggggccagaggcagtgtcaagagccgggcagtctgattgtggctcaccctccatcactcccagggcccctggcccagcagccgcagctcccaaccacaatatcctttggggtttggcctacggagctggggcggatgacccccaaatagccctggcagattccccctagacccgcccgcaccatggtcaggcatgcccctcctcatcgctggcacagcccagagggtataaacagtgctggaggctggcggggcagnnnnnnnnnnnnnnnnnnnnnnnnnnnnnnnnnnnnnnnnnnnnnnnnnnnnnnnnnnnnnnnnnnnnnnnnnnnnnnnnnnnnnnnnnnnnnnnnnnnnnnnnnnnnnnnnnnnnnnnnnnnnnnnnnnnnnnnnnnnnnnnnnnnnnnnnnnnnnnnnnnnnnnnnnnnnnnnnnnnnnnnnnnnnnnnnnnnnnnnnnnnnnnnnnnnnnnnnnnnnnnnnnnnnnnnnnnnnnnnnnnnnnnnnnnnnnnnnnnnnnnnnnnnnnnnnnnnnnnnnnnnnnnnnnntctgcttttaataagcttcccaatcagctctcgagtgcaaagcgctctccctccctcgcccagccttcgtcctcctggcccgctcctctcatccctcccattctccatttcccttccgttccctccctgtcagggcgtaattgagtcaaaggcaggatcaggttccccgccttccagtccaaaaatcccgccaagagagccccagagcagaggaaaatccaaagtggagagaggggaagaaagagaccagtgagtcatccgtccagaaggcggggagagcagcagcggcccaagcaggagctgcagcgagccgggtacctggactcagcggtagcaacctcgccccttgcaacaaaggcagactgagcgccagagaggacgtttccaactcaaaaatgcaggctcaacagtaccagcagcagcgtcgaaaatttgcagctgccttcttggcattcattttcatactggcagctgtggatactgctgaagcagggaagaaagagaaaccagaaaaaaaagtgaagaagtctgactgtggagaatggcagtggagtgtgtgtgtgcccaccagtggagactgtgggctgggcacacgggagggcactcggactggagctgagtgcaagcaaaccatgaagacccagagatgtaagatcccctgcaactggaagaagcaatttggcgcggagtgcaaataccagttccaggcctggggagaatgtgacctgaacacagccctgaagaccagaactggaagtctgaagcgagccctgcacaatgccgaatgccagaagactgtcaccatctccaagccctgtggcaaactgaccaagcccaaacctcaagcagaatctaagaagaagaaaaaggaaggcaagaaacaggagaagatgctggattaaaagatgtcacctgtggaacataaaaaggacatcagcaaacaggatcagttaactattgcatttatatgtaccgtaggctttgtattcaaaaattatctatagctaagtacacaataagcaaaaacaaaaagaaaagaaaatttttgtagtagcgttttttaaatgtatactatagtaccagtaggggcttataataaaggactgtaatcttatttaggaagttgacttatagtacatgataaatgatagacaattgaggtaagttttttgaaattatgtgacattttacattaaattttttttacattttttgggcagcaatttaaatgttatgactatgtaaactacttctcttgttaggtaatttttttcacctagatttttttcccaattgagaaaaatatatactaaacaaaatagcaataaaacataatcactctatttgaagaaaatatcttgttttctgccaatagattttttaaaatgtagtcagcaaaatgggggtggggaagcagagcatgtcctagttcaatgttgacttttttttttttttaaagaaaagcattaagacataaaattctttcactttggcagaagcatttgttttcttgatgaaattatttttccatctgaggaaaaaaatactaggaaaataaatcaaggtgatgctgaaaaaaaaaaaaaaaaagcggcgttccttttagagaggtgtataatgacctcccgcatgactgctggcttggtcgtcggctggggaagcgganagctatttaggcgggagacgttttccaaaataagagaaaccagaaaaaata

SEQ ID NO: 6841 - DNA, 489 bp, Homo sapiens
gtcgactttttttttttttttaacagtaatggaactaaaaccaaagtgattgttctttattatagcaaagtgatagtttttttatttaaaataagttattttttacaacctccttatataaaagatgtttatgaaagaaaaaattgagtgtgtctcggtgccatttttttaatgcaatgaatgatatccatgaaaaagaacatctgaatcttttgttttaaaagacagtgcaaggtataggtgaatttatgggagatacatcctgataaatttgcataatgaaatgagggagagtgtataataatttttttctactgttatccatctaggcactgacttgctcggcatgggcacaaggggagatctcaggttacaggcaaccaaaataaacatgttcccggggaggggtaattccccctccatctttcaccttggatgggttcattaatttaagggggggggtttggggggtggttagggggggttggt

SEQ ID NO: 6842 - DNA, 3162 bp, Homo sapiens
gaattccattttaagttatacaaaactgattaccataagtgcggtcgactgcttttatttttacgttgtgtgtgttggaaaaatgctaaaacatcagtctacaattctatatattgttattaaagattaatccaaccagcaacccaaggacatataagcgatttccactattgcatcagagcactcggcaggaaaggcctagccacggggaacattagaagctacagaagcattgcagagaagagaagatcccccgcgcgtccgccgctgttctaaggagagaagtgggggccccccaggctcgcgcgtggagcgaagcagcatgggcagtcggtgcgcgctggccctggcggtgctctcggccttgctgtgtcaggtctggagctctggggtgttcgaactgaagctgcaggagttcgtcaacaagaaggggctgctggggaaccgcaactgctgccgcgggggcgcggggccaccgccgtgcgcctgccggaccttcttccgcgtgtgcctcaagcactaccaggccagcgtgtcccccgagccgccctgcacctacggcagcgccgtcacccccgtgctgggcgtcgactccttcagtctgcccgacggcgggggcgccgactccgcgttcagcaaccccatccgcttccccttcggcttcacctggccgggcaccttctctctgattattgaagctctccacacagattctcctgatgacctcgcaacagaaaacccagaaagactcatcagccgcctggccacccagaggcacctgacggtgggcgaggagtggtcccaggacctgcacagcagcggccgcacggacctcaagtactcctaccgcttcgtgtgtgacgaacactactacggagagggctgctccgttttctgccgtccccgggacgatgccttcggccacttcacctgtggggagcgtggggagaaagtgtgcaaccctggctggaaagggccctactgcacagagccgatctgcctgcctggatgtgatgagcagcatggattttgtgacaaaccaggggaatgcaagtgcagagtgggctggcagggccggtactgtgacgagtgtatccgctatccaggctgtctccatggcacctgccagcagccctggcagtgcaactgccaggaaggctgggggggccttttctgcaaccaggacctgaactactgcacacaccataagccctgcaagaatggagccacctgcaccaacacgggccaggggagctacacttgctcttgccggcctgggtacacaggtgccacctgcgagctggggattgacgagtgtgaccccagcccttgtaagaacggagggagctgcacggatctcgagaacagctactcctgtacctgcccacccggcttctacggcaaaatctgtgaattgagtgccatgacctgtgcggacggcccttgctttaacgggggtcggtgctcagacagccccgatggagggtacagctgccgctgccccgtgggctactccggcttcaactgtgagaagaaaattgactactgcagctcttcaccctgttctaatggtgccaagtgtgtggacctcggtgatgcctacctgtgccgctgccaggccggcttctcggggaggcactgtgacgacaacgtggacgactgcgcctcctccccgtgcgccaacgggggcacctgccgggatggcgtgaacgacttctcctgcacctgcccgcctggctacacgggcaggaactgcagtgcccccgtcagcaggtgcgagcacgcaccctgccacaatggggccacctgccacgagaggggccacggctatgtgtgcgagtgtgcccgaggctacgggggtcccaactgccagttcctgctccccgagctgcccccgggcccagcggtggtggacctcactgagaagctagagggccagggcgggccattcccctgggtggccgtgtgcgccggggtcatccttgtcctcatgctgctgctgggctgtgccgctgtggtggtctgcgtccggctgaggctgcagaagcaccggcccccagccgacccctgccggggggagacggagaccatgaacaacctggccaactgccagcgtgagaaggacatctcagtcagcatcatcggggccacgcagatcaagaacaccaacaagaaggcggacttccacggggaccacagcgccgacaagaatggcttcaaggcccgctacccagcggtggactataacctcgtgcaggacctcaagggtgacgacaccgccgtcagggacgcgcacagcaagcgtgacaccaagtgccagccccagggctcctcaggggaggagaaggggaccccgaccacactcaggggtggagaagcatctgaaagaaaaaggccggactcgggctgttcaacttcaaaagacaccaagtaccagtcggtgtacgtcatatccgaggagaaggatgagtgcgtcatagcaactgaggtgtaaaatggaagtgagatggcaagactcccgtttctcttaaaataagtaaaattccaaggatatatgcccccacgaatgctgctgaagaggagggaggcctcgtggactgctgctgagaaaccgagttcagaccgagcaggttctcctcctgaggtcctcgacgcctgccgacagcctgtcgcggcccggccgcctgcggcactgccttccgtgacgtcgccgttgcactatggacagttgctcttaagagaatatatatttaaatgggtgaactgaattacgcataagaagcatgcactgcctgagtgtatattttggattcttatgagccagtcttttcttgaattagaaacacaaacactgcctttattgtcctttttgatacgaagatgtgctttttctagatggaaaagatgtgtgttattttttggatttgtaaaaatatttttcatgatatctgtaaagcttgagtattttgtgatgttcgttttttataatttaaattttggtaaatatgtacaaaggcacttcgggtctatgtgactatatttttttgtatataaatgtatttatggaatattgtgcaaatgttatttgagttttttactgttttgttaatgaagaaattcctttttaaaatatttttccaaaataaattttatgaggaattc

SEQ ID NO: 6843 - DNA, 2930 bp, Homo sapiens
ggcacgagggcaactgcgcgcgcccgccgggtgagccagcgatctgagccaggcgggggcggcccgacctttcccgcccagcctgggtcagaggaagccgaaagcggcctcagcaaggtgaggcgcccgaggctgcagaagaccgagcagaactttgcagagttcgggatgtgctgggctaggtcgctgaggacttgactggcttcctccctccttccctccacctaccttctccctccccctccaccgtccagtgggttcgttccgggcctccagctatcagctcccgatctcgtgtttgagggtagcgaccccgatttctgtttgcatgcacagccagcagccctagcgccagatcctaaagctggatatcttttaactgggctaccagcccgggcctcaaagttttgagtgagggccgccaggctcaggccccagcgaagccccgagcgccatggccgacccgcaggctggctccgcggccggggactgggagatcgatgtcgagagcctggagctggaagaggacgtctgcggggcgccgcggtccacgccccccgggcccagcccgccgccggcggacggggactgcgaggacgacgaagatgacgacggggtggacgaagacgcggaagaagagggcgacggcgaggaggcaggcgcgtcccccgggatgcccggccagccggagcagcgggggggaccgcagccgaggccgccgctcgcgcctcaggcctcacccgccggcaccggtccccgagagcgctgcactcccgcgggcggcggcgcggagccgcgcaagctgagccgcacgcccaagtgcgcgcgctgccgcaaccacggcgtggtgtcctgcctgaagggccacaagcgcttctgtcgctggcgcgactgccagtgcgccaactgcctgctggtggtggagcggcagcgcgtcatggccgcccaggtggcgctccggaggcagcaggccaccgaggacaagaaggggctttccgggaaacagaataatttcgagcgcaaagctgtgtaccagaggcaagtcagagcccccagtttgctggccaaaagcattttagaagttctccttggattattctacagctattatgtgtacataatgaaccatctttagaaaataaaagtgacatcagctctaggtatagatatattttttaataatgaaaaaagatgacatggataataataaaacattgattgatacaagataaatagtcttgtctcttaatgcgtagggggcctgggaagaatattaaaattttaatcaataaagtatgtctgttgaagcaagcaagcaaacaaatccataacaaccacaacaagcaacaagaacaagaacaacaacaagaagaagttgcagtatggatatctttcaccctcccaggaaactctttcaaacctaatctggacttttgcatctgtataaaaatatcagtgagatggaactgtaaataattgttctgctgatctgtagtggttgctgttaccttctgggtttccacatttttattccgtagatgttaatctctttcatgtgcaatctttgcttcttgtaggctatcgccccattccagcggagacttatgtaggagggaccttccctctacctcccccagttagtgacaggatgaggaaaagaagagcctttgctgataaagagttggagaacattatgctggagagagaatataaagaaagggagatgttggaaacttctcaagctgctgctctgtttctgcccaaccgcatggtgcctggacctgactacaattcctacaaaagtgcctacagccccagcccagtggaaccaccaagcaaggacttctgtaattttttgcccacctgccttgatttaaccatgcagtattcagggtctgggaatatggaactaatttcttctaatgtcagcgtgggcacaacttatagacagtatcccttgtcctcaagatttttagtttggcccaagtgtggccccattagcgacaccctcctctaccagcaatgcctgctaaatgccaccacctcagttcaagccctgaagcatggggccagctgggacttgaagggagcacgagtccaggatggactcagtgcagagcaggacatgatgccatcgaaattggaaggttccctggtgctgcctcacactcctgagatccagaccacgagaagtgaccttcagggtcatcaggctgtcccagagaggtccgcgttctccccaccccgacggaatttctctcccattgttgacacggactccctggcagctcaagggcatgtcttaacgaagatcagcaaagaaaacaccaggcaccctctgccacttagacataatccattccactcattattccagcaaacacttactgacaaatcgggtcctgagttgaaaacaccatttgtcaaagaggcctttgaagagacccctaagaaacacagagagtgtttagttaaggacaaccagaagtacacatttacaatagatagatgtgcaaaagacctttttgtagccaaacaagttggaacaaaactctcggtgaatgaaccactgtcattttctgttgagtctattcttaagaggccttcatctgccatcactcgtgtctctcagtgaaaggctgcttaaacagaaagctggattttctgcagtcttagagcattatagccatttgctactttttttaaaagttaagatgtttgtgtaaagaaatttctaatgtaaagatgatgattttgaaaaattttatatattcctaatatgcatgtactttttcttatcacatatatttaaacttacagatggaaattgcccaatgtgcaaattgttaagtaccacactttacacagcatttcaaaaagcaataaaattgacactgtcttctcaaagacccaaaaaatgaagaagcaaa

SEQ ID NO: 6844 - DNA, 699 bp, Homo sapiens
agcggccgcccttttttttttttttttttttttttggtggggctgctgcatatcttcatattgaggatgttggtatttctacttcatcaaagttatgactaggcagtcaggatgcctacactcactaactcactatatttgtacttcaaaaattaatctccttttctcacattctaactcaataatatatggaggtatattcatagtaaagcctattaagcagaaacaagttattttttaaggatgattatagaaactatgtttcagaaccaaaacatgtccttcaggacactcttagggacttattagaaatgtcctattctttgaaaattttcatagttaagtaaagctcttctaggagttctcttctgtaaactccccttccacatgcaatgacccagccacagtccccctgacacacatactcatttattggggcaatataatttacattttaaaaaccaaacaaaggtaaatacacttgggaaattccatgaaacctgaacaaataactgtgcatgagtcataggaaacagcaatggaagaggaagtgtctaaatatcagaaaacagatgttctcacaaataaatctagttgagatttaagtaagtggctctgagcctcttaccacataattgtttttcctagttttgagtaaggacaacacaaacattttgggatcaaaacaatgtgaagatt

SEQ ID NO: 6845 - DNA, 2183 bp, Homo sapiens
  misc_feature (983)..(983): n is a, c, g, or t
gggcggcggcgcgcgggtgcgatcgcggagctgtgaggcgcaggcagggctctggggcacctagagaccggggccggagacgtggcagccgccctgcccgccagaaagtttcctagaagtttgctgggcgcgggcgcacgactgactggctggaccatgaacgtgttccgaatcctcggcgacctgagccacctcctggccatgatcttgctgctggggaagatctggaggtccaagtgctgcaagggcatctctgggaagagccagatcctgtttgctctcgtcttcaccaccaggtacctggacctgttcaccaacttcatctccatctacaacacagtaatgaaggtggtttttctcctctgtgcctatgttacagtgtacatgatatatgggaaattccgtaaaacttttgacagtgagaatgacacattccgcctggagtttcttctggtcccagtcattggcctttccttccttgaaaactacagtttcactctgctggagatcctctggactttctctatctatctggaatcagtggctatcctgccccagctcttcatgatcagcaagactggagaggctgagaccataactactcactacctgttctttctgggtctgtaccgggcactctacctggctaactggatcaggcggtaccagactgagaatttctatgaccaaattgcagtcgtgtctggagtagtacaaaccatcttctactgtgacttcttctacttgtatgtgaccaaagtccttaagggaaagaagttaagtcttccaatgccaatctgaggaccttcagagacagtctacgccttaacaagcacatgaaggaaactattttgaatgttctctttggcaacttatccataatttgggatcaaatgttaaaaccagaaaagtgtttagtgtggatttcagcaaaacctgatcatcccacccagaagaccttctcatcaatagatcgcccttanagacccattgtaaggtcataaaaaacctcggccacctgcacaaagatggtgcctcactgcaacaagaaaccttaaggtgtcttaccgacgaaataaaaaacataaatgattgttctccaaggcctgagggcaagactcatgatgagcaagtcaaccccaatctggaacaatgtccctcctcttagaatgtcccaactaaagaccagttaaaatattagggtacgttcttgtgaatttccactttccaggtagatgaccaaatttaggtggtcaagatataaaggtgtcagctagttttaagtgtgaaacttatttcactttcacactgccttcaggccagaagcaaaccaaatttaccaggtttggctggaggagttttgtgactcatcttttactggtttgaattttttcaaaccagtggctgatacctgccttgtacttagtaccttaataccaataacctaatggtacttaggcgagtaccatttgcacaatcactgttttacttatgagcagatacagatatatccaaacccttacctactaggtatcctgctagggttttcaattccaattcttgtattaagttttttcctttcagttttaggtgcgaaagtaatcagtcaatccaatatcccccatctttgtcttgaaacaaaaactgttttaagacgtctacgttgaattattcagagaattaagcaataaaagctcacaccttattgtcaaaaaaaaaaaaaaaaaaaaacgaaacctcacccagcgaacagaagcgacacacgtccagaaccaagaacggaagcgacggccagcggcgcgccccgcccccggctggcgccagaccgcgcgacgccggggcagcacaatcgcgtgccagcgctcggaccgacctcccgaagccggaccggcaagcgagacgacagcggcgggcgcgacggtaccgcccgcgcgggcgagggccccgcgtacagagtaacaagccacgagggagggcagaccgaaacggaactgtacgacagaagccaggaggaagagcagggcgaagaagcagagaacggagagaaggtgatggaagaagaaagcgagtgaactagagagagcgaagggcggggaagaagagacgagactgaagccgggaggggcaccaggccgcgaaggggagacgcgagggaagcaagagcagacccagagcaccctctc

SEQ ID NO: 6846 - DNA, 1464 bp, Homo sapiens
ttcctgtcgttgcgctcttgtttgtggtcgtattggggcgacacagatcgtgttacactttttctgtttttttttagcgagtgcgttttcatcagtgtggtgttttgcgctttcgtgtactcgactcgttcacacggtaccacaccagttgctatgccctacgcgtccacatgttctgggccacgggcccgctccgccttgccgggatatttttggcttggtcgggattttcacgccaccatgtgccccgggctgtttttcgagcgcctgttcgtcgagttgtcctcccgctgtgccttcccctgaggttgctgggggtgtaccaggtgttgagccctccgtggccctggccgtgatgtgccctgatttctgaactagcgttatgcttgtaacctgttcgtgtggagcgccagtttcgtctagacttcaacagccgttcaattccagggttgtttgttaaagccccccggtggagtgttgtaaaaggcgtgtgttatggatggcacctgaaccctgtgtgtttttgggccgttggcccaaagcgcatgtgtctctgccagtgtttactaagattatgggtgccagaccaccgtggtgcctggggtccctaaagaatgttaaaagacacgatctgtttgtttgggtagtcccaaaagtgaagtgtaggtaatactactggactggacaccacaaatggtgaaggtggtagatcttatgtgtttttgacccgaaattttttttttttgaagacaccatctctgcccttaaggagttgtggcatagtggaggaaacagagaatccactaattcatttacctgggaacttttaattaatagagtgccaatcatattctaggctggtgcaggtgctgaggataagcctataagcaaaccaggcacaattagtctcttatggagcttactgtccatggccagcaggaaatgtgcacctgcagtgcccagtacagaaaccactagccacatgtagttgtttacaattaaattaattatgattaaatacaatttaacatagtctctgcagccacagttgaagtgctcagtagccacaggcagctggtgccactatagaggacagcacagctagagaaggtttccatcactgcagacagctcttagcgtggtcagtgtgcagatggatgagccagatcgtcaagtagggggccctgccagtctctccagtgcctttgtgccagtttcaaaaggttttctctctgggcaggtgcaacttcttgccaaggacgaggcttgtggagcaggatatggttctgggcctaggagaagtcaaggtgtatagaacaggagatgcagatcaccacatgctcaccaagtccctggagtaaaggactccagactctggagttgtctgatctcatctcccacgacacactcccatagtgcaccacgtgccctgctcatgctgttctctcagccttcttccttttc

SEQ ID NO: 6847 - DNA, 755 bp, Homo sapiens
  misc_feature (3)..(17): n is a, c, g, or t
tannnnnnnnnnnnnnncccctcgtagtgcagtagtaaaaggcttgaatcaaaaagcggacccctatgaagggctgaaaaaacatagacggtccagtccgtcctcaggaatacggtgggaaaataaaatcacagtttggcacttgctggctgtatttacaggaacagaaggtcttctcgggctcggagatgggacggtgtgaggcgagggggacgggtagggggctgtttgcatacggccaaaagcagtttctaagacacggcgggactgtgattccgaaagggcgctggggcaaaacagtgtctgggaggaaatgaccaggaggacgggggtgggcgatggggtatgaggtctccccagccacaatgaggggcgcccaccacgtaccccttccggctcagactcacccaacctggagcaccaggggggtccgcggtgggctgcagctgtgttcccccacgagtggggtgcagagcagaggggagcggctgtgttcccccacgagtggggtgcagagcagaggggagcggctgtgttcccccacgagtggggtgcagagcagaggggagcggctgtgttcccccacgagtggggtgcagagcagaggggagcggctgtgttcccgaccccatgttccgcgttcccctcccccaggccagggcacagggaccccgccccgctacaacggcagggaataaattaaattaaaaactcaagtctttttgatccaaccacgaaaaatacactaaaaaaaa

SEQ ID NO: 6848 - DNA, 747 bp, Homo sapiens
ttttcattctacaaatatttattaaagcccaactgtgtgccagccaccaggcatagaatagggaacaaaatagtttccctgcaactatataaaaagaatggcatattgtacttaaatgcctccttgccaaaataagaggcacaggacaacagctgtctggagatgacctcaagccagtcaggccccattttaaatatagaaacccctaagaatagccgccagtgctccagactcaacaggtgattggcccagagaggggaggtgaccccaggccccaggaaagggagcgaggacagcgctggttcccggctccccgcaccatcatggctttgcctctgaggcccctgacccggggcttggccagcgctgccaaaggaggccacggaggagcaggagctcgtacctggcgtctgctgaccttcgtgctggcgctgcccagcgtggccctctgcaccttcaactcctatctccactcgggccaccgcccgcgccccgagttccgtccctaccaacacctccgcatccgcaccaagccctacccctggggggacggcaaccacactctgttccacaatagccacgtgaaccctctgcccacgggctacgaacacccctgaggccccggacgcccccggacacaataaaggtgtgaagcttcaaaaaaaaaaaaaaaaaaaaaaaaaaaaaaaaaaaaaaaaaaaaaaaaaaaaaaaaaaaaaaaaaaaaaaaaaaaaaaaaaaaaaaaaa

SEQ ID NO: 6849 - DNA, 1303 bp, Homo sapiens
ccgggctcctcctgctgctgggacagtgctctagtagaacagacagacctactgacacaggggaggtgagaagggaggtgaccaccaggactggctctgtgagtaccacacagtggggagggggtgggggccaccatgtcatcatatcagaaggaactggagaaatacagagacatagatgaagatgagatcctaaggaccttgagccccgaggagctagagcagctggactgcgaactacaggagatggatcctgagaacatgctcctgccagctggactaagacaacgtgaccagacaaagaagagcccaacggggccactggaccgagaggcccttttgcagtacttggagcaacaggcactagaagtcaaagagcgtgatgacttggtgcccttcacaggcgagaagaaggggaaaccctatattcagcccaagagggaaatcccagcagaggagcagatcaccctggagcctgagctggaggaggcactggcacatgccacagatgctgaaatgtgtgacattgcagcaattctggacatgtacacactgatgagtaacaagcaatactatgatgccctctgcagtggagaaatctgcaacactgaaggcattagcagtgtggtacagcctgacaagtataagccagtgccggatgaacccccaaatcccacaaacattgaggagatactaaagagggtccgaagcaatgacaaggagctggaggaggtgaacttgaataatatacaggacatcccaatacccatgctaagtgagctgtgtgaggcaatgaaggcaaatacctatgtgcggagcttcagtctggtagccacgaggagtggtgaccccattgccaatgcagtggctgacatgttgcgtgagaatcgtagcctccagagcctaaacatcgaatccaacttcattagcagcacaggactcatggctgtgctgaaggcagttcgggaaaatgccacactcactgagctccgtgtagacaatcagcgccagtggcctggtgatgcagtggagatggagatggccaccgtgctagagcagtgtccctctattgtccgctttggctaccactttacacagcaggggccacgagctcgggcagcccaggccatgacccgaaacaatgaactacgtcgccagcaaaagaagagataacactgcatttccctttaccaactagcgctgggagcactggacacttaaatcctcatctgtcctcctttcctgtaaataaaagcccttctatccaaaaaaaaaaaaaaaaaaaaaaaaaaaaaaaaaaaaa

SEQ ID NO: 6850 - DNA, 2525 bp, Homo sapiens
  misc_feature (16)..(16): n is a, c, g, or t
taccgctattaggtancatatagaacccgttgggtttaaacaacggctgtcggtcggaattcgggatgcgcacgcggagacaggtgttgcggccgcagcgccgcgcgctcctctccccgactcggagcccctcggcggcgcccggcccaggacccgcctaggagcgcaggagccccagcgcagagaccccaacgccgagacccccgccccggccccgccgcgcttcctcccgacgcagagcaaaccgcccagagtagaagatggattggggcacgctgcagacgatcctggggggtgtgaacaaacactccaccagcattggaaagatctggctcaccgtcctcttcatttttcgcattatgatcctcgttgtggctgcaaaggaggtgtggggagatgagcaggccgactttgtctgcaacaccctgcagccaggctgcaagaacgtgtgctacgatcactacttccccatctcccacatccggctatgggccctgcagctgatcttcgtgtccacgccagcgctcctagtggccatgcacgtggcctaccggagacatgagaagaagaggaagttcatcaagggggagataaagagtgaatttaaggacatcgaggagatcaaaacccagaaggtccgcatcgaaggctccctgtggtggacctacacaagcagcatcttcttccgggtcatcttcgaagccgccttcatgtacgtcttctatgtcatgtacgacggcttctccatgcagcggctggtgaagtgcaacgcctggccttgtcccaacactgtggactgctttgtgtcccggcccacggagaagactgtcttcacagtgttcatgattgcagtgtctggaatttgcatcctgctgaatgtcactgaattgtgttatttgctaattagatattgttctgggaagtcaaaaaagccagtttaacgcattgcccagttgttagattaagaaatagacagcatgagagggatgaggcaacccgtgctcagctgtcaaggctcagtcgccagcatttcccaacacaaagattctgaccttaaatgcaaccatttgaaacccctgtaggcctcaggtgaaactccagatgccacaatggagctctgctcccctaaagcctcaaaacaaaggcctaattctatgcctgtcttaattttctttcacttaagttagttccactgagaccccaggctgttaggggttattggtgtaaggtactttcatattttaaacagaggatatcggcatttgtttctttctctgaggacaagagaaaaaagccaggttccacagaggacacagagaaggtttgggtgtcctcctggggttctttttgccaactttccccacgttaaaggtgaacattggttctttcatttgctttggaagttttaatctctaacagtggacaaagttaccagtgccttaaactctgttacactttttggaagtgaaaactttgtagtatgataggttattttgatgtaaagatgttctggataccattatatgttccccctgtttcagaggctcagattgtaatatgtaaatggtatgtcattcgctactatgatttaatttgaaatatggtcttttggttatgaatactttgcagcacagctgagaggctgtctgttgtattcattgtggtcatagcacctaacaacattgtagcctcaatcgagtgagacagactagaagttcctagtgatggcttatgatagcaaatggcctcatgtcaaatatttagatgtaattttgtgtaagaaatacagactggatgtaccaccaactactacctgtaatgacaggcctgtccaacacatctcccttttccatgactgtggtagccagcatcggaaagaacgctgatttaaagaggtcgcttgggaattttattgacacagtaccatttaatggggaggacaaaatggggcaggggagggagaagtttctgtcgttaaaaacagatttggaaagactggactctaaattctgttgattaaagatgagctttgtctacttcaaaagtttgtttgcttaccccttcagcctccaattttttaagtgaaaatataactaataacatgtgaaaagaatagaagctaaggtttagataaatattgagcagatctataggaagattgaacctgaatattgccattatgcttgacatggtttccaaaaaatggtactccacatacttcagtgagggtaagtattttcctgttgtcaagaatagcattgtaaaagcattttgtaataataaagaatagctttaatgatatgcttgtaactaaaataattttgtaatgtatcaaatacatttaaaacattaaaatataatctctataataaaaaaaaaaaaaaaggagacccgggcagaacagtaccgactaaaccacccacacccgacacacaacacccggggcgcacaaccagagcgacagcaaaaagaactgggagaacacgagacaacaggcgccaagcggggcccggcgcaccgggcag

SEQ ID NO: 6851 - DNA, 422 bp, Homo sapiens
ggttcgacaactcttgtttttgttattgtatatttattttttcaaaaaaaaaagttgagtaggaaggacgtattgaaaaatggaggaatctgataacaagtagtatgaagtcagatttgtaagagtctgagaagaaataagtagagaaaacagaaaatggtgtgaggtttacagtgttaaccacaaagtgaaagcaggcaagaacgtggtgggtacctggctgggtaaaggtcactggcaaagctttggtgtccatagtgactcaaaacaaacaaacaaacaaacaaaaaacaaacaaaaaaacaggtacgataatctaccttaggctaaaaaaaaaaaggccaaatttcagcctgaaagggcccacagtatgcccaataaagagaaaatgctgacatctattaatacatctactatggtga

SEQ ID NO: 6852 - DNA, 519 bp, Homo sapiens
ttttttttttttttttttaatcaaatccagatttctgcctgtagctcttcctctcctatcctaccgctccaaatattaactttttgtggcttcggcctcaaatatggaatgtgtcctgaagctttctaaaacttcacacaggcagaaacttgtaatgaggaagaaacaagatctattcagtccagaaaggaacaataccagatgaggcatgagggaggtatgagaaatatccaacgggattagcgtcaaatcctcgggagaccttggcctttggactaggtcaagtctgcccacaaaaataggaaattgctctgggcccagtgagcaggtatggagagccacagtctcacacccacgcaagggcaagggccgggcctcatcaacgtgtcaacatggggatggagctgctaagtgaggcgctattgccacagcgagtgtgggcgatgacttcctttctgccttcctccctcactcattctcctctctgactctggaggtctggtctgcagtcttgacggc

SEQ ID NO: 6853 - DNA, 7600 bp, Homo sapiens
  misc_feature (2002)..(2034): n is a, c, g, or t
gagggacttctgtaaggcggcacgaccacaccaaataacagcagcagagggaggtgggggagagggaaataaaggggagtcatgcttaaaatgctacagcggtgtgaaacagcagagcaaagaagcgcccccagcttctgagagccctggcccgagtcccctcccccgttagaaacagggctttgggatggtcatggagcactgccagtaactccaaccgcagcacgccggcctgctcgcccatcctccggaagcggtctcgctcgccaaccccgcagaaccaggacggagacaccatggtggagaagggctcagatcactcctcggacaagtccccgtccacaccggagcagggcgtgcagcgcagctgctcctcccagtccggccggagcggcggcaagaattccaagaaaagccagagttggtataatgtgttaagccccacctacaagcagagaaatgaagacttcagaaagctctttaagcagcttccagacacggagcgcctcattgttgattactcatgtgcactccaaagagacattctccttcagggccgactctacctctctgaaaattggatctgcttctacagcaacatcttccgctgggaaactctgctgacagtccgtttgaaagacatctgttccatgactaaagaaaaaacagctcgcctcattcccaatgccatccaagtttgcactgattcagaaaagcacttcttcacttcgtttggggcccgggataggacatatatgatgatgttccggctctggcagaatgctctccttgaaaagcctctgtgtcccaaggagctctggcactttgttcaccagtgctatgggaacgaattgggcctgaccagtgatgacgaggactacgtgccccctgacgacgacttcaacacaatgggatactgtgaagagatccctgtggaagagaatgaagtgaatgacagctcatccaagagcagcatagagaccaagccagatgccagtccacagctgcccaagaaatccatcaccaacagcacactaacatccacagggagcagtgaggcccccgtctcgtttgatgggctgcccctggaggaagaggcgctggaaggagacgggtccctggaaaaggagctcgccattgacaacatcatgggggagaagattgagatgatcgctcctgtgaactccccttcactggacttcaatgacaatgaggacatccccactgagctcagtgactcttccgacacacacgatgaaggagaggtccaggccttctatgaggacctgagtggccggcagtacgtgaatgaagtcttcaacttcagcgtggacaagctctatgacctcctcttcaccaactcgcccttccagcgggatttcatggagcagcggcgcttctctgatatcatcttccatccatggaaaaaggaggagaatggaaaccagagccgagtgattctttacaccatcacccttaccaaccctctggctcccaaaactgccactgtcagggagacacagaccatgtacaaggcgagccaggagagtgaatgttacgtgatagatgccgaagtcctcacccacgacgtgccctaccacgactacttctacacaatcaatcgctacacgctcacccgtgtggctcggaacaagagccgactcagggtctccacagagctgcgctatcgaaaacagccctgggggttagtgaaaacgttcatcgagaagaacttctggagtgggctggaggactacttccgccatttagagagcgagctggccaaaacggagagcacttatttggctgagatgcacagacaatctcccaaagagaaggccagcaagactacaacggtgcggaggaggaagcgtccccatgcccacctgcgagtccctcacctggaagaggtgatgagcccggtcaccacgcccacagatgaggatgtgggccacaggatcaaacatgtggcaggttccacacagacggggcattttcccgnnnnnnnnnnnnnnnnnnnnnnnnnnnnnnnnntgcagagcgtgtccaagctgctgctggttatcagctgtttcagtctggtgctgctggtcatccttaacatgatgctcttctacaaactctggatgttggaatacaccacgcagaccctcactgcctggcagggtctaaggctccaagaaaggttaccccagtctcagacagaatgggcccagctcttagagtcccaacaaaagtaccacgatactgagctccaaaaatggagggaaatcatcaaatcctcagtgatgctccttgaccagatgaaggactcgctcatcaaccttcagaacggcatcaggtcccgcgactacacgtcggaaagtgaagaaaagaggaatcgctatcattgacaaggcaggaacagggtggctgcaagaggcctgtgcaatacatgtacatagaccatataaatatatatatataaatatatatatatacagaatataaatatatatattatatacagattttaaaaaagagataatgcctatgtaccagggagaaggagcgggccctcccgcgccctgtgctggccggagcagcgttttcttatggtggagcagctgaggagggcaggaaccgcctctcagcaccgacctcccctgatctccctcctcccaccctctgttccccaccccttcccttgctggccattcttggcttttagaagggaaatgttgagccaaagttatgcctgcgaagaccctaaggtctcaaaaagaagtcttaagacggcattgcttaaggtgcttcattccctaatccccttttgatttgtttccaaaataaaagagaatcttttcttccctaccccaggcttccccaggcattctcttgggaacacagaagcatcaagggagcccagtctaaactcctagggttggccacccacttgatccggaccgtactgagtgtcagatggagaggatgcttggaaagctaggaaggctgcattgtgtggtggcaggctcccgagactcgtgttctgaaggatactctcctccatcacccctgcaccttcctccgacctgtgtagggtgtggacccagtaagggctgggaatttcttactttcccacccgctttctctctggtcttctcccaggctggatctgggcgaagtgtcactttttagtgcctaaagtcctattgtttctctgtgccctaagagcacattgtttattagccagggtggagcgttttcgaccttattaaacctcttttagtgcttctaagcaagtcaggtctgtggctctgaggccttcacttagagctgtcagtgtgatttccaggatgagtcagggtgtgctgggccctccaggatttgagagagggagagaaggcccttgccacgtccggggtgcagggtctacccacagaacactgtgagtggtgagcaccaagatgggttgccagcctcatttgctctttgaacgaaccaacattagccagtggagacgactgtctgagacagtttgcacatagaaaaagcatctgagccactggagggaaggatttggcaaaggtgcatgtgtttgggcaggaaaaggccaagtgaaatctatgccctacgggagccattcccaatcctgagtttctcagacttggcaatgggggttctggcgggggttggagtacaaatcctgctctggtctctggccccacagaggtgtaagatcattaagaagtagaaggcactagcttcaaagagtgagacattcagggccttttcagcattggcccactagcaccatgcatttatctgaattcacggggccctctgggcacattcatcatccctcatacactaactactgtttcttcatgtaatgaccaaaagagtcccaccagctccaggcagagctcgtggagattcatgaaagagtcacagccagtttggcatgcagaggtcttcagtcttgcttattcttctcctgggcttcttgacacaggggcagaagaaaccccagatgtcccagatgtcccagaacatcagcccaaaagacagaagattttatcactcatctaccccaaagataaagttgtatttttctcttagaatggcctttaattccctgtggcaattacagtttttgacttttccatgtgagaataaggccttggtatttccctaagggcaggatcagaaaacaggaaggtccatgcccaggtgatcctccaagggaggagggtgaggaggctccagggcatgagctagagtggatattcctcccctagaagaggagatgggaggaaatgcagtttcatgtaatccctgtgaagagtgcctatgcccacagcccagtgggtccttgttcagttcttgtccaggcctttgggtgagggacactggtagggatcaaggctcatgggctctgagccaaagaaggaggcatggtgcagactgctggaaatctcccacttggcacagccagaagccaaaactattcccagaaagttttgaatgcaaaacttgtagattcctgaatttattccatacataattatttccttaagttatttaattattaaaggtgccacggtgggacctttgggatgacttaaaaagggttctttgttgggagtcaagtgacagagcagacctggccgcagggagttgttctgcttctgctttacctctcaggaccattcccaggaggaaaatgtggcagagagggcagtactgagtatgtcagaagagccctcctggttttttagcgatttgaacccactagacaatgtgtgcacatagggaatgtcctttaagaatcatggatctcttgtaggctctctgtgttccaataattttttgactatcataccaggaaaaaaccaacaactctattcattcccaaacaaaatctcttcccccttagtcaatagcttgcgaaagagatcttaactcacccttgcagataagtcttggagtgaaacaaataaatagcattgtattcctggccatttgcctggctagttgctgtctacaagggagcatcaaaacatcactacttcttatgtaacttcttccagccagtgcttttattgttcgttttagtttactggggacacacaggagtctttctgtaatgacttatgtggtaaaatgtttgagagtttgcactcaattttaaagaatttgcagtttctaacaaggtgaagaacagctataggatctaaagttccattacagcttactgtgaaagaattgacaagactggcctcagacaagctaatcatggtgcgactctctcccttcctcatccacctctttggggacaagaggattacatctcaggccagcaagatcagctgcttgaagctctgtgtaagagcactgcactgacggtttggagacctgagcctgggtcctgacttttccattgactaagctctgtggccttgggcaagtcactccccctctctgagcttcagtatcctcctgtcacaggagggagttgggctagatcatctttaaggtaggttctagctttgacatcatcttgggggttaggccagaggctgggaagactgggtggactttctcaattgctctgccaggagggaacaagcccagaggctgaagcttcccagtatttagaggtgtggtagggcagtgtctgcattcccaggagacccagggtgattaaaatttattctttaggtggctaggagggctggggaggcccagtggaagagagagagagagagagagagagagagagagagagagagagatcgagagagatcgagcttgatgtattgctcagtattcacttagaagggtttctttctctttggcctagtttgtgaagggatcttcctttggactttctctaagttgggagaagaacattcttttcaatggagctcatcttctatctctagggtctgttcagcctttcatctatccatccttcctctttattggtagaagaaacagtggagagtagccacttctggttctagcacttctcttttgttaagatagggtttggatttagtatgaagctttggctaaaacccttgggtttgccttagaacactgacactaagaacctggaatgacatggggaggacaaagagagctcaagaggaatgctttgtgagaagtggattctctccgtgtccctgccccccacccaaacttgaactatacctattacatttccaggcagtatccctaagatgagatcctggagaaaggactaggggaagtatctttctggatgcttgtggtcccagaagggtactttctgtgtcataccatgccacttctttaagctcttcagggcagccaaagccagcccttttctcctactgcccccaggagaaatagcactcttctcccttcccccagatggcagggctctggcctccctacacctcataccctgcctgcctcctccaggaggaatctccggggccccttcctgactctccccaccttcgccacttgtctctaggctatgggacaatcatcccattcaccacttgacatccttgacatccttgactttcattcccccaacctccagcaggttggccccaatcctcttcacctctgtgttttcttctagaagatgcattttgggtctgagaggagcattttcctggaaggccatcttttaaggcccctgcttgctgtcatagtgcagagcagaaacttgcacactatttagagagctcccttcccacctctctgcccagccttgttacctcacttctgctctggccatggctgtgaagggcccagccagctccctgttttgatgttctgtgcaacagctccggggtcttgtgactggagatcctcaacaggccctggagccaggactggagtcttggcagctgatgagcagcaccttgccggccaggaggagctgatgctgacgatctccccaacatctgaaggcttaaagaacattgtcgttcttcagccctccttgcttctctcaatacaataagacattgcagaagcaaaagggtggcctctgctccaggcaaggcagctggctctgtctggggcatcggcctggggcttgggtgccacgtgctgagattgcatagtcaaaacagccatttttgccaacaatagcttgtggctccccacattttcctaccctgcactcaagggccagaccactctctgcatggaccagaccatcttcccaaacccatggtgctttttccccaactcaacctagactccaaggtggggagggatgggtcagaggccatagtggcccctggataatcctgacgtggggtggagtggggtgaggcagagggagcagccccaacacctgcactgggccatctatgggaaagaacacgggtcgagtgcagtcgagttgtctggccatctgtatttggatctataactgtactttgcctggcgctgtgcgcaaggtcagaaaacttactgctagtacctagaaacacacaaggctgcccagccaaatcttaatgtaaagtagctagagccatggaagtacagtatgaattaaaaagaaaaaagtattgaactacaaaaaaaaaaaaaaaaaaaacctcgtgcc

SEQ ID NO: 6854 - DNA, 1559 bp, Homo sapiens
tatgtctcggatcgttaaagcccttcgcagtttgttgtttgtatactttaaaccccgctcctcagggcctgggccgtttctgaagctgcttcctcttataaaatagctctggccgaaacatagttttttttttagcagatcccaaaatataatgaaggggatggtgggatatttgtgtctgtgttcttataatatattattattcttccctggttctagaaaaatagataaatatatttttttcaggaaatagtgtggtgtttccagtttgatgttgctgggtggttgagtgagtgaattttcatgtggctgggtgggtttttgcctttttctcttgccctgttcctggtgccttctgatggggctggaatagttgaggtggatggttctaccctttctgccttctgtttgggacccagctggtgttctttggtttgctttcttcaggctctagggctgtgctatccaatacagtaaccacatgcggctgtttaaagttaagccaattaaaatcacataagattaaaaattccttcctcagttgcactaaccacgtttctagaggcgtcactgtatgtagttcatggctactgtactgacagcgagagcatgtccatctgttggacagcactattctagagaactaaactggcttaacgagtcacagcctcagctgtgctgggacgacccttgtctccctgggtaggaggggggggaatgggggagggctgatgaggccccagctggggcctgttgtctgggaccctccctctcctgagaggggaggcctggtggcttagcctgggcaggtcgtgtctcctcctgaccccagtggctgcggtgaggggaaccaccctcccttgctgcaccagtggccattagctcccgtcaccactgcaacccagggtcccagctggctgggtcctcttctgcccccagtgcccttccccttgggctgtgttggagtgagcacctcctctgtaggcacctctcacactgttgtctgttactgattttttttgataaaaagataataaaacctggtactttctaaaaaaaaaaaaaaaaaaaacacaaaacaaagaaaaagacactaaacaatagcaacaacacgaaacatcgcaaccacacacaatatatcacgcacacgcagagccgactccaaatgccacaacaatacagcgcggcacgacgatcaagacataaaataagacatcagacaggggggcccaccgaacaatgactgactgcacgcctatgctatatgacaacaggagggcgcctgcctgcgtcttagagacgattacgtataacgacggaagccggacgcgacgacgcgatgttatacgaccagcggagatcgaggggaatgaagacctaggctgcaggagagcgtgtgctagagggaccacacccctatctgaggggccgacagtcagattgagaccaagcgaacagagaagagtaaggacgcggtagataaaccatatagggaggatggcggtgaacagcgctctacttcgggccgaagacagtcgggagggatcgtagtgaaaata

SEQ ID NO: 6855 - DNA, 2092 bp, Homo sapiens
ccaagcgccatgagaggccttctttgctggcccgtgttgctgctccttcttcagccctgggaaacccagctccagttgacaggtcccaggtgtcacactgggcccctggatctggtgttcgtgattgacagctcccgcagcgtgcgccctttcgagttcgagaccatgcggcagttcctcatgggcctcctccgaggcctgaacgtgggtcccaacgccacgcgcgttggcgtgatccagtattcgagtcaagtgcagagcgtcttccctctccgcgcgttctctcgccgcgaggacatggagcgcgccatccgcgacctggtgcctctggcgcaaggcaccatgacgggactggcgatccagtacgccatgaacgtggccttcagtgtggccgagggcgcgcgaccgccagaggagcgcgtgccgcgtgtcgctgtcatcgtgacagacgggcggccccaggaccgcgtggccgaggtggcggcacaggcgcgcgccagcggcattgaaatttacgcggtgggggtgcagcgcgcggacgtgggctccctgcgcgccatggcatcgcccccgctagacgagcacgtcttcctcgtagagtccttcgacctcatccaggagttcggcctgcagttccagagccggctgtgtgccattgatctgtgtgctgaagggacccatggatgtgagcaccactgcgtcaattccccaggctcctatttctgtcactgccaagttggctttgtactccagcaggaccagaggagctgcagggccattgactactgcagctttgggaaccatagctgtcagcatgagtgtgttagcacccctggtgggccacggtgccactgcagagagggccatgacttgcagcctgatgggaggagctgtcaggtccgggacctttgcaatggcgtggaccatggctgtgagttccagtgtgtgagcgagggcctctcctaccgctgcctgtgccccgaggggcggcaacttcaggcagatggcaagagctgcaaccggtgccgggaaggccacgtggaccttgttctgctggttgatggctccaagagcgtgcgtccacaaaacttcgagctagtgaagcgcttcgtgaaccagattgtggacttcctagatgtgtcccccgagggcacgcgggtggggctggtgcagttctcgagccgcgtgcgcaccgagttccctctgggtcgctacggcaccgcagccgaggtgaagcaggcggtcctggccgtggagtacatggaacgcggcaccatgacagggctggcgttgcggcacatggtggagcacagcttctccgaggcgcagggtgcacggccccgtgcccttaacgtgcctcgtgttggcctggtcttcacggatggccgctcccaggatgacatctcggtgtgggcagcgcgcgccaaggaggaaggcatcgtcatgtacgccgtgggcgtgggcaaggcggtggaggcggagctgcgcgagatcgcctcggagccagcggaactgcacgtgtcctatgccccggacttcggcaccatgacgcacctgctggagaacctcagaggcagcatctgtccagaggagggcatcagcgcagggacagagcttcggagcccatgcgaatgcgaaagcctcgtggagttccagggccgcacgctgggggcgctcgagagcctgacgctgaacctggcccagctgacggcgcgcctggaggatctggagaaccagctggccaaccagaagtgagggccacggacggcccagacccgggctggggcgcggcaccacggacggtgccccttgcgcgccatcggtgcgccggggccaggcagaacctgggcccgtccggcttgggctgtcggggcggaggcgctggcgggcttccggcattgagctgagttggcctcgcccggaccattaggcggactgcggcgtcagggggatagcgggtggtgagggaaggggcacgtgctagaccggcacgccctcgccgcgtgctgcgctcagttctttgttggatttcttgtttgtgttcttaaaaaaataaaaaaaactgatttccacggaaaaaaaaaaaaaaaaa

SEQ ID NO: 6856 - DNA, 595 bp, Homo sapiens
ttttttttgttctaggaattgtttatatgtctctgatgagacaagttctcaggacatagacctggggtagaatcacatccgtgatgggaatgtgggatcagttttgggcacagccttggcacgccatccttcatcctatgagtggactgtgtcatagttaaaaaataaatatctaaaactgatacagtatcatttctcaaatagaccaaggaaaatggaaaacaaaataattcagcttttcagaatatctgaaaagatgacattgatattgaacagggacctggttatggaccacaggaggccagtcattggcattgagtccatgatccaaggtcagtggctctaagtggtaaagccaaggaacgggaacccacgtaacgtgtccttcagtctgtccttatcaagacaggacaatggctggtatttctaatccttatcttacttgcttttgaaatgaagcagaatctcttaagatggaaggaaaggaaagtcaattttacagccagaggtaggaaagcgtgagttgttttgtgaaatggtcattccttgcacatcttataggcatcctgagagccttgttcagccccatcttgag

SEQ ID NO: 6857 - DNA, 3855 bp, Homo sapiens
  misc_feature (69)..(69): n is a, c, g, or t
  misc_feature (81)..(81): n is a, c, g, or t
  misc_feature (585)..(694): n is a, c, g, or t
  misc_feature (1186)..(1217): n is a, c, g, or t
  misc_feature (1406)..(1441): n is a, c, g, or t
ctactagactatgggcacaaagaagaggggaccactgtgagttgctatgatgcctgtcccaccctgcanagtaccaggcanacagcaggtgtttaattagtacctacaagaggaaagatagactcaacttgccctccccctacacagaagcccctctaatgttttcttgtttctcttgcaggctcctgatggaaagggaaggcccctagtcctggcaggatctgccggccccaacccgcatcctttctgcgcaggaaccatggcgcttccccgactctggagctgtccaggtgctgcctggtgatccgcacgcgacgcggcgacgggggcgcgggcgggcaccccgggggctgtccatgccccggatgcggccgcgccccctccccctccagccgggtacccccgcggctgggcggcgttcagggccgcgggcccgtccgggtgccccgtcgggggcgacatcccggcggccgcgctgaggccaccatgtgacacggcgccgcatcgttgtgcgaccaagcagcggcgccctggtgcctctcgtccatgctcctgggccccagccccgcgcaggccaaggatgannnnnnnnnnnnnnnnnnnnnnnnnnnnnnnnnnnnnnnnnnnnnnnnnnnnnnnnnnnnnnnnnnnnnnnnnnnnnnnnnnnnnnnnnnnnnnnnnnnnnnnnnnnnnngcgggcacaccctcgccgtcggcgcccggagctcggcaggacggcgcgctgggagccggccgcgtcaaacgcggctgggtgtggaaccagttcttcgtggtagaggagtacacgggcacggagcccctgtatgtgggcaagatccactccgactcagacgagggtgacggggccatcaagtacaccatctcaggcgagggtgctgggaccatcttcctgatcgacgagctgacaggcgacattcatgccatggagcgcctggaccgcgagcagaaaaccttctacacgctgcgggcccaggctcgggatcgcgccaccaaccgcctactggagcccgagtcggagttcatcatcaaggtgcaggacatcaatgacagtgagccccgcttcctgcacggcccctatattggcagcgtggccgagctctcacctacaggcacgtcggtgatgcaggtgatggcctcggatgcggatgaccccacgtacggcagnnnnnnnnnnnnnnnnnnnnnnnnnnnnnnnngcgagcaccacttcaccgtggaccccaagaccggcgtaatccggacggctgtgcctgaccttgaccgcgagagccaggagcgctacgaggtggtgatccaggccacagacatggcgggtcagctgggtggcctctcgggctccactaccgtcaccatcgtagtcaccgacgtcaatgacaacccgcccnnnnnnnnnnnnnnnnnnnnnnnnnnnnnnnnnnnngagtcagcccccattggaacggctgtgggacgtgtgaaggctgaggactcagacgtgggagagaacacagacatgacttaccaccttaaggacgagagcagcagcggcggcgatgtgttcaaggtcaccacagacagcgacactcaggaggccatcatcgtagtgcagaagcgcctggacttcgaatcccagcccgtgcacaccgtgatcctggaggccctcaacaagttcgtggacccccgcttcgccgacctgggcacgttccgcgaccaggcgatcgtgcgcgtggccgtgaccgacgtggacgagccccccgagttccggccgccctccggcctcctggaggtgcaggaggacgcgcaggtgggctccctggtcggcgtggtgacggcgcgggaccccgacgccgccaaccggcccgtccggtacgccattgaccgcgaatcagatttggaccagatcttcgatatcgatgcggacacaggcgccatcgtgactggcaaggggctggaccgcgagacggccggctggcacaacatcacagtgctggccatggaggcggacaatcatgcacagctatcccgggcatccctaaggatccgaatcctggatgtgaacgacaatcccccagaactggccacaccctacgaggcagctgtatgcgaggatgccaagccaggccagctcatccagaccatcagcgtggtggacagagacgagccccaaggcgggcaccgcttctatttccgcctggtgcctgaagctcccagcaaccctcatttctctctgcttgacatccaagacaacaccgctgcagtgcacacgcagcacgtgggcttcaaccggcaggagcaggacgtgttcttcctgcccatcctggtggtagacagtgggccgcccacactgagcagcacaggcacgctcaccatccgcatctgtggctgcgacagctccggcaccatccagtcctgcaacaccacggcctttgtcatggccgcctccctcagccccggcgccctcatcgccctcttggtctgcgttctcatcctggttgtgctggtgctgctgatcctcaccctcaggcgccaccacaagagccacctgagctcggacgaggatgaagacatgcgggacaacgtcatcaaatacaacgacgaaggcggcggcgagcaggacaccgaagcctacgacatgtcggcgctgcggagcctctacgacttcggcgagctcaagggcggcgacgggggcggcagcgcgggcgggggagcgggcgggggctcgggcgggggcgcgggcagccccccgcaggcccacctgccctccgagcgccactcgctgccgcaggggccgccgagccccgagccagacttctcagtgttcagggacttcatcagccgcaaggtggcactggcggacggggacctgtcggtgccgccctacgacgccttccagacctacgccttcgagggcgcggactcgccggccgcctcgctcagctccctgcacagcggctcgtcgggctccgagcaggacttcgcctatctcagcagctggggtccgcgcttccggcccctggccgcgctctacgccggccaccgcggggacgacgaggcccaggcctcctagcccctcgccctgccgtcggggcgcggctgctcacccgcccagcacacgccggggccccaggacaacgcgtttcccccgcggaccccctttcctgccctcccccaaccctcccttggcggctggacggaggggggacttgctaggagcggactcttccattcctcctcctctaggggtgcagctttggagcccagaggtgcgggattctgaccaacggcattaaaactgaggcgagaccgggcacggtgtggctctggggttagaatgggagatgggggtggcgttgcagagtcgggaaggggcgggtcactcaatcctggcctgggggagaatgctggagggagcacgccgctgagatgcccccaccccaggtttcccccatcagagttaagaggaaagaaggctgttcacttactaagcacctactgtgtgctgggacgctgtacagagaccagctcagtcgtcagagaaaccatgaggtggtgtcctgcacggaatagaaggggaaaggaccccagagaagtggctgtgacccgtccaagggcacctggccagtgaatggcagagcctctggcactgaccagctgcctggcctcgggcaagtcacttcacttctctggtcctcagtttcctcatctgtcaaatggggttaataacagaacctacctcgaagagttgtgaggctaaaaagggttcatatgtgtcaagtggttaggacagtgcctggcacatagtaggtgttcaataaatgctagcctttgttactattaaaaaaaaaaaaaaaaaaa

SEQ ID NO: 6858 - DNA, 1197 bp, Homo sapiens
  misc_feature (867)..(1034): n is a, c, g, or t
ttttttttttttttttttttttgaggtttatgctcattttattataaaaaaatacagaatccaaagttgattgtgacgggaagagggaggcccggtcgccagctccaggcctggcaacgcggacccgccccgccgaccccctacaaaagccctctgcccaccccccaccaccgggcgtgcctcgagccgccggccggcggttctacgaatatatatttatatataatatatataaaacacagagtcaggaaaggcgggtagaaatatgaaatccgtataaatgtgttgtttccttcattaaagtgtcttcggggaggagtttctttttttttttttggtagtggttccctcccttttgtcctttttttctttttcttagaaacattatcaggtcacagagttgagagaggggctctgacagacgacacgagcttattgccaagtgcagcttctactctaaaagtccaccccacccccccaccaaaataaaagaccccctatgaagggctgaaaaaacatagacggtccagtccgtcctcaggaatacgtggaaaataaaatcacagtttgcacttgctggctgtatttacaggaacagaaggtcttctcggcctcggagagggaccgtgtgaggcgagggggacgggtagggggctgtttgcatcggccaaagcagtttctaagacacggtgggactgtgattccgaagggcgctggggcaaaacagtgtctgggaggaaatgaccaggaggacgggggtgggcgatggggtatgaggtctccccagccacaatgaggggcgcccaccacgtaccccttccggctcagactcacccaacctggagcaccaggggggtccggttgtcnnnnnnnnnnnnnnnnnnnnnnnnnnnnnnnnnnnnnnnnnnnnnnnnnnnnnnnnnnnnnnnnnnnnnnnnnnnnnnnnnnnnnnnnnnnnnnnnnnnnnnnnnnnnnnnnnnnnnnnnnnnnnnnnnnnnnnnnnnnnnnnnnnnnnnnnnnnnnnnnnnnnnnnnccacacaacaaccacaccacccacacagacacaacacatgaccacacaaaaacagacacagcaccgaacaacacacccccaccaccacaccacacaaccacaaccaccaaaccccacacccacacagacacaacagaagagaccagacacgcaccaaacacaa

SEQ ID NO: 6859 - DNA, 2062 bp, Homo sapiens
ctccccccgggggggtctattacatttagatctgacccatttttttgacctaaatggctttttggatttttttgttttttttgtacacctcctttagctttatgcgctcagaaacccaaattaaaccccccccccgcatgtaacaggggggcagtgacaaaagcaagaacgcacgaagccagccgggagaccaccacgtcctgccccccgccatttatcgccctgatgggatttggtttttcatctgtccctgtggctggggttgagttgagggtggagcctcctggggggcactggccactgagccccctgtggagaagtcagaggggagtggagaaggccactgtccggcctggcttctggggacagtggctggtccccagaagtcctgagggcggaggggggggttgggcagggtctcctcaggtgtcaggagggtgctcggaggccacaggagggggctcctggctggcctgaggctggccggaggggaaggggctagcaggtgtgtaaacagagggttccatcaggctggggcagggtggccgccttccgcacacttgaggaaccctcccctctccctcggtgacatcttgcccgcccctcagcaccctgccttgtctccaggaggtccgaagctctgtgggacctcttgggggcaaggtggggtgaggccggggagtagggaggtcaggcgggtctgagcccacagagcaggagagctgccaggtctgcccatcgaccaggttgcttgggccccggagcccacgggtctggtgatgccatagcagccaccaccgcggcgcctagggctgcggcagggactcggcctctgggaggtttacctcgcccccacttgtgcccccagctcagcccccctcaacgcagcccgactagcagtctagaggcctgaggcttctgggtcctggtgacggggctggcatgaccccgggggtcgtccatgccagtccgcctcagtcgcagagggtccctcggcaagcgccctgtgagtgggccattcggaacattggacagaagcccaaagagccaaattgtcacaattgtggaacccacattggcctgagatccaaaacgcttcgaggcaccccaaattacctgcccattcgtcaggacacccacccacccagtgttatattctgcctcgccggagtgggtgttcccgggggcacttgccgaccagccccttgcgtccccaggtttgcagctctcccctgggccactaaccatcctggcccgggctgcctgtctgacctccgtgcctagtcgtggctctccatcttgtctcctccccgtgtccccaatgtcttcagtggggggccccctcttgggtcccctcctctgccatcacctgaagacccccacgccaaacactgaatgtcacctgtgcctgccgcctcggtccaccttgcggcccgtgtttgactcaactcagctcctttaacgctaatatttccggcaaaatcccatgcttgggttttgtctttaaccttgtaacgcttgcaatcccaataaagcattaaaagtcatgaaaaaaaaaaaaaaaaaaaaaaaaaaaaaaaaaaaacagaacaagaagagaaaacatcaacaccacgggcaagaagtaattcaaaccccggggagaaagggggggggagagggggggggcgccccacaagcgggggagggggacacaccgggggacccccgtggggaagagagctccacccgcgagaaaaccccgtggggacacaaagggcgcacgcgacgaacaaaaagcgtggtctgcacccgcaggaaaagcgctccgctcaccggcacaaacagggaaggttgcgacgacacccaacatgtaggcacaggtcgcctgagcccaagaccgcaaaagggcgacccacagaagaacggctggccgctcgatcaaacagggggggccaccccaacaaccctcagcagggggagcacaaacacctcgacgcaccaaaacgcccaggaagaccgacgagcccgaattggaccacggggaggtccgcaccccagctcgagaaacagtgagagcgcc

SEQ ID NO: 6860 - DNA, 727 bp, Homo sapiens
  misc_feature (8)..(9): n is a, c, g, or t
  misc_feature (17)..(17): n is a, c, g, or t
attgaggnnggcgggancgaaaaggttttttttttttttttttttttttttttttttttttttttttttttttttttttttttttttttttttttgtctctgtaatttctttaattattcaaacaatagagcacaaagataacagtttcaagtacattgtgatacacgttttgacaggaatagatatgcatttagtcatgagggaggctggcagcaaccaccatgcatacattttgcacaaactcttggctccgtcaaccctgaatgagaagtcggcgcctcgtcctggcggggctgggctgcaccctcttgatgccctgtacctagtgtctctaagcagtggtttcctttccttgcctgtgaaaaagagaattttaaatataaagcagtggacgcatcttaagaagatggaccaggagggctggggacagcacccagcagcacggacactctgccaccgggcctgtccaggagggagtgccacccaggagtgaggatttcccatccgggtgaagctctgctccaaggtgccccagtcaccagcagagttgcaccatggcctcaggcaccttggggcttggtcaacgcctggcttctctctgatcgtctgggctgcacggccacattgccaggtctgtctacacagccagaggagctgctgtgcccggtgcttctggttcgctttcgactgaccctcgtgccgaattcttggcctcgagggccaaat

SEQ ID NO: 6861 - DNA, 1280 bp, Homo sapiens
ggtgctttgggctctccttccttctcagacaagatgtcttatcagaaaaagcagcccacccctcagcccccagtggactgcgtgaagacctctggcggcggtggcggtggcggcggcacgggcggtggtggctgcggcttcttcggcggcggcggctcagggggcggtagcagcggttctggctgtggctactccggcggcggtggctactctggcggcggctgcggcgggggctcctccggcggcgggggcgggggcggcattggaggctgcggagggggctccggtgggagcgtcaagtactccggcggcggcggctcctccggcgggggctctggctgtttctccagcggtgggggcggctccggctgcttctcctccggtggcggcggctcctccgggggaggctccggctgcttctccagcggtgggggcggctcctccgggggcggctccggctgcttctcctccggcggcggcggcttctcgggccaggcggtccagtgccagagctacggaggcgtctctagcggcggctcctccgggggcggctccggctgcttctccagcggcgggggcggcggctctgtctgcggctactctggcggcggctctggcggcggctctggctgcggcggaggctcctctggcggcagcggctccggctacgtctcctcgcagcaggtcactcagacctcgtgcgcgccccagccgagttacggaggggggtcgtccggcggcggcggcagcggcggaagcggctgcttctccagcggcgggggcggcgggagctccggctgcggcggcggctcctccgggattggcagcggctgcatcatcagtggcgggggctccgtctgcggaggtggttcctctggaggcggcggcggcggctcctccgtgggtggctccgggagtggcaagggcgtcccgatctgccaccagacccagcagaagcaggcgcctacctggccgtccaaatagatcccccagggtaccacggaggcgaaggagttggaggtgttttccaggggcaccgatgggcttagagctctcatgatgctacccgaggtttgcaaatccttcatgtcttaacctacctggaagaagccattgagctctccggctgcatctagttctgctgtttagcctctttggtttctgtacaactacctcccaaccccagtgcctcagtcaataaatttgcaaattcatgagaaaaaaaaaaaaaaaaaaaaaaaaaaaaaaaaaaaaaaaaaaaaaaaaaaaaaaaaaaaaaa

SEQ ID NO: 6862 - DNA, 3000 bp, Homo sapiens
gtgcgcacagcctagagcccgcctccgtgaaagactgccgggcgcatgcggtcggggttgttcactggctgtccggctatccgcgcgcgtcgccggcccagtcctgtcgctgacggggatctgaagccggccctgcaggtcaaagagtaaaatgaagtacattctggttactggtggtgttatatcaggaattggaaaaggaatcattgccagcagtgtgggcacaatactcaagtcatgtggtttacatgtaacttcaatcaaaattgacccctacattaacattgatgcaggaacattctctccttatgagcatggtgaggtttttgtgctggatgatggtggggaagtagaccttgacctgggtaactatgagcggttccttgacatccgcctcaccaaggacaataatctgaccactggaaagatataccagtatgtcattaacaaggaacggaaaggagattacttggggaaaactgtccaagttgtccctcatatcacagatgcaatccaggagtgggtgatgagacaggcgttaatacctgtagatgaagatggcctggaacctcaagtgtgtgttattgagcttggtggaaccgtgggggacatagaaagcatgccctttattgaggccttccgtcagttccaattcaaggtcaaaagagagaacttttgtaacatccacgtcagtctagttccccagccaagttcaacaggggaacagaagactaaacctacccagaatagtgttcgggaacttagaggacttgggctttccccagatctggttgtatgcaggtgctcaaatccacttgacacatcagtgaaggagaaaatatcaatgttctgccatgttgagcctgaacaagtgatctgtgtccacgatgtctcatccatctaccgagtccccttgttgttagaggagcaaggggttgtagattattttcttcgaagacttgaccttcctattgagaggcagccaagaaaaatgctgatgaaatggaaagagatggctgacagatatgatcgcttgctggagacctgctctattgcccttgtgggcaaatacacgaagttctcagactcctatgcctctgtcattaaggctctggagcattctgcactggccatcaaccacaaattggaaatcaagtacatagattctgcggacttggagcccatcacctcgcaagaagagcccgtgcgctaccacgaagcttggcagaagctctgtagtgctcatggagtgctggttccaggaggatttggtgttcgaggaacagaaggaaaaatccaagcaattgcctgggctcggaatcagaaaaagccttttttgggcgtgtgcttagggatgcagttggcagtggttgaattctcaagaaacgtgctgggatggcaagatgccaattctacagagtttgaccctacgaccagtcatcccgtggtcgtagacatgccagaacacaacccagggcagatgggcggaaccatgaggctgggcaagaggagaaccctgttccagaccaagaactcagtcatgaggaaactctatggagacgcagactacttggaagagaggcaccgccaccgatttgaggtgaatccagtctggaaaaagtgtttggaagaacaaggcttgaagtttgttggccaagatgttgaaggagagagaatggaaattgtggagttagaagatcatcccttttttgttggggttcagtaccaccctgagttcctgtccaggcctatcaagccctccccaccatactttggcctcctcctggcctctgtggggcggctctcacattacctccagaaaggctgcaggctctcacccagggacacctatagtgacaggagtggaagcagctcccctgactctgaaatcaccgaagtttccatcaataaatcatgactgatcttgtagcggatgattcttcaagagacccttcaaacttgggtagaggtttacaggctcttgactttacactcggctttggagactttctttaaattatgtttttattaagattattttattatgcggaaaggtatttgggaaacttgtcacttgcatgtcccatcacgtgtactggctcctctgtggtgtctgcctgttgcgtgacactctccttgcagttcttgagttgcggcagaacatcgcgatgggaaccgatggtgggtggggctgcagagtgccccatcggtcaccttgtttctcaactacctcgcatcattgcagatgctagcgcgttgcctgtcgctttcccttggatacctagaccgttataaagtgtgccacatggacttaccgagcatggagagaggattttagctaggatttgaacacttggtgctgggaacctcagggtattgcttgccactaagccatgaaaccagagacaaaatctctatactgccctgagttggggggaattctcagtgccaactgtggctggtcctcattcaaagggacggtcagtttggtgtcaacatgaaacaccaagatgtctgtctctgaagcgtgattttaaaatccccatgcctgtggctgcgcttcctatttctagggctgggaaacactccttgcatcaaggggtcacttacagaacaaagaatcttttgggggaaacttcctctaaaaccctctcatatatagacagctttgactggagggtccatttttcttccaggatggtgttactgcagttgaaagggcaatatgaagttactttcttaatgtgacctagcaataggcatagctacgtggcactatattctggccagactcgatgtgtactctaacttaagaaataaatcagtaaggcagaacaagaaaaaaaaaaaaaaaaaaagctaaaatatccttgagggccagttttcggtcccgtttttggcaaggggccaaaggggggggttaaaaaaaaggaggcggggttaaacctggtgggaaagccttgggctgggggcccttctggggatggaaccaggatagtg

SEQ ID NO: 6863 - DNA, 1444 bp, Homo sapiens
  misc_feature (83)..(83): n is a, c, g, or t
  misc_feature (299)..(313): n is a, c, g, or t
aagtctcagaggctggagagcagagcaccaagatcgttctggcaggaacagccagtgggaggttccagctgagcgctccccanaggtgagctgatccccagccacagcacacaggaccaggctgcgagaacagcatcatcagcatcatgctattacaatcccaaaccatgggggtttctcacagctttacaccaaagggcatcactatccctcaaagagaaacctggacacatgtaccaaaacgaagattacctgcagaacgggctgccaacagaaaccaccgttcttgggactgtccnnnnnnnnnnnnnnntgttgatttcaagtctgggggccatcttggtttttgctccctacccctcccacttcaatccagcaatttccaccactttgatgtctgggtacccatttttaggagctctgtgtggtaggagtcaatgaagacatcttagtcttaacaagttacagataatctctgactggcatgttttctgcttctagcttggagctaaatgctgctcatgctgaaaagaataatgtctatatctttgtttgggtattagctctattttgatctatagcacagttttgtaattcagatcatcacccctgcactttgtaccacatgggcgtattctttcttcccagtcattgctgcaattatcttgtctgttctttgtgtaatatgttctgtgtgagcctctgcattaaactcgatttcttgggcaattatggaaattccagtgtggctgcagtttaactttgcactctctatgcatatgaggtttcctaaataaatgaggagtagcatagtttaaaatatatatatcttataactttctacaacaaagaattattgagtccaaatgtcatcagtgctcattttgagataccctgctatcgatggtcgctacaaaccaggaaatactcaagttattatgtgtatacattggttttagttttatgaaacaatttaccttcatgatctcatagttaaaattgtaataaatttaggaatataaaggatcaatatgggaagcaaaatttctaaaggcagtttctgttgttttaattagtatttgtgtagttcaaaccaggaaggatttgactatcattagattttgcttaactttatgaaagctaaaatattctctgttataaaggggcaactccatctggtcctatagcatctttactactgatttttttttgtttaatttgaaaatgcaaagaattgttaaatgttcttaaatgttctcactacaaaaaaagaaaaaagataactacgtgaggtgatggatatgttaattagctggattgtggtaatcattttggaatgtatatgtatatcaaaacatgtagtacaccctaaatatatataatttttatttgtcaaatatacctcaataaagatggaaaaaaatcgaaaaaaaaaaaaaaaaaa

SEQ ID NO: 6864 - DNA, 1180 bp, Homo sapiens
  misc_feature (351)..(371): n is a, c, g, or t
gcttgcggccgccaattttttttttttttttttttttttttttttttaggaacgaggtcttgctatgttgtccaaactggtctcaaactcctgggctcaaagtcttcgcaccttggactcccaaagtgttagggttacaggtatcagccaccatgcctgcctgtttctctctctctctctctctctctctctctatatatatatatacacacatatatatatttttttagggttagtcaagtgaagcagtgggagcagagaacgaatgctcttctttatataaaaatgcaaataaatgtggaagaaatgttagaaaattaccattttccaactgccaaaggaataatttannnnnnnnnnnnnnnnnnnnnctaaaactattgggtgacaggctatgggaagaaaatggatatttactcagcttcatgtattagcataagaattatatgctgatttatataaaagggaaaaaaagtagttacaatggagaaatattgtgaacaggcagtcgtaaacggagtgatcaaacctaacattacctttcgtctgtgatgtagtacgtaaaaaacacatcactcattagaatccctgccaaaaatgtttaacctgaagctaatcaagaggaaatcatcacagatgtcctaattgagatacattctgcaaaactacaggcctatactgggggaaaaatgtcacagaaggtagggagaaaggctaggggactattccaaattgaaggagactgaagaactatgacatctagctatggaatcagggtggggacaggacaaattataaaggacattattgaggtcaactggggagatagtattgtatttgtattttaatattcctcataagtgtatggtggttataccagaaaatgtcttcgttcttaggagatacatgcaagagagtttataaatgaggaataaagcaaactttcaaattgttcagcacaaaaataaaatatatactcataaataaatcaaatgtggcaaaatgttaacaacagatacaatctagatgaagggtatgtggatattaaatgactttagtattctttcaactttcctatagttttgaattttttttttttttttttttgagacagagtctcgctgtcaccaggctggactgcagtggcacgatctcaaaaataaacaaataggtatataag

SEQ ID NO: 6865 - DNA, 604 bp, Homo sapiens
gttttttttttttttttttttttttttttgagcggtagcaagctttattgtgaagagcaaaatgacaaagctcccacagcgtagaaggggacccgagcgggttgcccatcactggtcctttctgggggttccttccccaagtttcatagggatttacaggctagagcttttgtccgctattcagtagcaggtcacaataccttcaatcctgctctaatcagaggcatctctgccataacttcaggaggaattgagggagagggggcagcaggagccctctgtgtactggggaaggaaagaattcctggcttatactccctaaagacaggactacactcagatgtggatgaagggcaggaattctaacccctgcccctcaacacacacatccctgctacattccctctttctcactagaaatttgagatgaagggtcctaatcacatcttctgcttgaaacagcagagatttcaggctccacccatagtcaatagaaagaaaggggcaaggggactgtgaagtcctgaatgcccagctctgcgcaggaagacaggcagagccagctgcaaggatggcagcttttcaagcagtttctctgccaccc

SEQ ID NO: 6866 - DNA, 2882 bp, Homo sapiens
  misc_feature (301)..(345): n is a, c, g, or t
  misc_feature (670)..(737): n is a, c, g, or t
  misc_feature (812)..(906): n is a, c, g, or t
  misc_feature (1188)..(1233): n is a, c, g, or t
  misc_feature (1527)..(1545): n is a, c, g, or t
ctttaaattcagcttgtgactttgcacttcaggattctgagtgttctctgtcttcttcctgcattgtttttcttataccatacaggtttttcattggccttgactttttgttgttaactcattcttctttgggtttattttcatttgtttctgctgaatattatttgtttcaaactaaaaataacattccacattttaattgatgtgcggactcttaatctacttaaaatgtgggctgaagttccatgattccagctagtctggaataggtcatttaactggatgttaattcacctacatnnnnnnnnnnnnnnnnnnnnnnnnnnnnnnnnnnnnnnnnnnnnngggtcctggtaacaaccatttgggtagatttgctgattcctcttttctccttagtggaagagaaagccaatacccacctcctcttgggcatgtgcttagacgcctgtgctcgctaccttctgttctccaagcagccgtcacaggcacaaaggatgtatgaaaaagctctgcagatttctgaagaaatacaaggagaaagacacccacagaccattgtgctgatgagtgacctggctactaccctggatgcacagggccgctttgatgaggcctatatttatatgcaaagggcatcagatctggcaagacagataaatcatcctgnnnnnnnnnnnnnnnnnnnnnnnnnnnnnnnnnnnnnnnnnnnnnnnnnnnnnnnnnnnnnnnnnnnnaactgacttgctttaagggagggatgtcactggattgatagatttgtgaagtggtatgtagggagggcaagggcnnnnnnnnnnnnnnnnnnnnnnnnnnnnnnnnnnnnnnnnnnnnnnnnnnnnnnnnnnnnnnnnnnnnnnnnnnnnnnnnnnnnnnnnnnnnnnntctacagacctgcactagcctgtcgaaccccatcaagctggagaaaaccttgcaatgatagtaccttacgtcagtagtgctttacagatttctaaatgtgttcagttacaatgtgtttctcacagtgtgctggtgaagctttatgacaggaagtatcattttgtcagacatttcttagtgtcagcacactataccgatcattttcagaaacctgggatgacaggtgtattacacataccaccattcatgaaatcttgggctcatcaaagtcctcaggatatnnnnnnnnnnnnnnnnnnnnnnnnnnnnnnnnnnnnnnnnnnnnnnccagcctgtcagatggggatgaaatgaggcagcaccagcttgtcgcttcataagcacacagtaaattagccctatatctgcattcatgctctctcttcagaatcaccttgaaaacatacactttcttcttactgtcccttctctctgggttattttagaacgatatacacaagcaaaagagatctaccaggaagcactgaagcaagcaaagctgaaaaaagatgaaatttctgtacaacacatcagggaagagttggctgagctgtcaaagaaaagtagacctttgacaaattnnnnnnnnnnnnnnnnnnncatttttgtgtagggagaataatgtctagtaatgtggaagaatagctatcattcctgtctctgtggcacccgatcaatggcttaaatctgtcgtttttgatattcaggtttcctcaatttagccttagtgaaggaggggttgtacacactgccatttttgtattttaaaggaaaaatgactttcattcccaactgattatgacctttcaggatgtcgtcaagtgatgctttcagttgtaacacgtgacttggtgctgtccctgctggtctaagtagaactgtagattcatatgggctggtgttcctgtgcgctgtgggtgtggtgattcagcctggcatttctaccataagtttttggtctgctgatttgccgccctgtcttctcttactttactttatcaatacctggcaaactgaccagaattaccttcctcatggcaaagggggattatggtgaattgttgttcttatagtctgtttcatgaagcacaagtggaatttaatacataaaagagaaaaatatcttagtttgctaccagcatccagcatgaagttgtaaagtggggattaggcacgtgacagtatagcacccatttgaatttaaataaaagtgaaccatatttatctggttatataaaactaaaaatgggggtgtttatataaaactaaaaactaagaatgatgtaaccttttgtctgtgttatctgaacactctacttcctttgcagccttagtcacacaactgagtcatctcaagtactctttaaggacacacagcccaggctgttctgagtcagaataggcccctacaggtatattttaaaactcttcgtaattctaatgtgtactgctggtaaagctgaacctaccgacctggatcttagtcctagcctttttgcttttgcaatttcagtatcttcatctctaaactagggaaacactgggattctttcttagctgtgggggaaggtatttggttagatgactttgaatgaatagactgctgtgctgaaagagctttatcacactgtctcaaagtatgtaaagatacataggtggatgctcttactgcagcagtcatgaatacatttttagccatttacctaaggaaaaagacagtttttctaggtaccatgaaggaagattgaccctgttggtatgcctgtgggggtgggatgtgagtgggactgataaactgatacttttggttcgtatgtacatactggaagaatcttcataataaatgagactacacaacaaaaaaaaaaaaaaaaaaaaaaaaaaaaaaaaaaaaaaaaaaaaaaaaaaaaaaaaaaaaaaaaaaaaaaaaaaaaaaa

SEQ ID NO: 6867 - DNA, 2768 bp, Homo sapiens
  misc_feature (2743)..(2747): n is a, c, g, or t
cccaagcgtgcgttcccagcggctagttgcgctcggctgagcgtagtctgtcggagtctgtcctcggagcaggcggagtaaagggacttgagcgagccagttgccggattattctatttcccctccctctctcccgccccgtatctcttttcacccttctcccaccctcgctcgcgtagccatggcggagccgtcggcggccactcagtcccattccatctcctcgtcgtccttcggagccgagccgtccgcgcccggcggcggcgggagcccaggagcctgccccgccctggggacgaagagctgcagctcctcctgtgcggtgcacgatctgattttctggagagatgtgaagaagactgggtttgtctttggcaccacgctgatcatgctgctttccctggcagctttcagtgtcatcagtgtggtttcttacctcatcctggctcttctctctgtcaccatcagcttcaggatctacaagtccgtcatccaagctgtacagaagtcagaagaaggccatccattcaaagcctacctggacgtagacattactctgtcctcagaagctttccataattacatgaatgctgccatggtgcacatcaacagggccctgaaactcattattcgtctctttctggtagaagatctggttgactccttgaagctggctgtcttcatgtggctgatgacctatgttggtgctgtttttaacggaatcacccttctaattcttgctgaactgctcattttcagtgtcccgattgtctatgagaagtacaagacccagattgatcactatgttggcatcgcccgagatcagaccaagtcaattgttgaaaagatccaagcaaaactccctggaatcgccaaaaaaaaggcagaataagtacatggaaaccagaaatgcaacagttactaaaacaccatttaatagttataacgtcgttacttgtactatgaaggaaaatactcagtgtcagcttgagcctgcattccaagctttttttttaatttggtgttttctcccatcctttccctttaaccctcagtatcaagcacaaaaattgatggactgataaaagaactatcttagaactcagaagaagaaagaatcaaattcataggataagtcaataccttaatggtggtagagcctttacctgtagcttgaaaggggaaagattggaggtaagagagaaaatgaaagaacacctctgggtccttctgtccagttttcagcactagtcttactcagctatccattatagttttgcccttaagaagtcatgattaacttatgaaaaaattatttggggacaggagtgtgataccttccttggtttttttttgcagccctcaaatcctatcttcctgccccacaatgtgagcagctacccctgatactccttttctttaatgatttaactatcaacttgataaataacttataggtgatagtgataattcctgattccaagaatgccatctgataaaaaagaatagaaatggaaagtgggactgagagggagtcagcaggcatgctgcggtggcggtcactccctctgccactatccccagggaaggaaaggctccgccatttgggaaagtggtttctacgtcactggacaccggttctgagcattagtttgagaactcgttcccgaatgtgctttcctccctctcccctgcccacctcaagtttaataaataaggttgtacttttcttactataaaataaatgtctgtaactgctgtgcactgctgtaaacttgttagagaaaaaaataacctgcatgtgggctcctcagttattgagtttttgtgatcctatctcagtctgggggggaacattctcaagaggtgaaatacagaaagcctttttttcttgatcttttcccgagattcaaatctccgattcccatttgggggcaagtttttttcttcaccttcaatatgagaattcagcgaacttgaaagaaaaatcatctgtgagttccttcaggttctcactcatagtcatgatccttcagagggaatatgcactggcgagtttaaagtaagggctatgatatttgatggtcccaaagtacggcagctgcaaaaagtagtggaaggaaattgtctacgtgtcttggaaaaattagttaggaatttggatgggtaaaaggtacccttgccttactccatcttattttcttagccccctttgagtgttttaactggtttcatgtcctagtaggaagtgcattctccatcctcatcctctgccctcccaggaagtcagtgattgtctttttgggcttcccctccaaaggaccttctgcagtggaagtgccacatccagttcttttcttttgttgctgctgtgtttagataattgaagagatctttgtgccacacaggattttttttttttttaagaaaaacctatagatgaaaaattactaatgaaactgtgtgtacgtgtctgtgcgtgcaacataaaaatacagtagcacctaaggagcttgaatcttggttcctgtaaaatttcaaattgatgtggtattaataaaaaaaaaaaaaaacacacaaaaaaaaaaaaaaaaaaaaaaaaaaacaggaggcgggtatatacgggggacaacatacctttagacggcacacagtctaaaagcgcgcaacaacgaaatctcgttggaacctcggtgaacccaaccataattggcggtaagacaacaccccccaaccccaaacnnnnnaaattgggcgtttttttgttt

SEQ ID NO: 6868 - DNA, 6749 bp, Homo sapiens
cagctcatgaacatctctgcacttcctggggagctctggcccagcttggtacctcgcgtgttagcctgctgagagctgcagctccagcccagccgcggaccgccgggaagtcacccgctctgggggcagctgaatcttgacgttaccgccattgtttggagaaatcgagtgggtgtggaactgcggcgagcgagcccaaagtcatgctcagccggaaagtcgcatacaataatatgaagttgaactttcctcggcgcagaaaggcacaataataaaccctgagatccccggaatatcagaaggaaagtgctgttgatttgttcagctacttggaaacctcgcctctgctgagaacttaggaaggaaggttggcggcggtgaagagggaagaggatgatctagtaatgggctcttccaaatcgcatctggtaggttcatagccatgagtcagccaccaatcgggggcgctgcccctgccacagcagcagcttctcccgccgctgcagccactgaggctcgtctgcacccggagggcagcagcagaaagcagcagcgagctcagtcacccgctagaccgagggacagttcgctgcgacagacaatcgcggccacccggtccccagtgggggccggcactaaactcaattctgttcggcagcagcagctgcagcagcagcaacagcagggtaacaagaccgggagccgcacggggccgcccgccagcatccgaggaggcggaggtggggccgagaaggcgacgcccctggcgcccaaaggggccgctccgggagctgtccagcctgtggctggtgctgaagcggcccccgccgcgaccctggttgctttgggcggcaggaggcccggaccgcccgaggagccgcctcgggagctagagtccgtgccctcgaaactcggggaaccccctccgctcggagaagggggaggagggggcggggaaggaggaggagccggcggcggctccggggaaagggaggggggcgctgcccagccgccgccgcccaggggctggcgagggaaaggcgtacgcgctcagcagaggggcggcagcggcggggagggggcctccccttctccatcctcctcttctgcgggcaaaaccccaggaaccggcagcagaaactccggaagcggcgttgcggggggcggcagcggtggtggagggagctactggaaagaaggatgtctgcagtctgagctcatccagttccatctcaagaaggagcgggcggcagcggcggcggccgcggctcagatgcacgctaagaacggcggcggcagcagtagccgcagctccccggtgtctggcccccctgccgtttgcgagaccctggccgtcgcctccgcctccccaatggcggcggcggcggagggcccccagcagagcgcagagggcagcgcgagcggcgggggcatgcaggcggcagcgcccccttcgtcgcagccgcacccgcagcagctccaagagcaggaagaaatgcaagaggagatggagaagctgcgagaggaaaacgagactctcaagaacgagatcgatgagctgagaaccgagatggacgagatgagggacactttcttcgaggaggatgcctgtcaactgcaggaaatgcgccacgagttggagagagccaacaaaaactgccggatcctgcagtaccgcctccgcaaagccgagcgcaaaaggctccgctacgcccagaccggggaaatcgacggggagctgttgcgcagcctggagcaggacctcaaggttgcaaaggatgtatctgtgagacttcaccatgaattagaaaatgtggaagaaaagagaacaacaacagaagatgaaaatgagaaactgaggcaacagctcatagaagttgaaattgcaaagcaagctttacagaatgaactggaaaaaatgaaagagttatccttaaaaagaagaggaagcaaagatttgccaaaatctgaaaaaaaggctcaacagactcccacagaggaggacaatgaagatctgaagtgccagctgcagtttgttaaggaagaagccgctttgatgagaaagaaaatggccaagattgataaagaaaaggacagatttgaacacgagctccagaagtacagatccttttatggggatctggacagtcctttgcccaaaggagaagccggaggccctcccagcactagggaggccgagctcaagctacggctaaggctggtggaggaagaagccaacatcctgggcaggaaaatcgtcgaactggaggtggagaacagaggcctgaaggcggaactggacgaccttaggggcgatgacttcaacggctcggccaacccgctcatgagggagcagagcgaatccctgtcggagctgcggcagcacctgcggctggtggaagacgagacggagctgctgcggaggaacgtggccgacctggaggagcagaacaagcgcatcacggcggagctcaacaagtacaagtacaagtccggcggccacgacagcgcgcggcaccacgacaacgccaagaccgaggccctgcaggaggagctgaaggcggcgcgcctgcagatcaacgagctcagcggcaaggtcatgcagctgcagtacgagaaccgcgtgcttatgtccaacatgcagcgctacgacctggcctcgcacctgggcatccgcggcagcccccgcgacagcgacgccgagagcgacgcgggcaagaaggagagcgacgacgactcgcggcctccgcaccgcaagcgcgaagggcccatcggcggcgagagcgactcggaggaggtgcgcaacatccgctgcctcacgcccactcgctccttctacccggcgcccgggccctggcccaagagcttctccgatcggcagcagatgaaggacatccgctcggaggccgagcgcctgggcaagaccatcgaccggctcatcgccgacacgagcaccatcatcaccgaggcgcgcatctacgtggccaacggggacctgttcggactcatggacgaggaggacgacggcagccgcatccgggagcacgagctgctctaccgcatcaacgctcagatgaaggccttccgcaaggagctgcagaccttcatcgaccgcctcgaggtgcccaagtctgcggacgaccgcggcgccgaggagcccatttccgtgagtcagatgttccagcctatcattttacttattctcattcttgtattattttcatcactttcttacacaacaatatttaaacttgtcttcctttttacactgttttttgtactgtaaatctttcatcatttaccattcattgtagtattttcagtttgtttattttgttcacccttcaagacaagaagtaaaagaagtataatttctgtagtaaccaatgctataaaaacactgaagactgcttatttctttaaaaagatacaactcatcttaccaagaccaaattcaataagaagcccaaacactaaaatatttcaggctttattttaaaggcaagtgagactgcttcaaataaaacaacttcaagcttccaagaaacagttaagaggaggcagagaagagcagaaacacttctttgctgacacttacactgttgccatggacctacataagcagtgggagaacacagagactaactggcataaggaaaagatggaattactggaccagtttgacaatgaaagaaaggaatgggaaagtcaatggaagattatgcagaagaaaatagaagagctttgccgggaagtaaagctttggaggaaaatcaatatcaatgaaagtgctaagatcattgatctttaccatgagaagaccattccagagaaagtgatagaatcttccccaaattaccccgatttaggacaaagtgaatttataaggacgaatcacaaagatggtctgagaaaagaaaataaaagagagcagagcttagtcagtggaggaaatcaaatgtgtaaggaacaaaaagcaacaaaaaaatcaaaagtagggtttttggatcctttggctacagacaaccaaaaggaatgtgaggcctggcctgacctgaggacttctgaggaagacagcaagagctgttctggcgccctcagtacagctcttgaagaacttgcgaaggtgagtgaagaattatgcagctttcaagaggaaattcgaaagcggtctaaccatagaaggatgaagtcagattcttttctccaggaaatgccaaatgtaactaatatacctcatggggaccccatgatcaacaatgaccagtgcattcttccaatcagtttagaaaaagaaaaacagaaaaacaggaagaatctgagctgtaccaatgtgctccagagcaattctacgaaaaaatgtggaattgatacaatcgatttaaaaagaaatgaaactccaccagttcctcctccaagaagcacctctcgaaattttcccagctcggattctgaacaagcctatgaaagatggaaggaaaggttagaccacaacagctgggtgccccatgagggtcgaagtaaaaggaattacaaccctcacttccctttgagacaacaagagatgtctatgttgtatccaaatgaagggaaaacttcgaaagatggtatcatcttttcctctttggtaccagaagtcaaaatagatagcaagcctccaagtaatgaagatgttggacttagcatgtggtcatgtgacattgggataggtgcaaaaaggagcccctctacttcgtggtttcagaaaacctgctctacccccagtaatccaaaatatgaaatggtgatcccagatcaccctgctaaatctcatcctgatcttcatgtaagtaatgactgtagctcctcagtagcagagagcagtagcccacttagaaatttcagttgtggctttgaaaggactacaaggaatgagaagctggcagcaaagactgatgaatttaacagaactgtatttagaacagatagaaattgtcaggcaatacagcaaaatcacagctgctcaaaatcatcggaggatctcaagccctgtgatacctcatctactcacacaggtagcatatcacaaagtaacgatgtgtccggtatttggaaaaccaatgcccacatgcctgtgcccatggaaaatgtgcctgataatcccaccaagaaatcccccaacagggcctagttaagaaaaaggcaggggacctaagtcctcgcagttatcgaaatatgctccacgagcatgactggagaccgagtaatttgtctggccgtccgaggtcagctgatcccaggtcaaattatggtgttgtggaaaagctgctgaaaacctatgagacagcaacagagtctgcattgcaaaattctaagtgcttccaggataattggaccaaatgtaattctgatgtcagtggtggtgccacattaagtcagcatttagaaatgctccaaatggaacaacagtttcagcaaaagacagctgtgtgggggggacaggaagtgaagcaaggaatagatccgaaaaagataacagaggaatccatgtcagtgaacgcctcacatggaaaaggattttcccgacctgctagaccagcaaatcgtcgtctcccctccagatgggcatccagatctccatctgcaccccctgccttgcggagaactacccacaactataccatttctctgcgatccgaagcattgatggtttaagtctttggcctggattgctatattacagaagttctagtcccacttgtcaaacagagcattctgagtgtttacaggcggacctgttctcttccgacaagcaatttgaatcttaactttccatcagtcttcagtgtttttaatctaaggaataattatcttcctgcattttgatttcttagatcagaattttttaatgccatcctcattagttttccaatacaatataagttgaaacaatgtacaatattgtatattctttgttgcaagtggcagaaagtaaggttatgtgcatggccatgtgtttgtaggtgcatgtgttgaaataggaagtatcctagtatgtatttagatatgaaaaacttatgtgctagtgttgactttgaaattataacatgtatacctatatattctttgtgtttatttaaaagttttgaaaatatgcagtactgtttatattttgtataccttttaataggtatccacttaaggcatttgcagtacaaatattaattgaccacttccttggcccccagctacaatgaaaaagaagaattatgcacacatctaacattggtagatttctaaagacaactcataaataatttcttaacccatataaggataaaataataccattgatattcttgtttattctttttaaataaaaatgtcacaagtttaatagatcagccttgtaaagcaagcataaaatgttccctaaaatggttttaatataattatttgggggaaagtccctaagatattgggcttttttaaacctggaaaataattttttgaactccccccccaaaaaaaaaccgggttatttttttggagaaaaacttgcgccctttttttaaaaaaatgtgggcaccctgtggggttttccaaaaaagggggagggggaaaaaagtttcaacattttttttcggggggacaaaaacccccctttctcctcgtccccaacaaacaaaaaaaaccattttctttttctccccccaaaaaaaaaaaaggggggcggcgtcactctttttccccaccaaaaaaaaaaaaaa

SEQ ID NO: 6869 - DNA, 4216 bp, Homo sapiens
  misc_feature (1780)..(1795): n is a, c, g, or t
  misc_feature (2455)..(2502): n is a, c, g, or t
  misc_feature (3968)..(4004): n is a, c, g, or t
agcttcgacaacaagaaatactagaaaaggaggaaggagaacattgctgcagcttggatctacaacctaagaaagcaagagtgatcaatctcagctctgttaaacatcttgtttacttactgcattcagcagcttgcaaatggttaactatatgcaaaaaagtcagcatagctgtgaagtatgccgtgaattttaattgagggaaaaagggacaattgcttcaggatgctctagtatgcactctgcttgaaatattttcaatgaaatgctcagtattctatctttgaccagaggttttaactttatgaagctatgggacttgacaaaaagtgatatttgagaagaaagtacgcagtggttggtgttttcttttttttaataaaggaattgaattactttgaacacctcttccagctgtgcattacagataacgtcaggaagagtctctgctttacagaatcggatttcatcacatgacaacatgaagctgtggattcatctcttttattcatctctccttgcctgtatatctttacactcccaaactccagtgctctcatccagaggctcttgtgattctctttgcaattgtgaggaaaaagatggcacaatgctaataaattgtgaagcaaaaggtatcaagatggtatctgaaataagtgtgccaccatcacgacctttccaactaagcttattaaataacggcttgacgatgcttcacacaaatgacttttctgggcttaccaatgctatttcaatacaccttggatttaacaatattgcagatattgagataggtgcatttaatggccttggcctcctgaaacaacttcatatcaatcacaattctttagaaattcttaaagaggatactttccatgaactgaaaaacctggaattcctgcaagcagataacaattttatcacagtgattgaaccaagtgcctttagcaagctcaacagactcaaagtgttaattttaaatgacaatgctattgagagtcttcctccaaacatcttccgatttgttcctttaacccatctagatcttcgtggaaatcaattacaaacattgccttatgttggttttctcgaacacattggccgaatattggatcttcagttggaggacaacaaatgggcctgcaattgtgacttattgcagttaaaaacttggttggagaacatgcctccacagtctataattggtgatgttgtctgcaacagccctccattttttaaaggaagtatactcagtagactaaagaaggaatctatttgccctactccaccagtgtatgaagaacatgaggatccttcaggatcattacatctggcagcaacatcttcaataaatgatagtcgcatgtcaactaagaccacgtccattctaaaactacccaccaaagcaccaggtttgataccttatattacaaagccatccactcaacttccaggaccttactgccctattccttgtaactgcaaagtcctatccccatcaggacttctaatacattgtcaggagcgcaacattgaaagcttatcagatctgagacctcctccgcaaaatcctagaaagctcattctagcgggaaatattattcacagtttaatgaagtctgatctagtggaatatttcactttggaaatgcttcacttgggaaacaatcgtattgaagttcttgaagaaggatcgtttatgaacctaacgagattacaaaaactctatctaaatggtaaccacctgaccaaattaagtaaaggcatgttccttggnnnnnnnnnnnnnnnntacttatatcttgaatacaatgccattaaggaaatactgccaggaacctttaatccaatgcctaaacttaaagtcctgtatttaaataacacctcctccaagttttaccaccacatattttttcaggggttcctctaactaaggtaaatcttaaacaaaccagtttacccatctacctgtaagtaatatttggatgatcttgatttactaacccagattgaccttgaggataacccctgggctgctcctgtgacctggttggactgcagcaatggatacaaaagttaagcaagaacacagtgacagatgacatcctctgcacttcccccgggcatctcgacaaaaaggaattgaaagccctaaatagtgaaattctctgtccaggtttagtaaataacccatccatgccaacacagactagttaccttatggtcaccactcctgcaacaacaacaaatacggctgatactattttacgatctcttacggacgctgtgccactgtctgttctaatattgggacttctgattatgttcatcactattgttttctgtgctgcagggatagtggttcttgttcttcaccgcaggagaagatacaaaaagaaacaagtagatgagcaaatgagagacaacagtcctgtgcatcttcagtacagcnnnnnnnnnnnnnnnnnnnnnnnnnnnnnnnnnnnnnnnnnnnnnnnntcactctatgaacagcacatggtgagccccatggttcatgtctatagaagtccatcctttggtccaaagcatctggaagaggaagaagagaggaatgagaaagaaggaagtgatgcaaaacatctccaaagaagtcttttggaacaggaaaatcattcaccactcacagggtcaaatatgaaatacaaaaccacgaaccaatcaacagaatttttatccttccaagatgccagctcattgtacagaaacattttagaaaaagaaagggaacttcagcaactgggaatcacagaatacctaaggaaaaacattgctcagctccagcctgatatggaggcacattatcctggagcccacgaagagctgaagttaatggaaacattaatgtactcacgtccaaggaaggtattagtggaacagacaaaaaatgagtattttgaacttaaagctaatttacatgctgaacctgactatttagaagtcctggagcagcaaacatagatggagagtttgagggctttcgcagaaatgctgtgattctgttttaagtccataccttgtaaataagtgccttacgtgagtgtgtcatcaatcagaacctaagcacagcagttaacttgggaaaaaaaaaaaaaaaaaaaaaagaaactcagggatcactgggagaagccatggcattatcttcaggcaatttagtctgtcccaaataaaataaatccttgcatgtaaatcattcaagggttatagtaatatttcatatactgaaaagtgtctcataggagtcctcttgcacatctaaaaaggctgaacatttaagtatcccgaattttcttgaattgctttccctatagattaattacaattggatttcatcatttaaaaaccatacttgtatatgtagttataatatgtaaggaatacattgtttataaccagtatgtacttcaaaaatgtgtattgtcaaacatacctaactttcttgcaataaatgcaaaagaaactggaacttgacaattataaatagtaatagtgaagaaaaaatagaaaggttgcaattatataggccatgggtggctcaaaactttgaacatttgagcttaaacaaatgccactctcatgcattctaaattaaaaagttaaaatgattaatagttcaggtggaagaaataagcatactttttgggttttctacacattttgtgtagacaattttaatgtcagtgctgctgtgaactaaagtatgtcatttatgctcaaagtttaattcttcttcttgggatattttaaaaatgctactgagattctgctgtaaatatgactagagaatatattgggtttgctttatttcataggcttaattctttgtaaatctgaatgaccataatagaaatacatttcttgtggcaagtaattcacagttgtaaagtaaataggaaaaattattttatttttattgatgtacattnnnnnnnnnnnnnnnnnnnnnnnnnnnnnnnnnnnnnaaggtaagtggtttaagttgcctcaagagagggacaatgtagctttattttacaagaaggcatagttagatttctatgaaatatttattctgtacagttttatatagttttggttcacaaaagtaattattcttgggtgcctttcaagaaaattaaaaatactactcactacaataaaactaaaatgaaaactcaaaaaaaaaaaaaaaaaa

SEQ ID NO: 6870 - DNA, 5117 bp, Homo sapiens
  misc_feature (432)..(454): n is a, c, g, or t
  misc_feature (2318)..(2330): n is a, c, g, or t
  misc_feature (2982)..(3030): n is a, c, g, or t
  misc_feature (3987)..(3999): n is a, c, g, or t
ggcacgaggccgcgccgaggaggctgccgctctggcttgccgccccccgccgccgctgcacaccggacccagccgccgtgccgcgggccatggacctgcccaggggcctggtggtggcctgggcgctcagcctgtggccagggttcacggacaccttcaacatggacaccaggaagccccgggtcatccctggctccaggaccgccttctttggctacacagtgcagcagcacgacatcagtggcaataagtggctggtcgtgggcgccccactggaaaccaatggctaccagaagacgggagacgtgtacaagtgtccagtgatccacgggaactgcaccaaactcaacctgggaagggtcaccctgtccaacgtgtccgagcggaaagacaacatgcgcctcggccttagtctcgccaccaaccccaagnnnnnnnnnnnnnnnnnnnnnnngccccctctggtctcatgagtgtgggagctcctactacaccacagggatgtgttcaagagtcaactccaacttcaggttctccaagaccgtggccccagctctccaaaggtgccagacctacatggacatcgtcattgtcctggatggctccaacagcatctacccctgggtggaggttcagcacttcctcatcaacatcctgaaaaagttttacattggcccagggcagatccaggttggagttgtgcagtatggcgaagatgtggtgcatgagtttcacctcaatgactacaggtctgtaaaagatgtggtggaagctgccagccacattgagcagagaggaggaacagagacccggacggcatttggcattgaatttgcacgctcagaggctttccagaagggtggaaggaaaggagccaagaaggtgatgattgtcatcacagatggggagtcccacgacagcccagacctggagaaggtgatccagcaaagcgaaagagacaacgtaacaagatatgcggtggccgtcctgggctactacaaccgcagggggatcaatccagaaacttttctaaatgaaatcaaatacatcgccagtgaccctgatgacaagcacttcttcaatgtcactgatgaggctgccttgaaggacattgtcgatgccctgggggacagaatcttcagcctggaaggcaccaacaagaacgagacctcctttgggctggagatgtcacagacgggcttttcctcgcacgtggtggaggatggggttctgctgggagccgtcggtgcctatgactggaatggagctgtgctaaaggagacgagtgccgggaaggtcattcctctccgcgagtcctacctgaaagagttccccgaggagctcaagaaccatggtgcatacctggggtacacagtcacatcggtcgtgtcctccaggcaggggcgagtgtacgtggccggagccccccggttcaaccacacgggcaaggtcatcctgttcaccatgcacaacaaccggagcctcaccatccaccaggctatgcggggccagcagataggctcttactttgggagtgaaatcacctcggtggacatcgacggcgacggcgtgactgatgtcctgctggtgggcgcacccatgtacttcaacgagggccgtgagcgaggcaaggtgtacgtctatgagctgagacagaaccggtttgtttataacggaacgctaaaggattcacacagttaccagaatgcccgatttgggtcctccattgcctcagttcgagacctcaaccaggattcctacaatgacgtggtggtgggagcccccctggaggacaaccacgcaggagccatctacatcttccacggcttccgaggcagcatcctgaagacacctaagcagagaatcacagcctcagagctggctaccggcctccagtattttggctgcagcatccacgggcaattggacctcaatgaggatgggctcatcgacctggcagtgggagcccttggcaacgctgtgattctgtggtcccgcccagtggttcagatcaatgccagcctccactttgagccatccaagatcaacatcttccacagagactgcaagcgcagtggcagggatgccacctgcctggccgccttcctctgcttcacgcccatcttcctggcaccccatttccaaacaacaactgttggcatcagatacaacgccaccatggatgagaggcggtatacaccgagggcccacctggacgagggcggggaccgattcaccaacagagccgtactgctctcctccggccaggagctctgtgagcggatcaacttccatgtcctggacactgctgactacgnnnnnnnnnnnnncttctcagtcgagtattccctggaggaccctgaccatggccccatgctggacgacggctggcccaccactctcagagtctcggtgcccttctggaacggctgcaatgaggatgagcactgtgtccctgaccttgtgttggatgcccggagtgacctgcccacggccatggagtactgccagagggtgctgaggaagcctgcgcaggactgctccgcatacacgctgtccttcgacaccacagtcttcatcatagagagcacacgccagcgagtggcggtggaggccacactggagaacaggggcgagaacgcctacagcacggtcctaaatatctcgcagtcagcaaacctgcagtttgccagcttgatccagaaggaggactcagacggtagcattgagtgtgtgaacgaggagaggaggctccagaagcaagtctgcaacgtcagctatcccttcttccgggccaaggccaaggtggctttccgtcttgattttgagttcagcaaatccatcttcctacaccacctggagatcgagctcgctgcaggcagtgacagtaatgagcgggacagcaccaaggaagacaacgtggcccccttacgcttccacctcaaatacgaggctgacgtcctcttcaccaggagcagcagnnnnnnnnnnnnnnnnnnnnnnnnnnnnnnnnnnnnnnnnnnnnnnnnntggtatcgggcctcccttcagctgcatcttcaggatccagaacttgggcttgttccccatccacgggatgatgatgaagatcaccattcccatcgccaccaggagcggcaaccgcctactgaagctgagggacttcctcacggacgaggcgaacacgtcctgtaacatctggggcaatagcactgagtaccggcccaccccagtggaggaagacttgcgtcgtgctccacagctgaatcacagcaactctgatgtcgtctccatcaactgcaatatacggctggtccccaaccaggaaatcaatttccatctactggggaacctgtggttgaggtccctaaaagcactcaagtacaaatccatgaaaatcatggtcaacgcagccttgcagaggcagttccacagccccttcatcttccgtgaggaggatcccagccgccagatcgtgtttgagatctccaagcaagaggactggcaggtccccatctggatcattgtaggcagcaccctggggggcctcctactgctggccctgctggtcctggcactgtggaagctcggcttctttagaagtgccaggcgcaggagggagcctggtctggaccccacccccaaagtgctggagtgaggctccagaggagactttgagttgatgggggccaggacaccagtccaggtagtgttgagacccaggcctgtggccccaccgagctggagcggagaggaagccagctggctttgcacttgacctcatctcccgagcaatggcgcctgctccctccagaatggaactcaagctggttttaagtggaactgccctactgggagactgggacacctttaacacagacccctagggatttaaagggacacccctacacacacccaggcccacgccaaggcctccctcaggctctgtggagggcatttgctgccccagctactaaggtgctaggnnnnnnnnnnnnnccccatcctccagagaaacccagggaggaagactgtaaatacgaacccaatctgcacactccaggcctctagttccagaaggatccaagacaaaacagatctgaattctgcccttttctctcacccatcccacccctccattggctcccaagtcacacccactcccttccccatagataggcccctggggctcccgaagaatgaacccaagagcaagggcttgatggtgacagctgcaagccagggatgaagaaagactctgagatgtggagactgatggccaggcaagtgggaccaggatactggacgctgtcctgagatgagaggtagccgggctctgcacccacgtgcattcacattgaccgcaactcacacattcccccaccagctgcagccccttgctctcagctgccaaccctcccgggtcacttttgttcccaggtacctcatgggaagcatgtggatgacacaatccctggggctgtgcattcccacgtcttcttgctgcagcctgcccctagacatggacgcaccggcctggctgcagctgggcagcaggggtaggggtagggagcctcccctccctgtatcaccccctccctacacacacacacacacacacacacacacactgcctcccatccttccctcatgcccgccagtgcacagggaagggcttggccagcgctgttgaggggtcccctctggaatgcactgaataaagcacgtgcaaggactcccggagcctgtgcagccttggtggcaaatatctcatctgccggcccccagacaagtgggatgaccagtgataatgccccaaggacaaggggcgtgcctggcgcccagtggagtaatttatgccttagtcttgttttgaggtagaaatgcaagggggacacatgaaaggcatcagtccccctgtgcatagtacgacctttactgtcgtatttttgaaaaattaaaaatacagtgtttaaaaacaaaaaaaaaaaaaaaaaaaaaaaaaaaaaatcctatggtcgggggccggggaaaaaaaagggaatggaaaggggcccagggggccaaaactgggtttccgggaaccccatttttctttggaaaaaggggggaaaacc

SEQ ID NO: 6871 - DNA, 3503 bp, Homo sapiens
  misc_feature (3426)..(3459): n is a, c, g, or t
ggtaaaggaacatttaagtctctccagtaagtgtgaacaggaaggcatgggatagaagagagtccttatggagtggactggccacatgaactgtcctccagccactctttatttagatgggaagtggcatggtcctctgaacgctgcaggctggaaatgatccccagggcacatgcaatctgtggaaaggaatacatcggacagtgcaacatggtgagggctttcaatttgctgtggttgctgtatttttaacaagacacccggagcttcgattaggaataacctatcattagagttgttcctttaaaaaatgttgatgaataaagcaaatgtgggtttaaaatgccaacttatttttcactttgatattggtgctttattaagtgataccatagtttctctctcttttccctgttactttaaaaagaattttaaaattgtgtttgtatataaggtcagtctggcatagaatttctgaaagtaacattaataggatttctaaagaagttgtcagaaagacaaaattggatattctctgcactttcagagaaggactatttatgtttgaatttcataacaggcttacatttcttttctattgattcccttgcatatctacataatttaatcctgtctattgtcccagatctcttgtggctactttacctgttaccttttttgggattttgttctttatgttttacagttaccttcggaccagaagatatatggtatttttattcacttttttcagtgttttaaaataaggtttgttcatttattcattttatccattcatttcctattgtcgtatagttctaaccatatatatagtactttaaatattttcttatgttattatttaacacaataataaattcttatctaaagaaaagattattttactttattttacttaaaggaaagagaatttattggcaggatattgagtagcttgtagagtatatggaaggggagagccaagttaggaactggcaggagcgaggagggacaagacagctgcctgcacagtctgataggacacatctggctgctgccactggatgcccacatgggcagcgtgttgtaaatatcaccctaccagttggtaagttggcatgaattttccatgaaacacttgactgccatttgcagcatcatatctactttttatgcacctaattatatttttcctttcacttttatgtttttttctaaaactgccacctaaatacctttccactccgttaaatgtatggagtcaagataaatttctcattcttgctctacagtttaagatgtataagaagtaaacacttccgtggaatagggcttaatttggggctcaaatgttttgttttcctcctgagatgtttttgaatggataagactactctggttttggatgcagcaacttttctcctggcatggaagaactaaggactttgataaacagtttcccattgatagtataatataatgaggggcccagtctgctcttgtgaaaattggctgagcggcagcagcccatcccagctgtgtgtgagtagccccgctgttaaaagtacacctgctgggaattgttggcacatgctcatagcatatgctctgtgggggaggtgcttttaattccaagaggagcttttctcccacatctgcggatgcagaacaaagatgcagcaggactttagaaaacaggagtgtttctactgacattttattcattgctttgttagtcccgcaaatggagcaacttctggttgtttgtaagcagaaaaacaaaacattcaaaaccaaaaacctaattagtacttttgtcctttatatccctaggatgctctagggagtagaggtggcaggcatctttatcttcacccactggcacattagcagcttatgcaacttaggaagtcactgggagatgagtcctaaaagcctgaatttcaggatggggaggagataagaagcagagaactttgggagaccatggggcatttagtcctggcatagacacagaatggatattcacaggaagattcctgaggccagatatgcaggagagcacacattgtcacaaggggtgtggtgggaagagaggtgctggatgcctaagacagacttctgtgcttggcagattgactgagtgttgactctgaatactttgtggtccagtccataataggccagtcactcctgcctgatgcatccctgttgcactgttcataaaacctgtatcatatggggaagcttcaaggctggcaggcttttcatcaagtaatcatcattccatgttcctacgtatccttgaaatcaaaaccaggcaatatgtgtgtttttggttttgttttacaaaaaggcatacaatgagacgaattcttaagataatgcacatacagaatcatcaataaagtttcaaagagtttatgaagaaaaggtattttcctttcttgtaaaaaatgttatatatatataatattctgatctgcattcaccttagggcttagcctcttattttatgaattttcaggctgtgatttgtgttggatggctaagctctaaaataatgcaaatagccccaatctttaaatatagcggtgctaagttgaacaagtaacacaatacagaaaatgctgatatgaatacttagtaataatacaaaagttcctgctaaattatatatgtgtatcactgcctgactagaaaccccacttttcttttctaatccagcacaaaatcaaactctgattctacaaccagtctttttaaagggcaaaaatgactcaacacctttgttttgtatggaaaactttttttttacactaactgcaaaactgctttaaaaaaaggcttattcaggatagataagcatgtactccttttttaacttgctggaagacttgcccctccaaactagcacccccaaaagacaacttctttcagaaacggggtgttttacctaaacatagtagcttacatgttagccagcagtaggtcggcactagtgttttccacggttatcacctttgacaggtgatgtgcatctatagatagtggaagccaccccatgaggaggtgttaatagcagcatggtttcacttttggtaatcaggtaatcatgtgtatatacttagattcgcattattttaacatttctctgctactctgcacttcaggttcgttaagctattttaataattactggggttatggcaaacaccaatggaaatgtatatggcaactgctttcctgagcaagtgtgatttgttttatggctgttcaagttataaaattgttcttacattgtaggtaaacaaaatcttgatgtttttaaaggtcactgtaacttaaggttcaaatttctggcacagttttattagtattcacttcggaagctaataagataccatggttttctatgttactccnnnnnnnnnnnnnnnnnnnnnnnnnnnnnnnnnngatttatgttattttaaaaaaaaaaaaaaaaaaaaaaaaaaaaa

SEQ ID NO: 6872 - DNA, 2508 bp, Homo sapiens
ctttgcagatgtttgggaggaccacacccagtcctgagggaggcagcagacagacatggatggagtgctggtgctcggtagagttgaagaggggatgggagccagatgtggctacagcactttcatctgtggggcccggcctcagacccacaacagtcccagccccaagaaagtgctgcatgcagccaggctcgatggctcacgcctgtaattctagtactttggaggccgaggcgggcagattgcctgagctcaggagtttgagaccagcctgggcaacacggtgaaaccccatctctactaaagtacaaaaaattagccaggcgtggcggcatgcgcctgtagtcccagctactcgggaggctgaggcaggagaatcgcttgaacccgggaggcagagtttgcagtgagctgagatcacgccactgcactccaacctggtgacagagcaagactccatttcaaaaaaaaaaaaaaaaaaaagtgcagcatgcagtgtctggagggcagcagcagggggcattcggtctcccatccctcttgttctgggcaccaagcgtaagctgccgtcacctcttcaccagccctaaatatgggtgcccctctcccacagaacctgtctccagagaagattttccacgtcattgtggccccttgttatgacaagaagctggaggctcttcaggaaagccttccccctgctttgcatggctcccggggcgctgactgcgtgttaacatcaggtgaaattgctcaaataatggagcaaggtgacctctcagtgagagatgctgccgtcgacactctgtaagtggcttctctggggagagtcctctggggggcaggacctctcgtcagccctgccagccacctgccaggcccagggctgccctgctttatgacgaggccatgtgaagcactgcgatgcagtcccccaggcccctgccacaaccctcagccaccctatagctgttgaatgggataccattcaccagggctgccagggagttgaaggtttggcgggcttccatggtgtgattgccaccctaaacccttgaggaaggacaaaatgcacaaacagctttgtcctcgctggcgcagggctgttcatgtgtgcaccagcccccttcttcctgagtgccgtctgtgcctcacattccgtgtggtctatggggcagtggggcagctccctcaggcccctttgcaccaagagtggcagtctgggttctgctgggggcggtgacctcgatacccagcaaggcccagggctcctgctgcaccccaggcactgggcagagagcaccacaaaggcagcagcgtgtgtcctcgccaacagtccgcatcccaggtgctgcattcgtgcccttttgggggaaggtaagatagaagtttacagaatttaagcatctgtggggccaggcgtggtggctcacacctataatcacagtactttgggaggctgaggtaggaggatcacttgagtccaggaggctggggctgtagtgagctatgattgtgccactgcactccagcctgagagacagaacaagaccctgtctccaaaagaaaaagaccataagcatctggagcacctgcaagagcctgtgcatgggctcggcgtgactgagagtcctccgccttgcccgagcatcaggcaggccctcccaagacccctcaagatgctagaatgggactttctgcaaagtttaaacatctgtacaggatttagcttctttggtggcgaacttggattgtgatgccctcaggaagtctggtttcactctttctgtcactgtacgtcagcattcatgaaggacttgtattttctctgccttgtgaggtttggagacttgaaggaggacaaagtgacgcgtcatgatggagccagctcagacgggcacctggcacacatcttcagacatgcggccaaggagctgttcaacgaggatgtggaggaggtcacttaccgagccctgagaaacaaagacttccaagaggtcacccttgagaagaacggagaggtggtgttacgctttgctgcagcctatggctttcgaaacatccagaacatgatcctgaagcttaagaagggcaagttcccattccactttgtggaggtcctcgcctgtgctggaggatgcttaaatggcagaggccaagcccagactccagacggacatgcggataaggccctgctgcggcagatggaaggcatttacgctgacatccctgtgcggcgtccggagtccagtgcacacgtgcaggagctgtaccaggagtggctggaggggatcaactcccccaaggcccgagaggtgctgcataccacgtaccagagccaggagcgtggcacacacagcctggacatcaagtggtgaagtcaggccagggccttccagctgctcttggggccagagccaagagcctctcagtagagggaggggctgccctgagtggagtattaaagacacttaagaaaaccgaaaaaaaaaaaaaaaaaaaaaaaag

SEQ ID NO: 6873 - DNA, 2789 bp, Homo sapiens
  misc_feature (2034)..(2048): n is a, c, g, or t
  misc_feature (2768)..(2772): n is a, c, g, or t
  misc_feature (2776)..(2776): n is a, c, g, or t
gggcggatggaaggggccggggcagcgtcggggaaaggaagggccggaggcgcggcggcgggcggccgagaggggcggcggcggcggcggcggcggggttcccgcgccgcggagcccggcccgagagccgcgtccacgttcctgcctcctgctcccgccgccctggggcgccgccatgacgcccgatctgctcaacttcaagaagggatggatgtcgatcttggacgagcctggagagcctccctccccctcgctcaccaccacctctacttcgcagtggaagaaacattggtttgtgctgacagattcaagtctcaaatattacagagactccactgctgaggaggcagatgagctggatggtgagatcgacctgcgttcctgcacggatgtcactgagtacgcggtgcagcgcaactatggcttccagatccacaccaaggatgctgtctataccttgtcggccatgacctcaggcatccggcggaactggatcgaggctctgagaaagaccgtacgtccaacttcagccccagatgtcaccaagctctcggactctaacaaggagaacgcgctgcacagctacagcacccagaagggccccctgaaggcaggggagcagcgggcgggctctgaggtcatcagccggggtggccctcggaaggcggacgggcagcgtcaggccttggactacgtggagctctcgccgctgacccaggcttccccgcagcgggcccgcaccccagcccgcactcctgaccgcctggccaagcaggaggagctggagcgggacctggcccagcgctccgaggagcggcgcaagtggtttgaggccacagacagcaggaccccagaggtgcctgctggtgaggggccgcgccggggcctgggtgcccccctgactgaggaccagcaaaaccggcttagtgaggagatcgagaagaagtggcaggagctggagaagctgcccctgcgggagaataagcgggtgcccctcactgccctgctcaaccaaagccgcggagagcgccgagggcccccaagtgacggccacgaggcactggagaaggaggttcaggctcttcgggcccagctggaggcgtggcgtctccaaggggaggctcctcagagtgcactgagatcccaggaggatggccacatccccccgggctacatctcacagctggtgggcgtgatcactgtgcccgttttacagacaaggccactgagctctgagaggttatgtgacttgcccaaggtcaccccgcctgcaggtctcaaaggtgggatttgagcgagggtccggctgactgcagagcctgtgtgtgagtccccgtgtgacactctgcacttggacccttgccccggggaagtggggggctagtggccccgagagtcactccctgaacacagggaaatcctgccgaggcccactgggccaaggccccacacaaggaggtctgcaggacaggggagcctccagtagccctcagagaatgcaccgtccgcctaggacagcggttctcaacggggtccattttgtcccccttggggacatttggctgtgtctgggaatacttctggttgtcacaactaggacaaactaactctctagaaaaaacgtgtgtgtgtacacatatataagtttattataaattttaccaataaaaacaatgcttagtacacaatttacaaataaaaatatataattttattgtgaaaaaaaaaaaaaaaaaagatttttctcagaatgctttcagtgattttttccatactcttgtatccacaactgattaacaaagggggttgttctaacatgtgtgctggttgacatttttgtttatggtaatgagtaagatgagaagacatttgtcgaaactttactggtccatgttgtcagctacttctttgctagatcggatagtagttttctattgagaatatttgagaatattctattaagaatatttttgcaattttttgttctatttacaatgtaatggttatagatgtgagatacttctaagtttaatnnnnnnnnnnnnnnntttcttatcacttgcttaagtctagacaatcaacaaaacaataaatcaagccctgatgtgtaatgtttaccaattctgcagtgtaaatactcccgctgtggccaatgctgcattaccagcacaaagtccctggacagagagttgggaagagatgtcacactattcactaggatttccaccatgcggatacagtagatgtgattggcccaagagcacgcataatacaacacagtgaaatatttaggaagtaataaatttgagtatctattgccttgtctttaacatagttaatttaaagtatataaatttaattgttaatggctgtgcttaacaactacatcacagaattactaaaaatttgacaatcagctgtctgtagttatcacaccattatctaaagtagaaaagaaggggccaggcgcagtggctcacgcctgtaatcccagcactttggggaggccgaagtgggcagatcacgaggtcaggagaacgagactaacctggccaacatggtgaaactccgtctctaataaaatacaaaaaatagccgggcgtggtggtgcgcactgtggtcccagctacttgggaggctgaggcaggggacccactggagcccaggaggcgcaggttgcagtgagccgagattgcgccacggcactccagcctggcgacagagtaagactccatctcaaaaaaaaaaaaaaaaaagttttaaaaaannnnnaaancctcggggggggg

SEQ ID NO: 6874 - DNA, 2538 bp, Homo sapiens
  misc_feature (126)..(156): n is a, c, g, or t
ttaggctgtaattaggggatttgggaggagaactttcctggtgacgctttgcttttcttctgctcttggtgagaaagtgcctccttcttcccaggatcaggacctctgccatccagcgccacaaannnnnnnnnnnnnnnnnnnnnnnnnnnnnnncacacacacacactctcacactcgcccagagacaaacttaaggtgaggagaaagagcgctagcttcacttgatctccagcttccaacttaagcagaacttgagagcatccgaactcctggatttcaggacaagtgaagaagattctttgggctataaagatgaagagtctacttcttctggtgctgatttcaatctgctgggctgatcatctttcagacaactatactctggatcatgacagagctattcacatccaagcagaaaatggcccccatctacttgtggaagcagagcaagccaaggtgttttcacacagaggtggcaatgttacactgccatgtaaattttatcgagaccctacagcatttggctcaggaatccataaaatccgaattaagtggaccaagctaacttcggattacctcaaggaagtggatgtttttgtttccatgggataccacaaaaaaacctatggaggctaccagggtagagtgtttctgaagggaggcagtgatagtgatgcttctctggtcatcacagacctcactctggaagattatgggagatataagtgtgaggtgattgaaggattagaagatgatactgttgtggtagcactggacttacaaggtgtggtattcccttactttccacgactggggcgctacaatctcaattttcacgaggcgcagcaggcgtgtctggaccaggatgctgtgatcgcctccttcgaccagctgtacgacgcctggcggggcgggctggactggtgcaatgccggctggctcagtgatggctctgtgcaatatcccatcacaaagcccagagagccctgtgggggccagaacacagtgcccggagtcaggaactacggattttgggataaagataaaagcagatatgatgttttctgttttacatccaatttcaatggccgtttttactatctgatccaccccaccaaactgacctatgatgaagcggtgcaagcttgtctcaatgatggtgctcagattgcaaaagtgggccagatatttgctgcctggaaaattctcggatatgaccgctgtgatgcgggctggttggcggatggcagcgtccgctaccccatctctaggccaagaaggcgctgcagtcctactgaggctgcagtgcgcttcgtgggttttccagataaaaagcataagctgtatggtgtctactgcttcagagcatacaactgaatgtgcccttagagcgcatcagttttaaagtcattaagaacatgtgaaaggtgttttttttttccaatatgaactcatgcaagttaccaaaactgtgataacccttttttacttactgtaaagagtcattttcataaagatcaattcattgatttgttttttgtaaagctatcattcaatatatattataaattaatataaatttaagggaagctctatgtaaggagacttagagccaaactgtttaagctgtatcatcccaacaaagtatcctttcatgaacggggcatgcaatagcttaagaattgctaggattaaattaaggaaagtaaagctactcagagcagcaggttccacaagcacaaactttacacatttgtacaattttgaaatgcactacaataaacaaattagagcaacacatttgaaatacaggcttctttacataaactgagaggttatacaaaactcagtttcacaagggaacaatctatacctttctaaaagttaatatttcaagtctctaataggcagaatattttactctttaaaatcctgcctttctgaccaaaaaaaaaaaaaaaaaattcataatggatttccaattccattagttaacaagccacagtttaaaactcctcaataatcccatttattttgaagcatgacccttaaattaagcagataattatttaacccaatgaaacaagacttctacctttcttataatttaaaatttacacattgttctaagaggaattggtttaactctttggaggtagctttaaccgagttgtgtatttaaatttctaaggggccattttgctaagcagcattttacgcatctctactcagggcagttattatagattaaaactggctggggacataaaaaatttggtaacaattttagccagtctttgatttttctggttacgcctatgaaaaggtcatgtgcccctattaaaaaattaacttttaaacctggattaagaatttccttattttacccttattttgaaattcatttactttattaaaaggaaatccctaattgcagaaaaaaagatgccccttttcaaaatcttaatattcccattgggataacccgagagaaccccccccgggcccgggttttgggggggaaaaaccaaccgg

SEQ ID NO: 6875 - DNA, 3229 bp, Homo sapiens; identical to SEQ ID NO: 6600

SEQ ID NO: 6876 - DNA, 1916 bp, Homo sapiens
ctaaggggttcccttgtttaattgggaatgggcattgactttttttgaaaatccaagtgggcctgaggtcatttgataaaacattttttaagaagtggggcttagagaaccatacttttacatcctgacatcctttgggcctaacaacatcctattattatagtgttcagcagtgtgggcattgaagaggcgcagaatgctttgaaagaaacttaatcagaatcttggaacatcatgatcatgcccattcttaagtaaatcaactattttcaacactgaagaaaaatgaaacattatttagaaaacaatgagattacaagttccaaactcagccaggaatgtggctcacacctgtaatcccagcactttgggacacctaggtgggagcatcgcttgaagccaggagttcaagaccagcttgggcaacgtagtgagacccctatctctacaaaaaataaaaaaattagctgggtgtgatggcacacacctgttgtcccagctactcaagaagctgagatgggaggatcctgagctcaggaggtcaaggctgcagtgagccgagattgtgccactgcactgcagctggggtgacagtgcaagaccctgtctcaaaccaaaccaaaccacacacacacaaacacacatacacacacacacacacgaggtccaaatggtagcagggatccaaagggaacacagtatgtaggtcaaactggcagtaacagtgtacagcctttgacaaactagaaatattagagtaggccaaacacacctccaaactgtaaggctgtgcacaaacataaaaaatggcagccttccatctcctgcactggctgagtccatttacttgtgtacttgttctagtgagtggtgggactgtacatttttgaatagacctcaaaaatacttcattctgctgctgttcagttggctttttaaacctgtctgcagtaggacactgaaaacagcaagaacttcggggtgaacacccgctgatcctttaacaaggatttctggcaggaaactcacaaaaaggagaactgaaaatttagacatacagttggccattgtaaaaaacatcagtttcctctcatacattccaagtaaaccaagtaaaataagtgttggagtaacacttgcataaaagaatttaaggagtgatagctctttctgttctgccattcccaacattcctgggggaaaggagactcaatgagttaatactatttcactgagcccaagatggaaacttggtttgacctaaaacatctgattaatataggctagctgatttcttaaaaattcgttgcattgaaggatattttgcatgtctgtaacacctgtcaatacttgtttgtattgatttctgatattcttgcagctgactacgtgtaattgggcagatcagctttgcagtagattatgctgcatcctcgtggcaaaattctgtattcttagtgattgttacaaacccctttattgctgtctgagaaagtgaaagattgtgtatttctattaaaacatttacaatcaaaaaaaaaaaaaaaaaaaaaaaaaagaaagaatagaaaaagaggggggggggcgcgaaaaagatccccgcggggggggccacaatggtaagagcggaggaaacccgagctgctacgtgcacaacagaggggcgccccatgaaggaagggaagcaaaatagaaagacgtgggaggaccgcgggggccgcaacgtcatacaaaaccacccctgcgagcgcgggaaaaccgcgggcccctgctgggggggagacactcagggcggcagaggaacccctcaaactgcggaggggggggcaggctgttggctgaccgaaactcccccacgaaggacaattgcaaccggcctcgcggcgagttacacaccaccactgacacggtcttca

SEQ ID NO: 6877 - DNA, 1534 bp, Homo sapiens
  misc_feature (1266)..(1266): n is a, c, g, or t
  misc_feature (1268)..(1269): n is a, c, g, or t
  misc_feature (1286)..(1287): n is a, c, g, or t
  misc_feature (1309)..(1309): n is a, c, g, or t
catctggtgtattgactgtggccagtcttaaagctagtttttgctatgtggaacatgctgctctaattcagatttaaagagtttcttcctgttaattcgaagctcactgtgcctcttgtttccgagggaagaaggactgattaagtcatctaaatggatgcaatactgaattacaggtcagaagatactgaagattactacacattactgggatgtgatgaactatcttcggttgaacaaatcctggcagaatttaaagtcagagctctggaatgtcacccagacaagcatcctgaaaccccaaagctgtggagacttttcagaaactgcagaaggcaaaggagattcttgaccaatggaaggagagtcgagcccgctatgaccactggcgaaggagccagatgtcgatgccattccagcagtgggaagctttgaatgactcagtgaagacgtcaatgcactgggttgtcagaggtaaaaaagacctgatgctggaagaatctgacaagactcataccaccaagatggaaaatgaggaatgtaatgagcaaagagaaagaaagaaagaggagctggcttcaaccgcagagaaaacggagcagaaagaacccaagcccctagagaagtcagtctccccgcaaaattcagattcttcaggttttgcagatgtgaatggtttggcaccttcgtttccgctggtccaaggatgctccctcagaactcctgaggaagttcagaaactatgaaatatgaaatatctctgcttcaaaaaatgaggaagagcaagactgtcccctatgctgccaacatgcagtctttgtttatgtcttaaaaatgtcatgtttatgtcatgtctgtgaattgctgagtactaattgattcctccatccttgaatcagttctcataatgctttttaaataagaaaaattcagaagatgaatttcttccaatatttgaataaattaaagctcttagatacagagtagattgtattatatgctttttcctattaatactacttatagaaatccattaaaaagcaatctctgtacagtgtatttaaatatttcattgacatactgtgatctctattagtgatggatgtacaaaaaatgttttcttacccttgacttacaatgaaatgtgaaattacttgtctgaaccccgtggggagaaataaataattttcccaaagttcaaaaaaaaaaaaacacaagttaactaaccccacccacccccactccccacaacccactaaaacaacnannccccccccccctctcanncaccccctcaaaactaaaccanaattttcgctttcttcctcacaaagggagctctctggcgccctcctcttttcgggggataaactaaacccccccccaccccccgcgtcctcggcttccttcgggcaccggatccctccctttaggggggtccccgttccccaataggagtcccccgggaaccttctcacatcaggtctcatgccccaccccaaaggcccctcgggtgttcccaagccccccccag

SEQ ID NO: 6878 - DNA, 4541 bp, Homo sapiens
  misc_feature (2764)..(2775): n is a, c, g, or t
  misc_feature (2778)..(2783): n is a, c, g, or t
agcgggagtggaccgagttcccggaaggggtcggaggctgtgtggtggcgtctgctctcgcctgacctgtggcggcttctccgcccctcgtacccctggggaggcacggaggactcggctggaaagggtgactccggtgagggcacgtaagctagccggcaggtcccaggggcactgcacgtcttggggagggacaccgaaaggggcagcccggactctgacggtgtctctgcctctctgtgcctccgcagatccccgctcctggccctcgcctcgccacctcattgatgggcaaccaactggaccgcatcacccacctcaactacagcgagttgcccacaggggacccgtcggggattgaaaaggacgaactgcgggtcggggttgcctacttcttctcggatgatgaggaagacctggacgaacgcgggcagcccgacaagtttggcgtgaaggcccccccgggttgcaccccctgcccggagagccccagccgccaccaccaccacctgctgcaccagctggtcctcaacgagactcagttttccgcctttcggggccaggaatgcatcttttccaaagtgagcggtggccctcagggcgccgacctaagcgtctacgcggtcaccgcgctgccagcgctctgcgaacccggcgacctgctggagctgctgtggctgcagcacgcgccggagccgcccgcgcccgccccgcactgggccgtctacgtgggcggcgggcagatcatccacctgcaccaaggcgagatccgccaggacagcctgtatgaggcgggcgcggccaacgtgggccgggtggtgaatagctggtaccgctaccgcccgctggtggccgagctggtggtgcagaacgcctgcggccacctgggcctcaagagcgaggagatctgctggacgaactcggagagcttcgccgcctggtgccgctttggcaagcgggagttcaaggcgggaggggaggtgccggcaggcacgcagcccccgcagcagcagtactatctcaaggtgcacctgggagagaacaaggtccacaccgccaggtttcacagcctggaagacctcatccgcgagaagcgccgtatcgacgccagcggccgcctgcgagtgctccaggagctcgccgacctcgtggacgataaggagtagccgcctaggggctgccggcccctctgcctcccccgcacctcgctcccttcccttccccgcacccggacttcgcagtcagcggttctcaacctctgccccgccccgccacgcgcgtccgccgccggtggcccgggcccgggctgcacccccgcatccccaagccagcggcaggaagtctcaggaactgccccagggccgaaagggcgccgctgcgagcgcctggctgacagccacagcggtggtgacggtgctgggagaccccgcgtgcgctttccccttgagatgtaaaccgggaacggggaaggggctgaggggagaaaggacatggccttccccgcgagtccatggccagtgactgtggcccgactcgaaaacaaccctcttctcaaaagggaccatcaccgccccgagcgtgcgcacacagaccggtcggaggcgagaactggtctctacagggcacagttcagctcctctgtggatgcgtccccagatcgcaggatttccaagaaatcgagcctgtcccttgtgcacttgggaataattccccaagacagcacttcgggattccgggttatcctgaggctgccagggacttttccagctctccagccccaggtctcctgacattgtgttccaggctgcgggctaagccagacagtgtttgcctccggttctttccaccgtgggaagcgaacgccacccccacccgcctttgcctgcgagtctccctcgctggcagaagggaagccggcccggtcccgggaggaagatggcgctgcgaattcggtgaggacagccggccccgcccccgacaaggagctcgctcgttcacctggtgtctgggaacttgaatgtgtgaagggcgcttattgttctgaacccttgattgctccctcctcgggctgcatttcaaaaatagtcatatttttaaaggagttggaggagagggagggggaggacatggcaccattccagaaaccagcattgttacaacaccatagccagtatatttagtttggcttttcctaacatagaaatcttcaaagctggggaagtggaaataaagttttaaaaatgagagagcagttttccaactatgtcaacaaaaaaaaaaaaaaaaatgtttttattgaccattttagcaacaggctaataaaatttcaaattgaaatttttattttcatggctttaatccatgatagtttaaatactgggggccattaagagtggatgtagctaagagcttagctaacattgccttttcactctatttttctcagatattgtaagcattctgtttttcaatattgtagttaattttttggctttcaacagcagccctagtaatggtggagttgttaattaatgtgtatattgtactgaatttctgtcagttaaggggttcactgctttggtggaaattggtggaaattgctagcaggttccacgatgtttatttttttctccatgttgtatatcattaccatttcacatacgcgtttctatttttcttcctctcctcctgatctccttaaaaatgaatctagagttggtggctttttccccctcctctttggccagttccacagttcagttcnnnnnnnnnnnnagnnnnnntgaacttgtaggatcaggacaaatgtgtgtttttcaaaaacttaaggctgggtgtgaaacaccttctgtggacaaggatttgtaaacttctctcctccctccagctgcggccccagcctaactgatagttacttgattcagtgtgctagacacttaaatagcatctatgtctcttcaagggaatttgcaaataatgctgtttagctaattgttgcaagcaattgcatattaacagctgtgattttgttggacagcaagtattatggccaaagccagtttcttggcatttcaaaaataatgcaataaaaactagttgaggttagctgaggctggaaatgcctttttcatggtaaatgattcacttctatatttttctttctttttctttttttttctttggttttcatcctggattcatcccctgatcttaaatcaaaacgtcagatcaatgaactatgaactaaagtatttttcttaagcctattgagtgattaattttttaaaaaatgtttaaatgcatatgcttttctttcagcacaaacaacagcaaaaacttttgtaataactaacttacctttgcatgtatgaagaactgagtcatttatttccctaacttactcctctttcaagtaacaggtggcagatcataaaatgaattctttattgtatctacacactccacattctttactgtgtcctactactgtatcttggctccctgctgtattaaacaccatcttaagcacttgttcctgcaggactccttcttgacattttgtctcccccttcaaagtcactcaaagagtgggacttcatcaaaagaaatgaattagtctctatcacaccgaatactaagatttatttcctctgatggtacatagatttctctctccactaagagggtcactctcatagaggaatgtcttgtcagttttatacttgctgaggctagactgacaataaaaatgagctgggcagttaaattagcatttgttactatattggcctataaaggatcaggttgatgataatacctctaaaaatatgcaataataaaacaatagttatgaaagaaacttgaaaggtttgcaaggtttctcctatccctgttaaaattatcatttattatctctttgtcagtgttagtaaggtaacccatgacagaataatttgagtgatagttcatcatgcagaggatatgatcaagatattacctaatggttttatcctgaaaaaggtgtatacttttagggcactgttaacaatgcgagtgaaaccaagatggtgcaagttccctttgcagatggcgtgggcacacttgatttttattatgagtgaatgtaatctttctgtattttaccagagttacagcaattacctgaaaagtttcctaacattttaataatgttagggatttcgttttggttttagttgtcctcaagagacaacaggttcacagtaatttccatgatgttgggtgtggctaagctggggattggttctgttccccctgctcccgtgtagagaaaagctatatttatactgcattctttctcaactttcaggtaaaacaaactatgatttaaaaaaagaaaaaagaaaagacaggtacttttacttcaaagagtgctttgctacatttttatttaaaccaaaaatcaaataaaataaggaggggggctgggtatactttaaacaaaaccagtcctgaaatgctgttattctcaaagtacattccgaaaaaaaaaaaaaaaaaaa

SEQ ID NO: 6879 - DNA, 2596 bp, Homo sapiens
agcggaggagatggagctcaggtggtaatgcaagcaatagtgagcggctgtaaatacagatgaagcttcactcgcttgcaagccactcacctcctgctgtgcaacccaatttctagcaggccatggtctatggcctggggattgaagacccctgctccaagacttacctcccactgagaactcataatcaggatgacttgaagggagtgattcgggaaagttacctcaaaggccacgaccagctggttcccgtcaccctcttggccattgcagtcatcctggctttcgtcatgggggccgtcttctcgggcatcaccgtctactgcgtctgtgatcatcggcgcaaagacgtggctgtggtgcagcgcaaggagaaggagctcacccactcgcgccggggctccatgagcagcgtcaccaagctcagcggcctctttggggacactcaatccaaagacccaaagccggaggccatcctcacgccactcatgcacaacggcaagctcgccactcccggcaacacggccaagatgctcattaaagcagaccagcaccacctggacctgacggccctccccaccccagagtcaaccccaacgctgcagcagaagcggaagcccagccgcggcagccgcgagtgggagaggaaccagaacctcatcaatgcctgcacagaaggacatgccccccatgggcttcccctgtgattcccacggaacttgcccctgcggggcctcccccaggcacaatccccagcgtggtggtccctgcccatcacgccagacagggttaccaggatggagtaccgttggaacaaggccaaaatgagcgaggtggggccagaatggcgctggaggaccaggccggcacactggagtataagaccatcaaggaacatttaagcagcaagagtcccaaccatggggtgaaccttgtggagaacctggacagcctcccccccaaagttccacagcgggaggcctccctgggtcccccgggagcctccctgtctcagaccggtctaagcaagcggctggaaatgcaccactcctcttcctacggggttgactataagaggagctaccccacgaactcgctcacgagaagccacctggccaccactctctttggcaggggagacaacccgccgcccgccccgcagagggtggactccatccaggctgcactgctcccagccatctggccaggccgtgactgtctcgaggcagcccagcctcaacgcctacaactcactgacaaggtcggggctgaagcgtacgccctcgctaaagccggacgtaccccccaaaccatcctttgctcccctttccacatccatgaagcccaatgatgcgtgtacataatcccagggggagggggtcaggtgtcgaaccagcaggcaaggcgaggtgcccgctcagctcagcaaggttctcaactgcctcgagtacccaccagaccaagaaagcctgcggcagagccgaggacgctgggtcctcctctctgggacacaggggtactcacgaaaactgggccgcgtggtttggtgaaggtttgcaacggcggggactcaccttcattctcttccttcactttcccccacaccctacaacaggtcggacccacaaaagacttcagttatcatcacaaacatgagccaaaagcacatacctaccccatcccccacccccacacacacacacacatgcacacaacacatacacacacacgcacagaggtgaacagaaactgaaacattttgtccacaacttcacgggacgtggccagactgggtttgcgttccaacctgcaaaacacaaatacattttttaaaatcaagaaaatttaaaaagacaaaaaaaaaagaattcattgataattctaactcagactttaacaatggcagaagtttactatgcgcaaatactgtgaaatgcccgccagtgttacagctttctgttgcagcagataaatgccatgttgggcaactatgtcatagatttctgctcctcctctcttttaatgaaataacgtgaccgttaacgcaagtaactctttatttattgttcaccctttttttccttaaggaaaggactcttccaaatatcatcctatgaacagctcttcagaaagcccattgaaagttaaactatttaacgtgaaatccattaactggaataattgagtttctttatttttacaataaattcactgagtaaataagttgaaaaaaaaaaaaagagatttgtgtttggactgtctggtctgtagctaaaggaacaaagttaggaggggaatatttatttaaatctatcagttcattgcctggtcaggtctctggcctataaacatgcaaaaaaactaattcatgttaaagtccttccagatcctaatttctaaagcaatcaggagagaaagcttttagaatggcacatcatatctcattgatgccaacatggtttgtccatggttctgactttctgtgaaggcaccagcttgcaatatgccatcccatttcaccttgcatgtgaagacagcaaacaaaatccacaaatggtgtgaactaatatgctggtgctacctgcaataaattatg

SEQ ID NO: 6880 - DNA, 4750 bp, Homo sapiens
gcaaggggcaggcagagcctctgagcttaagttagttttgtttccctgtcccggatacaagagttggtaagctcgctgcagtgggtggagagaggcctctagacttcagtttcagtttcctggctctgggcagcagcaagaattcctctgcctcccatcctaccattcactgtcttgccggcagccagctgagagcaatgggaaatggggagtcccagctgtcctcggtgcctgctcagaagctgggttggtttatccaggaatacctgaagccctacgaagaatgtcagacactgatcgacgagatggtgaacaccatctgtgacgtctgcaggaaccccgaacagttccccctggtgcagggagtggccataggtggctcctatggacggaaaacagtcttaagaggcaactccgatggtacccttgtccttttcttcagtgacttaaaacaattccaggatcagaagagaagccaacgtgacatcctcgataaaactggggataagctgaagttctgtctgttcacgaagtggttgaaaaacaatttcgagatccagaagtcccttgatgggtccaccatccaggtgttcacaaaaaatcagagaatctctttcgaggtgctggccgccttcaacgctctgagcttaaatgataatcccagcccctggatctatcgagagctcaaaagatccttggataagacaaatgccagtcctggtgagtttgcagtctgcttcactgaactccagcagaagttttttgacaaccgtcctggaaaactaaaggatttgatcctcttgataaagcactggcatcaacagtgccagaaaaaaatcaaggatttaccctcgctgtctccgtatgccctggagctgcttacggtgtatgcctgggaacaggggtgcagaaaagacaactttgacattgctgaaggcgtcagaaccgttctggagctgatcaaatgccaggagaagctgtgtatctattggatggtcaactacaactttgaagatgagaccatcaggaacatcctgctgcaccagctccaatcagcgaggccagtaatcttggatccagttgacccaaccaataatgtgagtggagataaaatatgctggcaatggctgaaaaaagaagctcaaacctggttgacttctcccaacctggataatgagttacctgcaccatcttggaatgtcctgcctgcaccactcttcacgaccccaggccaccttctggataagttcatcaaggagtttctccagcccaacaaatgcttcctagagcagattgacagtgctgttaacatcatccgtacattccttaaagaaaactgcttccgacaatcaacagccaagatccagattgtccggggaggatcaaccgccaaaggcacagctctgaagactggctctgatgccgatctcgtcgtgttccataactcacttaaaagctacacctcccaaaaaaacgagcggcacaaaatcgtcaaggaaatccatgaacagctgaaagccttttggagggagaaggaggaggagcttgaagtcagctttgagcctcccaagtggaaggctcccagggtgctgagcttctctctgaaatccaaagtcctcaacgaaagtgtcagctttgatgtgcttcctgcctttaatgcactgggtcagctgagttctggctccacacccagccccgaggtttatgcagggctcattgatctgtataaatcctcggacctcccgggaggagagttttctacctgtttcacagtcctgcagcgaaacttcattcgctcccggcccaccaaactaaaggatttaattcgcctggtgaagcactggtacaaagagtgtgaaaggaaactgaagccaaaggggtcttcaccctaagcaggccttggagctgctcaccatctatgcctgggagcaggggagtggagtgccggattttgacactgcagaaggtttccggacagtcctggagctggtcacacaatatcagcagctcggcatcttctggaaggtcaattacaactttgaagatgagaccgtgaggaagtttctactgagccagttgcagaaaaccaggcctgtgatcttggacccaggcgaacccacaggtgacgtgggtggaggggaccgttggtgttggcatcttctggacaaagaagcaaaggttaggttatcctctccctgcttcaaggatgggactggaaacccaataccaccttggaaagtgccggtaaaagtcatctaaaggaggcgttgtctggaaatagccctgtaacaggcttgaatcaaagaacttctcctactgtagcaacctgaaattaactcagacacaaataaaggaaacccagctcacaggagcttaaacagctggtcagcccccctaagcccccactacaagtgatcctcaggcaggtaaccccagattcatgcactgtagggctgggcgcagcatccctaggtctctacccagtagatgccactagccctcctctcccagtgacaaccaaaagtcttcacatgttcaaacgttcccctgggttcacagatctttctgcctttggcttttggctccaccctctttagctgttaatttgagtacttatggccctgaaagcggccacggtgcctccagatggcaggtttgcaatccaagcaggaagaaggaaaagatacccaaaggtcaagaacacagtgattttattagaagtttcatccgcaaattttcttccatttcattgctcagaatgtcatgtggttacctgtaacttgaaggtggctacaaagatgactgtggaggtggttgcacttgccacccaaggatgtctgccacacctctccaagccctcctacctaccaagatatacctgatatatccaccagatatctcctcagatatacttggttctctccaccaggttctttctttaaagcaggattctcaactttgatacttactcacattgggctagacagttctttgtttggaggctctcttgtgcatgtaggatgttgagcagcatgtgtggcctgtacccagtacatgccacccagttgtgacaattaaaagtgtcttgagactttatcatgtgtcttctgccctaggtgagaacccttgcactacaggaaccctacacccaacctggggggaatgtagggaagaggtgccaagccaaccgtggggttagctctaattattaagttatgcattataaataaataccaaaaaattgtctctggcaatagttaccttcccagatacaggtccccccttttttcccctaactcttttaagcaatgattgtaactattaggagacattgctctcccacgtatgtttttctttttagacaatgcagacaccaggaagttgtggagctaggatccatcctattgtcaatgagatgttctcatccagaagccatagaatcctgaataataattctaaaagaaacttctggagatcatctggcaatcgcttttaaagactcggctcaccgtgagaaagagtcactcacatccattcttcccttgatggtccctattcctccttcccttgcttcttggacttcttgaaatcaatcaagactgcaaaccctttcataaagtcttgccttgctgaactccctctctgcaggcagcctgcctttaaaaatagttgctgtcatccactttatgtgcatcttatttctgtcaacttgtattttttttcttgtatttttccaattagctcctcctttttccttccagtctaaaaaaggaatcctctgtgtcttcaaagcaaagctctttactttccccttggttctcataactctgtgatcttgctctcggtgcttccaactcatccacgtcctgtctgtttcctctgtatacaaaaccctttctgcccctgctgacacagacatcctctatgccagcagccagccaaccctttcattagaacttcaagctctccaaaggctcagattataactgttgtcatatttatatgaggctgttgtcttttccttctgagcctgcctttctccccccacccaggagtatcctcttgccaaatcaaaagactttttccttgggctttagccttaaagatacttgaaggtctaggtgctttaacctcacataccctcacttaaacttttatcactgttgcatataccagttgtgatacaataaagaatgtatctggattttgtgcctagttcctagcacacagcttcaaaaattctagagtttcctgataggagtgtcttttgtattcataacaagcccttttcacccatccctgggtttatgctaacaaggttacccatggtgggcccttagtttcaaggaaggagttggccaagccagaaagaccaagcatgtggttaaagcattggaattttcagccccatcccacccccaatctccaaggaggtgatggggctggaaattgagttcaattttaacatggccagtgatttaagcaatgctgcctatgtaaagaaaccccaataaaaactctggacagtgaggcttggggagcttcctgattggcagacattccaatgtactaggaaggtagcgcatcttgattccacagggacaaaggctcctgagctctgggcccttccagtgcttgccaccctacatactctttgtctggctcttcatttgtattctttataataaaatggtgattgtaagtagaaaaaaaaaaaaaaaaaaaaaaaaaaaaaaaaaaaaaaaaaaaa

SEQ ID NO: 6881 - DNA, 1592 bp, Homo sapiens
ttagggcccatcacaggtccccaagggactcccccccaccagccgagagggggaattccccgggcccgaaggtggaaggcctcccgccccgccactcaagaccccgtcacgccggcccgaaactcatgcccgctccaacactccccggctcgccctctgggcttcaaggaactgacaggaggcgctgggcatccagccccgctctcctcgacagaggcttggacccttgccgcagcttgggcccccggcttcgggcgagggcagcgccccgccggagtctcccgggctgtgtagtcccggagagccccgggccccgaggggccgaagcgggccgctacgacgggcggcgaatctcgggctcctgaccctggcggacccggtagctgggggcgttttactcgctgctgtgggcatctagcagcaggctccgggctgaagattgcttctcttctctcctccaaggtctagtgacggagcccgcgcgcggcgccaccatgcggcagaaggcggtatcgcttttcttgtgctacctgctgctcttcacttgcagtggggtggaggcaggtaagaaaaagtgctcggagagctcggacagcggctccgggttctggaaggccctgaccttcatggccgtcggaggaggactcgcagtcgccgggctgcccgcgctgggcttcaccggcgccggcatcgcggccaactcggtggctgcctcgctgatgagctggtctgcgatcctgaatgggggcggcgtgcccgccggggggctagtggccacgctgcagagcctcggggctggtggcagcagcgtcgtcataggtaatattggtgccctgatgggctacgccacccacaagtatctcgatagtgaggaggatgaggagtagccagcagctcccagaacctcttcttccttcttggcctaactcttccagttaggatctagaactttgcctttttttttttttttttttttttttgagatgggttctcactatattgtccaggctagagtgcagtggctattcacagatgcgaacatagtacattgcagcctccaactcctagcctcaagtgatcctcctgtctcaacctcccaagtaggattacaagcatgcgccgacgatgcccagaatccagaactttgtctatcactctccccaacaacctagatgtgaaaacagaataaacttcacccagaaaaaaaaaaaaaaaaaaaaaaaaaaaaaaaaaaaaaaatgtcggggggccggaaaaaaaagggaattgaaaatgggccccatgggcccaaaacctggttttcccggaccccaactttcttttgtgaaaaaagggggaaaaatttggcccgggcctcccccaataaggggaagcccggtattaaattttcccaataagcccaggggtttacacttggcattaaatgaattcggctggcagtaccccggggatttaaacccccctaaaggagaggggggctctttttttttgggagacccaaaggggatcttctcttgaaaatcctttttttttcgcccgagataattctggtggctttgcaaacaaaaaaacaccgctttttataagggggg

SEQ ID NO: 6882 - DNA, 1834 bp, Homo sapiens
ttctaatgcttttaaggttccttttcagcccttcctcctcgtaatccacaaatactgagaccaaggcattttttgggtcagtcctaatttcaagcattctatcctgccctccccaaatgaactcacacttattagaccatatgttcctatattagttcaggaagggggaaaaaatgttcatcacacttgtatataagagatcatagaaaaacagtttactaacctgtgaaaataccattcattctctgtttacctctggtccacagctaagcaatcagtaggatataaatgtaccctatgttcactattcagtattcataagtatactacttatgaattggaaatctgacacaacatttacatgacctaattttgaaaatttaaaatagtgtaaggcccctaggcttaattttacaggggaaagattaaaaggacacaagcaaacatatattctctctctgtgctgtgggacactggtaattttttgacttaaaatatttgatacttaaaatgccaaacttctacatttctgcagtaacaaggcagttatcatattgaataccatttctttctctccagtaagtaaatattagcacatgaactgaaaatattaagtgattataaaaaagtccaaataaattcattaaaatttagcttggcaaaatgttagtttcatgttcttggtagaagtccttttatatttatattcaaatgaaatgaacaatttacaagcaaaggaaatggcatcaaatatttgacaccctgcctcccaaggtgtattgattcatgctttttgctcagatctaggtttctccactcaggaaaagaggagaatgtacccatacttgggaaaacaagtttccgatggcacagctttgatcaaacagcaaaattctatccatctatgtattgccatctgacagtatgacaaatggtcccatgtgcgatattcacactgcattgtagtcaaacctgtaagtcaaaggatatgaaataatagtaactacacattaagcacagaagaaaatgaaacaaacaaaaaggttttaaaccaaccaaaaatatgtcttattttggatgttctatatgttcttacattctctcaggtcttttgtgtcgttatgaacacaattctaacaagcttgattattttatttccattcacatattacaggcaacaagctgaaaaagtagaacagggtgtagagagacaggacaaagtacagattagggcttgaagtgcccctgaccagtcgacagcaaccacatggaataatgactcatgtgcattaatgatcacactaaatgatatttgttttttacctagtccttcaactgacagcttaaagaacttcaggttgttctgattcttgagtctcctctacaacttcagagaggactttcattttattttggatcaaatgctccacaactagttgaaactggaattaaattttatatgaagttcctagatgatttaaagctgtaagaagaagaataatgaatcataagaaaacttgctgctacagatatcaaaaaggaatgttaccatccctcatgctaatccttttcattttaaataaacaggatctaaaaaaaataatgctgggaagtcctaaccacatcaagaatgcctcagatcagtgacccaaggaccttccagaatggatgaaatagacccaaagctgaattcacctaattttagggccaaaaacccaaaaaacaaaacaagaccaaaaaaatcttcagatactgggagaacaaatctcaattgctcaattgtatcttatgaaaacaatttttcaaaataaaacaagagatatttaagattcaa

SEQ ID NO: 6883 - DNA, 4279 bp, Homo sapiens
  misc_feature (334)..(348): n is a, c, g, or t
  misc_feature (1609)..(1626): n is a, c, g, or t
  misc_feature (4003)..(4003): n is a, c, g, or t
tactggacaaacatttcctccaaggacacagctctctgcctccatgtcaccacctttgaaggactgactgattccctcggctggtgccagtgcctgctcctgccatggggcccgcggggagcctgctgggcagcggacagatgcagatcaccctgtggggaagtctggcagctgtcgccattttcttcgtcatcaccttcctcatcttcccgtgctctagttgtgacagggaaaagaagccgcgacagcatagtggggaccatgagaacctgatgaacgtgccttcagacaaggagatgttcagccgttcagttactagcctggcaacagatgnnnnnnnnnnnnnnnagcagaatggggcactcaccaatggggacattctttcagaggacagtactctgacctgcatgcagcattacgaggaagtccagacatcggcctcggatctgctggattcccaggacagcacagggaaaccaaaatgtcatcagagtcgggagctgcccagaatccctcccgagagcgcagtggataccatgctcacggcgagaagtgtggacggggaccaggggctggggatggaagggccctatgaagtgctcaaggacagctcctcccaagaaaacatggtggaggactgcttgtatgaaactgtgaaggagatcaaggaggtggctgcagctgcacacctggagaaaggccacagtggcaaggcaaaatctacttctgcctcgaaagagctcccagggccccagactgaaggcaaagctgagtttgctgaatatgcctcggtggacagaaacaaaaaatgtcgtcaaagtgttaatgtagagagtatccttggaaattcatgtgatccagaagaggaggccccaccacctgtccctgttaagcttctggacgagaatgaaaaccttcaggagaaggaagggggagaggcggaagagagtgccacagacacgaccagtgaaactaacaagagatttagctcattgtcatacaagtctcgggaagaagaccccactctcacagaagaagagatctcagctatgtactcatcagtaaataaacctggacagttagtgaataaatcggggcagtcgcttacagttccggagtccacctacacctccattcaaggggacccacagaggtcaccctcctcctgtaatgatctctatgctactgttaaagacttcgaaaaaactccaaacagcacacttccaccagcagggaggcccagcgaggagccagagcctgattatgaagcgatacagactctcaacagagaggaagaaaaggccaccctggggaccaatggccaccacggtctcgtcccaaaggagaacgactacgagagcataagtgacttgcagcaaggcagagatattaccaggctctagcaacccagaagacaaccctgggtagcctgtgatcagtgtctggagacgtttcttctgtggaagagaagaagtgacacaaacctatacttcatatgctgctttagtcacctgaagatggttggagaggccctgtcgactgttctcccagttgttcagtttctgagacagagaggtacggactaggctgcacctgagtgtgcccctgnnnnnnnnnnnnnnnnnnacacccaagcacatctccctgctgcaccctcaccacccacaaaagatcccagctgtcagtggtctcatctcattagtgaggaaagccaagctgtatggaaaagctgcactcaccaaggaccacaatgcccccggcctaaagtactgccattcagaaaagcaggtttttcttcctctctttccttttctctgtctgctactgactttaaggctttttcccccttgaaatgtccagattcctgtggttcatcccaaggaaattttcacacaaagcttggcctttgccctcaatataggtgttttaggatggtgacaaaccatggctgctgctttctgcccagctcgccagtcctccccaaagagttgcgcatcagcacctggggatctggaccctgcgggtgaagggatggggagggacgtccctggagtctcttctgtctttgttccttcttattttggcattcgatatcagcagcctctccccaaagtacttgaagtcagttttagatgctttattttatttttctagtcaaaaacgtgtttcccccagtgtttgaaaactcgtccgaatcttttcagtattttccatgagtattgtggtacttctagacttgtttaagcccagaactcattccttcaaaacagagagccttaatctttatgttgggacacagaccacatatttggacggcagccatgcatccatcgctgaagggctgtggacatgaatgtgtatttcccatggtctccgctgcccacaccaacagtgtggcatctcataagttaactgctaccctaaggtaatctaagattaaaatgtaaacatttatttttgttatgtaagtttataagatgttttatgttcaatgcctaatttctcaaaagtgccagaaaaaaatgtatattagctattttgattttatgtacaatgatttatactctccttttgaaaagataccataaagcacataagctagatcactacaaggagctgttatcttttttctaatcaagtgtttaaaacactgatggtttttaaagactcacctttttaaatggtacttggagctcctgattcaaattacctagaccccctagagaaataaatggaatatacataaataatcattttcagtggtttatggtgggcaatattgcaatatttgaaatggtaaaaatggaaagaagaacaaaatatgatgagaggtggctgtgaattataaacctcataaaagtgtcataattccattaaggtttaattatattttttcagaaaacagtgatgaattctgtagtccagtgcttgccaatgcaaattgcctattggaatcttcttcctatattttacaaacatcagtggctgaaatagctcagagtaagagctcagcctggtttgaatttaatcatctctttagatcttataaggccagcattaggaaacttgttcacttttcattttcaaaggagcctagttgaagtgctattatgagtgtgggctatggaaagacagcttttcctacactgataaagaaaaaaaatgaggaaattatttcatccccttgtgacatctgtgactttttggatttaataatcttgctgtttttcctctttatgacaaagaatataattgggaggatgaagtgtcttaaaaattgtagagaccagctcactggaatgtttttccatccctgtattcatggcttgactttgtgactgctctacactgcatgtctgacattgcagagtgagctatgttgaggtaaactggttggttgtcattattttgcaatcagcctggtctctcccatgaagatgtcgtgtgcataagcacaatcatcactgattagaagatcacagcagaatacccttggattagagagaagttcgtaccttgcatttctctgaattctagtctctcataagcactgctttgctggatgattttcactgctttgtgttaatgactttgagcgatctctcacatgatggggttctttagtacatggtaacagccatgtcatcttacacacctagcattgtgaatgctgtagtgacatcctttataggcaccttacagctcaaaacttttgtttcatttcatgccttacttatcaaaaaggcaggaaagtaggtatgatctctaaagtaaaaaaaaaaaaaaaaaaaaactaccctccaaacgccactccccactgctccgcccgccgacccggccgaaacaaaccagcggttattgtggtgaaacatgggggccatctcctcgggccttccccatacacctttggggttcctccccctggggaaccccccgccgttttcccgcctctgtggcaccccaaaaggtatgaggcctaagtatttccccggccccggccctnttccgccgcgtcattaaattgtgcagaacccgccatattttaaatttatacgccactcaaaaccccacgaggtttataccacctcgtggtgtgttatatagggaaaatcccgcgcctctggatgagttacccccgggggcaaataatttaaacccccctccgcttactgtgaaaaacgcggaagttcttcccctttctcgcggcggttctcgccagcaggcagtcctcctatccgtgagacatctccctcttttctcttcctcggcctgaacgccg

SEQ ID NO: 6884 - DNA, 1145 bp, Homo sapiens
tgtgcaattggccggaaggaacaccttttacagtggccacaattagcaatttccggggccccaatcaggagccggtgaccggggtatttaaccagttccctgtctcactggcccaaaattctcgcattggttttcccgggctgtctcagtttggggaaattagaccagaaggggggctgcaaaaatgttgagtctaatgttcgtaagcatcatagaaattcctgtcttcatattaagatgtactgctttaaaacacaactccagagcccctccccaagctcccctccccaagctcctgaagacccggtttctgagggagggaaattgctacttggattgagagtagctggaatgtaagtgaccccaggctttgcctcagggcctttagcctatgtcccccccacataaagagagcttctcagagcctgactgaagagctgacgttttgctttttcatatgccaattaaacccggtctaaatccaaatgcttctccagccatccaggagtggctgtccttttcagtcttgtcttttatataggtagctgagggggaagatttagaagccttgcactcactaaatagattaaacagagcaggcttgtttgttgaattgctccaaagtccaacagacacacactgagcaggtgttttacactcacattccctttttgccccttaaatagaaagtgcaggtaaaggtttatacaacaagaaagcacattgaaaataatttgatactctaacaatccattaacatgtgtaggggttacggtgaggatcactgtgttgtattcagaaaaacggggagagggatgcttaattggccctggcgcttgctatttttttctcatttcttcacaataggaccgtctttggcagcagcaaaatgtatttcagtatggcagtctttcctctcttacattattggtaagattatactaacaaaatgtttccccttgtacaattatgctgtgtttttaaaaaacattgacctgtgtgtttttataaaagaaaaagtatgttgtgccttcttcttaagaataaagttttctaaagggaaaaaaaaaaaaaaaaaaaaaaaaaaaaaaaaaaaaaaaaaaaaaaaaggggggggggcaaaaatccggggggggaattgggga

SEQ ID NO: 6885 - DNA, 2733 bp, Homo sapiens
gtaggtgcgtgcccgggactctgccgatgcgggccgcgccccctggggccaagagactccacgtcccgctcagggcaaagggtgtggggagaagcggtcacgcccctcggctggaatccgtgaggaccaggtctttttcagtgtgctcaatatggtcaccaagcctggaaacatagagtctcaccctgttgcttaggcagatggcgcgatctcggctcctgggttcaagcaattctcctgcctcagcctcctgaatagccgggattacagtcgtccagcatgctctgcccaccccacgccgaggtgcactgaccatgagcctcaactcctccctcagctgcaggaaggagctgagtaatctcactgaggaggagggtggcgaagggggcgtcatcatcacccagttcatcgccatcattgtcatcaccatttttgtctgcctgggaaacctggtcatcgtggtcaccttgtacaagaagtcctacctcctcaccctcagcaacaagttcgtcttcagcctgactctgtccaacttcctgctgtccgtgttggtgctgccttttgtggtgacgagctccatccgcagggaatggatctttggtgtagtgtggtgcaacttctctgccctcctctacctgctgatcagctctgccagcatgctaaccctcggggtcattgccatcgaccgctactatgctgtcctgtaccccatggtgtaccccatgaagatcacagggaaccgggctgtgatggcacttgtctacatctggcttcactcgctcatcggctgcctgccacccctgtttggttggtcatccgtggagtttgacgagttcaaatggatgtgtgtggctgcttggcaccgggagcctggctacacggccttctggcagatctggtgtgccctcttcccctttctggtcatgctggtgtgctatggcttcatcttccgcgtggccagggtcaaggcacgcaaggtgcactgtggcacagtcgtcatcgtggaggaggatgctcagaggaccgggaggaagaactccagcacctccacctcctcttcaggcagcaggaggaatgcctttcagggtgtggtctactcggccaaccagtgcaaagccctcatcaccatcctggtggtcctcggtgccttcatggtcacctggggcccctacatggttgtcatcgcctctgaggccctctgggggaaaagctccgtctccccgagcctggagacttgggccacatggctgtcctttgccagcgctgtctgccaccccctgatctatggactctggaacaagacagttcgcaaagaactactgggcatgtgctttggggaccggtattatcgggaaccatttgtgcaacgacagaggacttccaggctcttcagcatttccaacaggatcacagacctgggcctgtccccacacctcactgcgctcatggcaggtggacagcccctggggcacagcagcagcacgggggacactggcttcagctgctcccaggactcagggacagatatgatgctgcttgaggactacacgtctgatgacaaccctccctctcactgcacttgcccacccaagagaaggagctcggtgacatttgaggatgaagtggaacaaatcaaagaagctgccaagaactcgattcttcatgtgaaagctgaagtacacaagtccttggacagttacgcagcaagcttggccaaagccattgaggccgaagccaaaatcaacttatttggggaggaggctttgccaggggtcttggttacagcacggactgtcccggggggcggcttcgggggccgccgaggcagcagaactcttgtgagccagaggctgcagttgcagagcatcgaagaaggagatgttttagctgccgagcagagatgagggcctcagggtgccgtggggctgcagcctgagaggctggcccggggaggagttcccatcaccgcctgtgccgcggccttgggagcatgtcactgtgtacagctggccacacacagggaaggagcagcatctggtatgcagccaccaggacaaggactgaaaataatgtctacagtccacagcttcagcatttccagagaccacatgtgagcttcttttaggtcccagtgatgggaccagaagcatctaaagcaaaaaaaaaaccaaaaaaaaatctagagatgtggctgtggctttttgggaggtggggcatgggaggaccagagacgaagggcttggaaggagacccccacatgcatcatttcctcctcttcacagtgtgctgggagtccagccgtgcactgtgccagatgcctcaggaggagaaccctccccagtgtactgtgaaggatgacacagcacttcttcctaatgacacgcgaccgtcctggtgcctctacatggttgatgcgggcagtgtgggaccctcagttctaggactggtccgcagagaaagcacccaggagcagagcgcttcggagcggtcctcagtggcgccacctgctggtgctaatagggacagccacaggcctcttgcagactggcccaccctgcctacttccctactgacaagttctttggtatttcaaaagggagaaaccactataaaagacaagaggaagggcaggtactaggtgtttcatttccagaattaaaaaaaaaatccatttaaaaaaaaaaaaaaaaaaaaaaaaaaaaaaaaaaaaaaaaaaaaaaaaaaaaaaaaaaa

SEQ ID NO: 6886 - DNA, 3422 bp, Homo sapiens
gcgtgcggatgcggggaggctgcgtgtgtgcgcagggagagaacgccggccaccttcccgcttccgagctgggtgcgcgccgagcacaggagattgcctgcgtttaggaggtggctgcgttgtgggaaaagctatcaaggaagaaattgccaaaccatgtctttttttctgttttcagagtagttcacaacagatctgagtgttttaattaagcatggaatacagaaaacaacaaaaaacttaagctttaatttcatctggaattccacagttttcttagctccctggacccggttgacctgttggctcttcccgctggctgctctatcacgtggtgctctccgactactcaccccgagtgtaaagaaccttcggctcgcgtgcttctgagctgctgtggatggcctcggctctctggactgtccttccgagtaggatgtcactgagatccctcaaatggagcctcctgctgctgtcactcctgagtttctttgtgatgtggtacctcagccttccccactacaatgtgatagaacgcgtgaactggatgtacttctatgagtatgagccgatttacagacaagactttcacttcacacttcgagagcattcaaactgctctcatcaaaatccatttctggtcattctggtgacctcccacccttcagatgtgaaagccaggcaggccattagagttacttggggtgaaaaaaagtcttggtggggatatgaggttcttacatttttcttattaggccaagaggctgaaaaggaagacaaaatgttggcattgtccttagaggatgaacaccttctttatggtgacataatccgacaagattttttagacacatataataacctgaccttgaaaaccattatggcattcaggtgggtaactgagttttgccccaatgccaagtacgtaatgaagacagacactgatgttttcatcaatactggcaatttagtgaagtatcttttaaacctaaaccactcagagaagtttttcacaggttatcctctaattgataattattcctatagaggattttaccaaaaaacccatatttcttaccaggagtatcctttcaaggtgttccctccatactgcagtgggttgggttatataatgtccagagatttggtgccaaggatctatgaaatgatgggtcacgtaaaacccatcaagtttgaagatgtttatgtcgggatctgtttgaatttattaaaagtgaacattcatattccagaagacacaaatcttttctttctatatagaatccatttggatgtctgtcaactgagacgtgtgattgcagcccatggcttttcttccaaggagatcatcactttttggcaggtcatgctaaggaacaccacatgccattattaacttcacattctacaaaaagcctagaaggacaggatactttgtggaaagtgttaaataaagtaggtactgtggaaaattcatggggaggtcagtgtgctggcttacactgaactgaaactcatgaaaaacccagactggagactggagggttacacttgtgatttattagtcaggcccttcaaagatgatatgtggaggaattaaatataaaggaattggaggtttttgctaaagaaattaataggaccaaacaatttggacatgtcattctgtagactagaatttcttaaaagggtgttactgagttataagctcactaggctgtaaaaacaaaacaatgtagagttttatttattgaacaatgtagtcacttgaaggttttgtgtatatcttatgtggattaccaatttaaaaatatatgtagttctgtgtcaaaaaacttcttcactgaagttatactgaacaaaatattatttaaaattacttcaactttgtgtttttaaatgttttgacgatttcaatacaagataaaaaggatagtgaatcattctttacatgcaaacattttccagttacttaactgatcagtttattattgatacatcactccattaatgtaaagtcataggtcattattgcatatcagtaatctcttggactttgttaaatattttactgtggtaatatagagaagaattaaagcaagaaaatctgaagtattgtcttgtttttaaaaaatacagttcctagtgtttatagaagtcacttaatttgtctcatttttccacctggaaattaggaataatgtagaatgcaaggcagtaatttccttttggaaaggactctgaaggcagaaaagaagggagagaacctcatgggcagaatattataaaaagagtgtcatattccagcatttgaattggaaagagaagagtgaagatccaagttgcattattaatctgccctgtgttttttccttttaacaatcagtttgagctgctgctgttatgagtttctcatcaagatgaaagccctaatatgtaaagtcaaatccgatttaaattttgtgcttttatagaaagaaatttcttcatagacgtggtgatatatcatttcttggacctgctaatagtaggtcaaaggggagcactccttgccccctgttcctgggtttatgcagttttctttttagagtttatatagggcaagtggttctttttctctgaattacaggatggaaaaaggtcatatcctttgtcaggaaatataaacttgaaagtatgtagtcagctcttgtaatactcatatttatgattgtcctatatgaaaaacaacttcagttaaaactataatgtgtgattctgtataacaaggtgatgtctgtttcccagggctcagacctaatccagttataataaaatcaattaaatgaaatattctatagaatcgatctatgcccttgttaatctccatccatataggagtcacgttctttaagacagatggtggtagttatttttgtggcatggttagatttgactggttttgcagaagattacagttatgtactgcataatgacatatacaatagtggtcccataaaattataatggagcagaaaatctattgcctcatgatgttttagccgttttaatgtcatagcctagtgcattactcacgtgtctgtggagatgctggtgtaaacaaacctactacactgccagttgtataaaagtacagcacattcagttatgtacagtatgtaatactgataatgacaataaatgacaccggtttgtgtatttactttttataaaaaaaaaaaaaaaagaacaagaagaaacagggcgggggcaaaaaaaacaccgcgggggcccacaaaacagacaaccccaattccggaaaacagggggccaaacaggagcaccaaaaagcaaaacggggcggatacaaaaaacaaggaaaaccgagacagcatagaaggaccgaaccgcaggaaagagacaccccaagtagcaggcgaacg

SEQ ID NO: 6887 - DNA, 1687 bp, Homo sapiens
  misc_feature (716)..(716): n is a, c, g, or t
  misc_feature (732)..(732): n is a, c, g, or t
  misc_feature (736)..(740): n is a, c, g, or t
  misc_feature (1413)..(1444): n is a, c, g, or t
ggctggccttcctccaccccctcctcctctgcctcctccaggccacctccacttttcgagaatgaaggcaaaaaagaggaatcttctccttcacgctcagctttatttggcccaacttaaccagggagaagcaattacaaaagggctccgccatgtcacagatgaccagaagacatacaaaaatcccagcctgcgggctcaaggagggcaaactcaatctcccaccaaaagtcacactccaagtcccacatctcctaaatcttatccttctcaaaaacatgccccagtgttggagttggaaggaaagaaatggagagtggagtaccaagaggacaggaatgaccttgtgatttcagagactgagctgaaacaagtggcttacattttcaaatgcgaaaaatcaactattcagataaaagggaaagtaaactccattataattgacaactgtaagaaactcggcctggtgtttgacaatgtggtgggcattgtggaagtgatcaactcccaggacattcaaatccagtaatggggagagtgccaacaatttccattaataagacagaaggttgccacatatacctcagtgaagatgcattagactgtgagatcgtgagcgccaagtcatctgaaatgaacatacttatccctcaggatggtgattatagagaatttcccattcctgaacagttcaaggacaggcatgggatggggtnccaagtttattcactngagnnnnngaattatggcctaacttcctgagagaccgaaccccctcacctgaatccccctctatcaaacaaacaaaaaagcagcagtaaagagctagaagttgcagtagcccctactgctttagctttggcctccaacgattctgtgctatagatacagcactgtttctggcacgcctcgtgggcattttgaaatatttaacgtttcctcatgatttgcctttgtgtgtgattttagttccacatgatgacttgtgaacattagggatttaaaggaaaaaaaaaaaagaatactgttcccctcatttcatgaacacagtaactgataggtaaacagactgcattgattcactattatccccttatattcacatggctagttaacaatttacaacccttggaagaatctaagatgtacattttttaccttataggcaattacaatattcatgtacgaaagtaagtaagtgtgcccatgaaacaatgttcacacgtaaaacaaaataggaacacaaatgtacaccgtatataagcgtgcatccggacagcagaagtaaataatacaacaccacgctagtaacagacatacgaagataaataagggaccaatttcgatcccatgtcctggtgaagaacctatatcacacagaagacactgcaaacccaaaagatacgactaatnnnnnnnnnnnnnnnnnnnnnnnnnnnnnnnnaggaaacaggataatacagataaaaatttaagcaacaaatttcaaaaacaacattaggaagaaacaccaccaatgtgcttaaacagacgagatcatacacaggcacgttaaagacacgtgaacataaagagaggaaaaaacagaacatacaagcccagtaacacgagaagaaaaaagatacacacgaagaggtagcaacacaacaactccaacacaaacacgagaggcagaaataagaacggt

SEQ ID NO: 6888 - DNA, 1894 bp, Homo sapiens
  misc_feature (650)..(669): n is a, c, g, or t
ggcacaagcctctctctctctccctctctctctccctctctctctctccctgtgtcgcttaaacaacagtcctaacttttgtgtgttgcaaatataaaaggcaagccatgtgacagagggacagaagaacaaaagcatttggaagtaacaggacctctttctagctctcagaaaagtctgagaagaaaggagccctgcgttcccctaagctgtgcagcagatactgtgatgatggattgcaagtgcaaagagtaagacaaaactccagcacataaaggacaatgacaaccagaaagcttcagcccgatcctgccctttccttgaacgggactggatcctaggaggtgaagccatttccaattttttgtcctctgcctccctctgctgttcttctagagaagtttttccttacaacaatgagaaaacatgtactagctgcatccttttctatgctctccctgctggtgataatgggagatacagacagtaaaacggacagctcattcataatggactcggaccctcgacgctgcatgaggcaccactatgtgattctatcagtcacccattgtacaagtgtagctcaaagatggtgctcctggccaggtgcgaggggcactgcagccaggcgtcacgctccgagcctttgnnnnnnnnnnnnnnnnnnnncaagcaacccttccgttcctcctgtcactgctgccggccccagacttccaagctgaaggcactgcggctgcgatgctcagggggcatgcgactcactgccacctaccggtacatcctctcctgtcactgcgaggaatgcaattcctgaggcccgctgctgtgtgtggcttctggatgggacaactgtagaggcagttcgaccagccagggaaagactggcaagaaaagagttaaggcaaaaaaggatgcaacaattctcccgggactctgcatattctagtaataaagactctacatgcttgttgacagagagagatactctgggaacttctttgcagttcccatctcctttctctggtacaatttcttttggttcattttcagattcaggcattttcccccttggctctcaatgctgtttgggtttccaacaattcagcattagtgggaaaaagtgggccctcatacacaagcgtgtcaggctgtcagtgtttggtgcacgctggggaagaatttactttggaaagtagaaaagcccagcttttcctgggacatcttctgttattgttgatgtttttttttaccttgtcattttggtctaaggttgccattgctgctaaaggttaccgatttcaaagtccagataccaagcatgtggatatgtttagctacgtttactcacagccagcgaactgacattaaaataactaacaaacagattcttttatgtgatgctggaactcttgacagctataattattattcagaaatgactttttgaaagtaaaagcagcataaagaatttgtcacaggaaggctgtctcagataaattatggtaaaattttgtaagggagcagacttttaaagacttgcacaaatacggatcctgcactgactctggaaaaggcatatatgtactagtggcatggagaatgcaccatactcatgcatgcaaattagacaaccaagtatgaatctatttgtgggtgtgctatagctttagccgtgtcacgggcatcattctctaatatccacttgtccatgtgaaacatgttgccaaaatggtggcctggcttgtcttctgaacgtttggttcaaatgtgttttggtcctggaggctcaaattttgagttattcccacgttttgaaataaaaagagtatattcaaaaaaaaaaaaaaaaaaaaaaaaaaaaaaaaaaaaaaaaaaaaaaaaaaaaaaaaaa

SEQ ID NO: 6889 - DNA, 611 bp, Homo sapiens
  misc_feature (587)..(587): n is a, c, g, or t
tttttttttttttttttcccccttttcacgtttattttaatcatttgcaaaacaaaatacattaaacaagggcagttggctttgctaaattaaaataaaatgatctcgagtagaaaacgtaaaaaatgaatcaagataagtagaaatggtagcaaacaataataaataagttttctaatattaacaaagcaaaataaaattgaccaaatgcgtttgacactactagattttttttaatttttcattttttaaacaaacatttgcaaagagcttaagaattataagtggctgtgtttaaaaaaaaaaaaaactggtctgcaattggcagttgagtttctcctggagccaccaccgcagcagcggctgataaagtgcgtgcgcggagtttcctaaaagacgccaacgttctcgcgatcggatgcacatactgggtatgtttatacaatatataaaccttaaagtttcttgttttctaacaattccatagtcaaaagttatccactttgggagcactaattttgccctcgtgccgaattctttggccttcagggccaaaattcccctattaagtggaagttcccgggcgntaatttttttttttaaaaaaaaaa

SEQ ID NO: 6890 - DNA, 2415 bp, Homo sapiens
gagcggattaccatttccccccgggaaccagttatgacatgatttcgaatttaatccgactcacttaggggaatttggccctcgaggccaagatttcaactcggtggtggccactgcgcagaccagacttcgctcgtactcgtgcgcctcgcttcggtgagccccagggcccctgcctccttcctcctgccgtcctgcctccgtccccgccctttcatcatccgcgtccctgtgaaggcattccctaaatccgagcccgagtggttctccccgggaaggctactttggggagctggggggatgcgaaacaccctagatactggataatggggtggggaaatcgatgatttaagaacaaaaccgaaaaactggcgttttgtcgtgccgctcggaggggacattaaaaaatttcttagtgtttgcccgcaaaggtattgtgcgttgccttggaggctgagatatgggggaatagacaagtcctttgttctgaggttcatcttccgagccccgagcctcctcccagcctcggacggctgcgcgggctgcatctgtgcagcctggcggcggcggggctgtgctatgacatctttacagtccttcttgcagagacatgtgtgccagggatgccgaattgccgggagagcaggcaagaccggcttcggggcgcgcggcggccgctttgtgtgcggggctgcattgtgacgcgggcgatgaagccggtagggcggtggtcggaagctccagccgcggccgccgcctttgtgagaggactagaaagccggatccggcccgcatccttgcggagaggccgcggctaggaaatggaaacgcttttcctacctgggctccattttaggaattcttgccgatttttcccacttgaatttggaagtggctttcctcttctttccttgtcctagccagcctttaattttaaacgctgtaattaacaattcgcagtggtcaatttcctttattctgcaagattcggctttgagaggcatccgccctctttggtccacagcgttttgaaatatggggaggaggggcgcggggggtgtcgcctctttttctgtagaaagaggaagctcgtgagcgcggaacggcagcagtaggagggcgagaagggtttttttcaggctgcgggtcggagggcagaagtgcagttcccagcccagggacaactcggtggtggccactgcgcagaccagacttcgctcgtactcgtgcgcctcgcttcgcttttcctccgcaaccatgtctgacaaacccgatatggctgagatcgagaaattcgataagtcgaaactgaagaagacagagacgcaagagaaaaatccactgccttccaaagaaacgattgaacaggagaagcaagcaggcgaatcgtaatgaggcgtgcgccgccaatatgcactgtacattccacaagcattgccttcttattttacttcttttagctgtttaactttgtaagatgcaaagaggttggatcaagtttaaatgactgtgctgcccctttcacatcaaagaactactgacaacgaaggccgcgcctgcctttcccatctgtctatctatctggctggcagggaaggaaagaacttgcatgttggtgaaggaagaagtggggtggaagaagtggggtgggacgacagtgaaatctagagtaaaaccaagctggcccaaggtgtcctgcaggctgtaatgcagtttaatcagagtgccatttttttttttgttcaaatgattttaattattggaatgcacaatttttttaatatgcaaataaaaagtttaaaaacttaaaaaaaaaaaaaaaaaaaaaaaaaaaaaaaaaaaaacaatattgcgcaaatcgaaataaaaaaagtcgtaaaacattcactaaaaagggggggcggcctcaaaaaatccccccggaggggggccaaattttacgggtaacccccgtttttttgtgaaaaaaggggcccccaaagggggggggcgattttaaaaactaggggcacggggccccctttttttacacccccctgggagtggggaaaaaccgcccaactcggggggaactttttggggaaagagacccctaattcttgtgggggggggggacaaatttggggaaaaacttccccccccggggattttttaagggctccgggggggaaaatataaaaatttttttaaggggggaaaaagggggggaaaaaaaaccccgccaaattgtctttgccggcctttgaaaaattttttttccttccgggggaggggagtttttttggagaaaaattttttacccccgggggggcccgggggggctcccccaagggggggggggggggtttttttaaaaaaacaccaggccccccgggggggcctctttttgtggggcccccccaatggtcccccaag

SEQ ID NO: 6891 - DNA, 2437 bp, Homo sapiens; identical to SEQ ID NO: 6767

SEQ ID NO: 6892 - DNA, 1622 bp, Homo sapiens
gaagtaggaatagcttgggcccaggaatttgagaccagcttgggcaacacagggaaacctggtctctaaaaaaaaatttttttttaatattctgggcttagtgactcgtgcctatattcccagcttttctagaggctgaggtgggaggatctggttcgcttgagcccaggagatggaggctgcagtgagccatgattgccctactgcattctagcctgggcgacagagagagcgagcctgtgtccaaaaagtaagtaagtaaataaatacataaaaataaatacgggtttctgtcacctcgcttcagaatcagacagctagaggtggggcctggaattggtgttgttaatgcattctccaggaatttctcctgcatagggaagttggaaaccactggcttccttctctctgagcatctcctgagactagctcctgaagtggatagaaagtttttcaagtagcagattaagttttatcccttaggctgctaataaaaaacaattgactgtgattgcgtaattttacctgtcgtacacctttcagaaggcagaggctttggttcacccctctacctccagggcctaaaacagtgcctggaggaactcaattaaacatttgttgagtgaatacgtgaattacattgcagcgaggccaatcttttaaaagttacttgtcaaattaatctatcagttagtggcatattaaagcccagcatattacaaaaaaaatttttttagtagtcactgattttataaattaggagccacaagcactataccccagtgacttctgtaagtttggttagtttagaaaggagagagcctttcccagggcgtagtgtgctcaaggtgattagccagaaagaagattcagaacaaagcatttgcttagagagtcaaatgtaattagtcacagtgtagtggtaaatcatatatcaaacttatatttggtatattgtcttatatcaaaatatcattttataaaccataagtccaacatactgctataaaaattggtttctagcaaatagagaaaattgttatgttttccaatttcacttttcatactaataaaatttgacctttacaccttctttttcaagagttcaccacaggggcaccatagatattatgtagttaagagctcaaactctggagaatattgtgtttgaccacacatagtcagggagtttgatctaacctctcaatgcctcatttctcagctgaacatggaaatagtaataataaagttcacatacttctaagtgcttacctaagtttttgagacacatccacttaataaatggtagttacagtgatgataaagaattggggtgtataaaaatacctaaaactcaaaagctaacccatttaattattgtactactggacttttatgatagtaagtagaaatctgttgcttaaaaaagaagtttctttggtggtgtgcgtctatagtcccagctacttcggaggctgaggtgggagaatcacttgaacccaggagatcttggctgcagtgagctatgattgtgccactgcactctagcctgggtgacagagcaaggccctgtctcaaaaaaaaaaaaaaaaaaaaaaaaaaaaaaaaaaaaaaaaaaaaaa

SEQ ID NO: 6893 - DNA, 1222 bp, Homo sapiens
  misc_feature (36)..(36): n is a, c, g, or t
  misc_feature (197)..(197): n is a, c, g, or t
cgcagcttgcaggctgccgccagaagtacaagcagntgccaagtcctccggctgcttctttgatcactgtgacttccctgggcgctgtcccccagcaacgtggccatctacggtggcctgtgcgccttggctacctttgaccggcaggggctgcagcgcaatgtcatctccagcagctccttcaagttgttcttggngctggagccacaggtccgagacatcatcttcaaattctacgagtccaagtacgcctcatgtctcaagatgctggacgagatgaaggacaacctgctcctggacatgtgtctggccccccatgtcaggaccctgtacacccagattcgcaaccgtgccctcatccagtatttcagcccctacgtgtcagccgacatgcataggatggcggcagccttcaataccacggtggccgccctggaggacgggctgacgcagctaatcctggaggggctgatcagtgcccgtgtgaactcacacagcaagatcctatacgcccgggacgtggatcagcgcagcaccacctttgagaagtctctgttgatgggcaaggagttccagcgccgcgccaaggccatgatgctgcgggcagctgtgctccgcaaccagatccatgtcaagtccccgcccagagaagggagccagggggagctgactccagccaacagccagtcccggatgagcaccaacatgtgaggggtgaaccttggcctccaggacatctgcaccccctccccacctccacggacctcggacctccaggcggctcagtgctgcctgcggcccagctaaggggcctggccactgggtgccacccagcctgtgtgccctccctggggctgaggaggcaggcggctgctagttgtggcccttcctggaaggagaggcctgcagggctcgaccctgtgggtttctgtccccagggagcagactgtgcggcacccaggcccagtggcaccatttcccagacccctcctgttcccgcctcagtcaggtgcagacaagtgggcggtgtccattaaagagcagactcagcgttaaaaaaaaaaaaaaattcctgccgtgcaggctctggtcacccctgggtggccttgggttcctgagggctgtctccctgggactaggcttggaggcagggcctggtgagagaaatgagaagcctggccctcagattcaacagcccccagcagcagccactgtggcctcg

SEQ ID NO: 6894 - DNA, 892 bp, Homo sapiens
tctgaggaattttgtctgcggctcctcctggtagattttgagcctgataaagggactgaaggctggacatgaggaccaaccaagccctccagcaaggattcagagtgcccctccggcctcgccatgaggctcttcctgtcgctcccggtcctggtggtggttctgtcgatcgtcttggaaggcccagccccagcccaggggaccccagacgtctccagtgccttggataagctgaaggagtttggaaacacactggaggacaaggctcgggaactcatcagccgcatcaaacagagtgaactttctgccaagatgcgggagtggttttcagagacatttcagaaagtgaaggagaaactcaagattgactcatgaggacctgaagggtgacatcccaggaggggcctctgaaatttcccacaccccagcgcctgtgctgaggactccctccatgtggccccaggtgccaccaataaaaatcctacagaaaaaaaaaaaaaaaaaaaaaaaaaaaatttttgggcgccttgcggccccttggaagaagagtcttttgatagaaccctttgtcgtttgtggggcgcgggggggccccatgtagtggtatatgtggaacacgtgtggtcccacaagcagcgtgtgtttgcccagagagggagaacaccccgcggggcaatgacacaaaagcgtcgcgtgtgtggatgttcccttccccacacatttataaatagagggcccgcgcggggggcacaacgccggagaggctgttttgtggaaaaattaaatcccgagaagtgggggatttccgagcggggagcctcataagggggcgactcttttcaaccacgaggggacggtctcacgagcgagaagctcaatattgaaattacca

SEQ ID NO: 6895 - DNA, 4687 bp, Homo sapiens
agcgggggggccgtggctgggaccggcctggccgagcgcgccggcgccgcggccgcagacaaagggcggctcgcgcccgggccgccacgctctcgggctctgcctcgggaaggagacttggtctgaaagatgccacattcctgcagcctctcttggtgcagtggaatacagtcttgggcgaggtggcgtggatgagctggtgaaagaggatgctgcccacatccaaaggctccagaggatcctggcctggcagctgagctcccctgcatttggaacctcaggcgtaacttggtgtagagctcatgaaaggtgcttgtgtttctccagcttttttcaccagtgcttaccagactggctcaggttttggaatctaaggtgagctggtagaaacaggagaggtagaaagaagcccctggatgcctccagaattcattgatgggatccctgcatactgcttggaacacagaaagaggctgtgacacagctgagctttggagcatcttaaggagctcagctcagtaaacaaactcttgcatttcagccagaaagagcctcttgtaacaagtattcaaaggggagagtttctgcatcttttactttgcagtccactatggtagaaaacttgacattccatagataatgatactgggttttctttccaagatccgacgtttaaaagaaatatgagccattctaagctttaagaagggttcaggaaacacaggaattagtagacagcgctcccaatgcaggttaagacgacagcctgcgcccccaactagcacagctcagcgagcatgaccatatgccattctcgtctccagagagctggtggcagtgacctcactaggagaaaacacatccctcagccgtgggacttgacagaatgaggtgcgcgagggaggccgctagccgagacttggcctttcctgactgcccctgtgttacctgggcagctccagatcactgagcccacaatggctgagaagggtgactgcatcgccagtgtctatgggtatgacctcggtgggcgctttgttgacttccaacccctgggcttcggtgtcaatggtttggtgctgtcggccgtggacagccgggcctgccggaaggtcgctgtgaagaagattgccctgagcgatgcccgcagcatgaagcacgcgctccgagagatcaagatcattcggcgcctggaccacgacaacatcgtcaaagtgtacgaggtgctcggtcccaagggcactgacctgcagggtgagctgttcaagttcagcgtggcgtacatcgtccaggagtacatggagaccgacctggcacgcctgctggagcagggcacgctggcagaagagcatgccaagctgttcatgtaccagctgctccgcgggctcaagtacatccactccgccaacgtgctgcacagggacctgaagcccgccaacatcttcatcagcacagaggacctcgtgctcaagattggggatttcgggttggcaaggatcgttgatcagcattactcccacaagggttatctgtcagaagggttggtaacaaagtggtaccgttccccacgactgctcctttcccccaataactacaccaaagccatcgacatgtgggccgccggctgcatcctggctgagatgcttacggggagaatgctctttgctggggcccatgagctggagcagatgcaactcatcctggagaccatccctgtaatccgggaggaagacaaggacgagctgctcagggtgatgccttcctttgtcagcagcacctgggaggtgaagaggcctctgcgcaagctgctccctgaagtgaacagtgaagccatcgactttctggagaagatcctgacctttaaccccatggatcgcctaacagctgagatggggctgcaacacccctacatgagcccatactcgtgccctgaggacgagcccacctcacaacaccccttccgcattgaggatgagatcgacgacatcgtgctgatggccgctaaccagagccagctgtccaactgggacacgtgcagttccaggtaccctgtgagcctgtcgtcggacctggagtggcggcctgaccggtgccaggacgccagcgaggtacagcgcgacccgcgcgggttcggcgcactggctgaggacgtgcaggtggacccgcgcaaggactcgcacagcagctccgagcgcttcctagagcagtcgcactcgtccatggagcgcgccttcgaggccgactacgggcgctcctgcgactacaaggtggggtcgccgtcctacctggacaagctgctgtggcgcgacaacaagccgcaccactactcggagcccaagctcatcctggacctgtcgcactggaagcaggcggccggcgcgccccccacggccacggggctggcggacacgggggcgcgcgaggacgagccggccagcctcttcctggagatcgcgcagtgggtcaagagcacgcagggcgcccagagcacgccagcccgcccgccgacgaccccgagcgccgcttgtctgcctcgccccccgccgcccggccccggtggacggcggcgccagcccccagttcgacctggacgtgttcatctcccgcgccctgaagctctgcaccaagcccgaggacctgccggacaataaactgggcgacctcaatggtgcgtgcatccccgagcaccctggcgacctcgtgcagaccgaggccttctccaaagaaaggtggtgagggcggaggggccgctccaggccccacagagcaggagacccccagagaaagccggggctggcaggaggcggccgcctccgccctctctgctgccttggggttggcagaacacgtgaaggatccgaggagcgagaggaatgtccatttcttaaactgccttaataactagcctttaacctgtgggagcgggtttgaactggaccctggcttaggggtgactcatttctacgaaagggagaccacatgtgtgcacagggaagaacgctttagacacgagtctgcggccactggtgcagatcggagaatctgcagaggtagctcgaaaccatctgcccaactagcctcaactgacagctgaggaaagcaattagccagagaggcagagacactcgcttaagatcacaggcttagtgtgaggacgagcttgaaatcccagtctcctggcccccaggcagggtctgtcaccatagaatgtcttcctctactggggtcgttctggctttttgttagaaacttggtctgagatgttcttcccctgtccattaccattcgatgttcttttgttcagagcaatgtttcttgtattctgaaactggaaactgaaccagtttgcctttctcctagtcaccaagcatactttcctggctccccaagtacttaaatgttctcatctgtcgcacccctgtatttgcctcacccctgcatggtcggaaatcttcgtttcaggtcagaacagcctggggtctgtgggtaaaatcagcccttctcccaggcctgtgcacacaccccctcagcactccctatgcactttcctgacacgcaaagacacagccctctttccccactgggcgtcctaccccagtgaggttgaaggcaccaattccaagaatccctccaacctccctgccagcactcccccttcaccccacacccggcccccccaccctaaccacagcgcctctccagacctacctcggaccaaatgttctctacatgaactgctcatttggaggacagcagtgaggtcctgccatagagcaaatgtgttaggagagaaggtttcacatgggacccaacatccttcatcaatactttcctgagtttgatcatccatttagccttgacaaacagcagaccctacagagatgtgttggagagcacgtcgtgaccttgggggcaaggaatccagaaaggtaggaagatatgaaaagagaggtgtcaacagcaagggctcttaggggtcaggcaccagcatggagacctcatgacaaaggagggactcaaagcagcaatgcccctcatagtgtaggctaaggtgagtttggtgcatgcaaactgtgtgtcacccacagagcatggggtaatggtgtgtagacacaggcctctgcagaagcgtggggtggggacactgacagccctatctggtcccaggacattctaccatttctgccactggtgttcagctccttctcttcccccaacactcccaaagatacccacagaagtccagccagtttccaggtagagatccaccattggtcttgggctgcgttcaccctcacaccacacgccttaaatctaatcagcaaactataatttgtacgttgaaacctgcaacacattagaaacttatatttaaaaacagaattaatcacactgaccaacttttaaatggaaaatatgtaaataggaagtgtttgggttttgttttttctttaagaaaaagaaatgtacaccactcctcatgtgccattttgtcctcagagggcggctttacttttttggtaaaggaacaagctgctggccttgaccaggagttcatatataactgttattacagaggaattgttataactactaatgtttttaaaaaatttattaaacattattaaacttgatcaggtcaggccaaataaagttttattggaacacagaaaaaaaaaaaaaaaaa

SEQ ID NO: 6896 - DNA, 1306 bp, Homo sapiens
taatcttgaagaacggcacagtggtatgggccacaagcatactttatgtgtgtaacggactgaaagacaaatcaatcttggtgaaaggatttttcatctcttatttctatttgccagtgttagtcagtgttctgctggcttagattattacctttttctggttccttactgtgttttattctgatgggtcctagaaatccctctcctgaccacttgtcagaatcagaaagtgaggaagaagaaaatattagttacctaaatgagagttctggggaagagtgggattcctctgaagaagaggactctatggtgcccaacttatcgcctcttgagagtcttgcctggcaggttaagtgccttttaaaatattccacaacttggaaacctttaaatcctaattcctggttgtatcatgctaaactgttggatccaagcacaccagtccatatacttcgagagataggtctaagactctcccattgttcccattgtgtccccaaactggaaccaattcctgaatggccccctctggcctcttgtggagtcccaccttttcaaaagcctcttacaagtcccagccggctctctagagatcatgccactctaaatggagcactgcaatttgccaccaaacagctaagccgaacattgagtagagccactcccatacctgaatacctaaaacagatccctaattcatgtgtttctgggtgttgctgtggctggctgactaaaacagttaaggaaacaactcgtactgaacccatcaacactacttattcttacactgacttccaaaaggcagttaacaaactcctaactgcatcactgtaaagatctaccatttgctctgatatctctgatgttgctaattgagaaagtggtacaaagttagtcattacacagcccactaatgccttctcagtcaaactctcttatgccctggcaagccaatgaggataccctttgacaaaccctgtggataaaatgataatatcaaggtcaggcatggtggctcacacctgtaatcccagcactttgggaggctgaggcgggtggatctgctgaagtcagaagtttgagaccagccttgccaacacagtgaaaccctgtctctactaaaaataaaaaaattagccgggcgcagcagtgcacgcctgtaatccctgctactcgggaggctgaaacaggagaatcacttgaacccaggagacggaggttgcggtgagttgagattatgccactgtactccagcctgggtgacagagcgagactcagtctcaaaaaaaaaaaaaaaaaaaaaaaa

SEQ ID NO: 6897 - DNA, 2398 bp, Homo sapiens
gcaccggcaggtagggcggctccagcgcgcgcggcggcccgtacgcctcgggcggcgggttggcgtagggcgggtaccagcccaggcgtgggtctccgccatgggcctgcgccgcctcgggaccggggtcagggtgccacagcttaccaatggaagattaggccagatggctcctgagagtgctttgggagattctctgttccttctgggaatggcagggataggagggggtcccagaagtttgaacgctttggcatccaagaaatcacactccaaatactgctcttctggcctcccctgggctgccttctccaaccgtgttcctgggaaccgaagggcagaaattgccctcttgggcttataaacaaggagctcctgcctgcctggatgaagaggaggtcaagactttgtcccccactccgcaagataccctctctgttccggagcggtgggtccctcccctgttaggaccttgtctccctcaggactggacctggatcctgggcctgcagtcagattgccagtttcacttagaggtggaaatgtcaacccactggttggaatgggaaggtgagacaggatttcaccatgttagccaggatggtcttgatctcctgacctcatgatctgcccacctcggcctcccaaagtgctgggcttacaggcgtgagccaccgtgcccggccaaaaataacttttaaaaacatgagtatagcatacacacacacaaaagtccacaaatcctaggtgtaccacttgatgaatgatcccaacgtgagcacacctctggattaccacctggatcaagaaataggacatcacagcagctggcagcttccaaggagaagctctggaaagttctgcctgtctcagcacctggctggatcggaaacgagttttctttaaccagatttttaatgactgacttatgtggacaaatcataactgaatgaatcacctcctttgttgatttttttgggtactttatttgctattataaatgatgctgtaataagcacccttgaagaaatcttcatatctgcctctcctgtgtagcaggtcacagtgcctgggtttggttctagccctcatttgtgaactgtgtgactcaccatgccttttttctttctgtaagacaggaataatggtaagaatttaaatgggggtaatatggagcgcgtttagttcagagcctggtgcatacaagcactcaataagtactggcgattattagacctttagattaatttattagaagttggatttctggtgaaagggtttgagtgtttttgaggctttggcacagaatacccagctggtcccagaaaggtggttcccatttacctgcccgaaggtaattcacccttactgatactgagtactgttttctaaaagaacattaaaaattggataggttaaaaacaggtgaatacatttttttagttgcatttttttggttacccgtgagagtgaacatgttgccatgtgtttgctgacctcctaaatggtctatttgctcctacctttgtaccccaaaagtctgctctcaagatggtagccagaatgatcctttttgagacataagtcaaaatttcactcttctccttaaagctctgcaatggttctcaggttaaaagccaaagtcctgttcaaggcctccagggtcctcaccacttggtcccttgctctttctgttctagccaacttggccttctcctgcccctccgccgcaccatggcaatttcccctgctctgtgtggtcaactacctgaatctgttcaaagctttgctcaaatgtctccttcctgatgagacctccccagcccctgagctccccatgcctcactcctgatcgccttacttaacccttctttttcttttttgccagtagtacttatcaccgtctaaaatacttcataatttacttgtttattgtttgcccctctccaatagaatgtaagctccttggggcagggacctttgtcctttgtcttgttcactgctgtgtcccatgtgtaaacttgtctggcacagaagaggtgctcgataaatatttgttgagtgaatgaatggtaaattttctgttcatattctttgactattttctattgtaatgttcatctttttagtattggtttataagatgtatatttagcaccttttcatatatcactctttgtcacatattatgcaactaatttgtcatttccatcaatttttaaaatactttcttgatgcttcatttttaagctgtcagattattaatcttttctttatggtcttggactttattgttgcataaccgctgccttcaccaggaacatataaattttcaattaaatgttcttctgagattttatgatttcactttttatattaaactcttcattttgtcttc

SEQ ID NO: 6898 - DNA, 1324 bp, Homo sapiens
gaaattcttacaaaaactgaaagtgaaatgaggaagacagattgagcaatccaatcggagggtaaatgccagcaaacctactgtacagtaggggtagagatgcagaaaggcagaaaggagaaaattcaggataactctcctgaggggtgagccaagccctgccatgtagtgcacgcaggacatcaacaaacacagataacaggaaatgatccattccctgtggtcacttattctaaaggccccaaccttcaaagttcaagtagtgatatggatgactccacagaaagggagcagtcacgccttacttcttgccttaagaaaagagaagaaatgaaactgaaggagtgtgtttccatcctcccacggaaggaaagcccctctgtccgatcctccaaagacggaaagctgctggctgcaaccttgctgctggcactgctgtcttgctgcctcacggtggtgtctttctaccaggtggccgccctgcaaggggacctggccagcctccgggcagagctgcagggccaccacgcggagaagctgccagcaggagcaggagcccccaaggccggcctggaggaagctccagctgtcaccgcgggactgaaaatctttgaaccaccagctccaggagaaggcaactccagtcagaacagcagaaataagcgtgccgttcagggtccagaagaaacagtcactcaagactgcttgcaactgattgcagacagtgaaacaccaactatacaaaaaggatcttacacatttgttccatggcttctcagctttaaaaggggaagtgccctagaagaaaaagagaataaaatattggtcaaagaaactggttacttttttatatatggtcaggttttatatactgataagacctacgccatgggacatctaattcagaggaagaaggtccatgtctttggggatgaattgagtctggtgactttgtttcgatgtattcaaaatatgcctgaaacactacccaataattcctgctattcagctggcattgcaaaactggaagaaggagatgaactccaacttgcaataccaagagaaaatgcacaaatatcactggatggagatgtcacattttttggtgcattgaaactgctgtgacctacttacaccatgtctgtagctattttcctccctttctctgtacctctaagaagaaagaatctaactgaaaataccaaaaaaaaaaaaaaaaaaaaagtttccaatggcctttgtggggagctatgtggttgggtggggaaattgattcaaaacggggaattatgagagcacggcaagggtggtgggtgtcggaatg

SEQ ID NO: 6899 - DNA, 662 bp, Homo sapiens
  misc_feature (329)..(348): n is a, c, g, or t
cgactactattaaattcgcggccgcgtcaacggtcacgttgcacagttttattttaaaaccataattgtgtatttaatacactgtttttctttaaatttggctttgggcctcatttccaggtgttctcccgcagaaaacatgatgtgtgtagtttttatatgcaaacgagttaaagaagagtgatctagagccaggctggtcaagacaagaattggctggaataggctgctcttcccccattccatcatgtgctgtccccacccctttggccacctgggctgactgtgtcttaatacctcaagtgcaagtatataggagtaagaaatgnnnnnnnnnnnnnnnnnnnnactcatgcctacattgtatgacatctagtatgaaagggaaacattaaaggaaaacccttgttttgctctaaaacctgaggacggtaaacactgagagtaacctggtgcttggtttgaagtaaaacacaaatacttcccttttataatggtgatggttgtgtttgcttattagcctttttgctggttaattcttgatactgactagaaatgtgtatattgcttcttgaaatgatttaatgacttctatattggtgaacatggacgttctctaagtataatccacttatattatatttacaaatcagtaaaattga

SEQ ID NO: 6900 - DNA, 1365 bp, Homo sapiens
  misc_feature (509)..(525): n is a, c, g, or t
atccattgtgctctaaagtgatggagagcaccagcaaagccttagggcccatccctggcctcctgttacccacagaggggtaggcccttggctctcttccactatgacgtcagcttccattcttcctttcttatagacaattttccatttcaaggaaatcagagcccttaatagttcagtgaggtcactttgctgagcacaatcccatacccttcagcctctgctccacagagcctaagcaaaagatagaaactcacaacttccttgttttgttatctggaaattatcccaggatctggtgcttactcagcatattcaaggaaggtcttacttcattcttccttgattgtgaccatgcccaggctctctgctccctataaaaggcaggcagagccaccgaggagcagagaggttgagaacaacccagaaaccttcacctctcatgctgaagctcacacccttgccctccaagatgaaggtttctgcagcgcttctgtgcctgctgctcnnnnnnnnnnnnnnnnnccctcagggacttgctcagccagattcagtttccattccaatcacctgctgctttaacgtgatcaataggaaaattcctatccagaggctggagagctacacaagaatcaccaacatccaatgtcccaaggaagctgtgatcttcaagaccaaacggggcaaggaggtctgtgctgaccccaaggagagatgggtcagggattccatgaagcatctggacctatttcaaaatctgaagccatgagccttcatacatggactgagagtcagagcttgaagaaaagcttatttattttccccaacctcccccaggtgcagtgtgacattattttattataacatccacaaagagattatttttaaataatttaaagcataatatttcttaaaaagtatttaattatatttaagttgttgatgttttaactctatctgtcatacatcctagtgaatgtaaaatgcaaaatcctggtgatgtgttttttgtttttgttttcctgtgagctcaactaagttcacggcaaaatgtcattgttctccctcctacctgtctgtagtgttgtggggtcctcccatggatcatcaaggtgaaacactttggtattctttggcaatcagtgctcctgtaagtcaaatgtgtgctttgtactgctgttgttgaaattgatgttactgtatataactatggaattttgaaaaaaaatttcaaaaagaaaaaaatatatataatttaaaactaaaaaaaaaaaaaaaaaaaaaaaaaaaaaaaaaaaaaaaaaaaaaaaaaaaaaaaaaaaaaaaaaaaaaaaaaaaaaaaaaaaaaaaaaaaaaaaaaaaaaa

SEQ ID NO: 6901 - DNA, 6619 bp, Homo sapiens
  misc_feature (319)..(335): n is a, c, g, or t
  misc_feature (882)..(900): n is a, c, g, or t
agagcgggggcggggaggcgccgtctggctcaggctggggccggcgggagcgcgaacgagcgacggcggtacccgtgggcctgtggactgcagcctcggcggtcagcagcaatgaggtcttactgtgtagcccaggctgctctggaactcctggactcaagtgatcttcctaccttggtcttccaaagtgttgggattacagatggagtttcgctcttgttgcccaggctggagtgtagtagcatgatctcggctcactgcaacctccgcctcctgagttcaagtgattctcctgcctcagcctcccgggtatctgggnnnnnnnnnnnnnnnnntcgacaatgctagttgcagtctgtgtgaccctgaccaagttattttaatgtctgtgctgcagtttttcagtttccaagatggaatagttatagtgcatatcttcctcatggttgtgaggagtgcatgacccgtgggcctgtggactgcagcctcggcgatcagagagtgcttgtgatttcacgtatttttgctgaactcgtaaaagagacacttggatggtggattaaccagaacactaacattctgtgaaaagtttcaaattggagaatattgaattttcaccctagtccagcagctccgctgtcacttaaatacagatgaatgaagaccccattcggaaagacacctggccagcggtccagagctgatgcaggccatgctggaagtatctgccaacatgatgaagaagaggacatcccacaaaaaacatcggagcagtgtgggtccgagcaaacctgtttcccagccccggcggaacatcgtaggctgcaggattcagcatgggtggaaagaggggaatggccctgttacccagtggaaagggannnnnnnnnnnnnnnnnnnctgtaaatccttctttgtatcttataaaatacgatggatttgactgtgtttatggactagaacttaataaagatgaaagagtttctgcgcttgaagtcctccctgatagagttgcgacatctcgaatcagcgatgcacacttggcagacacaatgattggcaaagcagtggaacatatgtttgagacagaggatggttctaaagatgagtggaggggaatggtcttagcacgtgcacctgtcatgaacacatggttttacattacctatgagaaagaccctgtcttgtacatgtaccaactcttagatgattacaaagaaggcgaccttcgcattatgcctgattccaatgattcacctccagcagaaagggaaccaggagaagttgtggacagcctggtaggcaaacaagtggaatatgccaaagaagatggctcgaaaaggactggcatggtcattcatcaagtagaagccaagccctccgtctatttcatcaagtttgatgatgatttccatatttatgtctacgatttggtgaaaacatcctagatgtcatcacaaactctgccaaatttgtggaactatgaaatgtattatttgtagacataaagacttgattgctttccagtttaatgaaagcttaaatgtccctgcgaacccacaatctctgccagcagaactggttttgttctgaatagtacagattgatgtgaacacaaagcattttgtgtaaggagaacccctttcttttaaaagaagtctgtctatttcgaggggagttacaggcaagtttggtaaaagttaagctagtatcatagtcatttaaaattgtaatagatcttaaccattttccccctcaccctaactctcttattctgccgccacaatgcaagcatagtttgatgttttcgttattgccttttttgagatgtatgtatctgtatctacctatatctatatgtgtgtatacatatataatatatacacacagatacaagtgtacacacacacaccacacaccacacacaccccactggcagtctttgtggattaggatgggggtgacataattttcttgagtttaacaggagtgctttacccaagtcagtcatggatatgatatcactgctctttatttaaaagtaaactttgggcacaggaaccatatgggaacattcagcttgtttaaaaaaaaaaaaatcagaagttcagagcaccttttcaatctggagcccttaaaccataagtccaaatatgaattatttgtgaacagttaatgacccatattagaattttacaatctggtgaacaatctgggtaaaaggctacctttaattctaagcttcatttttttttgggggggggttacattttaatcataaattcttttttgcaaagcccaggttcttgttccacacagtgtaatgtaggtgtattttggacagcacatatggtccattgtgtacaagtcagtaatctggatttcagtacatggatttaaaaggcaacaatccatcactggttatgtgtgtttttggttaagtttctggaagaatacaatgcttttatattggaagtataagttttgagtggcattgttgccttctaacaagctctctgggacttttaaagttttattactattattgctaatgtatgattatggtcagagactttcaacccaccccttcctgcctacccctggcttttcctcacaaagaatgtctagacaaacagcagcttagtctcctgacacctcttgtggggtgcatgttcctgctccaggtatgctgttcatgtggattcattccattcagtggccccttggggtttgcatgccagtgaagcgttaccatagaagagccagccgtttgtgttcgcttggtaggtgtaagtaatagcagcccttagccacggagtcctttatgtggttatattcctgcaaggttagttttaaactgaaatagaactgctagatgtgataggtcgatcagcaacaacagctgctctcattttgttttggaggaaccctggtggtttgacagccaggagaaaggccatatgtgaaaccagtatcttgtcggagattggacaatccatcccctgactattatggggcagacgccataaacgttggcattgctatgtcaatccaaacaccagacagttctgaatacagaggctactggagtgacctcttttgtggaatgttcttgatggtttccaggcctcgttatgcatggtttgcttgatgcccattttttgtgccttgtgctgttggatggtaacgaccactcaccatgtaaacacagtacctcagttttctgtccacagctgcagtcgctctgtccctcgtgcttcactgtgggcagccaggggacaagcttctgaaagcactgttggcctactggcataggtgcttctcgtatgtgaacaggtgtcattctacagatctgttatgtgttttcctgttgactcttaagagtccctgcatgtaaatctcaaagctgagcctggctcccagagtccaggctgacattacagcgcaagagtttgcaagtgtgtccagcatgcaccaactgtgcagaacttggctcggtaactttgcgtggaaaaataaagtacattttgaagtatcttgagggttgggtcaattgagacatttctagcattacttaatgacttgcattgtggtttttctgcaagcaactttaatgactttttttataccacatggtctcccagtttctagatgaatgcaacatgatgatggtgatgatgacgatgagtttaatcattgttcatttattgcctttagggctgagggaaagggaaggtttgtttttttttctccccattttcccccattctgtctttcttttggtgacttacaccacatgtaatgacgctatgactaattctgctcccaagcccttgtatcttgggcttcattttaggctcatgtgtcagatctgcatgcattgcttgcatttttctggtatctgaatgttggttccttgtccaggaattcaacattaattccaaaagtatcatgggacttgtgacaatacaagacatgaatctatgtataaaatttatcggcctttctcatttacctgctctagtattattgtattgtgtgtgcgtgcgtgtgtgatgtcaggctgccacgtaaaacttcagagaaaaatcttaaaagcagaccatccttttttgcatgctctattctaagtagaatgttcaatgtaactgactaaaattgcatgttaaagatatttaggtttttttgttttctttatttttatttgttttcagtttcctgtatatttgcttactgtgccgttttagtggttttaggataaaaatgcactggtgaagcaaatgtagtgccaacagaaggtgattttccagttgtaaatgtcatgcagcatttgaagggactgtgttttctaaaaaaaaaatcacagttacttctaaaccagatttcatttcttttattgttttatgtgccaaaccacgaagtgcattgggcttcaatctctgaacactgtagacccattagaagactgttccgattgttacaaattgtagtgcctgaaaacactcttaagctgattgtcttaacaaaatgaaagttctccaaagacaaaacagaacaattattataacaaaataattatggttgaaatgtctgtggttccttggaaatgctgcgctctttgtgttttccagatattaatatttccagcaactgggaggttttccttgaagttcttgatggggtagagaagatgaagtccatgtcacagcttgcagttttgtcaagacggtggaagccttcagagatgaagttggatcccttccaggaggttgtattggaaagcagtagtgtggacgaattgcgagagaagcttagtgaaatcagtgggattcctttggatgatattgaatttgctaagggtagaggaacatttccctgtgatatttctgtccctgatattcatcaagatttagactggaatcctaaagtttctaccctgaatgtctggcctctttatatctgtgatgatggtgcggtcatattttatagggataaaacagaagaattaatggaattgacagatgagcaaagaaatgaactgatgaaaaaagaaagcagtcgactccagaagactggacatcgtgtaacatactcacctcgtaaagagaaagcactaaaaatatatctggatggagcaccaaataaagatctgactcaagactgactctgatagtgtagcattttccctgggggagttttggttttaattagatggttcactaccactgggtagtgccattttggccggacatggttggggtaacccagtgacaccagcactgattggactgccctacaccaatcagaagctcagtgcccaatgggccactgttttgactcggaatcatgttgtgcactatagtcaaatgtactgtaaagtgaaaagggatgtgcaaaaaaataaaaaaaaacaacaaaaaaagctaaccttctattagaaaaggggacaggggatgagtaaacttcttttattgcggacaaatgtgcacatagccgctagtaaaactagcctcaaacaggatgctcatagcttaataataaaagctgtgcaaaggcaaaaaaaaaaaaaaaaaaaaaaaaaaatcactgatgcacacattacctcattgacaattcagaagtaaatccaacgtgtgttgactctgtggaaagcagcaaaaacaggagctgaagaaacagaaattctgtggaaccagccgtaacccagtaaggaattgtgaagttgtgtttttattttgtttcattttttgcagagtattaagaacattattctggaacatcagaacgtttcccttagaccgatcccagcaggtggcagctcagattgctgcagtgttgtaattataactgattgtacttaagttatggatgtagagaatatgtttcattcatttattcagcatgtaaataaaattgatcctgttgagttatcataattgcagttcaactatctgcatgattattcttttcacgtatcattcattctgtacattgtgtacattgagaagtatagcaatctatgtaaattgtaatcctcagctgaggttcctcagtgctaggtcccataggatggtcgttgcccttgttactgaggtttctctgttcagcggcttcaattttgcttctcttgtaacatctagtttgaagatttacttcaagttggaatcttctagaatgcttgtacgtcagttcttaatttagagtcaaattggaagtacatgtaggtaccttggggcacacgcctaaccctcggccggaatcacctggccaaggaggccgcgctcatggaccagacctggcggcaggccaaccgtggtccaggcgaggttattagcaatacagcacgttgcgggggaaaacacggctccaagtgacgcaccgctcataacttgagaccgaccatatattaaaggacgtaacaaggcgtgaacactccaccggacctcgtgtcacaccgtcactgctagcaccactctcagctgggtgactacgcacacaacgataagaggcgacacacgcacaactccctgaatgctcagttacgcgacgcactcacgccgcatgacggctagtcgtatcccacccgtcacccctctcgaccacaaccaccaagctgtcg

SEQ ID NO: 6902 - DNA, 2272 bp, Homo sapiens
  misc_feature (2270)..(2270): n is a, c, g, or t
agaagcggcagatcgagacgctgcagcagctggtggaggtggacggcggcattgtgagcgaggtgaagctgctgcgcaaggagagccgcaacatgaactcgcgggtcacgcagctctacatgcagctcctgcacgagatcatccgcaagcgggacaacgcgttggagctctcccagctggagaacaggatcctgaaccagacagccgacatgctgcagctggccagcaagtacaaggacctggagcacaagtaccagcacctggccacactggcccacaaccaatcagagatcatcgcgcagcttgaggagcactgccagagggtgccctcggccaggcccgtcccccagccaccccccgctgccccgccccgggtctaccaaccacccacctacaaccgcatcatcaaccagatctctaccaacgagatccagagtgaccagaacctgaaggtgctgccaccccctctgcccactatgcccactctcaccagcctcccatcttccaccgacaagccgtcgggcccatggagagactgcctgcaggccctggaggatggccacgacaccagctccatctacctggtgaagccggagaacaccaaccgcctcatgcaggtgtggtgcgaccagagacacgaccccgggggctggaccgtcatccagagacgcctggatggctctgttaacttcttcaggaactgggagacgtacaagcaagggtttgggaacattgacggcgaatactggctgggcctggagaacatttactggctgacgaaccaaggcaactacaaactcctggtgaccatggaggactggtccggccgcaaagtctttgcagaatacgccagtttccgcctggaacctgagagcgagtattataagctgcggctggggcgctaccatggcaatgcgggtgactcctttacatggcacaacggcaagcagttcaccaccctggacagagatcatgatgtctacacaggaaactgtgcccactaccagaagggaggctggtggtataacgcctgtgcccactccaacctcaacggggtctggtaccgcgggggccattaccggagccgctaccaggacggagtctactgggctgagttccgaggaggctcttactcactcaagaaagtggtgatgatgatccgaccgaaccccaacaccttccactaagccagctccccctcctgacctctcgtggccattgccaggagcccaccctggtcacgctggccacagcacaaagaacaactcctcaccagttcatcctgaggctgggaggaccgggatgctggattctgttttccgaagtcactgcagcggatgatggaactgaatcgatacggtgttttctgtccctcctactttccttcacaccagacagcccctcatgtctccaggacaggacaggactacagacaactctttctttaaataaattaagtctctacaataaaaacacaactgcaaagtaccttcataatatacatgtgtatgagcctcccttgtgcacgtatgtgtataccacatatatatgcatttagatatacatcacatgtgatatatctagatccatatataggtttgccttagatacctaaatacacatatattcagttctcagatgttgaagctgtcaccagcagctttgctcttaggagaaaagcatttcattagtgttgtattacttgagtctaagggtagatcacagactgtgtggtctcaactgaaaggatcaccttggcatctgtgtgcctggattcttccagaatgtctacaatgctaatctctcacatagaggttcccagcttcctaagaaccccttttggcacctaatcaaatttcaaaatccctccccccacattttcatacttttccccattctcaggacttttcaccatccatcacccacttatcccttcatttggcaccattcactaagggcctcctgggggcaggcccggtgccagtcactggagtcaagggccctttcggctggggacccctcgcgaataactggcatttgggtggaggcctctttcaaggcagaatcccacttgggagtaaaaacaccgggccacggttggtggggcagagagcgccgacaaccacggcgaaaaaatacacgagagtgctcacagaatcacacgaaggtgccacaaccatgcggagacgatgaccgaaacacaccgagcaacaccactagagactgatccagacaacacaactatcgtgatctcgtacatgcgatcagtngc

SEQ ID NO: 6903 - DNA, 2980 bp, Homo sapiens
gagctcacagacccataatcctgcatttctctaacaagttgtttatggagttgcttctccatttgcctacatcccaaaattcacccctcccggtttcttctgccccctcctgagtcccggcctgaaggagggggagggacgcgggtgcggcgcgggtgggggagggcggacccgacgcacagggccagcgccgaggcgccccctctccgccagcggttgacgcccccggattatttatccgcaaagtcccgcgcgcgcccattgggccgaggcccgagtgtcagcgcgagtcccggctcgccattggctccgcacacgtgcggccctgactcacgtgcttccggtttgaaggcaaaaagtgtgcctgggtgattttttttttaagcgagagagtttgtgcaaagatccgagctgtcagagatttgaaaaaaaaaaaaaaaacaaaaaaaaaaaaaccagcccggcgctggcggagacgcgctctccctgcaaaaaaagcaaaggcgattaaaggcgctgccagcctcacgctctgggcacagctgagcgtgacactcggggaagtcaaacccctcactactgcctaggaagatggctagactttaaatactatttttttccctttaagaaaaaaattattggagctttttttcttgctttctttttccttttctttttctttttttccttcatttttttggccgtggcttactccccatttaaatcaaatcattgaatctggttgcagaaagaaaaaagaaatagccaagtgtctccatatctggatgtctacaaattagagagggagagacagcgagatctatctgctagataagaacgagcgatccaggccagacgcctgagcttttttcctgcacccgccccgtgccttcgctgaggcttcgcctgcctccttcctccgcgcacccccacgggccgctggcaaagtggggtggggagcgaggcggtgggggcgggggccggcgcggcggccggggcggcggggcggccgagcatggaagaacagcagccggaacctaaaagtcagcgcgactcggccctcggcggcgcggcggcggcgactccgggcggcctcagcctgagcctcagtccgggcgccagcggcagcagcggcagcggcagcgatggagacagcgtgccggtgtccccgcagcctgcgcccccctcgccgcccgcggcgccttgcctgccgcccctggcccaccacccgcacctccccccacaccccccgcccccgccgcctcagcatctcgcggcgcctgctcaccagccgcagccagcggcccagctgcaccgcaccaccaactttttcatcgacaacatcctgaggccggacttcggctgcaaaaaggagcagccgccaccgcagcttctggtggctgcggcggccagaggaggcgcaggaggaggaggccgggtcgagcgtgacagaggccagactgccgcaggtagagaccctgtccacccgttgggcacccgggcgccaggcgctgcctcgctcctgtgcgccccggacgcgaactgtggcccacccgacggctcccagccagccgccgccggcgcgggcgcgtctaaagctgggaacccggctgcggcggcggcggcggccgcggcggcagtggcggcggcggcggcggccgcagcagccaagccctcggacaccggtggcggcggcagtggaggcggcgcggggagccccggagcgcagggcaccaaatacccggagcacggcaacccggctatcctacttatgggctcagccaacggcgggcccgtggtcaaaactgactcgcagcagcctctcgtatggcccgcctgggtgtactgcacacgttattcggatcgtccatcctccggtccgcgcaccaggaagctgaagaagaagaagaacgagaaggaggacaagcggccgcggaccgcgttcacggccgagcagctgcagagactcaaggcggagttccaggcaaaccgctacatcacggagcagcggcggcagaccctggcccaggaactcagcctcaacgagtcccagatcaagatctggttccagaacaagcgcgccaagatcaagaaagccacaggcatcaagaacggcctggcgctgcacctcatggcccagggactgtacaaccactccaccaccacggtccaggacaaagacgagagcgagtagccgccacaggccggggccgcgcccgcgccccctcccggcaccgccgccgtcgtctcccggcccctcgctgggggagaaagcatctgctccaaggagggagggagcgcagggaaaagagcgagagagacagaaagagagcctcagaatggacaatgacgttgaaacgcagcatttttgaaaagggagaaagactcggacaggtgctatcgaaaaataagatccattctctattcccagtataagggacgaaactgcgaactccttaaagctctatctagccaaaccgcttacgaccttgtatatatttaatttcaggtaaggaaaacacatacgtgtagcgatctctatttgctggacatttttattaatctcctttattattattgttataattattataattattataattattttatggccctcccccaccgcctcgctgcccccgcccagtttcgttttcgttgcctttttcatttgaatgtcattgcttctccggtgcctcccgacccgcatcgccggccctggtttctctgggacttttctttgtgtgcgagagtgtgtttcctttcgtgtctgcccacctcttctcccccacctcccgggtcccttctgtcggtctgtctgttctgcccccctttcgttttccggagacttgttgagaaatacgaccccacagactgcgagactgaaccgccgctacaagccaaagattttattatgttcagaaacctgtagtctgaaataaagtgtacactgtgaaaaagaaaaaaaaaaaaaaaaaaa

SEQ ID NO: 6904 - DNA, 3266 bp, Homo sapiens
ctcctcccgctggctcccgggggctgcggtgctaaaaggggcaagagctgagcggaacaccggcccgccgtcgcggcagctgcttcacccctctctctgcagccatggggctccctcgtggacctctcgcgtctctcctccttctccaggtttgctggctgcagtgcgcggcctccgagccgtgccgggcggtcttcagggaggctgaagtgaccttggaggcgggaggcgcggagcaggagcccggccaggcgctggggaaagtattcatgggctgccctgggcaagagccagctctgtttagcactgataatgatgacttcactgtgcggaatggcgagacagtccaggaaagaaggtcactgaaggaaaggaatccattgaagatcttcccatccaaacgtatcttacgaagacacaagagagattgggtggttgctccaatatctgtccctgaaaatggcaagggtcccttcccccagagactgaatcagctcaagtctaataaagatagagacaccaagattttctacagcatcacggggccgggggcagacagcccccctgagggtgtcttcgctgtagagaaggagacaggctggttgttgttgaataagccactggaccgggaggagattgccaagtatgagctctttggccacgctgtgtcagagaatggtgcctcagtggaggaccccatgaacatctccatcatcgtgaccgaccagaatgaccacaagcccaagtttacccaggacaccttccgagggagtgtcttagagggagtcctaccaggtacttctgtgatgcaggtgacagccacggatgaggatgatgccatctacacctacaatggggtggttgcttactccatccatagccaagaaccaaaggacccacacgacctcatgttcacaattcaccggagcacaggcaccatcagcgtcatctccagtggcctggaccgggaaaaagtccctgagtacacactgaccatccaggccacagacatggatggggacggctccaccaccacggcagtggcagtagtggagatccttgatgccaatgacaatgctcccatgtttgacccccagaagtacgaggcccatgtgcctgagaatgcagtgggccatgaggtgcagaggctgacggtcactgatctggacgcccccaactcaccagcgtggcgtgccacctaccttatcatgggcggtgacgacggggaccattttaccatcaccacccaccctgagagcaaccagggcatcctgacaaccaggaagggtttggattttgaggccaaaaaccagcacaccctgtacgttgaagtgaccaacgaggccccttttgtgctgaagctcccaacctccacagccaccatagtggtccacgtggaggatgtgaatgaggcacctgtgtttgtcccaccctccaaagtcgttgaggtccaggagggcatccccactggggagcctgtgtgtgtctacactgcagaagaccctgacaaggagaatcaaaagatcagctaccgcatcctgagagacccagcagggtggctagccatggacccagacagtgggcaggtcacagctgtgggcaccctcgaccgtgaggatgagcagtttgtgaggaacaacatctatgaagtcatggtcttggccatggacaatggaagccctcccaccactggcacgggaacccttctgctaacactgattgatgtcaatgaccatggcccagtccctgagccccgtcagatcaccatctgcaaccaaagccctgtgcgccaggtgctgaacatcacggacaaggacctgtctccccacacctcccctttccaggcccagctcacagatgactcagacatctactggacggcagaggtcaacgaggaaggtgacacagtggtcttgtccctgaagaagttcctgaagcaggatacatatgacgtgcacctttctctgtctgaccatggcaacaaagagcagctgacggtgatcagggccactgtgtgcgactgccatggccatgtcgaaacctgccctggaccctggaagggaggtttcatcctccctgtgctgggggctgtcctggctctgctgttcctcctgctggtgctgcttttgttggtgagaaagaagcggaagatcaaggagcccctcctactcccagaagatgacacccgtgacaacgtcttctactatggcgaagaggggggtggcgaagaggaccaggactatgacatcacccagctccaccgaggtctggaggccaggccggaggtggttctccgcaatgacgtggcaccaaccatcatcccgacacccatgtaccgtcctcggccagccaacccagatgaaatcggcaactttataattgagaacctgaaggcggctaacacagaccccacagccccgccctacgacaccctcttggtgttcgactatgagggcagcggctccgacgccgcgtccctgagctccctcacctcctccgcctccgaccaagaccaagattacgattatctgaacgagtggggcagccgcttcaagaagctggcagacatgtacggtggcggggaggacgactaggcggcctgcctgcagggctggggaccaaacgtcaggccacagagcatctccaaggggtctcagttcccccttcagctgaggacttcggagcttgtcaggaagtggccgtagcaacttggcggagacaggctatgagtctgacgttagagtggttgcttccttagcctttcaggatggaggaatgtgggcagtttgacttcagcactgaaaacctctccacctgggccagggttgcctcagaggccaagtttccagaagcctcttacctgccgtaaaatgctcaaccctgtgtcctgggcctgggcctgctgtgactgacctacagtggactttctctctggaatggaaccttcttaggcctcctggtgcaacttaatttttttttttaatgctatcttcaaaacgttagagaaagttcttcaaaagtgcagcccagagctgctgggcccactggccgtcctgcatttctggtttccagaccccaatgcctcccattcggatggatctctgcgtttttatactgagtgtgcctaggttgccccttattttttattttccctgttgcgttgctatagatgaagggtgaggacaatcgtgtatatgtactagaacttttttattaaagaaacttttcccagaaaaaaaaaaaaaaaaaaatgttttctaaataaa

SEQ ID NO: 6905 - DNA, 1055 bp, Homo sapiens; identical to SEQ ID NO: 2836

SEQ ID NO: 6906 - DNA, 4129 bp, Homo sapiens
  misc_feature (1629)..(1629): n is a, c, g, or t
  misc_feature (3671)..(3747): n is a, c, g, or t
  misc_feature (3749)..(3759): n is a, c, g, or t
  misc_feature (3761)..(3764): n is a, c, g, or t
  misc_feature (3766)..(3783): n is a, c, g, or t
  misc_feature (3785)..(3788): n is a, c, g, or t
  misc_feature (3790)..(3791): n is a, c, g, or t
  misc_feature (3793)..(3795): n is a, c, g, or t
  misc_feature (3797)..(3798): n is a, c, g, or t
  misc_feature (3805)..(3805): n is a, c, g, or t
catacgcactgactttcccgggaagataaaaaccctggagaaacactaggccattgacaaatgatctgagacaactttagaaaacaatgtaggatgaatggaaagagaaagaaaggaaagaaagaagaaaaagaaagaaggaaagaaagaaagagaaaggaaggaaggaaagaaggaaggaaaagaaggaaggaaggaagcaatatagtgttataaatactgcactcaacattttccaaattcttgccattatttttcaaaagtttaatagtttgcagaaatagatactcaagccaaagtctgttttagagaaactttccatggaaagtcagaatttctaccacttccttttctatccacatttccagtgcagaagaaactgagaaacagagctttttgaagagaggacagggccatagcaacaaggaccttcttgggggattaatgggaggtcagtagaattaataaccctccttggatgagtgctactgttttcacatggcttcagatgctatcaacctcaaagaaatgatctcaacagagaagcttattctctcccaacttctacggtaaaatccaggagtattttctctggggatctgcccacaggacaaagtccataaaagcaagtcctgtctggaccatgtggttatctgaagcattagccatcaccagcacaacaaacggggcagggctttccaaggtggggctggtcagaagggaatctttgataagaggcccacaggcagggaaagcgaaatagggttgatgagaccaggggagacctaaaaaaaaggcagctttgtgtcttctagctccaaatatacctgccttttagctcacacactgtcctggagttctcagacctttaggggccctaacacagttcagttcatacaggggttcaaaagggacagtggcccatttgggagacctttaggatcaatgggaatcaattccattgttttgcctcagagtaaagtttctggctcggggacaattataagttgcaaaaaggatagaggcatatcccaagtcttccttcattccacaaataattacaaacaacctactgtgtgccaggcactattcttagcactggaaatacactagtgaagaagcagatgaggaccctgtttattgtttctctccaagaaattctccaagaatattgtttcttggagagaaataataaataaacaagacaatttctgaaagcaataagtgcaatcaagataattaaaggatgctaaagtgtgacttgtggggattgggagagagatgcacagacaatattaaagaggaggcattcgagctttgttgtgaacaccggaagtaacatgccgagcgcctgggggatggaaactcctatagcaccccacaggctaacagcaagtaggacaagacaaaaagggcaggtgggacatggtagagatggaccctacccaggaaacagctccatcagcatcttagcctgccccactctagccacacatacccacgtgtgctcctgagttcagtgtgcccacctcactcccacaccctcacatagactttggcaagagtaaggagggaactccatagagacattttacctatctcaggggagcagccacaaagaagcaagtnttgtaaaaggtcttttgcaaaggagagtgaacccagcaatgagagatccttaacagctagtgcccattagggggctaaacctaaagcctgggtggtgatggctcaaacgctaatgagtcagtgaatccttaccgaccccctggcctttataatctgaggcaactttggctgcagcccgggaatgtgcagggcactagggaatacaaggccttcttccctggttgtcttgtaataaaacagccatggggttgtccctccagtccgagagactgagatgagccctacatagcagcgatgtggtcaggtaaaaatcaggaacccactgaaatccttgggcaagccaccctgcctgcttgtgcctcggttctctcatatgtcatatataggaggtgaggactccagctccacctgccccaggtgggtgtggtgatgatgaggaaagacaagaggcttgcaaggaccctgaagaggtcggagcatcatacagattcctttattagcccacattctgatgttccctggtgagacttccccaagcaattgctagtaaatgggggttaatttcttctccacctccctactgaacaaaaaaagaaatgccagacttactaggagaatcgagttgctttgagtttcttttgttttgttttgttttgttttgttttaaggctccccttacacaccctcctttaagctttgggttttctctcttatagtttgttgactagatacatgctaaaaatgtctttggagagaacttctgcctgataaacacccaattctagactgtgggtggattttcgagctgacggtggtcaattcctttcattaagcagtgatctgatttctccacatggccattctgccttcttgggggcagagtagatgggcagcagttcaccttttcagagaaagaggtcttctagccacctgggctgctactgaatggttttctccaggacgctctacctaatgattatttctataacattaagcatggtaataagtagcttccaattcaattcatcctaaagccaaagaaaatacagcaccacacacacacacacacacacacacacacacacacacacacacacacacaccactttatggcaattcttaactgacattcaatgacttacttcttttcttagaaaatttccaccacatttctatccccaagccaacatacaatgtgaaatgaaagccagtgcgtggagtgcagctgctaaaaattttcagcacagggctctttctgactctgctcatgagatggtatcagccacccaatgactggcgtatcttggtcctgtgtctttcttcttatgctgtgttaatgtgtttactttccatttggcagagagacaagagagacacctccaacttcgacaaagagttcaccagacagcctgtggaactgacccccactgataaactcttcatcatgaacttggaccaaaatgaatttgctggcttctcttatactaacccagagtttgtcattaatgtgtaggtgaatgcaaactccatcgttgagcctggggtgtaagacttcaagccaagcgtatgtatcaattctagtcttccaggattcacggtgcacatgctggcattcaacatgtggaaagcttgtcttagagggcttttctttgtatgtgtagcttgctagtttgttttctacatttgaaaatgtttagtttagaataagcgcattatccaattatagaggtacaattttccaaacttccagaaactcatcaaatgaacagacaatgtcaaaactactgtgtctgataccaaaatgcttcagtatttgtaatttttcaagtcagaagctgatgttcctggtaaaagtttttacagttattctataatatcttctttgaatgctaagcatgagcgatatttttaaaaattgtgagtaagctttgcagttactgtgaactattgtctcttggaggaagttttttgtttaagaattgatatgattaaactgaattaatatatgcaaaaaaaaaaaaaaaaaagaaaaagtcgacgcnnnnnnnnnnnnnnnnnnnnnnnnnnnnnnnnnnnnnnnnnnnnnnnnnnnnnnnnnnnnnnnnnnnnnnnnnnnnncnnnnnnnnnnntnnnnannnnnnnnnnnnnnnnnngnnnngnncnnncnnttaaatnttccccccccggggcgccccttttatttcccccccccactttttttaaaaaagaaagccgcgcccattatttggggggagaaaatctaaaaaaatgggggggggggggcggtttttttttcaaaggcccccctgtaggagaaaaaagaggcttctcttgggtcttcctttaaaaacacttacacccccttttttggggggggagggaacatctgtcacaacacccctccccccatcaaaaaagacttgccctcccccgacggaaaaaaaatatttttataatagataaagaaagggggggaacaaaaggatgccctcattttgt

SEQ ID NO: 6907 - DNA, 2929 bp, Homo sapiens
  misc_feature (954)..(973): n is a, c, g, or t
  misc_feature (1099)..(1114): n is a, c, g, or t
aaaaacaccttttaaagcaggtgctggggacacttctcagggccaactgccgagaccacacaaccagccacccctctaggatcccagcccagctggtgctgggctcagaggagaaggccccgtgttgggagcaccctgcttgcctggagggacaagtttccgggagagatcaataaaggaaaggaaagagacaaggaagggagaggtcaggagagcgcttgattggaggagaagggccagagaatgtcgtcccagccagcagggaaccagacctcccccggggccacagaggactactcctatggcagctggtacatcgatgagccccaggggggcgaggagctccagccagagggggaagtgccctcctgccacaccagcataccacccggcctgtaccacgcctgcctggcctcgctgtcaatccttgtgctgctgctcctggccatgctggtgaggcgccgccagctctggcctgactgtgtgcgtggcaggcccggcctgcccagccctgtggatttcttggctggggacaggccccgggcagtgcctgctgctgttttcatggtcctcctgagctccctgtgtttgctgctccccgacgaggacgcattgcccttcctgactctcgcctcagcacccagccaagatgggaaaactgaggctccaagaggggcctggaagatactgggactgttctattatgctgccctctactaccctctggctgcctgtgccacggctggccacacagctgcacacctgctcggcagcacgctgtcctgggcccaccttggggtccaggtctggcagagggcagagtgtccccaggtgcccaagatctacaagtactactccctgctggcctccctgcctctcctgctgggcctcggattcctgagcctttggtaccctgtgcagctggtgagaagcttcagccgtaggacaggagcnnnnnnnnnnnnnnnnnnnnagcagctactctgaggaatatctgaggaacctcctttgcaggaagaagctgggaagcagctaccacacctccaagcatggcttcctgtcctgggcccgcgtctgcttgagacactgcatctacacnnnnnnnnnnnnnnnncatctcccgctgaagcatggtgctttcagctacactgacagggacggccatttaccaggtggccctgctgctgctggtgggcgtggtacccactatccagaaggtgagggcaggggtcaccacggatgtctcctacctgctggccggctttggaatcgtgctctccgaggacaagcaggaggtggtggagctggtgaagcaccatctgtgggctctggaagtgtgctacatctcagccttggtcttgtcctgcttactcaccttcctggtcctgatgcgctcactggtgacacacaggaccaaccttcgagctctgcaccgaggagctgccctggacttgagtcccttgcatcggagtccccatccctcccgccaagccatattctgttggatgagcttcagtgcctaccagacagcctttatctgccttgggctcctggtgcagcagatcatcttcttcctgggaaccacggccctggccttcctggtgctcatgcctgtgctccatggcaggaacctcctgctcttccgttccctggagtcctcgtggcccttctggctgactttggccctggctgtgatcctgcagaacatggcagcccattgggtcttcctggagactcatgatggacacccacagctgaccaaccggcgagtgctctatgcagccacctttcttctcttccccctcaatgtgctggtgggtgccatggtggccacctggcgagtgctcctctctgccctctacaacgccatccaccttggccagatggacctcagcctgctgccaccgagagccgccactctcgaccccggctactacacgtaccgaaacttcttgaagattgaagtcagccagtcgcatccagccatgacagccttctgctccctgctcctgcaagcgcagagcctcctacccaggaccatggcagccccccaggacagcctcagaccaggggaggaagacgaagggatgcagctgctacagacaaaggactccatggccaagggagctaggcccggggccagccgcggcagggctcgctggggtctggcctacacgctgctgcacaacccaaccctgcaggtcttccgcaagacggccctgttgggtgccaatggtgcccagccctgagggcagggaaggtcaacccacctgcccatctgtgctgaggcatgttcctgcctaccatcctcctccctccccggctctcctcccagcatcacaccagccatgcagccagcaggtcctccggatcactgtggttgggtggaggtctgtctgcactgggagcctcaggagggctctgctccacccacttggctatgggagagccagcaggggttctggagaaaaaaactggtgggttagggccttggtccaggagccagttgagccagggcagccacatccaggcgtctccctaccctggctctgccatcagccttgaagggcctcgatgaagccttctctggaaccactccagcccagctccacctcagccttggccttcacgctgtggaagcagccaaggcacttcctcaccccctcagcgccacggacctctctggggagtggccggaaagctcccgggcctctggcctgcagggcagcccaagtcatgactcagaccaggtcccacactgagctgcccacactcgagagccagatatttttgtagtttttatgcctttggctattatgaaagaggttagtgtgttccctgcaataaacttgttcctgagaaaaaaaaaaaaaaaaaaaaaaaaaaaaaaaaaaaaaaaaaaaaaaaaaaaaaaaaaaaaaaaaaaaaa

SEQ ID NO: 6908 - DNA, 4546 bp, Homo sapiens
  misc_feature (925)..(965): n is a, c, g, or t
atgctctttgagggcttggatctggtgtcggcgctggccaccctcgccgcgtgcctggtgtccgtgacgctgctgctggccgtgtcgcagcagctgtggcagctgcgctgggccgccactcgcgacaagagctgcaagctgcccatccccaagggatccatgggcttcccgctcatcggagagaccggccactggctgctgcagggttctggcttccagtcgtcgcggagggagaagtatggcaacgtgttcaagacgcatttgttggggcggccgctgatacgcgtgaccggcgcggagaacgtgcgcaagatcctcatgggcgagcaccacctcgtgagcaccgagtggcctcgcagcacccgcatgttgctgggccccaacacggtgtccaattccattggcgacatccaccgcaacaagcgcaaggtcttctccaagatcttcagccacgaggccctggagagttacctgcccaagatccagctggtgatccaggacacactgcgcgcctggagcagccaccccgaggccatcaacgtgtaccaggaggcgcagaagctgaccttccgcatggccatccgggtgctgctgggcttcagcatccctgaggaggaccttgggcacctctttgaggtctaccagcagtttgtggacaatgtcttctccctgcctgtcgacctgcccttcagtggctaccggcggggcattcaggctcggcagatcctgcagaaggggctggagaaggccatccgggagaagctgcagtgcacacagggcaaggactacttggacgccctggacctcctcattgagagcagcaaggagcacgggaaggagatgaccatgcaggagctgaaggacgggaccctggagctgatctttgcggcctatgccaccacggccagcgccagcacctcactcnnnnnnnnnnnnnnnnnnnnnnnnnnnnnnnnnnnnnnnnngcgggatgagctgcgggctcatggcatcctgcacagtggcggctgcccctgcgagggcacactgcgcctggacacgctcagtgggctgcgctacctggactgcgtcatcaaggaggtcatgcgcctgttcacgcccatttccggcggctaccgcactgtgctgcagaccttcgagcttgatggtttccagatccccaaaggctggagtgtcatgtatagcatccgggacacccatgacacagcgcccgtgttcaaagacgtgaacgtgttcgaccccgatcgcttcagccaggcgcggagcgaggacaaggatggccgcttccattacctcccgttcggtggcggtgtccggacctgcctgggcaagcacctggccaagctgttcctgaaggtgctggcggtggagctggctagcaccagccgctttgagctggctacacggaccttcccccgcatcaccttggtccccgtcctgcaccccgtggatggcctcagcgtcaagttctttggcctggactccaaccagaacgagatcctgccggagacggaggccatgctgagcgccacagtctaacccaagacccacccgcctcagcccagcccaggcagcggggtggtggttgtgggaggtagaaacctgtgtgtgggagggggccggaacggggagggcgagtggcccccatacttgccctcccttgctccccctccctggcaaaccctacccaaagccagtgggccccattcctagggctgggctccccttctggctccagcttccctccagccactccccatttaccatcagctcagcccctgggaagggcgtggcaggggctctgcatgcccgtgacagtgttaggtgtcagcgcgtgctacagtgtttttgtgatgttctgaactgctcccttccctccgttcctttcggacccttttagctggggttgggggacgggaagagccgtgcccccttgggcgcactcttcagcgtctcctcctcctgcgcccccactgcgtctgcccaggaacagcatcctgggtagcagaacaggagtcaaccttggcggggcgggggctgcgtccaacctggagattgcccttccctatgccacggttcccaccctccctcaccagtttggacaatttgaaattacctattgctgctacttgttctgtcctctgaccttggggcaaaggagccccaggccctgtctccccagcatcctccctggtggccctgggcaggtgcactgacacccccaccttcccatcccctgctgaaccaggccctgttacacacagccgcctaaggcccgcggctcatgtgctgcccgcccccatatttattcactgatagagaatcttggggatgctggggtctggagtgaacatctcctccccttcatgccctagcctgtgttctagctgtcctggcgagacttctgtgagtgaagaggaaggggtctctggtcaaacccagcccccagggcctagggttgaaagccttccccggctccgggcattatttgggtttaatctcggagcctcactcctggactgaagtccggtgcctctgccttatccctggtggagatggaatgtggcccattgcctcctccctctcctgtcaaaaaccctgatcaggtagatttggaggcggccacgatttcctgtttggcccctgttcaccccagtgcactggccctgactccaggcgtgagtatggggaaggatacgggttcttctgacggggagcaagggcctccgtcttcccttccttaactctccccctttgccctccgccctgaaaaaggtgtccttgaagtcccttccacctctatgccactgtctgcttagcccagctcaggggtggggaagaggcgaaagcgtgggggaggtgagcgcagcggcagttctgcctcggagctgattgcagggccctgtgtggtctccggacagctgcgggaaggctgccgcagctgaagctgaagaggcggctacgtgcggtttgtcagggggattgggttgaaaactggccagtcgggatgactgggtgaaagaggagtagctcctgccactggcgttttgagtgttggcaatttgggatgcctcctggggaaggtttccgggcgtttggtgagtctctagatttttccttgctttctgtgtttattggtttttgatgttgtaaaagcaatgaatcccctttacaagaaaatcgaaaacacagaagaatgaaggacatgccagtccccgatcgctgctgtgagcacctcagtggctccctcagaccagatcccgtaggcagccccacagaccgaccctgaccccactcacagccaccctgaagatagactataggaacgggcccataccacacagactgctctccaatccctgagtctcagatgtttcatttatttcctacttttccactactaaaaaacagtgtggaatagacattattggcaaaattgctcatccctaatcctgaaaaacaggccagaatgggtaaagacttgtcaaagcttgcaacatagctacatggtgcacccggacctgtaccccctccccccaacacaaaaccagtgtctgggaggttcattttcctttaaactgatccagctggccctgaaccaattgtttttgactgagtatctaggagagcagtaagtggaacttcagacaagcccactgggtctggtccaggtgaggggcagggggcatggggctgggaggtctcaggggccttccctgggggtggccagcctggtagggggcagagaaggaaaagctgaggggggtccctgtgagggaggaaagaaggatcatttgccccgctgggtctcaaaggcagtgagaagagagctgaagaaagctctggctggctgacaggatccctgtgttgtaattggtccctcctttcagctctctagtgagatgcccgtgtctgtgcgtgtgcgtgtgtgtttcatacagctagcattagatgggtgatgtttcttacttatcatccctaactattgcaacttgaccttaaaaagacaaaaccccacaaaactcttcctgccacgggcttgcagattgaagcactttcgatgttgggcgctggcgtttgtgttctgggcaccaccgtgaccctgcccagatggctataatattattttatacacaaaccttttttttcataaatgttataattttgtgtctgtctttataaactattataagtactatttttgttataattcaaaatagatatttagtataaagtttttgctgttaaatatttgttatttagtaaaatatgaattttgctctattgtaaacatggttcaaaatattaatatgtttttatcacagtcgttttaatattgaaaaagcacttgtgtgttttgttttgatatgaaactggtaccgtgtgagtgtttttgctgtcgtggttttaatctgtatataatattccatgttgcatattaaaaaaatgaatgttgtgcattttgtgattttggaaatactcaatgtggctcttctataggcttctagaataaaccgtggggacccgcaaaaaaaaaaaaaaaaaa

SEQ ID NO: 6909 - DNA, 5835 bp, Homo sapiens
  misc_feature (1035)..(1053): n is a, c, g, or t
  misc_feature (1398)..(1436): n is a, c, g, or t
  misc_feature (4470)..(4493): n is a, c, g, or t
cccgctctgcttcagcgcacgctgaagacggcactaggacccagggaagtccccgagcggggttcgcggaaaggcagccagactcctccttatctccagtgtcaaacttgacatcagcctgcgagcggagcatggtaacttctccagcaatcagagcgctccccctcacatcagtggcatgcttcatggagatatgctcctctcactgccctctgcaccagcaacatggattgtcagctctccatcctcctccttctcagctgctctgttctcgacagcttcggggaactgattccgcagccttccaatgaagtcaatctactggattcaaaaacaattcaaggggagctgggctggatctcttatccatcacatgggtgggaagagatcagtggtgtggatgaacattacacacccatcaggacttaccaggtgtgcaatgtcatggaccacagtcaaaacaattggctgagaacaaactgggtccccaggaactcagctcagaagatttatgtggagctcaagttcactctacgagactgcaatagcattccattggttttaggaacttgcaaggagacattcaacctgtactacatggagtctgatgatgatcatggggtgaaatttcgagagcatcagtttacaaagattgacaccattgcagctgatgaaagtttcactcaaatggatcttggggaccgtattctgaagctcaacactgagattagagaagtaggtcctgtcaacaagaagggattttatttggcatttcaagatgttggtgcttgtgttgccttggtgtctgtgagagtatacttcaaaaagtgcccatttacagtgaagaatctggctatgtttccagacacggtacccatggactcccagtccctggtggaggttagagggtcttgtgtcaacaattctaaggaggaagatcctccaaggatgtactgcagtacagaaggcgaatggcttgtacccattggcaagtgttcctgcaatgctggctatgaagaaagaggttttatgtgnnnnnnnnnnnnnnnnnnnttctacaaggcattggatggtaatatgaagtgtgctaagtgcccgcctcacagttctactcaggaagatggttcaatgaactgcaggtgtgagaataattacttccgggcagacaaagaccctccatccatggcttgtacccgacctccatcttcaccaagaaatgttatctctaatataaacgagacctcagttatcctggactggagttggcccctggacacaggaggccggaaagatgttaccttcaacatcatatgtaaaaaatgtgggtggaatataaaacagtgtgagccatgcagcccaaatgtccgcttcctccctcgacagtttggactcaccaannnnnnnnnnnnnnnnnnnnnnnnnnnnnnnnnnnnnnnctacacctttgagattgatgccgttaatggggtgtcagagctgagctccccaccaagacagtttgctgcggtcagcatcacaactaatcaggctgctccatcacctgtcctgacgattaagaaagatcggacctccagaaatagcatctctttgtcctggcaagaacctgaacatcctaatgggatcatattggactacgaggtcaaatactatgaaaagcaggaacaagaaacaagttataccattctgagggcaagaggcacaaatgttaccatcagtagcctcaagcctgacactatatacgtattccaaatccgagcccgaacagccgctggatatgggacgaacagccgcaagtttgagtttgaaactagtccagactctttctccatctctggtgaaagtagccaagtggtcatgatcgccatttcagcggcagtagcaattattctcctcactgttgtcatctatgttttgattgggaggttctgtggctataagtcaaaacatggggcagatgaaaaaagacttcattttggcaatgggcatttaaaacttccaggtctcaggacttatgttgacccacatacatatgaagaccctacccaagctgttcatgagtttgccaaggaattggatgccaccaacatatccattgataaagttgttggagcaggtgaatttggagaggtgtgcagtggtcgcttaaaacttccttcaaaaaaagagatttcagtggccattaagaccctgaaagttggctacacagaaaagcagaggagagacttcctgggagaagcaagcattatgggacagtttgaccaccccaatatcattcgactggaaggagttgttaccaaaagtaagccagttatgattgtcacagaatacatggagaatggttccttggatagtttcctacgtaaacacgatgcccagtttactgtcattcagctagtggggatgcttcgagggatagcatctggcatgaagtacctgtcagacatgggctatgttcaccgagacctcgctgctcggaacatcttgatcaacagtaacttggtgtgtaaggtttctgatttcggactttcgcgtgtcctggaggatgacccagaagctgcttatacaacaagaggagggaagatcccaatcaggtggacatcaccagaagctatagcctaccgcaagttcacgtcagccagcgatgtatggagttatgggattgttctctgggaggtgatgtcttatggagagagaccatactgggagatgtccaatcaggatgtaattaaagctgtagatgagggctatcgactgccaccccccatggactgcccagctgccttgtatcagctgatgctggactgctggcagaaagacaggaacaacagacccaagtttgagcagattgttagtattctggacaagcttatccggaatcccggcagcctgaagatcatcaccagtgcagccgcaaggccatcaaaccttcttctggaccaaagcaatgtggatatcactaccttccgcacaacaggtgactggcttaatggtgtctggacagcacactgcaaggaaatcttcacgggtgtggagtacagttcttgtgacacaatagccaagatttccacagatgacatgaaaaaggttggtgtcaccgtggttgggccacagaagaagatcatcagtagcattaaagctctagaaacgcaatcaaagaatggcccagttcccgtgtaaagcacgggacggaagtgcttctggacggaagtggtggctgtggaaggcgtagcatcatcctgcagacagacaataattctggagatactggtggaagttccaagtccaataagacactcaaatatgagtacaaatgccttaaaatggaattgaaaaactctttattttcccctatcatttattggatgggtgggtggggtatttttttgtaattgcttttttaaatattagttaatggattaaatttaattcttcagcgtaaaatggtgaagaactagcatatagccattgatcataaactgactatcataaaatcaaaacaagtgaaataacaaaatggacatggtggctttgtttaggtagagccacaaaagaaaagacttgtaatatttttatatacagaggaaatctgtaacaggtattttgtttcttttaaagcaagcaacacagaggaatttatacctcaaactatctggccatatttactaccttatcactgcattattctcttttatctgtttaaagcatatagagatgaagtttgtagttgttttaagtactacacatttttaaattgttagcttccttaagtatatcatgtaaagaaatgtcttaatttttgaaaaaagtacatatttattttcttttgaattgtttttattgttttctatttatgccttgatgatttaatatggatttgttacagccaagtgccaaatgctctctcaaattgtcagcaatttaactagacacagataataatgggtttctttcagattttttgaaccatccacttacatatatttttaaaaaatgaaatccttttcctgttcatacactaaccaaatctctcaaatctgttatcccaatcattgttgcctctccgtttattataaactgtatgctcacaacttagtgtaatataccagcttgtatgcaatggattttcaaccagataacatacctttcctgctctggtgcttagagactatcaactccctcctttagtgaaggagccgtgttagagcttccgagaatagctccactggagagaagtggaatcctatatagaatgctgcactaattgacaacacagcctataggccaatgcatgagtaaaaaaaaaaacaattactggctcactggctttgaaaagtcacttactattgttgctgaaacttgctgagctgtttatagagaatgatgataacagaacttttcctctgtatcactggtgtttaggtgaattaattaaacattgtgatcattagtaccaggtattattatctttannnnnnnnnnnnnnnnnnnnnnnnggtgcagttttggtgtgtaacttagaaggattgaacttctttgaatttactggacataacattttcagaatagttggtcatctagcaaccgcctcaaaatgtgtaagcaggagagaaatttctcatcacagggatttagacttactattacataaaggctaactatgagcttgctcattaattttgaaaagatgtacctggtggatatctagctagtaatatattctgaagcaacattttagctctattgatactctttctaatgctgatatgatcttgagtataagaaatgcatatgtcactagaatggataaaataatgctgcaaacttaatgttcttatgcaaaatggaacgctaatgaaacacagcttacaatcgcaaatcaaaactcacaagtgctcatctgttgtagatttagtgtaataagacttagattgtgctccttcggatatgattgtttctcaaatcttggcaatattccttagtcaaatcaggctactagaattctgtattggatatataagagcatgaaatttttaaaaatacacttgtgattataaaattaatcacaaatttcacttatacctgctatcagcagctagaaaacattttttttttaaatcaagtattttgtgtttggaatgttagaatgagatctgaatgtggtttcaatctaattttttcccagactactatttctttttaggtattattctgagcatactcaacaaaacccatgcatttcataaactaatagaagttgaggattgttgaatctatttcacttattttggctgtggtttccatctgaaagtagaggttgtatacaccatatactgttcttcattttattaatatttttctccttgacctctcataaatttactttacacaattcttaccctgtacatatgtaaacataagtgtacgattcttaaccatggagtagaggtactagaatgcttacggccatctctttgtacaggaactgcattgactttcagtaaacataaagccacaactcctacatgatgttatgtaccatatgatctgttttgtatcttaaatttgatttacatatattatttatttctggtaactcactcagtttatgctgtgctaaatatcaatcaagccatgtataaatgtgatatgattggcaatatgtgtttactttaaacttgtcttttcaaaatattactcagtttatgttgtacaatgtagatggcctcttactaatgtaaaatgatttgtagtggaaacatttatatttttataataaacataatgaaaatattttttacagattggaaaaaaaaaaaaaaaaaaaaaaaaaaaaaa

SEQ ID NO: 6910 - DNA, 717 bp, Homo sapiens
  misc_feature (303)..(310): n is a, c, g, or t
  misc_feature (323)..(323): n is a, c, g, or t
cctctacgacgggccactttggttttgttacttgggtgaggaaaggataattgtctgacagtagagaggggaaagaaaaaaaggcactataagagggttaagctttttttttttttatctttagcttggtaggaattggtctcggaacaatagcgcatgactttgaagatggcgatgcttttttgactggggtatgatgggtctgcatttttttgttgttgtttggactgcagtcttggtggttagaagcacgagatagggtccttcccaagctggtttgagttttccttcttcccagcttcnnnnnnnnatccatcccccanggctgatgctgatgtgctggggaactccaaagggtgggcatctgtactaaaaagcctttagctttggagggaagagaaagtgggaagagagacccaagtaacatagctcttgagaaactgacttttagtttcaaacgtaggaatgtcaacagtgaagtgtgagtaaggcagcctatacagcatttcacaaggagataagccaacttctttctgagggacagttcggacctttaataaggcaataggaaggcacttggtccatgataatcgagtttttaaaactaatttggttagatggctttttagggtttggttcattctttctactctttctgatgaaggtgggtgccagggggtatggtattgaatctataaattaccttgggaagtatgg

SEQ ID NO: 6911 - DNA, 6053 bp, Homo sapiens
  misc_feature (710)..(762): n is a, c, g, or t
  misc_feature (4010)..(4040): n is a, c, g, or t
  misc_feature (5084)..(5110): n is a, c, g, or t
ctgttctggccttgaaaatgatccttcttaaaaggattttcctccttcctcaagggaaagaaaacctattgatataaaacttcacttcccattcagtttcccctgctaaatgccactccagtagagactgagtgttgataaatacaggggaaggaaaaagtcgtaagctgagcctggtcacattgccccttgtgatatcgttttatttttaacttcgcaacacttggactatttctgttgaagttttctctcctttccctgccttcccaacagaacgctgtcctctactgcagctgatgcaacccagccacctcccggcaatccgcttacttgcaatcaagggttcaggtgcaagcagatgctgactcagcctgttccattaagagctaagaagcaagaagaaattggggcgccatggggaaagcccgcagatccccgccagggcaccacaggcattgtgagggatgcttcaaccgccactgccacattcctgtggaacccaacacctcctgcctggtaataagctgccacctgctctgtggtgccgccttccacatgtgcaaagaggcagagcaccagctcctctgccctttagagcaggttccgtgcctcaactccgaatatggctgccctctgtccatgtcccgccacaaactggccaagcacctgcaggtgtgccccgccagcgtggtctgctgctccatggagtnnnnnnnnnnnnnnnnnnnnnnnnnnnnnnnnnnnnnnnnnnnnnnnnnnnnnaaagagacccccagtgaggagtgtttggacacagccctggccctgcaggatcagaaggtcctcttcagatccttgaaaatggtggaacctttcccagaaactagagaggctactgaggaggaaccaactatgaatggtgaaaccagtgtggaggaaatgggaggagcagtgggtggagtggatatcggtttggtaccacatggtctgtcagcaactaatggggagatggcagagctaagtcaagaagaacgggaggtgctagccaaaaccaaagaagggatggacctggtcaagtttggccagtgggaaaatattttcagcaaagagcacgcagcctctgctttaacaaattcatcagcgagctgtgagagcaagaacaagaatgactccgagaaagaacagatttccagtggccataacatggtagaaggagagggcgctcccaaaaagaaagaaccacaggaaaatcagaagcagcaggacgttcgtacagccatggaaaccacagggcttgccccttggcaggatggtgttctggaaagactgaaaacagctgtggatgcaaaggactataacatgtatctagtgcacaatgggcggatgctgatacactttggtcagatgcctgcttgtacacccaaggagagagactttgtttatggcaagctggaggctcaggaagttaagactgtttacaccttcaaagttcctgtgagctactgtggaaagcgagctcgacttggagatgccatgttgagttgtaagccaagtgaacacaaggcagtggatacttcagatttggggatcactgtgggggacctgcccaaatcagatctcatcaagaccaccctccagtgtgctttggaaagagaactcaaaggccacgtcatctctgaatccagaagcattgatggactgttcatggattttgccacacaaacatacaactttgagccagaacagttttcctctgggacagtgctggctgacctaaccgctgccaccccagggggactccacgtggagctccacagcgagtgtgtgaccaggagacacaacaaaagcagctctgccttcactttcacttgcaacaaattcttcaggagggatgagttccccctgcacttcaagaatgtccacacagacattcagtcatgtctcaatggctggttccagcatcgatgccccctcgcctacttgggatgtacatttgttcaaaaccatttccgtcccccagggcaaaaggcaaaagtaatctatagccaggagctcaagacctttgccattaagccggaggttgctccagagctgagcgagggaaggaagaacaaccatcttttgggtcatggaggaaaaagccagaattctttaaccagcctgcccctggagattttgaagtacattgctgggtttttggacagcgtcagcctggcccagctctcccaggtgtctgtgctgatgaggaatatctgtgccactttgttacaagagagaggaatggtccttttgcaatggaagaaaaagaggtattcccatggaggcacctcctggagagtccacagagagatctggcagttcagcagcctcttctccaaaatcaagagctgggagtttaatgaagtcacctccatgtctgagcacctgaagtcctgtcctttcaacattgtagagcacaaaactgacccgattcttttgactagcatgtgtcagccccgtgagcaggcccgagagagcttagtctccacctttagaatcagaccacgaggaagatacgtctcctaaaaattcagatgccactcgatgcacccttcttggatttcttctcggagttcctgaagtaggacagagtgtgtggttttgaggactcccttctgtaaactgcctatttgcttatcggggtgtattggaacacgcaatgtccttcgaaacctcaacacgaggcctaagaatttcctaagccatgtcttgtaccatagtgccacattgatgacttgtttccttttttcttttcttttcttttcttttttctttctttctaaaatagattggtctgagaagaaaataagtaatttgaggccatttggaagatgggcccaatttcttaagtgatgagagagcacgaaattccataaccagtacaggcctgtgcttttacatgggctttttagttcacaaagcactttcaaatttatgggacaggaaatgcaggatgggactccccagggaacgcagggtgaagggaacaaagctggaggctctggagctgggtctgttttgacggtcaagtccagggctcattttggttattctactgcctctaggccagggtagtcctaacacagcctgacataggagagcccctggctgagcatggcagccttgaagacaccacaggccaaaacatgaggggcagaaatgggatcacagagtctgttgctagaatcttggcaacatacagcaggaaagccttgataaatcgggagtccaaaggagacaccatatttatggagaacattaggacaaaaagtcaccaacttactttgtaacattttaataatgacttaagggtcaagattttttcttctgaaaattatgttctgagttaggcagaacatagccatggccctgggccaccctgtgctatctgaaatgacctcaatacactaatgccaacctcagcgtcatgccagaatgcacagggcagcccagggagatcacacctttggcaaagtccagacaaggcccactgcagttcctatggcgccagtcaccagctcctagacagcacttgggtaccccattggggtcttggagaggaagacatgtgaacataacggttccctgaaattgctcctacccatccatatttctggtcatgctttcagtctgacaaaaatggatgatactgctgtttttggtaacaaacagtgaatattcataagaacaccaaaaaaaaaaaaaaaaaaaaaaaaaaaaaactggcatcccctaaagcagggcttcttagccttggaactattgacatttttaaatggataattcttttttttttttttctaggtggggaggggatggagttcactcttgttgcccaggctggagcgcaatgacatggtctcggctcactgcaacctctgcctcctgggttcaagcgattctcctgcctcagcctcccgagtagctgggattactcgcctggctaattttgtatttttagtagagacgggctttctccatgttgttcaggnnnnnnnnnnnnnnnnnnnnnnnnnnnnnnngcccgccttggccttccagggtgctgggtttgcaggtgtgagccactgcgccctgcctgaactggataattctttgttgcaagggactgttctgtgtactacaggatacttggcagcatccttggcctatccattaaatgtcagtagcacccccacagtggcaacaatcaaaaatgtcaccagacattgctaaatattggggagcaaaatggctccccgttgaaaatccctaaaggatgtcatactagtgacaataagttaggatatgcttattttttagtacagcaaaatcttatcgcacatagctatccacaatagttatgatttaatgcagctctttatttatgaaataggttttagacatgtggtgattttaagttgggaaccagaaggaaatgattcgttggtatggcttcatgtccttcagccacccccaagaatgtatcctttcagctctctttggttatacctgaagccaggagcgttgagttattagccttgtgtttatattcctctcactgtaattggtgtcattttcccagcagtcctagcagtcctcaagcaagtgggaaatcggaaaagaaaaggacaggcattgtagggaagcagaggataaagaatttagccaacaaaagaaacaatctagtcaatctgggtgcttttatttcctgggttctctctaaacatggctcagagctggtgtagatgaagtaggtgaaacctctgaaaagagtctagaaggcagtagagcaagtcccagaccagaaacatgctcatcttttcatcgtaatgtgccactcggtactatttggtaatgtcactctatttttcctaatcccatcctttggtttgtatttcatatttgttttcgggccttttctcaaaattgatatgactagggtgtgacctaaggttttattctgtgaagatgagtaactggaaagaagctaacactgcagtgggaaggaaggaagagagttgtccaggtggtagttcgacgtgttttgaatctagtccttcctacatggaggataaaagctcctnnnnnnnnnnnnnnnnnnnnnnnnnnnatagaaatagaaagggaaactatagaccaatggagatgaaaatcaggggctatcgacagatggaggagaaataaggtgctacatagagaaaggaagagggcagaaggctttcccttcccaaactgggtgagctggggaagccttggttcaggagagtggcactgcccacaactgctttgtgggttgtgcacttccagccgcactctccccctccagttgctgccttcagagccgtactgaagcacgagcttcaataagacaagcacacttcatagtgagagggcagcggtaccaaagcctttcagagagactatggattagacagaaatgatttgtgagaggaagctggagtgaacagcatgaacagcgagtgttacctgacagaggcaagacagctagaagtggcttcagatttagaaacagctgaggggagcaaagacggactgtgtacacagggagggaggatgtctatgggcagagcccttggtgagtatcatcaccaagaaaggcagtccagagtagagatcagccgaatatggaggctgaggtctgtagaactgggccagagaggaccttactgccttagtagcataagggtctggaaaagaagtttctatctcacaacaaaggaaaaagtgaaaagcaaggtggaacttgaagatacgtcacgaaaatcactataaaagtctgatttatgtgtgatgtcaaatcaaactgaaatgaagaatgagattgagtatatctgtggtgactgacctctgtatactagaaacctcaacatctctagaagaggaaataaaagctgctttgcactctgaaaggctaattgggtgaatcttataagttaggtctagagacagatgtgtgattcacaggcatagaagttgtcgctgaaaccaagtgtgtatcatgaagaaagaccagagcacaagcctgagacaac

SEQ ID NO: 6912 - DNA, 3357 bp, Homo sapiens
  misc_feature (1706)..(1747): n is a, c, g, or t
tctgcctgctgtcgggggcgggctggccatggccgatggccggagcatggcaggcatcccccggagttgtctcttttcatgccagcgccaacaggaggctgtctggacacactgattactcactcaccagcctccctcttctgtccaccagcccagcctgactcctggagattgtgaatagctccatccagcctgagaaacaagccgggtggctgagccaggctgtgcacggagcgcctgacgggcccaacagacccatgctgcatccagagacctcccctggccgggggcatctcctggctgtgctcctggccctccttggcaccgcctgggcagaggtgtggccaccccagctgcaggagcaggctccaatggccggagccctgaacaggaaggagagtttcttgctcctctccctgcacaaccgcctgcgcagctgggtccagccccctgcggctgacatgcggaggctggactggagtgacagcctggcccaactggctcaagccagggcagccctctgtggaaccccaaccccgagcctggcgtccggcccgtggcgcaccctgcaagtgggctggaacatgcagctgctgcccgcgggcttggcgtcctttgtcgaagtggtcagcctatggtttgcagaggggcagcggtacagccacgcggcaggagagtgtgctcgcaacgccacctgcacccactacacgcagctcgtgtgggccacctcaagccagctgggctgtgggcggcacctgtgctctgcaggccaggcagcgatagaagcctttgtctgtgcctactcccccagaggcaactgggaggtcaacgggaagacaatcgtcccctataagaagggtgcctggtgttcgctctgcacagccagtgtctcaggctgcttcaaagcctgggaccatgcaggggggctctgtgaggtccccaggaatccttgtcgcatgagctgccagaaccatggacgtctcaacatcagcacctgccactgccactgtccccctggctacacgggcagatactgccaagtgaggtgcagcctgcagtgtgtgcacggccggttccgggaggaggagtgctcgtgcgtctgtgacatcggctacgggggagcccagtgtgccagtgagtcctgccccagggcccccaaagagccagctcctctcaagatcccccttcaatggggcatcagctcccaggagcccgctgtgtgcctctctttccaactcattcagtgacaacacgttgagatcttgaaactggccacagcatggatatttacaccaaagaaattgacaaatgctataaaccatggatttttttttcttttgagagagagcaagctcaatattccaacttaccagctcactcctgaccctcaccacccactcttttggagcaggtggccagaggaaggggcaccctgagcttagctccccggcagggcaggaaagggcagggattctgaagtccacacacaaactcaagctcccctaccccagccaaggtgcattttcccttccacacctgtgacctgaggatcgacggagactgcttcatggtgtcttcagaggcagacacctattacagagccaggatgaaatgtcaggtgacagtcacccctagcttcctaggaaccccctagggcctcaagtgagggtcttaatgcagggaccctggagtgagaggtggttccnnnnnnnnnnnnnnnnnnnnnnnnnnnnnnnnnnnnnnnnnngggtcgtggactccaaggctcatagaagccaggaggtcacttattgacctgaggggccaaggtcaagaccaacctccatctaagggagttccagccactggttgccttgcaggaatgcaaggtcagggtggccagagctcggggttgttcaagaaaaccagcaacccagacttccactggcaactctcgaaaccacaattaattactggggttggcaatcaacttggatatatttaagacactgtgcaggtgaaacagaacctcctcaggggccagaccttgcctgggcttgtgggctgctggtcgcgcccccgtgcacagggagaagagaagcagacgggagcagaagggacccctgctcttggaagggaggctgtgcgggctgggggtgatgatagcccggccagcacacacacgtggcatcttaggccatgggcaggggtggcaggaaggggcagcctgggctctgggagacttgcctgtgtgacccagggtggggttacagaggaaaggcggggtgctggcccagatcaagagccagaaagtgcaggacatcctcgccttctatctgggccgcctggagaccaccaacgaggtgattgacagtgacttcgagaccaggaacttctggatcggtgagtgcccagctgattgggggtatggcgagtaaggggttgtgatgccccaccctgctgcaggaaccctgggccatggcggctgccagcagatggcaagggtgtgttgagggcctggagcccagagcggggccagctgctcaccccctttcccggggagggcccaggtagggagcacatgggggctgccagcgctgggaagaggggccagaaaggcagctggcagcagactccagggtctgagtgggccaaccttgactaccccggcccagggctcacctacaagaccgccaaggactccttccgctgggccacaggggagcaccaggccttcaccagttttgcctttgggcagcctgacaaccacgggtttggcaactgcgtggagctgcaggcttcagctgccttcaactggaacaaccagcgctgcaaaacccgaaaccgttacatctgccagtttgcccaggagcacatctcccggtggggcccagggtcctgaggcctgaccacatggctccctcgcctgccctgggagcaccggctctgcttacctgtctgcccacctgtctggaacaagggccaggttaagaccacatgcctcatgtccaaagaggtctcagaccttgcacaatgccagaagttgggcagagagaggcagggaggccagtgagggccagggagtgagtgttagaagaagctggggcccttcgcctgcttttgattgggaagatgggcttcaattagatggcgaaggagaggacaccgccagtggtccaaaaaggctgctctcttccacctggcccagaccctgtggggcagcggagcttccctgtggcatgaaccccacagggtattaaattatgaatcagctgaaaaaaaaaaaaaaaaaaaaaaaaaaaaaaaaaaaaaaaaaaaaaaaaaaaaaaaaaaaaaaaaaaaaaaaaaaaaaaaaaaagaaaaaaaaaaaaaaaaaaa

SEQ ID NO: 6913 - DNA, 2045 bp, Homo sapiens
  misc_feature (2022)..(2022): n is a, c, g, or t
atttcatcttttcttctgctgttttcttttcccctcttctttttcacaaatgttcaaaatggtctcatgcgcatgtgtcttgccccactttcccctttagctgaacagaaaattttgtctcagtaaaacgaagtcaaaaaacaggattcctccaaacatgcctcctcccgcactggccagccgagtccagctgagaaacttatgctagattcaatgtcattgagcaatgctttattgaagtctcgttcttctcacttctgcaccagtgagccaatgatactgacagaaatgtcatctctcttctatctgtggttgctgtttttggagtaaaagtttctgtgtgtgtttttttagttcttttgatggctgttgttttgcattgtaaataccatgatgggggaccccatcagaacatggccttatttaataatttatttcgtatttattgagtaatattgggaaaagagaaggaccacctctttccctgaattgctattgagaattggtccatctcccagctccaggtgctgctgtctgcagcaagggcattactgcccaggtaaggagtgctagaatcaccaagcaaattgaaattggcagaaatggaggcttcagtcacacaaattagactcaaatggaactaaaacactggttatctccaggaaaacctcatttagatggaaattaatggaagaataaaatgcctacacatgaaccaacttctattaaaaagtcacaactccttgaaaaaaaaaaataaagaaaaattgtaaactcttttttttttctggccaaggaaagctatgcctcatcttctaacgagccaagccaaaaagactgcaatggtattcctatgtgtttctttggcctgtgtatcagtctgaatgaaatggaatgggtctctagcctcagtcttgtcatctgtaaaatggggcttgtcctatatattatctgcaagacgtgggaaatgggggctcaagccctgatgctatggactccatactgttggatatattgtctcttgtgtcttctgctgactgcagattaaagggtgtcaaccaaggaaggaaacaaaaaagtagggcctggacttcatttgcagaatgaggtcatagtcgttgagtcccacagtcatatatgggagacctcaagttgctgtcaccttgataactcttgtatcctgggttaaagccctctgtatttagtttgaacttctctctaagccccgtggtccagagtcatcacgggagagaccaagatgggcttaccttgccctgctctggatttaaccattgttcattgtcaggctatatttttgtacaatcattcaaataacccagtgacataggtcatattgccacttttcagaggagaaaactgaggctcaggagggggagttgacatgcccaagctcccttgagctcagatcagcttgactcaatgtccaacattcccttggtagctttttctccggggtcctgtgctataagaacttctctctgcactgtatttttttttctcccaattcttagctatttcctcaagcaatgattggccaaggacctagcataatccaccacattggccaaggggacgtggtgcaccccaaggccatttctctgcattggaggctgcgaatctcctctggaaaattcccaacccgaggacccaccatgagcccagctcagcctgaccagacagcctctgcctggagcattcacatcagatggaaagaagctgctgtgtcctccagcatcctgggaccctgtcctctgcccagtgacacagcagccatggctagcttgatttctggtctccaaagctaagcataaccttcccggggtttctggtttttcagcctgtacgaaacatgtctctgttctaattaaagttcccatggtatggtgttctcaaaaaaaaaaaaaaaaaaaacgcacgggatggcatccctcggggggaatgtctattgtggcgggggggcggcggcgaaaaaaggcgcatttgacacatggggcagcggtnggtgatatatccacagtatctca

SEQ ID NO: 6914 - DNA, 2871 bp, Homo sapiens
  misc_feature (60)..(1014): n is a, c, g, or t
  misc_feature (2528)..(2536): n is a, c, g, or t
  misc_feature (2538)..(2561): n is a, c, g, or t
  misc_feature (2563)..(2568): n is a, c, g, or t
  misc_feature (2570)..(2581): n is a, c, g, or t
  misc_feature (2583)..(2589): n is a, c, g, or t
  misc_feature (2591)..(2591): n is a, c, g, or t
  misc_feature (2600)..(2616): n is a, c, g, or t
cgctgttgcctccgccacctcctccgccgccgcgcgcccctcggagttccgcgccccacnnnnnnnnnnnnnnnnnnnnnnnnnnnnnnnnnnnnnnnnnnnnnnnnnnnnnnnnnnnnnnnnnnnnnnnnnnnnnnnnnnnnnnnnnnnnnnnnnnnnnnnnnnnnnnnnnnnnnnnnnnnnnnnnnnnnnnnnnnnnnnnnnnnnnnnnnnnnnnnnnnnnnnnnnnnnnnnnnnnnnnnnnnnnnnnnnnnnnnnnnnnnnnnnnnnnnnnnnnnnnnnnnnnnnnnnnnnnnnnnnnnnnnnnnnnnnnnnnnnnnnnnnnnnnnnnnnnnnnnnnnnnnnnnnnnnnnnnnnnnnnnnnnnnnnnnnnnnnnnnnnnnnnnnnnnnnnnnnnnnnnnnnnnnnnnnnnnnnnnnnnnnnnnnnnnnnnnnnnnnnnnnnnnnnnnnnnnnnnnnnnnnnnnnnnnnnnnnnnnnnnnnnnnnnnnnnnnnnnnnnnnnnnnnnnnnnnnnnnnnnnnnnnnnnnnnnnnnnnnnnnnnnnnnnnnnnnnnnnnnnnnnnnnnnnnnnnnnnnnnnnnnnnnnnnnnnnnnnnnnnnnnnnnnnnnnnnnnnnnnnnnnnnnnnnnnnnnnnnnnnnnnnnnnnnnnnnnnnnnnnnnnnnnnnnnnnnnnnnnnnnnnnnnnnnnnnnnnnnnnnnnnnnnnnnnnnnnnnnnnnnnnnnnnnnnnnnnnnnnnnnnnnnnnnnnnnnnnnnnnnnnnnnnnnnnnnnnnnnnnnnnnnnnnnnnnnnnnnnnnnnnnnnnnnnnnnnnnnnnnnnnnnnnnnnnnnnnnnnnnnnnnnnnnnnnnnnnnnnnnnnnnnnnnnnnnnnnnnnnnnnnnnnnnnnnnnnnnnnnnnnnnnnnnnnnnnnnnnnnnnnnnnnnnnnnnnnnnnnnnnnnnnnnnnnnnnnnnnnnnnnnnnnnnnnnnnnnnnnnnnnnnnnnnnnnnnnnnnnnnnnnnnnnnnnnnnnngcaatccgaaggacacacaatggggaatccgtgtcctacctgttcagccatgtcccgctataaatccagaatgggaagtgtccagcaagcctactctgacttctgacttgtttttgttttctggatttttagctgtaggtattcagcaatgataggttaatcactggcaaaagcatcagatctttgtatatgctaagatttattgtttccccttctaaagctcaagatcatttctttccagtttttggggaaatggtggtggttatttggtctttaagtgaactgtcttaaatgagaaacgtttttgtcattttgacttttaacaggtacaggtgatctcttcctttgttctttcagtactttgaggcgacaactttcaagtatataatttcattgtggaagtcatagtttatatatttcgaggttgccaaaggtgacttcacattaaagccttctgtgtaaatatatactgataatgcctatggacatttgggtaaaaccctgtatagaattaattatccttttactttggagtgaaccttggaaaatttataattataataccatggattttgaattttccttttttttttttttttttggataactcagtttcagataaaccatcttggttactgtgcttaatttggaccaaattttatttagcttaatatggacactgacacattttggggggtatacattagacatatcagagcagtgtatttctggatcattttttaaatgacctcttctaaaacataactgtcacttacctgaaatgctgcatcctaaaattccaaaattatattgagcaatcgccaaggcctaaagccaactgacttaaaggtaatcatttcagctaagattaaatttaaagcctaagaatgtatagagctagttttaaaataatgatctcagatttttaaaaaggatataggaacctgcattgtcattctctgaattaagaactgatggtttctatcattatttagccccacctttgtattttaaaatccttcagaatacatttatgaaccaatgcgactggacttagccacacacaatggaaattcagaccttgactatttggtgtttccagttcacaaaggtgatgaagactgtcttgggagcagcttaatcccaaaatttgtacatttcttgctgctcctggcgtggaaacttaagtgagaccaccaaatacattggtcctgtccaattctactgaatgggggtggacctggcatttatctggccaaaaacaggagccagagaaatatgaatataccaaagttgtttgtttagcctccaacttaaattacattagtcaacttatagatactcatatgatcacttttctttttagatactacatcaactagattcaggagtatatcatttgcagtgcttgtattggtttaaaatgtaagattttaagatcctctaacactgtactaaaacatttcaataaaatcattctgactgcgttcaaaaaaaaaaaaaaaaaaaaaagnnnnnnnnnannnnnnnnnnnnnnnnnnnnnnnnannnnnnannnnnnnnnnnnannnnnnnanaaaaaaaannnnnnnnnnnnnnnnngggggggggccgccccaaaaaaaaccccgcggggggggccaatttttttggcgcccccctctttttttttaaaagagggccccctatgaggggggctttttaaaaaagggggcgcggggcggtgttttttaacaccgcggggggggaaaaaaacgcccctctggggactctttggggagagacaccctttctttgggggggggggccaatttgggggacaccctccccccagaattttctacctccccggggaaa

SEQ ID NO: 6915 - DNA, 4211 bp, Homo sapiens
  misc_feature (1376)..(1391): n is a, c, g, or t
cccagctcggaccccggacggcgcgcgcccccgaagccccggatcccagtcgggcccgcagctgaccgccagattactgtgcatcccgaatcacgaccacctgcaccctcctgccccggcccgccccccaagtcctcaggcacccagctccccggcgccccggatcctcctggaccggtccgtccagattcccgcgggaccgacctgtccgcatccccaggaccgccgggctcggtgcaccgcctcggtcccggagccgcccgcctggattgcattccctcctctcctggatctcctgggacccgacgcgagcctgccccggagcccgccgagcgcaccctctctcgggtgcctgcagccccgccggcgcggcccggcccggcgcggcccggctcggctcctagagctgccacggccatggccagagcccgcccgccgccgccgccgtcgccgccgccggggcttctgccgctgctccctccgctgctgctgctgccgctgctgctgctgcccgccggctgccgggcgctggaagagaccctcatggacacaaaatgggtaacatctgagttggcgtggacatctcatccagaaagtgggtgggaagaggtgagtggctacgatgaggccatgaatcccatccgcacataccaggtgtgtaatgtgcgcgagtcaagccagaacaactggcttcgcacggggttcatctggcggcgggatgtgcagcgggtctacgtggagctcaagttcactgtgcgtgactgcaacagcatccccaacatccccggctcctgcaaggagaccttcaacctcttctactacgaggctgacagcgatgtggcctcagcctcctcccccttctggatggagaacccctacgtgaaagtggacaccattgcacccgatgagagcttctcgcggctggatgccggccgtgtcaacaccaaggtgcgcagctttgggccactttccaaggctggcttctacctggccttccaggaccagggcgcctgcatgtcgctcatctccgtgcgcgccttctacaagaagtgtgcatccaccaccgcaggcttcgcactcttccccgagaccctcactggggcggagcccacctcgctggtcattgctcctggcacctgcatccctaacgccgtggaggtgtcggtgccactcaagctctactgcaacggcgatggggagtggatggtgcctgtgggtgcctgcacctgtgccaccggccatgagccagctgccaaggagtcccagtgccgcccctgtccccctgggagctacaaggcgaagcagggagaggggccctgcctcccatgtccccccaacagccgtaccacctccccagccgccagcatctgcacccnnnnnnnnnnnnnnnnaccgtgcagactcggactctgcggacagtgcctgtaccaccgtgccatctccaccccgaggtgtgatctccaatgtgaatgaaacctcactgatcctcgagtggagtgagccccgggacctgggtggccgggatgacctcctgtacaatgtcatctgcaagaagtgccatggggctggaggggcctcagcctgctcacgctgtgatgacaacgtggagtttgtgcctcggcaagtctgggcctgacggagcgccgggtccacatcagccatctgctggccacacgcgctacaccttgaggtgcaggcggtcaacggtgtctcgggcaagagccctctgccgcctcgttatgcggccgtgaatatcaccacaaaccaggctgccccgtctgaagtgcccacactacgcctgcacagcagctcaggcagcagcctcaccctatcctgggcacccccagagcggcccaacggagtcatcctggactacgagatgaagtactttgagaagagcgagggcatcgcctccacagtgaccagccagacgacgggtggctgacccggaatgcttcggcctgacgcccgctatgtggtccaggtccgtgcccgcacagtagctggctatgggcagtacagccgccctgccgagtttgagaccacaagtgagagaggctctggggcccagcagctccaggagcagcttcccctcatcgtgggctccgctacagctgggcttgtcttcgtggtggctgtcgtggtcatcgctatcgtctgcctcaggaagcagcgacacggctctgattcggagtacacggagaagctgcagcagtacattgctcctggaatgaaggtttatattgacccttttacctacgaggaccctaatgaggctgttcgggagtttgccaaggagatcgacgtgtcctgcgtcaagatcgaggaggtgatcggagctggggaatttggggaagtgtgccgtggtcgactgaaacagcctggccgccgagaggtgtttgtggccatcaagacgctgaaggtgggctacaccgagaggcagcggcgggacttcctaagcgaggcctccatcatgggtcagtttgatcaccccaatataatccggctcgagggcgtggtcaccaaaagtcggccagttatgatcctcactgagttcatggaaaactgcgccctggactccttcctccggctcaacgatgggcagttcacggtcatccagctggtgggcatgttgcggggcattgctgccggcatgaagtacctgtccgagatgaactatgtgcaccgcgacctggctgctcgcaacatccttgtcaacagcaacctggtctgcaaagtctcagactttggcctctcccgcttcctggaggatgacccctccgatcctacctacaccagttccctgggcgggaagatccccatccgctggactgccccagaggccatagcctatcggaagttcacttctgctagtgatgtctggagctacggaattgtcatgtgggaggtcatgagctatggagagcgaccctactgggacatgagcaaccaggatgtcatcaatgccgtggagcaggattaccggctgccaccacccatggactgtcccacagcactgcaccagctcatgctggactgctgggtgcgggaccggaacctcaggcccaaattctcccagattgtcaataccctggacaagctcatccgcaatgctgccagcctcaaggtcattgccagcgctcagtctggcatgtcacagcccctcctggaccgcacggtcccagattacacaaccttcacgacagttggtgattggctggatgccatcaagatggggcggtacaaggagagcttcgtcagtgcggggtttgcatcttttgacctggtggcccagatgacggcagaagacctgctccgtattggggtcaccctggccggccaccagaagaagatcctgagcagtatccaggacatgcggctgcagatgaaccagacgctgcctgtgcaggtctgacaccggctcccacggggaccctgaggaccgtgcagggatgccaagcagccggctggactttcggactcttggacttttggatgcctggccttaggctgtggcccagaagctggaagtttgggaaaggcccaagctgggacttctccaggcctgtgttccctccccaggaagtgcgccccaaacctcttcatattgaagatggattaggagagggggtgatgacccctccccaagcccctcagggcccagaccttcctgctctccagcaggggatcaccacaactcacacttgtctgttcttcagtgctggaggtcctggcagggtcaggctggggtaagccggggttccacagggcccagccctggcaggggtctggccccccaggtaggcggagagcagtccctccctcaggaactggaggaggggactccaggaatggggaaatgtgacaccaccatcctgaagccagcttgcacctccagtttgcacagggatttgtcctgggggctgagggccctgtccccacccccgcccttggtgctgtcataaaagggcaggcaggggcaggctgaggagttgccctttgccccccagagactgactctcagagccagagatgggatgtgtgagtgtgtgtgtgtgtgtgtgcgcgcgcgcgcgcgtgtgtgtgtgcacgcactggcctgcacagagagcatgggtgagcgtgtaaaagcttggccctgtgccctacaatggggccagctgggccgacagcagaataaaggcaataagatgaaaaaaaaaaaaaaaaaa

SEQ ID NO: 6916 - DNA, 2922 bp, Homo sapiens
ttttttttttttttttttttttttttttttttttttttttttcacttcccatgagcatttttattaaattgaaacaagttgttgattcgataattacaagacttgtacaaaaattcacagcgcctgtgaggagcctttggctggaactggtgacacctgtgcctctccggacagaggaaggaagtcccaccccgccttccagcagcagcgagcctgtgtctggcattccctgttccgctgctcccaccctcactgtggggcagcagttctttaggaacattcagctgtcaaaggtgagaaccagccccacaggcctgggcctcgcaggcttaaggagcacttgttggcactgttagctcagcacctctcccagctccagcccattggctggagaggaaaagggcagaaaacacaaatctcactctagaaacacatacacacacctactacacagatgataaaatcccacaatcgtatctgttcatgtttctgggttttgcactgaacagagattggaagggagtaaggactctctcccttctgcttaacattcacatcaggaaaaagaagaaaacaaagttgccctttcatcttcatctgcttatttcagaggacacacggaggcagactgaccgagcagtggggcttcatcttcattcttgcacttctcaccctacaaccatttagcaacagaaaccgtggaaagcgctggctacggggctccaggcagccaccccccttattgggcaaaggagttaaaaagagcatcaccacgacctcgctactggtttttggcctgtctgagggagagagttcccgcggagccggcctgggcgtggcccgcagccctactgctgggcctgcctcttgcagtagttgctgtaggcctcctcgaacatggccttgcaggggaagcgggccttcagcttggagcagatgaggaaggagccccccatcttcctgtgcagggagtaggtttcctcgggtggggggacgagacggtgcctcagcatgacgggaatcaggttgtggatcttctcggtggtgctctgagtgccaaaatcaaaaggctcatcagaggcgaaggcctcccccaggatgaggatggcatccaagtgggcgtcttccatgaccttgacctcgtagccggtgaggaacttcatctctatggatttcgcccgcacagtctccctgtccctgtcggcagcagccctgatgatctgaatgtagaggtcggtgaaggatctgtcatattcccgcgttgccccaaaatccaaaagagccaccttgtgctgctgggggtcatagaagaagttggaccagttggggtctgtttgcatgaagtggaactcgaacagctccctcaggcacagaaccaggatgttgtagcagatctcgttccgaatctcctggctgagcccttcggcctggtccagggggaagccagacaccagctctgtggtcagcacatgtgggctgcagagctcatccacaatctcaggcacatagaagaaggggtggcccttcagcaggtccctgaacttgcgggcacaggcggcctctcgctggtagtcacactccagggccagctcccgcctcagcacgtcgatcaggtgctcggggaacaggccttctggaagcatgttgctcatgttcaacacggccatgaggttgttgacatcactgttgatgctctgggccacgccagggtactggatcttcatggccacctcgcggccgcccttcattcgggccaagtgcacctgcccaatggatgcggcggcgaagggccgctcctcgaagtattccaacttgtcccgccagttggggcccaggtcgttgttgagagttttcatcatctgcttcagtggcatgaagtccgcgctctgccgcacccgctcgaagatcttagccaggtgggggttgataaaggcatcatcctggatgctcagcatctggcccagcttgagtgccgcaccacgcaccttgcagagcgtgcgcacgatccgctctgcattggcctcggacaggaaaggactggaacccagcacggccttcttccctgaggggtcctcggagcgcaggctcttcttggcgacctctgccagtgccccgaagcccaggcccacggccagacctccgaagttggccagccggccaatcctcgtcacaggcaccttccgctcccgggcatgctcgctgagcgtctgtttgtgctgcttgttctcggggcgagccttagcctgccgggccttctcaatgtcctcggctgtgaggcccccaacaggggattggtcctggtggaagaaccttcgctgaaagcccatggcagagaatgagtctctggggtttgcaaagagcctcccgttggccctgcccagaggggaggaggcctggccggggaacccggcttctctaaagggtccactggccacgtaggcaggagctgggccctcgctgtgggcatgacccagggatgggggcgctgactggtcgggagcggaggctgaagagaagtctgtggaggctccggctgcatgcgggactgagaagtggaactccccttctgggccgccgaagttctcagcaaaatattcttcatgtttatcctgaccctgcaccttccccaagaacatgccaatctgctccacagccgtggactgcagggccctggccgccatgatcagctcccctccgatgcccaagtgctgcaggtgggtttccacggccgcctgggtcagcttgacaaggcctttagccaccatgatggtgtctcccaatatggcagccatccttcagggctggctgcaggaagctgggatccgcggtcaccttctagccgcctccgcgcccgcctctgcgcgctggccaccgcgctgacgcccgccacgcgctccggatctgtttaccaaccctcgtgcc

SEQ ID NO: 6917 - DNA, 2008 bp, Homo sapiens
  misc_feature (504)..(518): n is a, c, g, or t
  misc_feature (1024)..(1076): n is a, c, g, or t
ccggcccggcccttccttcccctttcccgcagtcgttgcctcctcctcccctacctcctcctccccttcctcctcctggccgcttagtctcacacccgccgggccgttgttcccgagacgttgttgagtcccctgtgtcctcttctgggtggaggaactgcaatgtctggtggagaacagaaaccagagaggtactatgtgggtgtggacgttggaacaggcagtgtccgtgcagctctggtggaccagagtggggtcctgttggcttttgcagaccagccaattaagaattgggagccccagttcaaccaccatgagcagtcctccgaggacatctgggctgcgtgctgtgttgtcacaaagaaagttgtacaagggattgatttaaaccaaattcgaggacttgggtttgatgccacgtgttctctggttgttttggataagcagtttcacccattaccagtcaaccaggaaggggattcccatcgaaacgtcatcatgtgnnnnnnnnnnnnnnnagtcagtcaagttaacaggatcaatgagaccaagcacagtgtcctccagtacgtcgggggggtgatgtctgtggaaatgcaggccccgaaacttctgtggctgaaagagaacttgagagagatttgctgggataaggcgggacatttctttgatctcccggacttcttatcgtggaaggcaacaggtgtcacagcacggtctctctgctccctggtgtgtaagtggacatattcagcagagaaaggctgggacgacagtttctggaaaatgattggtttggaagactttgttgcagataattacagcaaaataggaaaccaagtgctacctcctggagcttctcttggaaatgggctcacaccagaggcagcaagagaccttggccttctccctgggattgcggtcgcagcttcactcattgcttccgaggtttcctagggactaggaagtggatttgggggccaaagtgtgaaaaaggggcaccggccctcatttggggaagggnnnnnnnnnnnnnnnnnnnnnnnnnnnnnnnnnnnnnnnnnnnnnnnnnnnnnagacccgatttttgtaccaggcgtctgggggccttatttctcagccatggtacctgggttctggctgaatgaaggtggtcagagcgttactggaaaattgatagaccacatggtacaaggccatgctgcttttccagaactacaagtaaaggccacagccagatgccagagtatatatgcatatttgaacagtcacctggatctgattaagaaggctcagcctgtgggtttccttactgttgatttacatgtttggccagatttccatggcaaccggtctcccttagcagatctgacactaaagggcatggtcaccggattgaaactgtctcaggaccttgatgatcttgccattctctacctggccacagttcaagccattgctttggggactcgcttcattatagaagccatggaggcagcagggcactcaatcagtactcttttcctatgtggaggcctcagcaagaatcccctttttgtgcaaatgcatgcggacattactggcatgcctgtggtcctgtcgcaagaggtggagtccgttcttgtgggtgctgctgttctgggtgcctgtgcctcaggggatttcgcttctgtacaggaagcaatggcaaaaatgagcaaagttgggaaagttgtgttcccgagactacaggataaaaaatactatgataagaaataccaagtattcctgaagctggttgaacaccagaaggagtatttggcgatcatgaatgatgactgaacagggcttgcaggtgctgatgccagaagcttctgtgccattgcattaaagacttctgtcatttgatccatgttcaagacccttgaggtattgtttcatcatttctgtattgtctttcaataaagaaaacaaacatgtgcaaccaaaaaaaaaaaaaaaaaaaaaaaaaaagaaacttcctcactaa

SEQ ID NO: 6918 - DNA, 3153 bp, Homo sapiens
  misc_feature (1106)..(1127): n is a, c, g, or t
ttttttttttttttttttttttttttttttttttttttttttttcacttagaaatgtttatctttatttcagaataacctataggaccatatccagataaaggtcctatcagtacttctcatgagttatcactcagttttgcttctagagacccaccagtcaaagcagtaaaactaaatctccttaacaaaactgaagtcttcagaaaagcagtgctaaatgggtgatgaaaccttacttaaccactccctgtatgcaagatgacttattttgcattcctaaaacttctactttgattctcaatatatccgttttttttttctttttttcaaaagcattattttggtgaaaatcccaatatatgagtttaaaaaaaaatcattaacatcattaacagtactttaaatcaattactccttttgcctgcaacagggtccagcaaagccttaccacctcaagcaaacccactatacctatctatgctcaagaagtagtttggctactgaagacatgctggtctcttccaagtctttcctcaggatccacacatcagacattcatctctattctccaaagagcacaccatggctgctgtgttcctctccttctcttcttcctcttttgataccttttctttatcttttagcttctccttatttagagtgaactggattggattagctgctggtcttgtccttaaataatacatcccagtcttcaaaccctgcttccagccgtagaagtgcatactagtgagtttgccatagttaggctcagcaatgtggatgttcaaagattggctttgatcaatgaaagcacctctctcagctgccatcttgagaacagttttctgagagatttcccacacagttttataaagttgcttcaggtcatcaggaatttctggtatgctctgaatagagccattgcatgcaataatctggtttttcatctcttcatgccataggccccgctcggtaagatctttcaataagtgaggatttacaatctgaaattctcctgacaagactctgcgagtatagatgttgctggtgtaaggttcaatggactcattattccccaggatctgagcagtggaagctgtnnnnnnnnnnnnnnnnnnnnnnaagtaaactgtttcttataccatactttgcaatcttctccttgagaaccttccagtcccataggtctgtaggagtaacattccacatatcatactgaagaattcctttgctaactggagagccctcataggtttcgtatgggccctgctccttggcaaggtcacagctggcttccagagcaccataataaatagtttcaaagatctgcttattcagtaactgggcttctgcactctcaaaagggtatctcatcaggataaaagcatctgccagaccttgtaccccaattccaatggggcgatggcgtttatttgataggcatgcctctggtacaggatagtagtttatatcaataattttattcaagtttcggacaacgactttagtgacttcagccaacttcttaaagtcgtatgtgtgttctgatgtgacatacatattcagggccagggaagccaaattacaaacagcaacctcatctttgctggtgtactccactatttctgtgcacaggttgctgcatttgatggttcccaggttctgctggttgctctttcgattacaggaatctttgtagagcatatacggggtgcctgtttccgtctgagactcaatgatggcataccaaagctgctgagcttttacaactttgcggacacgaccttgtttctcataacttgcatatagtttctcaaattcctctccccaaacctcatccagaccaggacactcatttggacacatcaaagaccagtcctgattagtctccactcgtttcatgaagagatccggaatccaaagagcaaagaaaagatctctggcacgctgctcttcctttcctgtgttcttctttaaatcaaggaattcaaagatgtctaaatgccaaggctccaggtaaatagcaaatgccccaggacgcttgttcccaccttgatccacatatcgagctgtgttgttatatactctcagcatcggtacaaggccattggaattgccattagtcccagcaatgtagctgccagtagcccgaatacaactcacagcaacaccaattcctccagcagacttagaaatcaatgcacattgctttagagtgtcataaatgccttcaatgctgtcatctttcatactcagaagaaaacagctagaaagttgtgggcggttggtaccagcattgaagagagtgggcgaagcatgagtaaaccacctctcagaaagaagattatatgtttcaattgctgcatcaatgtcttctttgtggatcccaacagatactctcatcaacatatgttgtggtctttcagccacttttccattgatcttcaacaaataagaccgctctagcgtcttaaagccgaagtaattgtaagagaaatctcggtcatagataatagcagaattcaggcgatctttattggccagaacaatatccaatgttgacttggccaccatgggagagtgtttgccattatgtggatttatgtagttatagaggtcttccatcacatcactgaacactttctttgtttctttgtgcaagttagagacagcgatcctggctgccaggatagcatagtcagggtgcttagtagtcaaggttgcagctgtttcagcagccaaagtatctagttccactgtggtgaccccactgtacaagccttggattactttcatggtgatctgagcaggatcaacaaaatccatattgagtccataacaaagcttctggattcgagatgtaattttgtcaaacatgactcgttcttggcggccatctcgcttgatcacatgcatcgcagctagtggctgaggctctgaaggatccaagactggactgcggctctaaagcgccggcgggatcgagaaggtgacagagtgggaagggttaggttccaggcgctgctcaggggaaagaactggagttggagccagacagcactttcttcagagcagaggcgcaacaatccaaatccccttcccgcgcccgccacccgtgacgcacaaaggggcgcgacggggttcgaat

SEQ ID NO: 6919 - DNA, 824 bp, Homo sapiens
cctctgtctaaccttacatgaaaaaacccgtttccaacgaaggcctctaaaaggccaagaaatccccttgcagactttacaaacagagtgtttcctaactgctctatgaacagaaaggttaaactctgtgagttgaaccaacacatcacaacgcagtttgtgggaatgattctgtctagttttgaaacgaagatatttccttttctgccgttgaccttaaagcgcttgaaatctacacttgcaaattgcacaaatagagtgtttcaaatctgctctgtctaagggaacgttcaactctgtgagttgaatgcacacaacacaaggaagttactgggaattcttctgtctagccttacatgaaagaaaacccgtttccaacgaaggcctctaagtggtcaaaatatccacgtgcagactttacaaacagagtgtttccaaactgctgaatgaaaagaaaagtaaactctgagagttgaacgcacacatcgcagagcagtttctgagaatgattctgtctagtttttatacgaagatatttccttttctgcctttggcctcaaagcgcttgaaatctccacttgcaaattccacaaaaagagtgtttcaaatctgctctgtctaaaggaaggttcaactctgtgagttgaatacacacaacacaaagaagttactgagaattcttctgtctagcattatatgaagaaatcccgtttccaacgaaggcatctaagaggtccaaatatccacttgcagactttacaaacagagggtttccagaatggctgtatgaaaagaaaggttaaactctgtgagttaaacacaca

SEQ ID NO: 6920 - DNA, 611 bp, Homo sapiens
tttttccttaggatttttttagaatagatttcttaggtttaaatttttatgatgcaagtatattttcgaggaatggaaatataggctgaagagccagaacaaacacctaaaattcaatactaataacttcaagccattatatgaaggtttcaaataggtgatttaaagcagtgcaatgcattttatgctaattttcgttatgctatttgaaaaataaaacccttcttaatgctcaaaatttgaaataatgcaaatgccgcagatttgtttttagcctgaattatacactgcactgatagtatggccacacggtggcattgccgtggctcctgagcagcagccctgcctgcttgcctcaatgccttgcagccagcacttgctcagcccgtgggacttctaacagcactaatgttggttttgtagttattttcctttttacttttgtaatgatttaacttttttcacaccctgtaataagcgtaatagaagcattcattagtaacttccatagttagaaaattctgggtaacaaaatgccctaaaggatgccggacattgtcacagtatgttagagtgctgttaatttggaagagagaactatgaaaaaaaaa

SEQ ID NO: 6921 - DNA, 2732 bp, Homo sapiens
caacagtccccaggcatcaccattcaagatgcatccaggggtcctggctgccttcctcttcttgagctggactcattgtcgggccctgccccttcccagtggtggtgatgaagatgatttgtctgaggaagacctccagtttgcagagcgctacctgagatcatactaccatcctacaaatctcgcgggaatcctgaaggagaatgcagcaagctccatgactgagaggctccgagaaatgcagtctttcttcggcttagaggtgactggcaaacttgacgataacaccttagatgtcatgaaaaagccaagatgcggggttcctgatgtgggtgaatacaatgttttccctcgaactcttaaatggtccaaaatgaatttaacctacagaattgtgaattacacccctgatatgactcattctgaagtcgaaaaggcattcaaaaaagccttcaaagtttggtccgatgtaactcctctgaattttaccagacttcacgatggcattgctgacatcatgatctcttttggaattaaggagcatggcgacttctacccatttgatgggccctctggcctgctggctcatgcttttcctcctgggccaaattatggaggagatgcccattttgatgatgatgaaacctggacaagtagttccaaaggctacaacttgtttcttgttgctgcgcatgagttcggccactccttaggtcttgaccactccaaggaccctggagcactcatgtttcctatctacacctacaccggcaaaagccactttatgcttcctgatgacgatgtacaagggatccagtctctctatggtccaggagatgaagaccccaaccctaaacatccaaaaacgccagacaaatgtgacccttccttatcccttgatgccattaccagtctccgaggagaaacaatgatctttaaagacagattcttctggcgcctgcatcctcagcaggttgatgcggagctgtttttaacgaaatcattttggccagaacttcccaaccgtattgatgctgcatatgagcacccttctcatgacctcatcttcatcttcagaggtagaaaattttgggctcttaatggttatgacattctggaaggttatcccaaaaaaatatctgaactgggtcttccaaaagaagttaagaagataagtgcagctgttcactttgaggatacaggcaagactctcctgttctcaggaaaccaggtctggagatatgatgatactaaccatattatggataaagactatccgagactaatagaagaagacttcccaggaattggtgataaagtagatgctgtctatgagaaaaatggttatatctattttttcaacggacccatacagtttgaatacagcatctggagtaaccgtattgttcgcgtcatgccagcaaattccattttgtggtgttaagtgtctttttaaaaattgttatttaaatcctgaagagcatttggggtaatacttccagaagtgcggggtaggggaagaagagctatcaggagaaagcttggttctgtgaacaagcttcagtaagttatctttgaatatgtagtatctatatgactatgcgtggctggaaccacattgaagaatgttagagtaatgaaatggaggatctctaaagagcatctgattcttgttgctgtacaaaagcaatggttgatgatacttcccacaccacaaatgggacacatggtctgtcaatgagagcataatttaaaaatatatttataaggaaattttacaagggcataaagtaaatacatgcatataatgaataaatcattcttactaaaaagtataaaatagtatgaaaatggaaatttgggagagccatacataaaagaaataaaccaaaggaaaatgtctgtaataatagactgtaacttccaaataaataattttcattttgcactgaggatattcagatgtatgtgcccttcttcacacagacactaacgaaatatcaaagtcattaaagacaggagacaaaagagcagtggtaagaatagtagatgtggcctttgaattctgtttaattttcacttttggcaatgactcaaagtctgctctcatataagacaaatattcctttgcatattataaaggataaagaaggatgatgtctttttattaaaatatttcaggttcttcagaagtcacacattacaaagttaaaattgttatcaaaatagtctaaggccatggcatccctttttcataaattatttgattatttaagactaaaagttgcattttaaccctattttacctagctaattatttaattgtccggtttgtcttggatatataggctattttctaaagacttgtatagcatgaaataaaatatatcttataaagtggaagtatgtatattaaaaaagagacatccaaatttttttttaaagcagtctactagattgtgatcccttgagatatggaaggatgcctttttttctctgcatttaaaaaaatcccccagcacttcccacagtgcctattgatacttggggagggtgcttggcacttattgaatatatgatcggccatcaagggaagaactattgtgctcagagacactgttgataaaaactcaggcaaagaaaatgaaatgcatatttgcaaagtgtattaggaagtgtttatgttgtttataataaaaatatattttcaacagaaaaaaaaaaaaaaaaaa

SEQ ID NO: 6922 - DNA, 9770 bp, Homo sapiens
  misc_feature (180)..(203): n is a, c, g, or t
  misc_feature (2803)..(2833): n is a, c, g, or t
  misc_feature (9446)..(9465): n is a, c, g, or t
gttccaagttgcatgtgcttgaaatagatttaattcttattccccacagtttaggtatttttcattagtacatcaatttgacacactgaatgcaagactattaatcccactgcttctcgcaggaactcaacaatagtgctacgcacagactcagagaagcgctcactggcagaaagtggnnnnnnnnnnnnnnnnnnnnnnnnggagaaagcccctaaaaaactggagtacgacagtggtagcctgaagatggaacctgggacttctaagtggcggagggagcggcctgagagccgtgatgattcatccaagggtggagaactgaaaaagcccatcagcctgggccaccctggttccctgaagaagggcaagaccccacctgtggctgtaacttcccccatcactcacacagcccagagtgccctcaaagtcgcaggcaaacctgagggcaaagctacggacaagggtaagcttgcagtgaagaatactgggctccaacgctcctcctctgatgctggtcgggaccgcctgagtgatgctaagaagcccccctcgggcattgctcgcccctccacttcgggatcctttggctacaagaagcctcctcctgccacaggcacagccactgtcatgcaaactggtggttcagccactctcagcaagatccagaagtcctcaggcatccctgtcaagccagtaaatgggcgcaagactagcttagatgtttccaacagtgcagagccaggattcctggctcctggagcccgttctaacatccagtaccgcagcctgccccggccagccaagtcaagttctatgagcgtgaccggcgggcggggtggacctcgccctgtgagcagcagcattgaccccagtctcctcagcaccaagcagggaggccttacgccttccagactgaaggagcctaccaaggtagccagtgggcggaccactccagcccctgtcaatcagacagatcgggaaaaggagaaggccaaagccaaggcagtggccttggactcagacaacatctccttgaagagtattggctccccagaaagtactcccaagaaccaagcaagccaccccacagccaccaagctggcagagctgccaccaacccctctcagggccacagcgaagagctttgtcaaaccaccctcactagccaatcttgacaaggtcaactccaacagtctggatctaccatcatccagtgataccacccatgcttcaaaggtcccagatctgcatgctacaagctcagcatctgggggccctctcccttcctgcttcacccccagtccggcacccatcctcaatattaactcagccagcttctcccagggcctggagctaatgagtggtttcagtgtgccaaaagagacccgcatgtaccccaaactctcaggcctgcacaggagcatggagtccctccagatgccaatgagcctccccagtgccttccccagcagtactcccgtccccaccccacctgctccccctgctgctcccacagaagaagagacggaagagctgacttggagtggaagccccagagctgggcaactggacagtaatcagcgggatcggaacactcttcccaagaaagggctcaggtaccagcttcagtcccaggaggagaccaaggagaggcgacatccccataccattggtgggctgcctgaatccgatgaccagtcagagctgccttctccccctgcacttcccatgtctctgagtgcaaagggccaacttaccaacatagtgagtcccactgcggccaccacgccaagaatcacccgctccaacagcatccccacccacgaggcggccttcgagctgtacagcggctcccaaatggggagcaccctgtccctggccgagagacccaagggaatgattcggtcaggatccttccgagaccccacggacgatgttcacggctcagtgctgtccctggcctccagtgcctcctccacctactcctcacaaaatgcaatctgagcaaatccggaagcttcgtagggaactggaatcatcccaggaaaaagtggccaccttgacgtctcagctttctgccaatgctaatctggtggctgcttttgagcagagcctggtgaatatgacatcccgcctgcgacacctggcagagacggccgaggagaaggacactgagctgctggatttgcgagaaaccatagactttctgaagaaaaagaactctgaggcccaggcagtcattcagggagcccttaatgcctcagaaaccacacccaaagaacttcggatcaagagacaaaactcctcagatagcatctcaagcctcaacagcatcactagccattccagcatcggcagcagcaaggatgctgatgcgaaaaagaagaaaaaaaagagttggcttcgaagttccttcaacaaagcgttcagtataaaaaaggggcccaagtcagcttcctcatactcggatatagaggagattgctacacccgactcttcagccccctcatcccccaaactacagcatggttctacagagactgcttcaccctccatcaagtcctccacctcgtcctccgtgggcactgatgtcaccgagggccctgctcacccagccccccacactaggctgttccatgcaaatgaggaggaggagccagagaagaaggaggtatcggagctgcgctctgagctatgggagaaggaaatgaagcttacagacatccgcttggaggccctcaactctgcccaccaactggatcagcttcgggagaccatgcacaacatgcagttggaggtnnnnnnnnnnnnnnnnnnnnnnnnnnnnnnnaaggtagccccaggcccctcatcaggctccactccagggcaggtccctggatcatctgcattatcttccccacgccgctccctaggcctggcactcacccattccttcggccccagtcttgcagacacagacctgtcacccatggatggcatcagtacttgtggtccaaaggaggaagtgaccctccgggtggtggtgaggatgcccccgcagcacatcatcaaaggggacttgaagcagcaggaattcttcctgggctgtagcaaggtcagtggaaaagttgactggaagatgctggatgaagctgttttccaagtgttcaaggactatatttctaaaatggacccagcctctaccctgggactaagcactgagtccatccatggctacagcatcagccacgtgaaacgagtgttggatgcagagccccccgagatgcctccttgccgtcgaggtgtcaataacatatcagtctccctcaaaggtctgaaggagaaatgcgtcgacagcctggtgttcgagacgctgatccccaagccgatgatgcagcactacataagcctcctgctgaagcaccggcgcctcgtcctctcgggccccagcggcacgggcaagacctacctgaccaatcgcttggccgagtacctggtggagcgctctggccgtgaggtcacagagggcatcgtcagcaccttcaacatgcaccagcagtcttgcaaggatctgcaactgtatctttccaacctagccaaccagatagaccgggaaacaggaattggggatgtgcccctggtgattctattggatgacctgagtgaagcaggctccatcagtgagttggtcaatggggccctcacctgcaagtatcataaatgtccctatattataggtaccaccaatcagcctgtaaaaatgacacccaaccatggcttgcacttgagcttcaggatgttgaccttctccaacaacgtggagccagccaatggcttcctggttcgttacctgaggaggaagctggtagagtcagacagcgacatcaatgccaacaaggaagagctgcttcgggtgctcgactgggtacccaagctgtggtatcatctccacaccttccttgagaagcacagcacctcagacttcctcatcggcccttgcttctttctgtcgtgtcccattggcattgaggacttccggacctggttcattgacctgtggaacaactctatcattccctatctacaggaaggagccaaggatgggataaaggtccatggacagaaagctgcttgggaggacccagtggaatgggtccgggacacacttccctggccatcagcccaacaagaccaatcaaagctgtaccacctgcccccacccaccgtgggccctcacagcattgcctcacctcccgaggataggacagtcaaagacagcaccccaagttctctggactcagatcctctgatggccatgctgctgaaacttcaagaagctgccaactacattgagtctccagatcgagaaaccatcctggaccccaaccttcaggcaacactttaagggttcggcaatcactgtcacccccggacagcagaacgctggcatcagctatcttagctcctcctctcccctctcctctttcagagcactggctctccagccccaggaggagaacaggagggaggaggagatgaaagaggagggacaggttcttggtgctgtacctttgagaacttcctaggaaggaatggtggggtggcgtttgggaacttgtgccccctaaacacatttactggcctcctctaatgactttggggaaaagatgattctgggtctttcccttgacttcttgtttcaattacaaactcctgggctttctggggaggggttcagaaaacatcaaaacactgcagcagttcctaaatgattctcacaagcaaccctgagagagacagtcttgtgagggagatctgggggaggcaggaagctcctcagattttctcacagacccttcccaattccatcaccactgccaacaactcctcccccagagatctggctggagcccagaaaaagaagcatgtggtttaaaaaatgtttaaatcaatctgtaaaaggtaaaaatgaaaaaaaaaaacaagcaaacaaacaaaaaacaatggaaaagatgaagctggagagagaggaaccagttgccaaggtagagagctgcccgctcctgccctctggatgacataggggacatcaacaagacggctgccaacctgagaagtcaccaaaccacaaaaataaccttacagccttcagggaaagactaccagctctgtctttctaccctctaatttaacaatgcataagagtcaataaaccctacttttttatttttggtttttattttgttttcatttttttctcccatttgcctatttatttttttgtttcccttttttttttctttttccgtttttccatttcctcacatgtccacgagatgcttgggttgcttttccaggggctagtttggcttttccaagtgggttttctttggagaatctgatgccatgcaattggcatgacacctgccatgccactatctttggcatccatggggcttatatgagacatgaagcattggctcagaagtagagggagaagaggaacccagttcccttgacttcccttttgagagcacacgttctgctgggtagctcaattgccagcctctgtcatgagaaggtatagccccatcttgatagaagagttactccgagctttatcatggaccagaggaaaaccagaaaactgaaaacattcctctgtcttgtggccagtttggcctttcactgcactattctgatggtgcctgactgaatccaaatatcctagctggctcttactatttttcacaaatgagtattcacatataagagatgaacatccatgtgagatcatcccaatcagaatataagactcaaggagtttgacttggtggccaatacctgccttccaaagagatcctacctttgcagatttgctcctttcccattgccttgaaggtctggcaatccctgttctttcatttgacaagtacttactgagtactcactatatacaaatcattaggttaaaacagacacacacacacacacacacacacacacaagacctgggcccttaagtttacagtccagcaggaaatgttaacctccattcagctacgcccccttgttatctagaccttcgggatcatctaagaaatgtagctgaaacccaaggagccagctagaaagaagcttttgattagatgcacaatacattgggggcagaagatctgggatcaattaagatggagcctgaaggactatggaatcttgcttgtcaggaatgggcaagtctacttcctgccatttctgaaagccccgcgggaccagcttctaggctgagctgcctagtaggctgaagcttcaggactctgcaggtcaaggatatgtgatgagcaccggcctaagtgtttgctcttcagattcctaagtagcacaagactttatcagaatctataggcataccaacctggatcactcttccacccaaccgaggagtagatgcatctgaatcttcatatcggtatattaagtccaaaagatggtccgggctgcccctcacaaaagcttctgcatccacatggtaagctcccatggatgacagggttctgtatgatggagactattattgctattgctgctaattccatgagctgtgaagatccctaaccaactcagctgtaacatatgcaattctgtggtgggaagaggctgtgtgtccaaggatggtgctgaaatcactgccttaaggtctctgctgtgcagaatgaggaggcccccgagctggctgttctaacttagaaggaagagaagactggatgggcctgcttgggatctaggcctcttctaaaccctatcctaagctccagttccatggcaaggctcagacttttaatgccatcttaatctgatggttgagcgcttcactctattttctggtgctgcccagccagtgccttctgccatggatgttactggctacttgagaaaaaggagaggggagaaccccttctttcattccaactgcctccgaccccaaagggattcttggctctctggtaaccatggataccaccatgaattttatttggatcctcagcaggttgattctggaggcctcatgctatgactttttatttctcttcctgggatccaccaccctctactctcagctgactgctgcatttaggccaggtctccaattgctttcctccagaaagtgtgttcccgtctagtgaggtagtattgaagcctcggctttccctctggagcctgggaccctgtttacagttgcacatctgggcccctcactgtggggattgatcattctcatgaaggaatcacagttatatggcaactgcagaaggctgagcctcctcatggtgctataaccccttgggacactcatccagacttctctgaagcagaaaacctgagctccccactcactgccctagaatttatggcaaggagcaaatctacagcattctctcccacctacgtcctgcttcttggttgagactactgggatccttcagaaaagaaacactgggtcccatagctaaattctcaaccgccaggcaccttcagaagaatccagcctaatactggaatttgtgctattatcttcctctccagccccccaactccatccctcaccacagttgtctaggaaatgacatgaattcaatatctaatgtcaaccaatggggagagccacaactccaggagaggttcctgagctgagtcccttaatttctggatgaagaagaccaacaagttttgtccaatgtatttgtttctcagaccttgcctaggcactaaaaataaaatactaggtcattggaggctaatgtgggacctgatgtctgcgtgtgtgtatgtgtgtgtgtgtgtgtgtgtgtctccctctctcacacacacaagagcagtttgctgttgctgtttcctaccttctgaggcttcaaagtattttttaaaatctatgctttgtggcagctctacggtgcttatctctgtctttgtgtcaatccttaagtacccatgtctttttcatgtctaaccattgggaaggtagaggctggcagggaagacaaatctgctacaagtccatgggaagaccctacaatgaaatgttcattggttggtatactgttttagtcttgaattgccaactttccaactgatctatccatattccttaagtactaaagacaaaatagagggcttctttttctctcttaatgtcttgccttctggttttcctggtttgcaagactaagtgtacctaatctcaccatctcttcacttctagctctctgaaacaagggtcacactactcagagggataaccccttacagtggtctgaggagtaactatttcctaaagtattctaaaagagtaggaagagagaaatggtagcctgctgcttctcacagacacctcacatcctcacttgggatggcatccacatagaaaccctgcatttaggtaaaatttgcctgactgaaggggactcagtcctccaaatcaaggtcaagaagatatctgcatgagaccttaagaactctttattgccattatttggagagggcgggggaattgtcctaatcacacatttaacacagggaataagtgctgaagtgacccagatcaccaagcgcagttcctcatcatactttatttttgctttccttattccttggcactgactaagctaaagttaagaagccgacttcataagccaacccctgtgatgggatggaaaaatgggcttttgcagagggtttattaatagagatggatatactactcacaagttgtggctcatggctccactgagaaggccatagtaataaaatgatcttatgaacactgttccccaaaggccaaagcctgaagatattgccccttataatccaatcagccttatattttaataagtcctgaatcaacctgactacggatatatggggccaccagggtgcatgggtgcatgtctgctcagcctagccctggaagtgagcactgccggccacagatcctgggaaaggtggtagtaacccagaagatgtagccttgaagggaggatacctatcaaaatgccaaagctgcagggacacgaagacggttgaaaattcaacctatgtatactagatccttccagtttgatggtttggtcattcttcttcatgattataccatggagaattttctgtgacaagggtggtcatggaagtaagtgagtgatcccctggtttctcattccttaaagcagtggttcgcaaagtatggcacaagaccagcagcatcagcagcctttgggaacttgttagaaacgaaaattctcaatcccatcccagatctgctgaatcagaaactctaatgagaggacccggcaatccacgttttaataagccctcctggtgattctgatgcacactaaattcaactgttttaaagggaaagccctttatagtattggagttcccacactgagaggctttggggcccnnnnnnnnnnnnnnnnnnnnttgtcattcagactttaacattaatttcaaagtcacctttctcatgcttccttgtgtttctgtttttccatttatgattttaacaaagaaaggtatgtgtgcttttgggtggaagttaggagaatgtttgtgtctttcctagttgaatacaaccttcagagaaaaaccttatgccttggaaattactacctggcacacaaaggggcttcaacaaggaaaagcagttggaggtctcttccagattgctcttctgccgaattatttgtatctattccgagctgattatgtaataggatggaaaaagt

SEQ ID NO: 6923 - DNA, 1505 bp, Homo sapiens
  misc_feature (30)..(30): n is a, c, g, or t
  misc_feature (77)..(77): n is a, c, g, or t
  misc_feature (82)..(82): n is a, c, g, or t
  misc_feature (113)..(113): n is a, c, g, or t
  misc_feature (120)..(120): n is a, c, g, or t
  misc_feature (130)..(130): n is a, c, g, or t
  misc_feature (132)..(132): n is a, c, g, or t
  misc_feature (151)..(151): n is a, c, g, or t
tccaggggccgcgggctgagggtgcggcanttcatcccagggctccactggccccgtcaccgtctgtcgcgtccctngtccnacctccctcctgcccggcagtcccgcccgtncccccancctggcgagnanccgtccaacagtagccccngggccagctcccaacagaaagggctgacgtgctccaggactcaggggcgctccatgggaggacgaaggaagcccagccagccaggagccactcctcacacctccaagtgtggccaagtgggccctgaggccaaggacttacttgctcttcctggccatctctccctttctggaggaggcccggggcctgtgtacaccaaggctgacctcgtgctgcctgctgggacccagccctccctgccgctcccctgtgagcccagtccaccgtgggcgcccagggccagggacgggccagcgcccggctgcatcgcgaggttgggagtcacagtggctgtgggcctggacgggcacagccagagcaggggcccatgggaagggcaagggatggggaagcctgggccggccccttccctgctcccaaggcaggtgtccaggtggcgggagcagcaccaaggacagccaggcttacccggtgggaggagcaggagcagagcaggtggcagggaggaacccctggcgaggcagggagcactgaagtagggaagcagcaaaaaatacaggctcccaacgtggctccactgtctcatgaagtgtcaaaaatttaaaaatacacctcactttctattcagcatcagctattgaaatggaattctccttttctattcccgttgtacatagccccacgccctgcctccggctttgtcctctgtacagagccccctgtcccctctgctgttccggacccttttcttgcagcagctcaaccccccgactcactcagatccccaggactgcagccgagccccgggcttcctttcttaccattctgtatgcttccaaggtgtgaccattcaaactaacagtattattaagattattaataaagatttctttcttcaaaccagaaaaaaaaaaaaaaacaaaaaacaacaaaaaaaacaaaaaaaaaaacaaaaaaaaaaaacaaagaagagggggcggcgcgccacaccaaggagattccccccggggggcgccaccggaagccagacccccacttttgttgagtcaaaaaggggtccccaaaggaggggcggccctataataaacagggggcccgcggcgccggcgggtgtataaaaacagcaggctcttgactgagaggaaaccacgctgcgccacctctgtaagaacacactcttgtgaggagaaggaccaccatactactgctgtgcgggggcgcgccacctcttgctgtcctgtctttccccttagaaggattttaacgcgcccagggaaaacgactaccacgtcaagagtacataggggtgaacacaacggaaattctcctgcgcagtaaaagttgcgctaaaggt

SEQ ID NO: 6924 - DNA, 2610 bp, Homo sapiens
agatcctgcccatcccctgggctcacaggagatgccccttggaggcctccaggccagcgcccacccctgtggctgtggcatcctctccgatggcaggcacagacctggaccctgttggcgccagcccagcctacagcggccttggcggcgaagagctctgcggccccaccccatgggtgggacctgctcctccggcattgcccctgccccgcctgccctggggaatgggggctcatctccacccccaccccactctcaggcctcacaaagccaagttggagaagcagctgtcccgctgtgagcggttggagggtggggggtcttgttgcagttcgggtagcccccctcctccgccctctccccctgagagccgcggccccttccgcagccaggcgcttgctcctctctctcttccttcctcccttcctccctccctccttcccccgcccccgcagtctctctctctctctctccttcccccaaccctccctccctcctccccccgctccttcccccaaccctctctctctctccctctgtctccctccctctctctctcccgccgcgcccgcctcccgcccgccctcgctccctccactcctctcccctcccctccccggcactgcagcaccagccgtctgcagctccggccgccacttgcgcctctccagcctccgcaggcccaaccgccgccagcaccatggccagcaccatttccgcctacaaggagaagatgaaggagctgtcggtgctgtcgctcatctgctcctgcttctacacacagccgcaccccaataccgtctaccagtacggggacatggaggtgaagcagctggacaagcgggcctcaggccagagcttcgaggtcatcctcaagtccccttctgacctgtccccagagagccctatgctctcctccccacccaagaagaaggacacctccctggaggagctgcaaaagcggctggaggcagccgaggagcggaggaagacgcaggaggcgcaggtgctgaagcagctggcggagcggcgcgagcacgagcgcgaggtgctgcacaaggcgctggaggagaataacaacttcagccgccaggcggaggagaagctcaactacaagatggagctcagcaaggagatccgcgaggcacacctggccgcactgcgcgagcggctgcgcgagaaggagctgcacgcggccgaggtgcgcaggaacaaggagcagcgagaagagatgtcgggctaagggcccgggacgggcggcgcccatcctgcgacggaacacgagccgccgggcgtgagacgcggtccctcggtgcagacaccaggccgggcgcggctgggtcccccgggggccctgtgagagaggtggcggtgaccgtggtaaacccagggcggtggcgtgggatcgcgggtccttacgctgggctgtctggtcagcacgtgcaggtcagggcaggtcctctgagccggcgcccctggccagcaggcgaggctacagtacctgctgtctttccagagggaaggggctccccatgagggaggggcgacgggggaggggggtgatggtgcctgggagcctgcgtgtgcagccggtgcttgttgaactggcaggcgggtgggtgggggctgcagctttccttaatgtggttgcacaggggtcctctgagaccacctggcgtgaggtggacaccctgggccttcctggaagcctgcagttgggggcctgccctgagtctgctggggagtgggcattctctgccagggacccatgagcaggctgcatggtctagaggttgtgggcagcatggacagtcccccactcagaagtgcaagagttccaaagagcctctggcccaggcccctccgtgggacagccccgccgcccctccccaccagggctttgcagatgtccttgaaagacccaccctagagccctttggagtgctggcccctcctgtgccctctgccctggtggaagcggcagccacaagtcctcctcagggagccccaagggggattttgtgggaccgctgcccacagatccaggtgttggaagggcagcggtgctggccttggaggacggtcagctggaggatggcggtgggggaggctgtctttgtaccactgcagcatcccccacttctccacggaagccccatcccaaagctgctgcctggccccttgctgtaaagtgtgaagggggcggctgagttctcttaggacccagagccagggccctcaacttccatcctgcgggaggccttggccgggcactgccagtgtcttccagagccacacccagggaccacgggaggatcctgacccctgcagggctcaggggtcagcagggacccactgccccatctccctctccccaccaagacagccccagaaggagcagccagctgggatgggaacccaaggctgtccacatctggcttttgtgggactcagaaagggaagcagaactgagggctgggatattcctcatggtggcagcgctcatagcgaaagcctactgtaatatgcacccatctcatccacgtagtaaagtgaacttaaaaattcaatcaaatgaacaattaaataaacacctgtgtgtttaagaaa

SEQ ID NO: 6925 - DNA, 1782 bp, Homo sapiens
cgccgtctgcttgcgggcggtgcggccaaagatcagatgtggcgtcttatcgtggactctcgctcgctctcgtccagtaggcggaccgccagggatatctcagcggacgcatcaagcgttggggggtggggaggtactgagggacgctgcggaaagcgtggggactacgccgtcctctggagtccgcgtgtggggcgcaggcctcttaatcgtgggtctatcgtggggaggagcagggacccgcaggattcgattacaccgcgtcgagccacagccgggtcggataccatacagaaaaggtgaaaaaagttgggcagcaatttaggagacgcgtgtgttctacccaaggcgatataaccggtggaaaaatataccaaaatgtgcctttcttctgtccaattgacaaaaaaaaaagaatttttttttctcactctaaaagaggtgtggctcacatcaagattcttcctgatattttacctcatgctgtacaaagccttaatgttgtaatcatatcttacgtgttgaagacctgactggagaaacaaaatgtgcaataacgtgaattttatcttagagatctgtgcagcctatttctgtcacaaaagttatattgtctaataagagaagtcttaatggcctctgtgaataatgtaactccagttacacggtgacttttaatagcatacagtgatttgatgaaaggacgtcaaacaatgtggcgatgtcgtggaaagttatctttcccgctctttgctgtggtcattgtgtcttgcagaaaggatggccctgatgcagcagcagcgccagctgtaataaaaaataattcacactatcagactagcaaggcactagaactggaaaagaccacagaaaacaaagaatccaaccctttcatcttacaggtgaacaaactgtgatgatgcacatgtatgtgttttgtaagctgtgagcaccgtaacaaaatgtaaatttgccattattaggaagtgctggtggcagtgaagaagcacccaggccacttgactcccagtctggtgccctgtctacaccagacaacacaggagctgggtcagattcccctcagctgcttaacaaagttcctcgaacagaaagtgcttacaaagctgccttctcggatactgaaaggtcgagttttctgaactgcactgattttattgcagttgaaaaaaaaaaaaagctattccaaagatttcaagctgttctgagacatcttctgatggctttacttcctgagaggcaatgtttttactttatgcataattcattgttgccaaggaataaagtgaagaaacagcaccttttaatatataggtctctctggaagagacctaaattagaaagagaaaactgtgacaattttcatattctcattcttaaaaaacactaatcttaactaacaaaagttcttttgagaataagttacacacaatggccacagcagtttgtctttaatagtatagtgcctatactcatgtaatcggttactcactactgcctttaaaaaaaaaaaccagcatatttattgaaaacatgagacaggattatagtgccttaaccgatatattttgtgacttaaaaaatacatttaaaactgctcttctgctctagtaccatgcttagtgcaaatgattatttctatgtacaactgatgcttgttcttattttaataaatttatcagagtgaaaaaaaaaaaaaaaaaattatttctatgtaaaaatgatgcttgttcttattttaataaatttatcagagtgaaaaaa

SEQ ID NO: 6926 - DNA, 2384 bp, Homo sapiens
  misc_feature (2101)..(2116): n is a, c, g, or t
tttaaagatgtggctaactagctagtgatgcatgaacaattgttttagaaacctaccattgtggtcctgttggtatctaggaagttttttcatttgttggtggcaactgagtgatctgttatgtctacttttcctctctccctgtcccctcccccatcttcttctctctcttttctttctccctttttttcagtcaaggtagacttgagataggggacttgcatggctatagtagatcataatacatgaggccccccaaataagagagtgaaacattgtctgggatgtattttctgctcgaactcatcgtcatttttctgtgtatttcttacattagcccccagaaaagcatttttcaaagactttgagaaccaaaggttctctctgtaaggaaatgtgttaacctgatttccttgttctcatgtaattttctctcttaaagccataataatagtgtcagaggcagctttctagttagtgtgagtaatgtggttactgtattttctatttttattttaatgtgcttttcctgctgtggattttttttttctttcttgattttaaaaacagcagttgagtaaatgtggttatttgaagactggcgtatattgcatcttctctgagatgcaattttgaaggaaggctctgtgcacaataggcattttttttcagattccttagtaggataaataggagaatgtttggaacacagatcagtgacaatattggtttatggtcatggtaggtcaggcttcctcagagaaactgacaatagagtatcccataggttttgtctctagagagtctgttaatatgaagtctgtttattttatgatgtgttgataagaaaattaggtaaccagggaagcaccttaaattgctgcattcatttgcctctttttaagcatgcacacacattgagaaattttgaattaacaacaacaaaatacacttaaattcccctggaaagagtaattaagagctacttgtctctgtgctgtcatctctgccagaattagagttcctgctgagtatattccattgagtcagccatcattccatcaccagcagggattgcttttctgcttttccacgtattgacatgtgagggaatgtctgtcttgcagtagccatgggcttgtgccagattttgagatccatagaggcagttctgggagcttttcaattctgaatcagggttccaattcataatagctgagccagggaaaccgggttgaatctgtggccaaaaccgtggtaaaaaactttttccccctttcctttcttgcagtgctttattgctttaaaatatgagtgcctctgtccattgattctctggtgactttccgttggattcaaattgtggtctcttaggtgaaaaggtcagtgtgttattcattcagccacacatcgatggagattaactgagagcagtacaagacatttggatcctgccagacctagggcacctgaaggaagtttatttcttttctctctagcctttactatgcctgctgcagaagaggatggccctgtcttctgggagtaggggagggttttgattggctgtatgttaactgcctcaaatccatggccatagggcgagtaagaaccctggagaatcaaacatgtcatctttgtagcatcacctgatttagtgcttttcctcaggtctgagatgtctcagggggcctttttcccttgcagcactgatctttcaatgaggtgctagtgtctgtcctgagcaataacaaggagaaaccatgaagtgtgaacagctcttattaggggggtaaatgtcattagcgcctttgtagccttctctgcaatctgaatgctcctgtcaaaagagcgacttactgaagcctcctttaaaatcacataaatggaatttaagatgctgaagttttacattttaattaagcaaggccattaactccctttacatatacacttttttgtagccagttatgcttgtatgccttataaggctattgaaaaattatccacgaaaattattttaaggatttgagaaatagttggttaactttaagtcaaagttttagatatagagaccctatactcatgtgcccaaccattnnnnnnnnnnnnnnnncgtatatgataggagaaaacactagcattttgagttaataagtaggtcagtttggattaatggaaagtttgaagcttagagtgtttaaataatgattttattcttttcaatacacaagtggaaatgtttctccagtctaaattccccctagtattctcctgaaacaaaatttttatatgcagatatttgcttcttttgcaagtttgagaatttcacagtaacttctggttaccctgggttgtgtcttgcagttaccaaaaaaaaaaaa

SEQ ID NO: 6927 - DNA, 1709 bp, Homo sapiens; identical to SEQ ID NO: 5213

SEQ ID NO: 6928 - DNA, 2677 bp, Homo sapiens
cacgaggccgcgggggcaaggcctggagctgtggttcgaatttgtgcaggcagcgggtgctggcttttagggtccgccgcctctctgcctaatgagctgcaccagaatgatccaggttttagatccacgtcctttgacaagttcggtcatgcccgtggatgtggccatgaggctttgcttggcacattcaccacctgtgaagagtttcctgggcccgtacgatgaatttcaacgacgacattttgtgaataaattaaagcccctgaaatcatgtctcaatataaaacacaaagccaaatcacagaatgactggaagtgctcacacaaccaagccaagaagcgcgttgtgtttgctgactccaagggcctctctctcactgcgatccatgtcttctccgacctcccagaagaaccagcgtgggatctgcagtttgatctcttggaccttaatgatatctcctctgccttaaaacaccacgaggagaaaaacttgattttagatttccctcagccttcaaccgattacttaagtttccggagccactttcagaagaactttgtctgtctggagaactgctcattgcaagagcgaacagtgacagggactgttaaagtcaaaaatgtgagttttgagaagaaagttcagatccgtatcactttcgattcttggaaaaactacactgacgtagactgtgtctatatgaaaaatgtgtatggtggcacagatagtgataccttctcatttgccattgacttaccccctgtcattccaactgagcagaaaattgagttctgcatttcttaccatgctaatgggcaagtcttttgggacaacaatgatggtcagaattatagaattgttcatgttcaatggaagcctgatggggtgcagacacagatggcaccccaggactgtgcattccaccagacgtctcctaagacagagttagagtcaacaatctttggcagtccgaggctggctagtgggctcttcccagagtggcagagctgggggagaatggagaacttggcctcttatcgatgaattaagcaacaatgtaactggtcttgacttgtcatattcccccatgcaatcctaggtctgtattgctcaattttaggaagcctttgctactccatcagtaggtttagatttgagcttttgagacctggctatggaaaagaaagacacttgagaatttagtgttggggtctgtacagatgatgctacccaatttggctttgaaggatcaagtaacaggttgaaaactatttttataaaggtaatactttttcagttcccttcttccttccctctcaatccactagctttcatgttgggcaaggaaaagttgaggaaggatggctgatggtgatggaaagctgtgttaatggtatgaggaatgtgtgaaaagtatacacaaagggctctgaagctcaagtcagaggagtgggaggtctgatcattgttggtggaaaaacgtaaggttattttgtgtttttaagttggttttacaattctttcctggggaaattatttctggaggggaaaaagatccattctacgtatccttgtggagaaaagctaaataacctttaagaatgtgggtggtattggagaaagaagatgaattatagctccggagaatcaagatcttaagtgaagcctttctgttcagatgtgatctataaaaaatcataatttggggaaagtttaagcaaatctggctttgtagtcctgatgttataagtgactttgtgatcaaactgtcaggcttgggttcttgttatagaatgcttggtatagaaaaaccatgccatcattaatggctaacaacacgtagggacttcatgtcatgtcaaagatagctctttgcaagtgccttgattaaaccagaaaactgtcatcgtttaacccaaatatctgaatggtcatctggtaactcatgggtttttggcctcataagatggtccactctgtacacaggcattcctcctgcaataatgttgtatctttgagaccgttgtcagtgtacacaactcacatccttcatattgaaggtgactcatttttctgcacacttttttgatgtgatgcttgacgtgaggcccgacactaggattctcaatgcaagaatccagtaccttgcacatagaagtagcaacccatcccttgcctattttcatcttgctgttttcttttttttaaaaaaatggatgtgacttgttttgaatgttttgtattatacttgtttttgtgtgtgcataaattcattctgtaggatcttaagaaaaagagtcccagaatgttgcttctattattgtgcacaaccattgagaggtgttacaagaatgcagttaattttaacatgtgtgatgtgccatggtggaaaagtactatcggaataactctgcagtgacagaatttgaagtttggctagcatccatacttttctactgtaaatatttcactctcctctagctatccttgatgagcttctcactttaagaataaatgtgtttgatacaaaaaaaaaaaaaaaagaaaaaaaaaaaaacacagtcaaataagaaactcaactgacattctcatttttcatttaggaacaactgagcagagttagtatgggaccaagacatgggatcccatctgagggatattcacaagggcccccag

SEQ ID NO: 6929 - DNA, 1453 bp, Homo sapiens
ctcctggtgagtgatgttttatgctgtaagaagtggctattagcaatagtttcactgactttaccttagggcagtgccacagtaatctgggaacttgttagaaatacacattctcaggccccatcccagacttattgaatcacagactctgggggcagggtttaaaagcactccaagtgattctaatgcacactaaaggttgagaaccatttcttagggataagctgggaaatttttacaggtgtggaggatatttcaaatacatcttttgcctttgcactaacatgctttcatttctttcagtctcttcctccattccctttaaagtcttccccatcatatcactgatctcaaaagctagatttgtcttcattttagtcgtatccctaaaaccatgccttggtctgtacaggagttgtcccacattcccttgcaggctggtctctccatgttctctgttgcagtaaggaccagccaagcttcagctgtcccattcctccccctacaacacacacacctttcaggcagggaggagatgagcttccagccccaagagtggaggctgccacatcctaacatagtatctattgaaaaggaagcagtgtgtatctatgattatatctctgttcatctatatatttttgacatgtagcaacacctctccatcttatcaaggaactcaactcggtctgggtctccccagtgcccagtggtggcctttgacaggtaggaggatgcagtgctgcaggctattttgttttttgttacaaaactgtcttttcccttttcccctccacctgattcagcatgatccctgtgagctggttctcacaatctcctgggactgggctgaggcaggggcttcgctctattctccctaaccatactgtcttcctttcccccttgccacttagcagttatccccccagctatgccttctccctccctcccttgccctggcatatattgtgccttatttatgctgcaaatataacattaaactatcaagtgaaaaaaaaaaaaaaaaaaaaacaaacacaaacccacaaacactaaacacaataaaacacaaaaacgcccaaccccgacaacccgacacggcccacccacacagcatcacaacgccccagatccaccatccaccacaacacaccccaccaacacccacacacagcaacagctaagcggcgcccggtcccggcaacaacaaacgacacgcacacacgagcgcagccaccgcaccactcaacaaatacatacacgatccagctccaccagtcaacaccaccacagcagagcggcgccgaccaccaaaacacacgccggcagcagcgagtcaaacacaaacgctgcgtagcgaggtcgtccaacaaaacagaagcgcataacaaccacacgcgctagcaagacgcaaggacaccaacgcgacgccaccgcagcagccccgcccaac

SEQ ID NO: 6930 - DNA, 1273 bp, Homo sapiens
tttttttttttttttttttttttttttttttttttttttttttttttttttcagagaatggcactttatttttaagacttgatttttttgccatgattatctaccaattcttccatgatggtgtcatcctcttcaacagtgaccaggacctttttgcccactagattaaagatgtcttcaggaggatagcctttgggctcacccaccttcacggtgagcatgtccattgttagaatggtgccttccggaattttcactttggccaccacagacttgcccagcttctcattgcaggccatctcacagggcagcagctgcttggttggggagcccagggcacgctccacaagacgcactgaccgcaccagctcggccagttctccaggctccagcgaggccgagtggtcactccccttccaggtcttgtccaaagttatgtgacgttccaacaccttggcccccagagccactgcggccacagatatcgctatgcctgtttcatgcccagaataccctatgggaatgtcaggaaagagcttctgatattccgagatgacccgcaggttgacgtcctcaggctggagcgggtatgcgctggtacactgcaagaagcagaagttggggttgaggggcttcacgatctgataaacttgcttcatggtgtccattgactgcatcccactggagatcaccattgggcgaccttttttggctgtcttttccagataaggaaaattattagtgtctccagatccaactttgaaaaatggaacattcagttcatgcaggaattcaactgccatctcatccatgccagaggcagtgaagaagatcccaacctcctcggcgtacctctgcagctccctgtactggtcatggctgaactccagatgtcgtttgtgctccccgtacgtcttcccccaggaatgcttcgaggtgtatggcctctccaaggctttccgattaaacttgaattctagctcactcttctggaacttagcacaatcagccccacactccttggccatgcggatcatgcgcttggctacgtccaggtcgccctggtggttctggccgatctcggcaatgatgaagcacgggtgttgcccgcccacccagcgcccgggacacagctccagctccagcggcattgcagcggctcggggtccaacgcctcactaccagtctgggtccggccgccgccgccgccgcctctactctgttctgtgcctcgtgccagacccacacgccagccccgcctcgtgcagcccgc

SEQ ID NO: 6931 - DNA, 1809 bp, Homo sapiens; identical to SEQ ID NO: 2868

SEQ ID NO: 6932 - DNA, 1478 bp, Homo sapiens
  misc_feature (619)..(623): n is a, c, g, or t
  misc_feature (625)..(626): n is a, c, g, or t
  misc_feature (1051)..(1052): n is a, c, g, or t
  misc_feature (1392)..(1392): n is a, c, g, or t
  misc_feature (1409)..(1409): n is a, c, g, or t
ggcggccgccccaccctccccacccggggaagccatcacagctcatctgcccgcggctgcgtgaggacagcaggggtttttcttcagagtctattttttcagcgacaaggacccaggtcttcctgctgctgccagggagagcagggacagtgccgcgtgcgagatgagctcgaacactgcccgccttactgccgcctaccccgcccgccacgccgccgtcgatgccagcgctgtccccacgggtaccaggaagtgcagagccgcacaggagctgccccggagctgaggggacggtcttcggctcctctgcaccccgtgattctgcccacgctcctccaccacgaggcactgacctgcgtcgggtggtgaccgtggctggcggtcacgccctcagcccctccgggcacacgtgccgcctgaccgggcgacccttttcagttcggcaaacgtcgctcccttcattttgggactgaggctgcagcattggaacaaaagagcattatttcaatttttctttctttttttttgttcgttcatttaaacgtatatttagaactgcactttgtccacaaccttcccttctctttctattcgccccaagatgaaacttgaagggaannnnnanngaacggaaagaaaggggaacgaggggcagaacaaaaaacaccccccggcgcgccgcgaaaagcggcgaacaagggggggggacgcagcaagggcccaaccccaagacgagcgggggcgagcgagccacccgcccggaagcaagaacaaagccgcacaccagagagagggaggaccacaagcacgcaccgcgagaccagggagacacaaaaagcgggcagcgacaaacaggggaaagaagggccagcacgccagcagcacggggggccccccggaacccaccggcgccaccccaacaacgacaacacaccacaaaagggggaacccaaggacgaagggcagccacaacaccaacacaacccgggccccccccccaccacaccaaggaggagcgacagaagaccgcacacgggacgccgaccccccnnccccccaccagcccacaaaccgcgaaacacaaagggaatgcgaggggccggcgcacacgcaagacgacaaacagcacagaaacagggtgaggggggaagggaaaaacaaccagactcacatcaagtgaaagaaccacacgccagttggtggagacacaccagacttcacgcgacgccaaacagcggtcggcgagacacaaaacaaaaacggaggcggggaggaatactccaacacccccgcgcttccaccccaaacaaaacaatgcgcatggataagcagcaaagtcaacacacccacccacgggagcgcacccacacggcgaccgcagccacgaacaanagtcgagagggggaaantacgataacacccacggaccccggccttgtcaacagacaacaaacacgaaaagtcaactcagggaaact

SEQ ID NO: 6933 - DNA, 2360 bp, Homo sapiens; identical to SEQ ID NO: 6397

SEQ ID NO: 6934 - DNA, 1197 bp, Homo sapiens
  misc_feature (3)..(51): n is a, c, g, or t
atnnnnnnnnnnnnnnnnnnnnnnnnnnnnnnnnnnnnnnnnnnnnnnnnngtgagaccctgtctcaaaaataaataagtaaataaataaataaataaaataaaaaccaggtcagtacctggagaatttgaatgatagagaatgatagagtaataccctaattattagttaaaacctacaggttgggattacatgtgtgagccaccgcccctggcctctgtaggcttctttaacccatcagagagactccctggtaaggattaggggctaattactggtgcctccttcagctgtcagtccatcctcctttatttgtacccaccttccagtcagcaaggcacaacaatgttgttacaaaggaaacaaactcaatttggcccatttcctggaaatgcaatctcccaaacaggtttgtgtgaaccaaattccattttcctttgtttcccatgtgcagtcccagttgcatttccatgggagccaatccacccacccatagaatgacttgaaaatgtgtgaagttcagaagtttcataccaagaagtttgctgagcatgatgtttgtatattgattaggagtaaaaatgttcatttttacaaaatattacaacttctccctctcccctccttccacccagtatcccctgttcctcccccaggcattctggtcactgttcctttttgttgagatcattctcggtgtctcatatagctgggttgcagctccgttctttgccaggaggtggtaatagaggattccacgcactcagaatgcctcaggccggcgcctgtggcttctctcaatggagggaagtgtcctgcagggggcgctgttggtccttcaggcaaggtcgggttccctcgaagtctctgtcttagcagttgctggtcttcagaaacattgggcaccaatttttctcatttgtgctgtgtatctttaggcaagttgcttcctgtctctgagcgtcgtctttgtttccgccttcctgggcctacggcaggcctgattcctcaaggaagtgtccagagttccggacagatggaaaaggaagagagaatgggtgtcacaaaggtctgtccactcctggcctaaggcttgggggcctgctcagggctagcctgtttgggcctcggtatggactcctgcctcctggtcaggacctggaaacctgggagcaggcaaggcaggaacaggagagc

SEQ ID NO: 6935 - DNA, 3738 bp, Homo sapiens
  misc_feature (2382)..(2418): n is a, c, g, or t
  misc_feature (2836)..(2862): n is a, c, g, or t
gggagtcgagtgagcgcggcgccgcgagcgggctgcgggtccccggctgcccgcagcccgctcgcggcgcttctccggcccggctccttctccgctcgttaacgtcgccaaccccccccacccctcatatctctctccacccacccaaccgccccccgctccttctcgccgcctcgagtccgcttgggggaaaacttcaaagagccggatcgcaggctccctgcctactcccccaccggggatttcagactagacgcttgaagcaaagctgccatcccagaagacgacatgctctcagcaacccccctgtatgggaacgttcacagctggatgaacagcgagagggtccgcatgtgtggggcgagcgaagacaggaaaatccttgtaaatgatggtgacgcttcaaaagccagactggaactgagggaagagaatcccttgaaccacaacgtggtggatgcgagcacggcccataggatcgatggcctggcagcactgagcatggaccgcactggcctgatccgggaagggctgcgggtcccgggaaacatcgtctattctagcttgtgtggactgggctcagagaaaggtcgggaggctgccacaagcactctaggtggccttgggttttcttcggaaagaaatccagagatgcagttcaaaccgaatacacccgagacagtggaggcttctgccgtctctggaaaacccccaaatggcttcagtgctatatacaaaacaccgcctggaatacaaaaaagtgctgtagccacagcagaagcgctgggcttggacaggcctgccagcgacaaacagagccctctcaacatcaatggtgctagttatctgcggctgccctgggtcaatccttacatggagggtgccacgccagccatctaccctttcctcgactcgccaaataagtattcactgaacatgtacaaggccttgctacctcagcagtcctacagcttggcccagccgctgtattctccagtctgcaccaatggggagcgctttctctacctgccgccacctcactacgtcggtccccacatcccatcgtccttggcatcacccatgaggctctcgacaccttcggcctccccagccatcccgcctctcgtccattgcgcagacaaaagcctcccgtggaagatgggcgtcagccctgggaatcctgttgattcccacgcctatcctcacatccagaacagtaagcagcccagggttccctctgccaaggcggtcaccagtggcctgccgggggacacagctctcctgttgcccccctcgcctcggccgtcaccccgagtccaccttcccacccagcctgctgcagacacctactcggagttccacaagcactatgccaggatctccacctctccttcagttgccctgtcaaagccatacatgacagttagcagcgagttccccgcggccaggctctccaatggcaagtatcccaaggctccggaagggggcgaaggtgcccagccagtgcccgggcatgcccggaagacagcggttcaagacagaaaagacggcagctcacctcctctgttggagaagcagaccgttaccaaagacgtcacagataagccactagacttgtcttctaaagtggtggatgtagatgcttccaaagctgaccacatgaaaaagatggctcccacggtcctggttcacagcagggctggaagtggcttagtgctctccggaagtgagattccgaaagaaacactatctcctccaggaaatggttgtgctatctatagatctgaaatcatcagcactgctccctcatcctgggtggtgcccgggccaagtcctaacgaagagaacaatggcaaaagcatgtcgctgaaaaacaaggcattggactgggcgataccacagcagcggagttcatcatgcccgcgcatgggcggcaccgatgctgtcatcactaacgtttcagggtcagtgtcgagtgcaggccgcccagcctccgcatcacccgcccccaatgccaatgcagatggcaccaaaaccagcaggagctctgtagaaaccacaccatccgttattcagcacgtgggccagcccccggccactcctgccaagcacagtagcagcaccagcagcaagggcgccaaagccagcaacccagaaccgagtttcaaagcaaacgagaacggccttccaccaagctctatatttctgtctccaaatgaggcattcaggtccccaccaattccctaccccaggagttacctcccttacccagcccctgagggcattgctgtaagtcccctctccttacatggcaaaggacctgtctaccctcacccagttttgttacccaatggcagtctgtttcctgggcaccttgccccnnnnnnnnnnnnnnnnnnnnnnnnnnnnnnnnnnnnnccagagtttgtgacctaccaagatgccctggggttgggcatggtgcatcccatgttgataccacacacgcccatagagattactaaagaggagaaaccagagaggagatcccggtcccatgagagagcccgttacgaggacccaaccctccggaatcggttttccgagattttggaaactagcagcaccaagttacatccagatgtccccaccgacaagaacctaaagccgaaccccaactggaatcaagggaagactgttgtcaaaagcgacaagcttgtctacgtagaccttctccgagaagaaccagatgctaaaactgacacaaacgtgtccaaacccagctttgcagcagagagtgttggccagagcgctgagccccccaagccctcagttgagccggccctgcagcagcacnnnnnnnnnnnnnnnnnnnnnnnnnnnttggggcgcatcagtgacttccacgaaacttatactttcaaacagccagtcttcaccgtaagcaaggacagtgttctggcaggtaccaacaaagagaacctagggttgccagtctcgactccattcctggagccacctctggggagcgatggccctgctgtaacttttggtaaaacccaagaggatcccaaaccattttgtgtgggcagtgccccaccaagtgtggatgtgacccccacctataccaaagatggagctgatgaggctgaatcaaatgatggcaaagttctgaaaccgaagccatctaagctggcaaagagaatcgccaactcagcgggttacgtgggtgaccgattcaaatgtgtcactaccgaactgtatgcagattccagtcagctcagccgggagcaacgggcattgcaggtgagcccccccacctgaatttcagttactttaccagttgtcagttttttaatgtgtaaacaggattgggggagtatggtagggcagggcaccaggcagatttggtgaatgaagcttgtggtaatttgaatatatgcaatgtggccagtaagagaacgtgagtggtagcactgaggcgtgtctggatgctttaagttattctgtagattataagggaactccactcaattgctgataaccgatgttttaattattgtgaagggtatctaaagactgcatgacgtttacctatcaattgctttgatttctctgcctgtaagatagcaaatatacctagaagtgctgcttagaatgccttacttgatacctggtagagatgtgtagcagccgcatgtctgtgggattcatgcaaatttttcaccaaaaaaaaaggaaaaaaaaaaaaaaaaaaaa

SEQ ID NO: 6936 - DNA, 537 bp, Homo sapiens
cagtcagattttttttttgcttaactaagacaaagtgaataattcactgtgagccaaattctttcttgattcctctttttggagcagtccatctttatgggaaaaccagcctagaatggtgatttcagtttcaggtgatttcgatagaattgtatttggctcagaaatgataagactggggccaagaaaaattttaaacttttttttttgtaatcatattactagtttgatttcatatgaacttcctttgttgactttctttgccattaatttaaaagttccagtatcctcaatatttgatgtcttatatgtacagaatcctttccagctgtaagtcatcagcaagtaaaaaatttagtatggcaatagttttcataagaggttttttaaaacagaaaaatgttgacattgccagcctctgggttgcattttgggatatgctacatttcaaaggtatcttttaaatctgaaggcaaagactttttcaacatctgaatattctgatttacagaaattataaaaaaaaaagtcgacgcg

SEQ ID NO: 6937 - DNA, 3037 bp, Homo sapiens
  misc_feature (1804)..(1823): n is a, c, g, or t
ttgcattgtcaggtaaattgcctttttttctgtgggacgtcatcaaaaaggcttgaaaaacactgctggaatcaatttatcctgttttctattcttctgaatgctaattttttttccttgagccattctactttcatttcaatcatgaaatatttccaactggccttgattaatgctttaacttttcaaagaaaaaacacccacacacatctcagtagaaaatatggtgaactgaagatgatatttggttttcaaaagaaaagtttggccaaatgttctgcattgcatttctgaggcacacacaggagcgggtgccagggtatttgactgtaggtaagtgaacaaggagctatacagatagaatggcacggggtttgacagtaatcagaacaccacatcagaacacttgattgcacttcaactctcatgctgtgtttgccccaaataatcttaaaaattgtgactatatcgaataagttcacaatacttattaggatgtggtgaaactgaattatttgaagtaggaagacccgaagttcttcgcctatgagactggtgaagtgatttgtagccaacatgctccaacccatctattaagaaaactatggcatctattaagaaaattcaaaatcttaaacagagaaatccatatttagaaaacatggccagattaaatagggggtgggttattttcttaaatacgttttgtcaatttcacgtgaaaaatgaaaacccctagttcatgttacatattacatttctgttaagatgtatgttcctctgtttctaatagaagttgtggtggtttggaagtgaaaattgaatgtgagcacaggccatgtaaaggaaggagaaagtgtaaatgttaataacaggaaaactgaatttagctctcatgaggcagtcaaggaaatcattcattgaacatgttgggaaatacttttcatttggtgaccaaatacctacaaattcatttacaaaaaagaaaaatgaaagttacctcagaactaaactcagaaatatgtcccacatgggttcttgtaatgtttcttggtgaatgtctttatagaaagaagtgggcatgaaatgatgactcagtaattaaacacatgggggaagggaggctgtagaaaacactggattctatatttaaaatttcattcagttcactaatttgtttttactgaccaaagctttctatacctatgtagagtgtctgagaactagaagggcccatcagttgccactcggatgatccttttgtctcttttcagataaggccccagttcaacagcgtcctctgtgtcaatcagatactcccaggaatgagtgagccctgccgttttcccaagttgcccctcagcacattccagccagttccaaaacttttggcttgtttttgacacaaggccagataagctactcaaactggtttttttaaaaaaagaaaacaaccccaatctatattccttttttaatactgtgtacataacctgctgctcgaaagactaggttttcccctttccagctagttgtgttgtttctttatgtagacagctttaaatcatgtttacatgattcagccattttaaacaacctcttcctatttttttttcctttttgtacaaaaaaaaaaaaaagaagaagaaagaaagcaactaactaaaacctttcctttcaaggatttatgcagcataggatagggcaaccacaagtaaacacaaacatcacgtgagccttcttaaagaaaacatttccagaaatcactccaatgtcttaaaaaacacacaaaataaaacctttnnnnnnnnnnnnnnnnnnnngacaatgagttgcagacgatcaccaacactgaaacttaatttagcttttttctctcctctccaatcataaaaagtctctttttggttcttcatgcaggagctattttctttcttttctggcctctaacaggaaaacagagtttctagccgagctgctcctgaggtattaaaagtgatgttcgtgtcatgcggatcaatcctgcccaaacattagtgtgcatgcaaatcacctggcagtcttattaaatgcagaatctgattccatgaggtccatgttgtccgtggaccaaacttgcagtagtagcgaggagtctagaagacgtccatgttatagaaattgaacccaggaaaggatttggggcttatgaagctaacaaaagcacgtaaaacccagcctgagaaacagtagctacacccagctcttgttgctattctggaaccaaataatgcaaaatatgctcgagacacatctcagttcttgcttgcttgactttctgagtgtctctctggcacaagggcctgtcatttgaattcccatcccccacctcatccccatgtattattccactggatatcccaaatatctagagtttcaaaacccaaatgatcccatttggccagagccttttttatgagtatgctaatgttatctgtgtatgaagcacacaaacttttccaggatacccggctatctattaatccttcagcacggacgttctccatggtaacagtctgacctataagatctaatgcctttcccagggggctcagaatcccatgagtttgggttaaatctgccataacatctaaaaaaaaatgtaaaggctctacggaattactttatttattcatttcccagaaagagaaaataattttcagttgaactcaaatcgtcattattacattgacaaggtttctaaggttttccaaaaagaatataagcctgccatccactatagcctttgccaataaaggcagagcttgaaaaaaggggggattttttttctgttagacatgtatcatcttacaaatctattttaaacacttttgggaccagtaaatcagatataatacatttgggcgagaatggaaattttttctgactgcaacataagaataaatgagtttaaaggggaatgtcctccatgccgtagtgcctcccacagaccggggagcctccctaactcggaaatttaattttcatgggtttatca

SEQ ID NO: 6938 - DNA, 2047 bp, Homo sapiens
aactgattcaggtagtttataatggtaatatactctcagatatcccaatatccaacactgattgcatgcacattatgataaacaattatttattcattaggcaaataaatattaatataatttctaatcttgaaaagcattattttaaaaataaaactattcataaacataagttgcatgtgaattatgaataaattataatttatttttgtaacccacaccttattttccaggaacataaatgtgtaagacaaaagcacagtatcagtggaatttctttccttttttaaaaattgatgcttaactttgtaaaactatatcccacattctgaatcctggagtaacttcagctctttagttggagaggctattaaaacattaagaaaagtaatgttgaaaggattctttaatgaaacccttagtgaatatgacagtgagtagtgaaaaataagtttattaagctacttcgcatcctagagtttcatgaaaccctatgaagttttaaataaaacatttatttactattaagtgtagttagtttttaaaatgttaatgaataaagaacttactctctcagtttatcttttacaatctttgaccagttaaaggggaaacaatttttacttaataaaatatttagaagtctgtagagtaggaatctttgaattggatgaaatttagtatttatctaattcatatactcaaacagccatcagatataagattcaggtcttactttctaaattatattattgtatgtatatatgaaatttcaaaaacaatttggtctctttccacttgagaatagtgcatgaagaaaataagtaattcaaatatatggatgtttagtccaaatttagaaatttccaccattttgtaaaattagttcattctacctgatgttaatatctcttttcttaaaaacttattcgagtatgtttttccttttatttttggtttatattataatacctatatacttatgaatctttgcaagtaaacacatagaatttaaactgaaaatgacaggagatagaaattgtactgtctatatattatgttagtgttttataaatagttgtgatgatgaagataatatgataataccagtgattcattagtctgaaaactagaaatgtcactttttcaggcatagcataagtcagatttagttgcagatttgtttggtatatgtaatttcatgtatacactgccctacattaatagaatggtactactatggtaaaaatattaaacatggtcatatttgaatttcaatctaatgactttttagaattcaactttatacagctaaatgcaaaactgaagatgattttaaagttggaacaattatagtttacatattatgctcatcatatgctcaccacaagaagagcatatagactcataattcagattttataatttcagcatagcagagtgagtatatgaattgatttggggatgacaaaaatccgattttgaatcccagcatatagcttaatattcaaccttctctatataattactctatatcagtttcaaatgggaaatataacagaatcttcctcataaggatttatagaaaaaaaatgagctgatgtatgtacagtctttaagatactagtataaatatatatatatatatatacaaacacatatgtaatataaatgtggttgtatgttgttaacttaattatccattaatgtgtagttttacaaacattattattacttctttttcttatgattttacaaccatgacatttcaacttttgatatgggcaactaacagtgacccatctgtcagtcagaagtcctcgtgggtccctctgtctgtctgctaaaagtcctcatgggtccgtctgtctgtgttctaaatgaagtacttcttttctggcctactgcaattttacaaattaccttgtagagattagatacatttgtcccctctagacagaggtaacacctgagtacagaccttaataaatggagtgtggtctgattgaatgaatatttccatgcaggcaaaaaaaaaaaaaaaaaa

SEQ ID NO: 6939 - DNA, 889 bp, Homo sapiens
cccgaattcgcggccgcgtcgacacaggctgctagaagacaaaagaagcctccagacagccctggcacgaggctaaaaagctgctaccaagacagccacgaagatcctaccaaaatgaagcgcttcctcttcctcctactcaccatcagcctcctggttatggtacagatacaaactggactctcaggacaaaacgacaccagccaaaccagcagcccctcagcatccagcagcatgagcggaggcattttccttttcttcgtggccaatgccataatccacctcttctgcttcagttgaggtgacacgtctcagccttagccctgtgccccctgaaacagctgccaccatcactcgcaagagaatcccctccatctttgggaggggttgatgccagacatcaccaggttgtagaagttgacaggcagtgccatgggggcaacagccaaaataggggggtaatgatgtaggggccaagcagtgcccagctgggggtcaataaagttacccttgtacttgcaaaaaaaaaaaaaaaaaaaaaaaaaaaaaaaaaaaacgaaacaaacgagaaccatactgagaaacaaccaaggggaaagagaaagagagaacaaacaagatcacagacacaaacatagcaggggggggggcccaaaaagagaatgcgccaccgggggaggaaccggaacgatagacggagatacccaccgacatctggtatgaaacaagggcggccccacataagatagcgcagtcatataaacacgcagccgcaccctcggatagatacgaccacccgggtggggaaaaacaaaggcgacgagcgccatgtgcgtcgagaacagaccaactctcggcggggggggagacaacaagggggcacataccc

SEQ ID NO: 6940 - DNA, 2173 bp, Homo sapiens
  misc_feature (159)..(174): n is a, c, g, or t
  misc_feature (824)..(837): n is a, c, g, or t
cggatagatactggtctggaagagtagggaagacctgttttagaactctgtgaaagggtacagtatggatgacagtcttggctaaatgtaatcagatccaggaagctggagtcagtgtgagctggaatcagttcgaattagcaaagcactggctctcannnnnnnnnnnnnnnntgaccacaaagtgttaaacacatctggaaagggattctgacatcatcctgagaatctttggggaatacatatagcctgtagacccattcctctttgaccctataaagattctttaaagagtaataccctgagtggttttctggccagcttgcctgctcatttatctttgaggagatggaaggagacaatatgcctcgtggagatccacaggccctagaggtgtatggattgagcatttggaagtgctgaagctgagagactgggtctcttggtggaccccaagggatctgcttttcctctactcattgtccctacacaacttttcctggcagctggcattgctgtttagatgggttgttctttgctgtttaagttgtttggcagtggtgtgtcaggatgcgggttttctgaatactttcccagctggttacttgagtggtggttagggaggggctgttctggggctgctctggagctgttgaggtcgggtgtctgtctggatactcacagctggtctgtcgaggagaacgctgttctcattctgctgcctttggtggtgctgtgtgtggctctttagatgtgggtggagatgagttgggggagttaatgagatctttttttagctgcttttgataaagtagtctgtactnnnnnnnnnnnnnngactttttcccttaacctgtgcatacttctttgctagcctttgtgaaagagagttcaggccctcttgccctcttgctctttcgctctctcttgcccttctgccttctgccatgggatgatgcagcaagaagaccctcaccagaggcaggttccttgaccttggacttcctagcctccagaactgtaagaaattcttttctcttttcttttcttattttctttcctccctccatcacttccttcactctctctctctttcttcctcttttctttctctcttttttttttttttttttttgaggcggagtctcgctccgtcccccaggctggagtgcagtggctagatctcggctcgctgcaagctccgcctcccgggttcacgccattctccattctccattctccagcttcagctcccgagtagctgggactacaggcgcccgccaccaggcccggctaattttttttgtatttttagcagagacggggtttcaccgtgttaaccaggatggtatcgatcctttttttttgttttaaattatgcagtctgtggcattctgttataacagcatgaaatagacaaaggctccattttcaagagcaagcccttttgtagtttctgagctaattatgactgcagaggaagttctataggtagcctcagatctaccacctagtaaatctgctactaaccagacctagaatctaggattctagatcaagtgctgggcaacatgatacctctgcaacttggcacctccctatatccctccagttggtttggcccatcaggactaatattacccctcatatcctagtctctcttgtaggcagaagccttgcctaaaccctaagctgcttagctcacattctgtcttgctttttctgttttttttttttttttttaggagggggttcaaatataaaatatacgggaaagaaatataatgaacctccatgtacccaacacccggattaaacagttatctcaattttgccagacttgtttcatctacttcaatctccctaaacatttacatttgtacaggaaaaactggataaatacctaattctccaccctatctcccattttaagtcatttttcagaataatgagttagtgactagtaacctccactgtagtgaccaatagttttttttcctgaatatcgtaatgagctcatagattattgtttgcatttgagcccattgtagtcactattaattgttttagatgctcatattgtctcaggttaataagtatctcttcaagttgactcccatggccttttgacgtgatcctgttggacttggatggcttccttgctttctggcaa

SEQ ID NO: 6941 - DNA, 4615 bp, Homo sapiens
  misc_feature (925)..(947): n is a, c, g, or t
agcgcccgccgcgtccggggccggctggtgcgcgagacgccgccgagagttgtgaagggcgcgggtggggggcgctgccggcctcgtgggtacgttcgtgccgcgtctgtcccagagctggggccgcaggagcggaggcaagaggggcactatggcagacaaagttaggaggcagaggccgaggaggcgagtctgttgggccttggtggctgtgctcttggcagacctgttggcactgagtgatacactggcagtgatgtctgtggacctgggcagtgagtccatgaaggtggccattgtcaaacctggagtgcccatggaaattgtcttgaataaggaatctcggaggaaaacaccggtgatcgtgaccctgaaagaaaatgaaagattctttggagacagtgcagcaagcatggcgattaagaatccaaaggctacgctacgttacttccagcacctcctggggaagcaggcagataacccccatgtagctctttaccaggcccgcttcccggagcacgagctgactttcgacccacagaggcagactgtgcactttcagatcagctcgcagctgcagttctcacctgaggaagtgttgggcatggttctcaattattctcgttctctagctgaagattttgcagagcagcccatcaaggatgcagtgatcaccgtgccagtcttcttcaaccaggccgagcgccgagctgtgctgcaggctgctcgtatggctggcctcaaagtgctgcagctcatcaatgacaacaccgccactgccctcagctatggtgtcttccgccggaaagatattaacaccactgcccagaatatcatgttctatgacatgggctcaggcagcaccgtatgcaccattgtgacctaccagatggtgaagactaaggaagctgggatgcagccacannnnnnnnnnnnnnnnnnnnnnnaggatttgaccgtaccctggggggcctggagatggagctccggcttcgagaacgcctggctgggcttttcaatgagcagcgcaagggtcagagagcaaaggatgtgcgggagaacccgcgtgccatggccaagctgctgcgtgaggctaatcggctcaaaaccgtcctcagtgccaacgctgaccacatggcacagattgaaggcctgatggatgatgtggacttcaaggcaaaagtgactcgtgtggaatttgaggagttgtgtgcagacttgtttgagcgggtgcctgggcctgtacagcaggccctccagagtgccgaaatgagtctggatgagattgagcaggtgatcctggtgggtggggccactcgggtccccagagttcaggaggtgctgctgaaggccgtgggcaaggaggagctggggaagaacatcaatgcagatgaagcagccgccatgggggcagtgtaccaggcagctgcgctcagcaaagcctttaaagtgaagccatttgtcgtccgagatgcagtggtctaccccatcctggtggagttcacgagggaggtggaggaggagcctgggattcacagcctgaagcacaataaacgggtactcttctctcggatggggccctaccctcaacgcaaagtcatcacctttaaccgctacagccatgatttcaacttccacatcaactacggcgacctgggcttcctggggcctgaagatcttcgggtatttggctcccagaatctgaccacagtgaagctaaaaggggtgggtgacagcttcaagaagtatcctgactacgagtccaagggcatcaaggctcacttcaacctggatgagagtggcgtgctcagtctagacagggtggagtctgtatttgagacactggtagaggacagcgcagaagaggaatctactctcaccaaacttggcaacaccatttccagcctgtttggaggcggtaccacaccagatgccaaggagaatggtactgatactgtccaggaggaagaggagagccctgcagaggggagcaaggacgagcctggggagcaggtggagctcaaggaggaagctgaggccccagtggaggatggctctcagcccccaccccctgaacctaagggagatgcaacccctgagggagaaaaggccacagaaaaagaaaatggggacaagtctgaggcccagaaaccaagtgagaaggcagaggcagggcctgagggcgtcgctccagccccagagggagagaagaagcagaagcccgccaggaagcggcgaatggtagaggagatcggggtggagctggttgttctggacctgcctgacttgccagaggataagctggctcagtcggtgcagaaacttcaggacttgacactccgagacctggagaagcaggaacgggaaaaagctgccaacagcttggaagcgttcatatttgagacccaggacaagctgtaccagcccgagtaccaggaagtgtccacagaggagcagcgtgaggagatctctgggaagctcagcgccgcatccacctggctggaggatgagggtgttggagccaccacagtgatgttgaaggagaagctggctgagctgaggaagctgtgccaagggctgttttttcgggtagaggagcgcaagaagtggcccgaacggctgtctgccctcgataatctcctcaaccattccagcatgttcctcaagggggcccggctcatcccagagaccatgatcgttcacttgatggtgtgagatgacaacgttagagaaagtcatcaatgagacctgggcctggaagaatgcaactctggccgagcaggctaagctgcccgccacagagaagcctgtgttgctctcaaaagacattgaagctaagatgatggccctggaccgagaggtgcagtatctgctcaataaggccaagtttaccaagccccggccccggcctaaggacaagaatgggacccgggcagagccacccctcaatgccagtgccagtgaccagggggagaaggtcatccctccagcaggccagactgaagatgcagagcccatttcagaacctgagaaagtagagactggatccgagccaggagacactgagcctttggagttaggaggtcctggagcagaacctgaacagaaagaacaatcgacaggacagaagcggcctttgaagaacgacgaactataacccccacctctgttttccccattcatctccacccccttcccccaccacttctatttatttaacatcgagggttgggggaggggttggtcctgccctcggctggagttcctttctcacccctgtgatttggaggtgtggagaaggggaagggagggacagctcactggttccttctgcagtacctctgtggttaaaaatggaaactgttctcctccccagccccactccctgttccctacccatataggccctaaatttgggaaaaatcactattaatttctgaatcctttgcctgtgggtaggaagagaatggctgccagtggctgatgggtcccggtgatgggaagggtatcaggttgctggggagtttccactcttctctggtgattgttccttccctcccttcctctcccaccatgcgatgagcatcctttcaggccagtgtctgcagagcctcagttaccaggtttggtttctgagtgcctatctgtgctctttcctccctctgcgggcttctcttgctctgagcctcccttccccattcccatgcagctcctttccccctgggtttccttggcttcctgcagcaaattgggcagttctctgccccttgcctaaaagcctgtacctctggattggcggaagtaaatctggaaggattctcactcgtatttcccacccctagtggccagaggagggaggggcacagtgaagaagggagcccaccacctctccgaagaggaaagccacgtagagtggttggcatggggtgccagcatcgtgcaagctctgtcataatctgcatcttcccagcagcctggtaccccaggttcctgtaactccctgcctcctcctctcttctgctgttctgctcctcccagacagagcctttccctcaccccctgaccccctgggctgaccaaaatgtgctttctactgtgagtccctatcccaagatcctggggaaaggagagaccatggtgtgaatgtagagatgccacctccctctctctgaggcaggcctgtggatgaaggaggagggtcagggctggccttcctctgtgcatcactctgctaggttgggggcccccgacccaccatacctacgcctagggagcccgtcctccagtattccgtctgtagcaggagctagggctgctgcctcagctccaagacaagaatgaacctggctgtgtcagtcattttgtcttttcctttttttttttttttgccacattggcagagatgggacctaagggtcccacccctcaccccacccccacctcttctgtatgtttgaattctttcagtagctgttgatgctggttggacaggtttgagtcaaattgtactttgctccattgttaattgagaaactgtttcaataaaatattcttttctacaaaaaaaaaaaaaaaaaaaaaaagacacctaataaagaggataaaaaaaaaaaaa

SEQ ID NO: 6942 - DNA, 3762 bp, Homo sapiens
ttggccccgcacagattgagccgagttgtcgccccgctgggagaagtgaccctcctgcgcctggtcaagtgtcttggcaaatcttcctttcttcacgtaagatgtgtattggcggcacgtgaggaggtccagacactggcggccatggaactcaccggtaatagaggacacatctcttaactgggttgctctaagaactgatgtctaaaccgtctcagcatggcctgtagaggaggagctgggaatggccaccgtgcctcagctacactctctcgggttagccctggaagtctttacacatgtagaacccgtacccataatatatgcatggtatctgactttttctacccaaatatgggaggcgtggaaagccacatttaccagctctctcagtgcctgattgaaagagggcataaggttataattgtcacccatgcttatggaaatcgaaaaggcatccgttacctcaccagtggcctcaaagtctattacttgcctctgaaagtcatgtacaaccagtctacagccacgaccctctttcacagtctgccattgctcaggtacatatttgttcgggagagagtcacgataatccattcacatagttctttttctgctatggcccatgatgctctcttccacgccaagacaatggggcttcagacagtcttcacggaccattccctttttggatttgctgatgtcagctcggtgcttacaaacaagcttctaaccgtgtctctttgtgatacaaaccacatcatttgtgtgtcttatactagtaaggaaaatactgtactaagagcagcactgaatcctgaaatagtgtccgtcattcctaatgctgtagatcctactgacttcactccagacccatttagaaggcatgatagtataactattgttgttgtcagcagacttgttacagaaaggggacaaatttggttagtggtataatacctgaactctgtcagaaatatccagatttaaatttcataattggaggagagggaccaaagagaatcattttggaagaagttcgggaaagataccagctgcatgacagggtgcgtcttttgggagctttagaacacaaggatgttagaaatgtcttagttcaaggacatatttttctgaatacctcccttactgaagcattctgcatggcgatcatggaagcagccagctgtggtttacaggttgtaagtaccagggttggtggaattcctgaggtgcttccagaaaaccttattattttatgtgagccttcagtaaaatctttgtgtgaaggattggaaaaggctattttccaactgaagtcagggacattgccagctccagaaaacatccataacatagtaaagactttctacacctggaggaatgttgcagaaagaactgaaaaggtatatgaccgggtatcagtggaagctgtgttgccaatggacaaacgactggacagacttatttctcactgcggcccagtaacaggctacatctttgctttgttggcagttttcaacttcctcttcctcattttcttgagatggatgactccagattctatcattgatgttgcaatagatgccactgggccacggggtgcctggactaataactattctcacagtaaaagagggggtgagaataatgagatatctgaaaccaggtagaaggaagcctagattgtaagattttaaacatttgtaatagttctataaagactatggaaaataaccttgcttttggggggtttttgtttttttagagttaatttagtaagttatgctacctctatatcattcaatattttctgttgaggaaagataaaaatgtatgcaattcctgagtgtagaaacttcttgcacttatttaaaatttaggagagaacatttaagccactcaggtatgcaatttttcagactactgaaatccctgtagcagagatgttttaacattatattttgagagctttgggtgctgaagggccaaacgttttctgggcattttttggccagtttttaatgtaacaccattagacactcaccagatgtttacaagttttctttaggggaactacaacaattatatgaactgttttatatcatgttcatatacatttattaggaatctaaatcatgtctttgaacatttattaggttcactcagtaggtgttacatgtaattaacaggttccttgagtaagatagtccatcagttaccagcacattttgaacccctgctctgtgtagaatgttgaactagatgcttcccgccattaaggaccaggggtgcattcactctttgtttaccattcaaatggcttacttcatcataattgtggttgatatgagatcaatatccaacatgccaaaaatgctcatgccagttaatgccaggaaaaaaatcaccgacacactactagtactttgttcctgttgtatgcattctcctaggtagagcctccatcttcagttgtgtttgtgaaggtattttttgctttttaaatactggggaccgatatcactgttgatagtgcagagaaaccctccacatttttcagtgcataattgagttttctataaatgccttcgtgttttctgagcagaatgtacgaggtgtgccatcccaaaaccagctgctaccctgtccttttaatgtaagtcactccccttcactgtggcctcgctgatgtctgataagtattgtcagtgtgcaaaaggctttacttcagaatggtttatttatagcaaactaagttgaaaattttagaaacagtctttgtgggtggatgttattaactgtcattgttgttgcccagagccatgggttttttaaccccaaattatccacatggtgtgtattatgaattctttgaactcttaaggtttttgtgagaaaaggactgtgaattcaaaacaataaggcacttgtgggtgcactacatagattctgacagtgttgtgattctgtataggatttttaaaaatgacaacattcacaaaatttattactttttaaaaaataacatgcctattaactggttgcactgatataaaagaaatatatttgtgttttgtttgtactaaaatgcaaaagcaagagtgcaatttttaaaatctagaagttaggggttttgttggagaaaaatggactgatctttaaactattcagtcttactgggatttttatgcatagaaactcacatataaacatgaaataaacagtgccagtattcataggaaagtgagaaactgtaatatttggccattattctattcaacaggttttagaggcatgccaccattttttccttatatttttgcttaatttttttaaattgtcatttaattcttaaactgtcatttatttgagatggaaataagatctaaagttagttgcctttgcctgtaaaacatgtgatttgcaaattattattttcctttttttttaacaaatggaagtaaatttgtttcacgtaaatcttaattttcaacctttctggataccttaattgtaactgtcagtttgcactggtcggtatatggaaacacattgctctaccctgctacttagttgattttaaagtgaatttacagtgatgagaaatttgtgaaaaatatattgtatttcttttgatgtttcaaaaggttgcctatgaaaaactgatttgttaaaacatgctacatgtccaaaaataaagaccagaatgacattttgataaaaaaaaaaaaaaaaaaaaaaaaaaaaaaaaaaaaaaaa

SEQ ID NO: 6943 - DNA, 1808 bp, Homo sapiens
gccggagctgtgggctggcagccatgggtgccaggcagtgctgagagcagtggggcatggctgcagccctgcaggtcctgccccgcttggcccgagcccccttgcatccactcctctggcggggctcagtggcccgtctggccagcagcatggccttggcagagcaggccaggcagctgtttgagagtgctgtaggtgcagtgctgccgggccccatgctgcaccgggcactatccttggaccctggtggcagacagctgaaggtgcgggaccggaactttcagctgaggcaaaacctctacctggtgggctttggcaaggctgtgctgggtatggcagctgcagctgaggaactactgggccagcatcttgtgcagggcgtgatcagcgttcccaaggggatccgtgctgcccccatcccacctgtcacactggaggagaagcagacactcactagactgctggcagcccgtggagccaccatccaggagttgaacaccattcggaaggccctgtcccagctcaagggtggggggctggctcaggccgcctaccctgcccaggtggtgagcctcatcctgtcagatgtggtgggggaccctgtggaggtgattgccagtggccccaccgtggccagttcccacaatgtgcaagattgcctgcatatcctcaatcgctacggcctccgtgcagccctgccacgttctgtgaagactgtgctgtctcgggccgactctgacccccatgggccacacacctgtggccatgtcctgaatgtgatcattggctctaatgtgctggcgctagctgaggcccagcggcaggccgaggcactgggctaccaggctgtggtgctgagtgcagccatgcaaggtgatgtaaaaagtatggcccagttctacgggctgctggcccatgtggctagaacccgcctcaccccatccatggctggggcttctgtggaggaagatgcacagctccatgagctggcagctgagcttcagatcccagacctgcagctggaggaggctctggagaccatggcatggggaaggggcccagtctgcctgctggctggtggcgagcccacagtacagctgcagggctcgggcaggggtggccggaaccaggaactggccctgcgtgttggagcagagttgagaaggtggccgctggggccgatagatgtgctgtttttgagcggtggcaccgatgggcaggatgggcccacagaggctgctggggcctgggtcacacctgagcttgccagccaggctgcagctgagggcctggacatagccaccttcctagcccacaatgactcacataccttcttctgctgcctccagggtggggcacacctgctgcacacagggatgacaggtaccaatgtcatggacacccacctcttgttcctgcggcctcggtgatggcataggtcacattttgggagttcagaggaggcctacaagggcaaggtcagatggcagagcaaggttggtcctcagggcctctctaagccttagggcccctcctctccttggccttggctgtttggttaactgtcaccttccactcagggcctctgctctatatctattcccttccagccagactggcagatgggggcttccccctacccctgaggatgaggacaagcccctcggccagttcagcgttcccgtgcttctcccttgggcagcctctctcttgagcccctcaccctgtttctttctgtgaagcgagaatgtctgaaaataaataggaccatgccaaaaaaaaaaaaaaaaaaaaaaaaaaaaaaaaaa

SEQ ID NO: 6944 - DNA, 660 bp, Homo sapiens
  misc_feature (559)..(559): n is a, c, g, or t
  misc_feature (587)..(587): n is a, c, g, or t
  misc_feature (597)..(597): n is a, c, g, or t
  misc_feature (616)..(616): n is a, c, g, or t
  misc_feature (627)..(627): n is a, c, g, or t
  misc_feature (642)..(642): n is a, c, g, or t
ctactactaaattcgcggccgcgtcgacttttttttttttttgtcttatgtctctaatctgcactgttcagctcttttaggcactgcaaagttgtcttgaattaggaaagaggtgctagaatgtgggcgtgggtgttgacctacatctgaacaatttacatatgattcaccacaattaaacaatttggtttgaaatagctataattaagttattatcagagaagtatttactagtctagaaattctaaatttatcttcacatacaccctaactgagaaaagggccacattttctgcactctattaagtaaagcaaatgctgaactaaatgcctccatgttaacatttatattgttaagttactgacagcatattctatgaatgattacgttagtcgtttctttaaaaattataggtttgaaatagcaagaaaaatatgaaatgatggtagacaaaaaagagtttcagtttctaacttctaactatatatatacacacacacatgcacacagaattgccttcccggatgtatagaaattatatacagccatgtccaggcncgatggaaattatgggggaatatccaanttaggatacncgtgccgaatcgccgggtntaaataatacnggtttataatggacnatccacaatcctggttta

SEQ ID NO: 6945 - DNA, 1587 bp, Homo sapiens
atgggccctgagcgtatcttccccaattagactgagaaattggaaatcaggggcccttcagaaggcactggggattggagcagtgaggagcttgaggaagagcaggaggaaacgggttcgggcccagctggctactcctaccagcccttgaaccaagatcctgaacaagaggaggtggaactggcaccagtgggggatggagatgtagttgctgacatccaggatcgaatccaggccctggggcttcatttgccagacccaccattagagagtgaagatgaagatgaggagggagctacagcgttgaacaaccacagctctattcccatggacccagaacatgtagagctggtgaaaaggacaatggctggagtaagcctgcctgcgccaggggttcctgcctgggctcgggagatatcggatgcccagtgggaagatgtggtacagaaagccctccaagcccggcaggcatcccctgcctggaagtgaccacagtgagagctgccttatattcctacattccaggccagaaccagcacaggactgaacacatccctggttgtaatgtccatttccatcttccccgtctccctttccacatcaaggcacatcagacttctcagagacccactttattcagttctgtacatatggggacatcggtccaagcccaacccaccttagcatgtatcactctgtggagaataaagcaccctatgtacacagccaaaaaaaaaaaaaaaaaaaaaaaaaaaaaaaaaaaaaaccaaaaaaaaaaacccaaaagaacacaccaacaaccaaaacaaacaaaaacaactacagagcaagagcaccaagaccacagcaacagccaagaccagcaaagagagagccgagagcggcggcgcgagccatcccaagaaaacgaatacgacgcattgaggggcaacccatgccacaccaacgacaccgaacgagagtcagcagggggtgggtgtgcatcctcatggaggtctgcgcgtgcgctggcatgcggggcctcgcgcgcaccgcgcgataggaagacagggcaagggcaaacaacaatagcaccttgctagcgaaatcaaactaccggcagcgcagcgacacctacaggtacgagactatcaggataggaacacaccacacccagcaacaacgtgtaccccacaggacaaaccaacacagattgagaggcagctcagacgacaacacccaaaccggcggataaaaacggcgacacacaagatacccccgacgagtattagtaacacaacaaaccaaaatgcgtagtaaacacatagaggtgagtagaagacgaaaaacaaccaacaacgggacgacgcagcgcagaagaataactgacagaccacgcgaagagaacagaagcaggaggcacagcaggcaacgcacgcaacaagcagcaaagcagacgcacggcgacacaccacccaaaaagaacaccgcacgagcacagccaccaacaaacgacgcagcgacaacacgcagcagcgcaaccaggccgaggacgagcaagagcaacagacgacaacaagagccggacggcagagggagagaacaagg

SEQ ID NO: 6946 - DNA, 2054 bp, Homo sapiens
  misc_feature (28)..(28): n is a, c, g, or t
aaatgcagctgtacggtctgggatgtanggcatgtcgtacgtacgtccatccgtccacttgtccctcctggcaggtggtgtggggccaccatgctgatcctacaaacggggaggtgggggggacttctggtggtgcaagggcccctgggctctaatagggtcatctctggcagcccacttgggccagctacgtgggagggaggaattacacagctgaccgaatccggcttcggatgaggtgagggaggagcaggtcaggaggggggccctcgtagggacgcgtacactcacacggacacacatggccacacgcatgtgcgggtgccataaccggcgaggctgggccagccgctccaccatttccccgactgcatggagacagtagaattagtgaacccctgagttaacccgtaaggccttccgtgtaacctgcatctagagtttaagaagcttctgctgttttgccggaattggcggtgactggggagggctgggtgggtggggggcctcaggcgggatctcggggcggggggaggaggatggtgaccttgggagtcgccctgtcagcacgcacatgcttgggacccactccacacactccctgccagctttgttgcagcctcagctggtggtgtctccgtccttatcctagcctagctcgcagggtgagaaccactggagtggctggggctggccagaggtcaccgtttctccttcctgtgtgctccagtggcttttgaagacactgggttgggacctttttcctgaagagagctgggtgtagccagagctactggcacctaccccgagcatctctctctgtaagcagcttcaggggcagtccgtttctctgtgcttctgaaagcccccttctcacgtttcaggccccagttttaactcaaggcctggggcaggggcgtttaattgatgatgacagaggacacaggtttttgccagcaaaaaggaaaaccaaggcttggtggaagggaaaggtggtgtgtcccctgttccctattccatctccctgggacttcctgctcatcatagtacccagtgagcccagagatcctactagactgggtcagcaattctagagaaccttccggaatagtctgggaacatggtcaaggtggaaggggctcccctagagagggtgggggtgtagttacttcccagttggccagaaaactgggccttgcagacccccttagcattttttccctttttttccttccctgctttctacttctttggggagccccttgtgttttggagtctgactggagtctcgcatcctggggcctgctccatccatccctcctgggcgccagaccctccatccaagccctgtgtctttccatagtcagggtcaggccctgcatctattccaaggggcactcagtacacattccataaattagctgggtgtccctgcacgcccaccccatgaaactcgagcaggtctctggaagccatttgttaaaaaaaaaaaaaaaaaaaatttaaaaataccttttaattttctggtaattccagttctttgaagcatcctctgctgggtcttggggtgtgtggatggattggcttgtctgatgggattggtaacccctcgctactcaagatggggggatacaaacaccttcagggaaggggagcctggttcttctcgttttcctttttttttttttttaaaaaaaaacactttttatttttttatttatttttgggttgtttttggcccaatgaaatttcagtttttcaactttcccctacccagggttgtggacccaaattgggcttgacaaagtccctttcctcctacctttcccctggggccccgggcttggccttgaactggcggcggggatgcgccaggggggaaatccctggttacaccttggggcaaaccgtttggcaaaaacaacacataaaaaaaaaaagggggggcatattacgcgcacgacgccacattataagcataaagtaaaggggcaacgaggcatttgaggactggagccaccattttgttttgttagtagtttgcacgccgcgtg

SEQ ID NO: 6947 - DNA, 542 bp, Homo sapiens
ttttttttttttttttttttttatattacaaactgtatggatgcaggtatggggatgctagccgtcctcttccacaccatacagacagcctgtcagtggcagagtaaggccagcatgcaaatagagcaaaggtatacaagccaagtaatatcaagacaaaagtcagggattattacactctgagatcatttgagactctagatttgtctcttaaaccaaaattagattgtgttagccaatgactacattttcccctcttaaactagattgagttgtattttgctacttgcaataagaagaatcctaatatacttatcaaattgccagtgttccaaatttaaaactttaatgatgataaagttcaagaaaatgacactctaaaatacaactaggtcaaactttctagaagataaacaggcaattacattgaaagctttaaaatggatactttttgaccctgtaattctacttcttctaatttattattaagaaagaaccatgaggccgggcatggtggctcacgcctgtaatctcagcacttt

SEQ ID NO: 6948 - DNA, 3086 bp, Homo sapiens
gtgtacactatgtgcactgagggtgacacttctgagtgtgggggccctggctagggagtgggactggcaggcttgggtggggttcccaagctttaatcttcctaccccacagaatgttttctctgcccttcaggcagcctgagccgggcagggcccctgcctctgctacggcagcccccgatcatgcagcccccactggacctcaagcagatcctgcccttcccactcgagccagcccctacccttggcctcttcagcaactacagcaccatggaccctgtgcagaaggctgtgctctcccacacttttgggggacccttgctcaagaccaagcggcccgtcatttcctgtaatatctgtcaaatccgcttcaattctcagagccaggctgaggcgcactacaaaggtaatcgccacgcccgacgagtcaaaggcattgaggctgccaagaccagaggcagggagcctggcgtccgagaacctggagacccagctcccccaggcagcaccccaacaaatggggatggtgtagcaccccgtccagtttccatggagaatggactggggccagccccaggatccccagagaaacagcctggctccccatcccctcccagcattccggagactggtcagggtgtaaccaagggtgaaggggggactccagccccggcttccttgcctgggggtagcaaggaagaggaggagaaagccaagcggctgctctactgtgctctgtgcaaggtggctgtgaactccctgtcccagcttgaggcacataacaaaggtactaagcacaagacaattctggaggcccgaagtgggctcgggcccatcaaagcttaccctcggctggggcctcccaccccgggggaaccagaggctcctgcccaggaccgaactttccactgtgagatctgcaatgtcaaggtcaactcggaggtccaactgaaacagcacatctccagccggcggcaccgagacggcgtggccgggaagcccaacccactactgagccgtcacaagaagtctaggggcgccggggagctggcgggcacgctgactttctccaaggagctgcccaagtccctggcgggcggcctgctccccagccccctggcggtggctgcagtgatggcagcggcagcaggctcgccgctgtccctgcgcccggctccagccgcacctcttctccagggaccgccgatcactcaccctctgcttcacccggcccccggacccatccgaactgcgcacggacccatcctcttctccccgtactgacctcaaccctgaacccctcccattcaactccccacctccagccgggacccaggcgtccgggctcccagcccgcccctcctcccggcactccctaaatgatctctccttccccccccccaccccgagatacggggttccaggaaaggggaggggtagcgggggaggggggcttcagaagggggggaacaccccagatctcagggaaccccgccccctgcctttccctctcccctagaaaagggggggccgtctcacccccgagcccccttggagacaccccccctcccaaaagccatgtccatccagcccttccccccaaacctagcacaaaacggggttcacaagccatggtcggggtccgggggggacagaaatggattttcttggcaataagcggactctgggactccggctccctaccccaaactgaagcgcttccgtgaacacccccgtcctccgtagggggaggggagcaggcgggatcctgggtccctcataagcactttggttttaccgcctgcaacctcactgtgcccgccccgcaccatgccctagccccaggtctagccgggcccattgcagggggcagcacttgggggcatctccggcacttgggtgggaccaaggagatgccaccatagacctttccctcgccttcttcctccctagtccgggttccattcttttcaccagcacccatcgcccaaggggtaccgaggggggcaaggggtgtccagtccaagcccacccccgcctcgccttccgcaaaactgtgagcaaaaagcaatagaagcctcgcccccgcccttccccttcgcaggattcgccgagtctgtagcctccccgatccaagttcctagacctcatggctgtcccctcccaccagtcacctccactgcacaactcgggcgggggtgtgacacctctcccccacccccgactccgtggtttccgtatcgtcaacccttcagccgccgacccgggaggggtctggcctacactggtcttccccttcccatcaactctttctgcttgacaatgtagcaacccaggccccccacccacggtcctcccctttttcctctccctgacaataaagtctgaatttgttctgccctccaaaaaaaaaaaaaaaaaaacaaacaaaaaaaaaaaaaaaaaaacaaaaaagagaaaacgaaacaagaagagagcagccaagacgaaagagagacagaagagacaaaaaaatagggggagggggcgggaggaagagagagcccccggggggagaagaagaggggcgggcggagcgaaggagagagagaggaaaggaagggcgcggcagaccacgcgacgcgagggccggcgaaacgaagcgaagagagagaccgcagccgcgacgcagcagcggagacaaggagccagccgcacgagagcgacgggaacgacaggcgcacgaagcggagggagaagaaggcggccagggggccccacacgaccccaaccgcacgaagcgagccgaggaaggcgagaacggcaagcgggggagaggacacgaaaaacgcaacaaacagaaagaccacgaaaggcccccaaggaccacaaaggggcagggacgcgagcccaggcaagcagagaggcaagaggagcagtgaggaggagagagagagaaaaggagaggacaggacgaaaggagcgaaaacagggcaacggagcagcgagcgcgagggagagagaacggaaaaggaggagaaggcggacgacaagaagcagcaagcagagaaagagagtaggccaacgcagcgcctcctaccccccgg

SEQ ID NO: 6949 - DNA, 765 bp, Homo sapiens
  misc_feature (659)..(659): n is a, c, g, or t
  misc_feature (689)..(689): n is a, c, g, or t
ttttttttttttttttttttttcaaaattaacacaaagctaataagctgaatacacaatgcaaagcatcctaaatcttgggcaataacaaaatctaagatcctaagatcatgatatttaaggtaggaaaaaagtaatcagactagactgggtgcggtggctcacgcctgtaatcaatcccagcactttgggaggcagagatgggtggatcacctgacgtcgggagtttgagaccagcctgaccaacatggagaaaccccatctctactaaaactacaaaattagccgggcgtggtgccacatgcctgtaatcctagctactccggaggctaaggcaggagaattgcttgaacccaggaggtgaaggttgtggtgagctgagattgtgccactgcactctagactgggcaacaagagcaagactccatctcaaaaaaaaaaaaaaaaaaaagtaatcagatagcaaaggcaagttatttaatccagaccccatacccaatgcttaaaaattgtcatggatgatttgagaactgtaaaacctcataaaatagagagaggaaaagcctgaataaagagtattttaaaaaaacataatttggtttcagtaaacaaagaaaagctgaattgttaacacaaatttgctgagtagggatgttccanagaagtgacaagaggaacgtaaccttttangtaactcaactatgaaactaaaattatttcagtaaaaaatgtacaatcgtaaagcactgaactacttttattttgc

SEQ ID NO: 6950 - DNA, 2600 bp, Homo sapiens
  misc_feature (1523)..(1539): n is a, c, g, or t
aaatccgagcctcgcgtgggctcctggcccccgacggacaccaccaggcccacggagcccaccatgccgcgcccggcccccgcgcgccgcctcccgggactcctcctgctgctctggccgctgctgctgctgccctccgccgcccccgaccccgtggcccgcccgggcttccggaggctggagacccgaggtcccgggggcagccctggacgccgcccctctcctgcggctcccgacggcgcgcccgcttccgggaccagcgagcctggccgcgcccgcggtgcaggtgtttgcaagagcagacccttggacctggtgtttatcattgatagttctcgtagcgtacggcccctggaattcaccaaagtgaaaacttttgtctcccggataatcgacactctggacattgggccagccgacacgcgggtggcagtggtgaactatgctagcactgtgaagatcgagttccaactccaggcctacacagataagcagtccctgaagcaggctgtgggtcgaatcacacccttgtcaacaggcaccatgtcaggcctagccatccagacagcaatggacgaagccttcacagtggaggcaggggctcgagagccctcttctaacatccctaaggtggccatcattgttacagatgggaggccccaggaccaggtgaatgaggtggcggctcgggcccaagcatctggtattgagctctatgctgtgggcgtggaccgggcagacatggcgtccctcaagatgatggccagtgagcccctagaggagcatgttttctacgtggagacctatggggtcattgagaaactttcctctagattccaggaaaccttctgtgcgctggacccctgtgtgcttggaacacaccagtgccagcacgtctgcatcagtgatggggaaggcaagcaccactgtgagtgtagccaaggatacaccttgaatgccgacaagaaaacgtgttcagctcttgataggtgtgctcttaacacccacggatgtgagcacatctgtgtgaatgacagaagtggctcttatcattgtgagtgctatgaaggttataccttgaatgaagacaggaaaacttgttcagctcaagataaatgtgctttgggtacccatgggtgtcagcacatttgtgtgaatgacagaacagggtcccatcattgtgaatgctatgagggctacactctgaatgcagataaaaaaacatgttcagtccgtgacaagtgtgccctaggctctcatggttgccagcacatttgtgtgagtgatggggccgcatcctaccactgtgattgctatcctggctacaccttaaatgaggacaagaaaacatgttcagccactgaggaagcacgaagacttgtttccactgaagatgcttgtggatgtgaagctacactggcattccaggacaaggtcagctcgtatcttcaaagactgaacactaaacttgatgacattttggagaagttgaaaataaatgaatatggacaaatacatcgttnnnnnnnnnnnnnnnnncacctgaaaatgtggacagcttggtgtacttaatactcatgcattcttttgcacacctgttattgccaatgttcctgctaataatttgccattatctgtattaatgcttgaatattactggataaattgtatgaagatcttctgcagaatcagcatgatttttccaaggaaatacatatgcagatacttattaagagcaaactttagtgtctctaagttatgactgtgaaatgattggtaggaaatagaatgaaaagtttagtgtttctttatctactaattgagccatttaatttttaaatgtttatattagataaccatattcacaatggaaactttaggtctagtttcttttgatagtatttataatataaatcaatcttattactgagagtgcaaattgtacaaggtatttacacatacaacttcatataactgagatgaatgtaattttgaactgtttaacactttttgttttttgcttattttgttggagtattattgaagatgtgatcaatagattgtaatacacatatctaaaaatagttaacacagatcaagtgaacattacattgccatttttaattcattctggtctttgaaagaaatgtactactaaagagcactagttgtgaatttagggtgttaaactttttaccaagtacaaaaatcccaaattcactttattattttgcttcaggatccaagtgacaaagttatatatttataaaattgctataaatcgacaaaatctaatgttgtctttttaatgttagtgatccacctgcctcagcctcccaaagtgctgggattacaggcttgaaagtctaacttttttttacttatatatttgatacatataattcttttggctttgaaacttgcaactttgagaacaaaacagtcctttaaattttgcactgctcaattctgtttttcgtttgcattgtctttaatataataaaagttattacctttacatattatcatgtctatttttgatgactcatcaattttgtctattaaagatatttctttaaattaaaaaaaaaaaaaaaaaa

SEQ ID NO: 6951 - DNA, 1093 bp, Homo sapiens
ggtccggaatttccgggatgatcaacacatttcatctgggcttcttaaatctaaatctttaaaatgactaagttttcttccttttctctgtttttcctaatagttggggcttatatgactcatgtgtgtttcaatatggaaattattggagggaaagaagtgtcacctcattccaggccatttatggcctccatccagtatggcggacatcacgtttgtggaggtgttctgattgatccacagtgggtgctgacagcagcccactgccaatatcggtttaccaaaggccagtctcccactgtggttttaggcgcacactctctctcaaagaatgaggcctccaaacaaacactggagatcaaaaaatttataccattctcaagagttacatcagatcctcaatcaaatgatatcatgctggttaagcttcaaacagccgcaaaactcaataaacatgtcaagatgctccacataagatccaaaacctctcttagatctggaaccaaatgcaaggttactggctggggagccaccgatccagattcattaagaccttctgacaccctgcgagaagtcactgttactgtcctaagtcgaaaactttgcaacagccaaagttactacaacggcgacccttttatcaccaaagacatggtctgtgcaggagatgccaaaggccagaaggattcctgtaagggtgactcagggggccccttgatctgtaaaggtgtcttccacgctatagtctctggaggtcatgaatgtggtgttgccacaaagcctggaatctacaccctgttaaccaagaaataccagacttggatcaaaagcaaccttgtcccgcctcatacaaattaagttacaaataattttattggatgcacttgcttcttttttcctaatatgctcgcaggttagagttgggtgtaagtaaagcagagcacatatggggtccatttttgcacttgtaagtcattttattaaggaatcaagttctttttcacttgtatcactgatgtatttctaccatgctggttttattctaaataaaatttagaagactctctaaaaaaaaaaaaaaaaaaaaaaaagg

SEQ ID NO: 6952 - DNA, 2090 bp, Homo sapiens
  misc_feature (7)..(7): n is a, c, g, or t
  misc_feature (1751)..(1752): n is a, c, g, or t
gcgcctnaagaggaggcacgaggagcggatgagatcgtggggctcaccagcgtcccccatggcttctgagtagcgtgggagtggagtcagcaccaagccaggctccccgcgcctgccttgccctcacctgctcctgctctctgccagaggcagcatggtccgcagggcaccatggggcccgacagagtgacagcacgagaactgtgcgagaacgacgacctggccaccagcctcgtcctggacccctacctcggtttccgcacccataagatgaacgtcaggtctatcgctacctccgtgccttcctgccggaaagtggctttaccatcctgccctgcacgcgctactccatggagaccaacggggccaagatcgtgtccactcgtgcttggaaaaagaatgagaagctggagctgctggtgggctgcattgcagagctgcgggaggcagatgaggggctgctgagggccggtgagaatgacttcagcatcatgtactcaacccgcaagcggagtgctcagctgtggctgggcccagccgccttcatcaaccatgactgcaaacccaactgcaagtttgtgcctgcagatgggaacgcagcctgcgtgaaggtgctccgggacattgagcctggggacgaggtgacatgcttctacggcgagggcttcttcggcgagaagaatgagcactgtgaatgccacacctgtgagaggaaaggtgaaggagctttccgaaccaggcctagggagcccgcgttgccaccacggcccctggacaagtaccagctgcgtgagaccaagcggcggctgcagcaaggcctggacagtggcagccgacagggcctgctgggccctcgggcctgcgtgcacccatccccgctgcgccgggacccattctgcgccgcctgccagcccctgcgcctgccagcctgcagcgcccgcccagacacctcacccctctggctccagtggctgcctcagccccagccccgagtgcggccccggaagcgccgacgcccccggccccggagggccccagtgctctccacccaccacgctgcccgcgtctccctgcaccgatggggaggctgtggcccccactgccgcctgcgaggagaggccctggtggccctgggccagcccccccacgcccgctgggcccctcagcaggactggcactgggcccggcgctatgggctgccttacgtggtgcgtgtggaccttcgtcgcctggccccagccccaccagctaccccagcccctgctgggaccccaggccccatcctgatcccgaagcaggccctcgccttcgcccccttctccccacccaagcgcctacggctggtggtcagccacggctccatcgacctggatgtcggcggtgaagagctgtgacaggccggacggggaggcccagcagggagagagggtctctctcctagctgctacccaggacctccagaaggagcccttggacctctgggagggagctgacccttgactccagcatagctctgaccctggaatggggttggtttggacacccccagggatctgagccctgaccctttgtgactgctgacccctgagccacccccactcccacagggagccccggccatttgctgccctccccacccctgccccagcctcaggactgcaggagccatccgcccccctcagccccttcctccccagggagcaaagccataaggggcaggggccaccccacggcatctccccagtaacagnngcctcaggaggaggtggaactgatgtagggggtggcactccccagagactgccctcacgaggggactgggttcgctctcagctctgcagctgtctgcggtggggggaaggttggggggtgtctggaggcatgttcccctcaccaccccccgtgggtctcagggaggccgggtgtgacctcatctttctcatggtgctatcctggtgctattggggtggggagctccctcccctcccccacaccagaaaggggtatgttgggggcttggaagcacttgaactttttattttattaaaaccttgttataagcagcaaaaaaaaaaaaaaaaaaaaaaaaa

SEQ ID NO: 6953 - DNA, 4696 bp, Homo sapiens
gagcgggcgagggagcgcgcgcggccgccacaaagctcgggcgccgcggggctgcatgcggcgtacctggcccggcgcggcgactgctctccgggctggcgggggccggccgcgagccccgggggccccgaggccgcagcttgcctgcgcgctctgagccttcgcaactcgcgagcaaagtttggtggaggcaacgccaagcctgagtcctttcttcctctcgttccccaaatccgagggcagcccgcgggcgtcatgcccgcgctcctccgcagcctggggtacgcgctgaagcccgggaggcttggcgccggcgaagacccaaggaccactcttctgcgtttggagttgctccccacaaccccgggctcgtcgctttctccatcccgacccagccggggcgcggggacaacacaggtcgcggaggagcgttgccattcaagtgactgcagcagcagcggcagcgcctcggttcctgagcccaccgcaggctgaaggcattgcgcgtagtccatgcccgtagaggaagtgtgcagatgggattaacgtccacatggagatatggaagaggaccggggattggtaccgtaaccatggtcagctggggtcgtttcatctgcctggtcgtggtcaccatggcaaccttgtccctggcccggccctccttcagtttagttgaggataccacattagagccagaagagccaccaaccaaataccaaatctctcaaccagaagtgtacgtggctgcgccaggggagtcgctagaggtgcgctgcctgttgaaagatgccgccgtgatcagttggactaaggatggggtgcacttggggcccaacaataggacagtgcttattggggagtacttgcagataaagggcgccacgcctagagactccggcctctatgcttgtactgccagtaggactgtagacagtgaaacttggtacttcatggtgaatgtcacagatgccatctcatccggagatgatgaggatgacaccgatggtgcggaagattttgtcagtgagaacagtaacaacaagagagcaccatactggaccaacacagaaaagatggaaaagcggctccatgctgtgcctgcggccaacactgtcaagtttcgctgcccagccggggggaacccaatgccaaccatgcggtggctgaaaaacgggaaggagtttaagcaggagcatcgcattggaggctacaaggtacgaaaccagcactggagcctcattatggaaagtgtggtcccatctgacaagggaaattatacctgtgtggtggagaatgaatacgggtccatcaatcacacgtaccacctggatgttgtggagcgatcgcctcaccggcccatcctccaagccggactgccggcaaatgcctccacagtggtcggaggagacgtagagtttgtctgcaaggtttacagtgatgcccagccccacatccagtggatcaagcacgtggaaaagaacggcagtaaatacgggcccgacgggctgccctacctcaaggttctcaaggttctcaaggccgccggtgttaacaccacggacaaagagattgaggttctctatattcggaatgtaacttttgaggacgctggggaatatacgtgcttggcgggtaattctattgggatatcctttcactctgcatggttgacagttctgccagcgcctggaagagaaaaggagattacagcttccccagactacctggagatagccatttactgcataggggtcttcttaatcgcctgtatggtggtaacagtcatcctgtgccgaatgaagaacacgaccaagaagccagacttcagcagccagccggctgtgcacaagctgaccaaacgtatccccctgcggagacaggtttcggctgagtccagctcctccatgaactccaacaccccgctggtgaggataacaacacgcctctcttcaacggcagacacccccatgctggcaggggtctccgagtatgaacttccagaggacccaaaatgggagtttccaagagataagctgacactgggcaagcccctgggagaaggttgctttgggcaagtggtcatggcggaagcagtgggaattgacaaagacaagcccaaggaggcggtcaccgtggccgtgaagatgttgaaagatgatgccacagagaaagacctttctgatctggtgtcagagatggagatgatgaagatgattgggaaacacaagaatatcataaatcttcttggagcctgcacacaggatgggcctctctatgtcatagttgagtatgcctctaaaggcaacctccgagaatacctccgagcccggaggccacccgggatggagtactcctatgacattaaccgtgttcctgaggagcagatgaccttcaaggacttggtgtcatgcacctaccagctggccagaggcatggagtacttggcttcccaaaaatgtattcatcgagatttagcagccagaaatgttttggtaacagaaaacaatgtgatgaaaatagcagactttggactcgccagagatatcaacaatatagactattacaaaaagaccaccaatgggcggcttccagtcaagtggatggctccagaagccctgtttgatagagtatacactcatcagagtgatgtctggtccttcggggtgttaatgtgggagatcttcactttagggggctcgccctacccagggattcccgtggaggaactttttaagctgctgaaggaaggacacagaatggataagccagccaactgcaccaacgaactgtacatgatgatgagggactgttggcatgcagtgccctcccagagaccaacgttcaagcagttggtagaagacttggatcgaattctcactctcacaaccaatgaggaatacttggacctcagtcagcctctcgaaccgtattcaccttgttatcctgacccaagatgaaataaaacgtctctcttcccttctttcaggaatacttggacctcagccaacctctcgaacagtattcacctagttaccctgacacaagaagttcttgttcttcaggagatgattctgttttttctccagaccccatgccttacgaaccatgccttcctcagtatccacacataaacggcagtgttaaaacatgaatgactgtgtctgcctgtccccaaacaggacagcactgggaacctagctacactgagcagggagaccatgcctcccagagcttgttgtctccacttgtatatatggatcagaggagtaaataattggaaaagtaatcagcatatgtgtaaagatttatacagttgaaaacttgtaatcttccccaggaggagaagaaggtttctggagcagtggactgccacaagccaccatgtaacccctctcacctgccgtgcgtactggctgtggaccagtaggactcaaggtggacgtgcgttctgccttccttgttaattttgtaataattggagaagatttatgtcagcacacacttacagagcacaaatgcagtatataggtgctggatgtatgtaaatatattcaaattatgtataaatatatattatatatttacaaggagttattttttgtattgattttaaatggatgtcccaatgcacctagaaaattggtctctctttttttaatagctatttgctaaatgctgttcttacacataatttcttaattttcaccgagcagaggtggaaaaatacttttgctttcagggaaaatggtataacgttaatttattaataaattggtaatatacaaaacaattaatcatttatagttttttttgtaatttaagtggcatttctatgcaggcagcacagcagactagttaatctattgcttggacttaactagttatcagatcctttgaaaagagaatatttacaatatatgactaatttggggaaaatgaagttttgatttatttgtgtttaaatgctgctgtcagacgattgttcttagacctcctaaatgccccatattaaaagaactcattcataggaaggtgtttcattttggtgtgcaaccctgtcattacgtcaacgcaacgtctaactggacttcccaagataaatggtaccagcgtcctcttaaaagatgccttaatccattccttgaggacagaccttagttgaaatgatagcagaatgtgcttctctctggcagctggccttctgcttctgagttgcacattaatcagattagcctgtattctcttcagtgaattttgataatggcttccagactctttggcgttggagacgcctgttaggatcttcaagtcccatcatagaaaattgaaacacagagttgttctgctgatagttttggggatacgtccatctttttaagggattgctttcatctaattctggcaggacctcaccaaaagatccagcctcatacctacatcagacaaaatatcgccgttgttccttctgtactaaagtattgtgttttgctttggaaacacccactcactttgcaatagccgtgcaagatgaatgcagattacactgatcttatgtgttacaaaattggagaaagtatttaataaaacctgttaatttttatactgacaataaaaatgtttctacagatattaatgttaacaagacaaaataaatgtcacgcaacttaaaattttaaaaaaaaaaaaaaaaaaa

SEQ ID NO: 6954 - DNA, 1273 bp, Homo sapiens
  misc_feature (807)..(810): n is a, c, g, or t
  misc_feature (1088)..(1088): n is a, c, g, or t
ggcaggagctacccttcccgtggccccggaccttgggtgggctgtgggctcagggagcggaggggaggccttaagcatccactctctgcccggtgtttttgttctcatcagggagcctcagatgggaagggactcgagccccacctgtccctggactctggaatgccacggaattaacccgagcaggcatggaggcctctgctctcacctcatcagcagtgaccagtgtggccaaagtggtcagggtggcctctggctctgccgtagttttgcccctggccaggattgctacagttgtgattggaggagttgtggctgtgcccatggtgctcagtgccatgggcttcactgcggcgggaatcgcctcgtcctccatagcagccaagatgatgtccgcggcggccattgccaatgggggtggagttgcctcgggcagccttgtggctactctgcagtcactgggagcaactggactctccggattgaccaagttcatcctgggctccattgggtctgccattgcggctgtcattgcgaggttctactagctccctgcccctcgccctgcagagaagagaaccatgccaggggagaaggcacccagccatcctgacccagcgaggagccaactatcccaaatatacctggggtgaaatataccaaattctgcatctccagaggaaaataagaaataaagatgaattgttgcaactcaaaaaaaaaaaaaaaaaaaaaaaagaaaagtgaaaaaaagaaaaaaaaaaaaaaaaaaaaaaaagataaggaagaaaaaaaaaaaaagaaggnnnnaaaaggggggcgccccccaaaaaaccccccggggggggccccatttttcccccccccctttttttttaaaaaggaggcccccccttggggggcgtttttaaaaaaaaggggcgggggcccctttttttttacccccccgggggggggaaaaaccccccccccggggggattttttggaaggaccccttcttctcgttgggggggggccaaattgggccaaacctccccccaaagggattataacccctccgagggaaaaaaaaaaaaattttttttangggatataagggtgggaaacaaaaggcccatatttttttccccccccaaaaaaaatttttttccccgggggggtgtttttttttaaaaaaaatttttcccccgcggggggcggggggggccccccgggtggggggggggagttttttaaaaaccccaccccccccggggggttttttttttgggc

SEQ ID NO: 6955 - DNA, 851 bp, Homo sapiens
tttttctgtatctaatggattatgccgctctggaacattcatgtgatgcttttgttaattgcttatacattttattaagctaatgagcttggtcatagtaacatataaaatcaagaatcgtttaacttttgcaataaaaatcttgatgttgactctgaagtagtaagatgcaacttcaatgtactgggattgaggcagccatagcaatattaccacaggttttccaaaaattaacacaaatattttctattctagatgtgatatctttggcatcactgttcattcttttcctccttgattaaagtgaaacaattacattaaaatagttttatgatttaaaaatcattctttttttaagctattatttttaatgtaggtcagtgtgttatgtaaattgatgtccactacctgaacatgtgatgctttctcttttattccttggtatttcctccatattctctgagggccttcagtcaatttttttaaaggaaataataagttcaaatatgtatctatgacttagggttacaaagaatattttctttgcctccagtatactttgtattaaaaaaattataaaaggccataggtattcattttcaaatatttgaaaaaaaaaggcatggcacaattaaagcatatgcagaaccaacttggattattgctatatttctttctttctagtgtgtacggatattgatgacatttttaggtggctcttaacaagaacattttcctctctttagatgtgaatgcatagacagatattttctatgtaaacttttcatcagttcttgatagcaatagataacatttcctataatattccacacacacattcagccttcatc

SEQ ID NO: 6956 - DNA, 3309 bp, Homo sapiens
ggacagggcagctcaagacgctgaggtggtggctgcggcctttgaacaagtaagtgagccaccctcggagacccccgcgctggggacgggaggccggcgagcctcgggacctctgaaagccttgaggaggcgcggggacaccatggccgagcctctgaaggaggaagacggcgaggacggctctgcggagccccccgggcccgtgaaggccgaacccgcccacaccgctgcctctgtagcggccaagaacctggccctgcttaaagcccgctccttcgatgtgacctttgacgtgggcgacgagtacgagatcatcgagaccataggcaacggggcctatggagtggtgtcctccgcccgccgccgcctcaccggccagcaggtggccatcaagaagatccctaatgctttcgatgtggtgaccaatgccaagcggaccctcagggagctgaagatcctcaagcactttaaacacgacaacatcatcgccatcaaggacatcctgaggcccaccgtgccctatggcgaattcaaatctgtctacgtggtcctggacctgatggaaagcgacctgcaccagatcatccactcctcacagcccctcacactggaacacgtgcgctacttcctgtaccaactgctgcggggcctgaagtacatgcactcggctcaggtcatccaccgtgacctgaagccctccaacctattggtgaatgagaactgtgagctcaagattggtgactttggtatggctcgtggcctgtgcacctcgcccgctgaacatcagtacttcatgactgagtatgtggccacgcgctggtaccgtgcgcccgagctcatgctctctttgcatgagtatacacaggctattgacctctggtctgtgggctgcatctttggtgagatgctggcccggcgccagctcttcccaggcaaaaactatgtacaccagctacagctcatcatgatggtgctgggtaccccatcaccagccgtgattcaggctgtgggggctgagagggtgcgggcctatatccagagcttgccaccacgccagcctgtgccctgggagacagtgtacccaggtgccgaccgccaggccctatcactgctgggtcgcatgctgcgttttgagcccagcgctcgcatctcagcagctgctgcccttcgccaccctttcctggccaagtaccatgatcctgatgatgagcctgactgtgccccgccctttgactttgcctttgaccgcgaagccctcactcgggagcgcattaaggaggccattgtggctgaaattgaggacttccatgcaaggcgtgagggcatccgccaacagatccgcttccagccttctctacagcctgtggctagtgagcctggctgtccagatgttgaaatgcgcagtccctgggctcccagtggggactgtgccatggagtctccaccaccagccccgccaccatgccccggccctgcacctgacaccattgatctgaccctgcagccacctccaccagtcagtgagcctgccccaccaaagaaagatggtgccatctcagacaatactaaggctgcccttaaagctgccctgctcaagtctttgaggagccggctcagagatggccccagcgcacccctggaggctcctgagcctcggaagccggtgacagcccaggagcgccagcgggagcgggaggagaagcggcggaggcggcaagaacgagccaaggagcgggagaaacggcggcaggagcgggagcgaaaggaacggggggctggggcctctgggggcccctccactgaccccttggctggactagtgctcagtgacaatgacagaagcctgttggaacgctggactcgaatggcccggcccgcagccccagccctcacctctgtgccggcccctgccccagcgccaacgccaaccccaaccccagtccaacctaccagtcctcctcctggccctgtagcccagcccactggcccgcaaccacaatctgcgggctctacctctggccctgtaccccagcctgcctgcccaccccctggccctgcaccccaccccactggccctcctgggcccatccctgtccccgcgccaccccagattgccacctccaccagcctcctggctgcccagtcacttgtgccaccccctgggctgcctggctccagcaccccaggagttttgccttacttcccacctggcctgccgcccccagacgccgggggagcccctcagtcttccatgtcagagtcacctgatgtcaaccttgtgacccagcagctatctaagtcacaggtggaggaccccctgccccctgtgttctcaggcacaccaaagggcagtggggctggctacggtgttggctttgacctggaggaattcttaaaccagtctttcgacatgggcgtggctgatgggccacaggatggccaggcagattcagcctctctctcagcctccctgcttgctgactggctcgaaggccatggcatgaaccctgccgatattgagtccctgcagcgtgagatccagatggactccccaatggtgctggctgacctgcctgacctccaggacccctgaggcccccagcctgtgccttgctgccacagtagacctagttccaggatccatgggagcattctcaaaggctttagccctggacccagcaggtgaggctcggcttggattattctgcaggttcatctcagacccacctttcagccttaagcagccacctgagccaccaccgagccatggcaggatcgggagaccccaactccccctgaacaatccttttcagtattatatttttattattattatgttattattacactgtctttttgccatcaaaatgaggcctgtgaaatacaaggttcccttctgcaaaaaaaaaaaaaaaaaaaacacgagaaaaaaataaaaacaaaaaaaaaaataaacaaaaaaaaagagggggaggccacatactaaagatgtctcccacggagcaccaaaatgatttactacgacaccgctagttgttgaacaaagaatgggccaaaattggaaggtctataattagcaaatgtcggggtgctgtgttataaacactgctaccagtagtgacaacattgattacaggaagaagtggtgaaagagagcaaaatatgtatggggcgaacacatatgagtgaaagatatggaaagaaggaatagcgtacggcaaaataaaaaatataaagtctatatgtgtttagacatagattaaaggcgggagcgacacaatactgacaggcatttataaaacaaattag

SEQ ID NO: 6957 - DNA, 1198 bp, Homo sapiens
  misc_feature (262)..(286): n is a, c, g, or t
ttggctgtgttgtattccattgaacaaatgacttctatttatgcagcctgtcccctaatgatgagcattgaggttgtttacaccttttggtgagtctatttgcatcctacttggacatggtttttgtacaccttttcatcactccagtggaggagactcacctgcccaggacactctgcttcccctcttgtagctgaacttaaatgaggacagcagagctcctggggggctcccacggacccgccgtgggcccaggggaggnnnnnnnnnnnnnnnnnnnnnnnnngctgtggaccgtggatcctgagggtggcctggggcaagtaccggctgagggtccaggtgggctttgtgtacctttgggtcctggggccctggtgacttggactccaggttagagtcaagtgacaggagaaaggctggtggggccctgtgcttccgacttcatttcgagtgatggcagttcccaggaaggaatccacagctgacggtggctgacagatcagagaatggaaggcgaggcaggcgggcgtctgcgtgacctcaggtgcttggggcccagcagacccagagaaccatttccactaggccagggtgccggaagtgtccacaggtcttagattccctgttcagatgaaaagatttgtgcctttaatgataaaagtgatctgcatagagtcaaaaattcaagccatgggtataaaatgcaagtaaaatccctgccctcacctatcccaccctactacacagagatgtcctctcgagtttcctagactcactctggaaatttctgtatacacacagaagcttgtgcctctgctcgtgaaggcagagggagggagagctgaagggccagcaccttctcacctgtgggccccctcagtgctcggtcccagagcatgcaggactgtgcctcgtgttcagtttgctggtctgacttcatgctccttgggcaggatatgcatgtgccatgctaggagacatgtggatgtgaagctgggggacaatgtcccctggctatgcctttacaagggaagtaaggaaggtaggaggtgagcctgggagggagggagggaggcgcggagccgccgcaggtgtttcttttactgagtgcagcccatggccgcactcaggttttgcttttcaccttaccatttgtgaaagagtgagcaggaaaaagaaaaaaaaaaaaaaaaaa

SEQ ID NO: 6958 - DNA, 1583 bp, Homo sapiens
ggaattttcctgttcggtgtgaccaagacccacctggaaatggaatttggaactggcttcaggagacatcattcctgaacacactgtagggtgaattggtgcatcttccccaccatacacacacacacacacacacacacacacacacacacacacacacacaccccccaaaccttttcatggggaatgtgtggcaaccttgccaaacagcaccactcagagtgtgactctgactgtgaccttggccttaatgaggaacttcttaggagagtttgaggacaaggccaacatcgtcatctgggctcgctgcgtcccagcacatcaaactctgtccagagacaaggccaactgcaaatgaaagccagggaacattgctaagggtctgtggctctgtggtggtgttcatcgccttcctgagataggatttcccttgccagtcccaacctgtatatattctgtacagaagacatccctgaatatactgtaggtgagtcgtccagccaaatttatatctccaaaacatttttagctttttctacatgctatgaattgagatgacatgctcaacttgtaaataagtctttttgtacattaaaaaagtaattttttcataaaaaaaaaaaaaaaaaaaaaaaaaaataaaaaaaaaaaaaaaaaaaaaacaaaaaaaaaaacaaaaaaaaaaagaccacaaatactctaattcattaccctatagatcgaccaaacaaacttaagctcactcaatatttattctaataacaacgctcgctattctacatttactactaactatcaactaataatctcactcatacctctacaatctaatatccatcgccacaatactctaacatacgctatcatcataacaccacatcataatttaatctacaggcgccatcagttggaggaaacaacgcgaccaagccggaacaatctcggccctcatctgcacgggatcataccgcacaaccaccaccaccacgctctgctcaatgcactgaacacacacgacgactaacatatgcagagcatgaggaacagacaagatggctggacgacaaaatgctatgagctgcaacgataagcatcacgatcagggatgcgctacgtacgaccaagagaagagagccacagaagaatagaagggagagactacgacgagcactgaccatcggctgaatagcactcgctacgatgcggagcggggcggaggagggaggcaggagagggctgggcggagtcgcgacggcgtcaccagcgtgcgtctaagctgctggtgattcaagacatatgatagcgctcggaccagcactaacgcaacgtaggcgagcggagcgcaaagatgatcggagtcaaggcagactaaacggaaccaattacgacgagacatcaacacatatccaatgatctaacagacgataagactaggagacggaaagacaagacaaagggagattattgaagagaatgcaagcgacgaagttgctaagcacgtaccaacaaagaaaaagtacggtaagtacagggaatgatcagttatatgacttagaaggtaatggaattacacgagggttgat

SEQ ID NO: 6959 - DNA, 1812 bp, Homo sapiens
  misc_feature (1691)..(1691): n is a, c, g, or t
gagaggcgggaggcgctgagagtcatgggcggaggtccggggacagactgctttgcctgttgttgctcttcggaggcggcgatccccgaaggcgagctgaaatacggctgcaggctacaatttgcagccgacgattaaggaagacgacgagcgggagaggtggcccaccctcatggagcgcttgtgctcggatggcttcgcatttccccattactacattaaaccgtatcatctgaagaggatccacagagctgtcttacgtggtaatctggagaaactgaagtaccttctgctcacgtattatgacgccaataagagagacaggaaggaaaggactgccctacatttggcctgtgccactggccaaccggaaatggtacatctcctggtgtccagaagatgtgagcttaacctctgcgaccgtgaagacaggacacctctgatcaaggctgtacaactgaggcaggaggcttgtgcaactcttctgctgcaaaatggcgccgatccaaatattacggatgtctttggaaggactgctctgcactacgctgtgtataatgaagatacatccatgatagaaaaacttctttcacatggtacaaatattgaagaatgcagcaagtgtctcctcagaaacaacgagctgagaaggctacaagtgacgacaaagattctgtttcaaatatagccacagaaataaaggagggacctatatctgggacagtgtcttctcagaaacaaccagctgagaaggctacaagtgacgagaaagattctgtttcaaatatagccacagaaataaaggagggacaacaatctgggacagtgtctcctcagaaacaatcggcccagaaggttatatttaaaaagaaagtttctcttttgaatattgccacaagaataatgggcggtgggaaatctggaacagtgtcttctcagaaacaaccagcctcaaagactgcaagtgacaagacagattctgctttgaatacagctacagaaataaaggatggactacaatgtgggacagtgtcttctcagaaacaacaagccttgaaggctacaactgacgaggaaggttctgtttctaatatagccacagaaataaaggatggagaaaaatctgggacagtgtcttctcagaaaaaaccagccttgaaggccacaagtgatgagaaagattctttttcgaatatacccaaaaaaaaaaaaaaaaaaaaaaaaaaaaggacagtgtcttctcagaaaccaccagccttgacggctacaagtgacgaggaaggttctgttttgagtatagccagagaaaacaaggatggagaaaaatctaggacagtgtcttctcggaaaaaaacagcctcgaaggctacaagtgatgagaaggattcttttttcgaatataaccagagggaaaaaaggatggagaaatatctaggaaagtgtcttctcagaaacaccaacccttgaagggtacaagtgacgaggaagattctgtttttgggtatagccagagaaaacaaaggatggggaaaaatctaggacagtgtttttctgagaaaacaccagcttggaggcttcaagtgatatgagaaagattctgtttttgaatatagccagaggaaaaaagtatggagaaaaaaactaagaagatggtcttctcggaaaaaaaccatccttgggagcccccaagnggattgaaaaaggattcctttttcgaattataacccgagaaaaaaaaggttggggaaaaaaatcttagggaaaaggggtctttctcaaaaaacccccccgccccttggaagggggtacaaa

SEQ ID NO: 6960 - DNA, 5357 bp, Homo sapiens
  misc_feature (1447)..(1476): n is a, c, g, or t
  misc_feature (1901)..(1927): n is a, c, g, or t
  misc_feature (4257)..(4288): n is a, c, g, or t
  misc_feature (4454)..(4474): n is a, c, g, or t
catgtacaaggccttgctacctcagcagtcctacagcttggcccagccgctgtattctccagtctgcaccaatggggagcgctttctctacctgccgccacctcactacgtcggtccccacatcccatcgtccttggcatcacccatgaggctctcgacaccttcggcctccccagccatcccgcctctcgtccattgcgcagacaaaagcctcccgtggaagatgggcgtcagccctgggaatcctgttgattcccacgcctatcctcacatccagaacagtaagcagcccagggttccctctgccaaggcggtcaccagtggcctgccgggggacacagctctcctgttgcccccctcgcctcggccgtcaccccgagtccaccttcccacccagcctgctgcagacacctactcggagttccacaagcactatgccaggatctccacctctccttcagttgccctgtcaaagccatacatgacagttagcagcgagttccccgcggccaggctctccaatggcaagtatcccaaggctccggaagggggcgaaggtgcccagccagcgcccgggcatgcccggaagacagcggttcaagacagaaaagacggcagctcacctcctctgttggagaagcagaccgttaccaaagacgtcacagataagccactagacttgtcttctaaagtggtggatgtagatgcttccaaagctgaccacatgaaaaagatggctcccacggtcctggttcacagcagggctggaagtggcttagtgctctccggaagtgagattccgaaagaaacactatctcctccaggaaatggttgtgctatctatagatctgaaatcatcagcactgctccctcatcctgggtggtgcccgggccaagtcctaacgaagagaacaatggcaaaagcatgtcgctgaaaaacaaggcattggactgggcgataccacagcagcggagttcatcatgcccgcgcatgggcggcaccgatgctgtcatcactaacgtttcagggtcagtgtcgagtgcaggccgcccagcctccgcatcacccgcccccaatgccaatgcagatggcaccaaaaccagcaggagctctgtagaaaccacaccatccgttattctgcacgtgggccagcccccggccactcctgccaagcacagtagcagcaccagcagcaagggcgccaaagccagcaacccagaaccgagtttcaaagcaaacgagaacggccttccaccaagctctatatttctgtctccaaatgaggcattcaggtccccaccaattccctaccccaggagttacctcccttacccagcccctgagggcattgctgtaagtcccctctccttacatggcaaaggacctgtctaccctcacccagttttgttacccaatggcagtctgtttcctgggcaccttgccccnnnnnnnnnnnnnnnnnnnnnnnnnnnnnncggccgtccagagtttgtgacctaccaagatgccctggggttgggcatggtgcatcccatgttgataccacacacgcccatagagattactaaagaggagaaaccagagaggagatcccggtcccatgagagagcccgttacgaggacccaaccctccggaatcggttttccgagattttggaaactagcagcaccaagttacatccagatgtccccaccgacaagaacctaaagccgaaccccaactggaatcaagggaagactgttgtcaaaagcgacaagcttgtctacgtagaccttctccgagaagaaccagatgctaaaactgacacaaacgtgtccaaacccagctttgcagcagagagtgttggccagagcgctgagccccccaagccctcagttgagccggccctgcagcagcacnnnnnnnnnnnnnnnnnnnnnnnnnnnttggggcgcatcagtgacttccacgaaacttatactttcaaacagccagtcttcaccgtaagcaaggacagtgttctggcaggtaccaacaaagagaacctagggttgccagtctcgactccattcctggagccacctctggggagcgatggccctgctgtaacttttggtaaaacccaagaggatcccaaaccattttgtgtgggcagtgccccaccaagtgtggatgtgacccccacctataccaaagatggagctgatgaggctgaatcaaatgatggcaaagttctgaaaccgaagccatctaagctggcaaagagaatcgccaactcagcgggttacgtgggtgaccgattcaaatgtgtcactaccgaactgtatgcagattccagtcagctcagccgggagcaacgggcattgcagcgtgcaatgatgcgcttctcagagttggagatgaaagaaagagaaggtggccacccagcaaccaaagactccgagatgtgcaaattcagcccagccgactgggaaaggttgaaaggaaatcaggacaaaaagccaaagtcggtcaccctggaggaggccattgcagaacagaacgaaagtgagagatgcgagtatagtgttggaaacaagcaccgtgatccctttgaagccccagaggacaaagatcttcctgtggagaagtactttgtggagaggcagcctgtgagcgagcctcccgcagaccaggtggcctcggacatgcctcacagccccaccctccgggtggacaggaaacgcaaagtctcaggtgacagcagccacactgagaccactgcggaggaggtgccagaggaccctctgctgaaagccaaacgccgacgagtctctaaagggctccatcctaaaaaacaacgccacttgctgcaccttagagaacgatgggagcagcaggtgtcggcagcagatggcaaacctggccggcaaagcaggaaggaagtgacccaggccactcagcctgaggccattcctcaggggactaacatcactgaagagaaacctggcaggaaaagggcagaggccaaaggcaacagaagctggtcggaagagtctcttaaacccagtgacaatgaacaaggcttgcctgtgttctccggctctccgcccatgaagagtctttcatccaccagtgcaggcggcaaaaagcaggctcagccaagctgcgcaccagcctccaggccgcctgccaaacagcagaaaattaaagaaaaccagaagacagatgtgctgtgtgcagacgaagaagaggattgccaggctgcctccctgctgcagaaatacaccgaccaacagcgagaagccatccgggaagagactgtgcaaaaccaaacacttgatccctcaggagtccaggcggggattgccactgacaggggaatactacgtggagaatgccgatggcaaggatgagtgtgcggagattcagaaagcggccggagcccagttcggactatgatctgtcaccagccaagcaggagccaaagcccttcgaccgcttgcagcaactgctaccagcctcccagtccacacagctgccatgctcaagttcccctcaggagaccacccagtctcgccctatgccgccggaagcacggagacttattgtcagtaagaacgctggcgagacccttctgcagcgggcagccaggcttggctatgaggaagtggtcctgtactgcttagagaacaagatttgtgatgtaaatcatcgggacaacgcaggttactgcgccctgcatgaagcttgtgctaggggctggctcaacattgtgcgacacctccttgaatatggcgctgatgtcaactgtagtgcccaggatggaaccaggcctctgcacgatgctgttgagaacgatcacttggaaattgtccgactacttctctcttatggtgctgaccccaccttggctacgtactcaggtagaaccatcatgaaaatgacccacagtgaacttatggaaaagttcttaacagattatttaaatgacctccagggtcgcaatgatgatgacgccagtggcacttgggacttctatggcagctctgtttgtgaaccagatgatgaaagtggctatgatgttttagccaaccccccaggaccagaagaccaggatgatgatgacgatgcctatagcgatgtgtttgaatttgaattttcagagacccccctcttaccgtgttataacatccaagtatctgtggctcaggggccacgaaactggctactgctttcggatgtccttaagaaattgaaaatgtcctcccgcatatttcgctgcaattttccaaannnnnnnnnnnnnnnnnnnnnnnnnnnnnnnntttatcggcaggtttctgcaagtctcttgttctcttgctccaaagacctggaagccttcaaccctgaaagtaaggagctgttagatctggtggaattcacgaacgaaattcagactctgctgggctcctctgtagagtggctccaccccagtgatctggcctcagnnnnnnnnnnnnnnnnnnnnnggacccaccatgtacagtgtgttatagtgttaatccttgtgcatatgtgtcataatacaactatttctgtaaagaaaggacactattacatatgaaaatatctcttctttatataagagaaattactccagtcagaaggacttagaaacatgtttttttccttttaaacttttaagtcagtttttatgaagttgttataatgtttctttacttttcaatgcacacatgctttgggatacgtttgtttttacttggaacatttgtttcttttcttttttaaggagaaaaaaaaatgagtaaaaggagctccacactttgacttaatttcatacaaagctctgatgacaggccatgactgtagagtggtcagaactgtgtggttggtttgagggagcgaattcggggaaggcacttggtgatataactttgttttgtttacagagtacctgctcgggccaggtaaatgctattggatgtaatccagtagtgtgtaatataaattcaaaccatatccacacacaacaactaattgtatgaaacttttatatcctaatttaaaagctgtgaaattagttttcacgcatcaaaccggattgtttatatgtttaaacattttatgctcttatttaaagaagactttgagctatttttttctgtaccctgtaaaatattgaaaactaacataatatgttgaggttgcttggaaatgtacataaaactaaaattttctgaatcgtgtgtttatgtttgaaatctgtgttttaactttgtaagtaaattctctgcctttgtatttatattttacaaaaattttcttaaaaggcaataaaactgttgaggaaaggaaaaaaaaaaaaaaaaaaaaaaaaaaaaaaaaaaaaaa

SEQ ID NO: 6961 - DNA, 1010 bp, Homo sapiens
aagacaagcttccccaactgtaacccctcccaccccccaatctcatggaacagagatcttggaatgttcctcccacagttcaaaagaccccttttggtcacccaccctgggtataacactgaaatgggtatccagcttcctggcacctcttggtcagcaacccagtgttggcaccaaatgatctttagggaacatggttttaggcggaccacaccgcccacaacggccacccccataaggcataggccaagaccatacccgccgaatgtaggtgaggaaatccaaattggtcacatccccagggaagatgtagactatcacctgtacccacacggtccgggactcaatccaaatgcctctacaggacaagaagctctctctcagacaaccatctcatgggccccattccaggacacttctgagtacatcatttcatgtcatcctgttggcactagatgaagaacccttacaggtaattaattgttctcttcacttctcatggggcagcacagaaaggaataagttaggtaactgaagtgaccagccctcgaataaaaagtggcttcatggccgggtgtgatggctcacgcctgtagtcccagcactttgggaggccgaggcgggtggatcatttgaggttaggagttcgagaccagcctggccaacatggtgaaacctcgtctcttgaaaaaaaaaaaaaaaaagtggctccacttttagaacctcttagaagatggcacatttaaagccctgcttttttttttttttaaatccccaatatggctctactttggaggacataccagagagtcactagcttttatttcatagagaaaatgaaactatttctcttattctcacacatttgaggttcctttttgagtaagatagatggttctagaaaagaaagaaagatattctacctgaatttccatttgtgtgcagaagtctaaaacactacctttacgatttgtccttgaagaaccccactatctacaacatatctaaag

SEQ ID NO: 6962 - DNA, 1252 bp, Homo sapiens
  misc_feature (20)..(20): n is a, c, g, or t
  misc_feature (29)..(29): n is a, c, g, or t
  misc_feature (36)..(36): n is a, c, g, or t
  misc_feature (39)..(39): n is a, c, g, or t
  misc_feature (57)..(57): n is a, c, g, or t
  misc_feature (1138)..(1161): n is a, c, g, or t
aattcgcggccgcgtcgacntcgacgcgngaagatntcngcggccgtgcatagcggnctgccagaagacgacagaagggcaaatgggaaaaaaaaaaaaaaagggaagtagcaggtggagataatttaaatagcacagggacccctgcttaccaatccctccacagagttttgccctggagtaagcatgacatcagggtgcttgctgcttcctccagtggcccgagctctgtgtgcctttgttgaacaaggttttcgtggagctgaggtgactctcatgaacagagaatacctgtccttcatacagagaagcacccaaatgcaaacatctactttttctggtgttcaaccaggtaaacctctgtttagcaagaaacatcatccccagagtggggactgtcttgtcctttcagaagctagtaccctaagcaagactcataaggaaggtcgggcctccataggtctctgtttcttctgaacagtgatgagctaggtgcagagagagttaaaggtcctatgcagcttgacaagtgtgacccagttcccagtaaattccacttggctggggtttcagaggtgagcaagcaggctttttactcattacacaagaatctagacatccctttaattgggtggcattctgggtgctaaaaggaaggggctttgagaggcaaagatgatgggatatcataaatttttttgttccttttaatgtagcgcagctcctatacttcagatttaactttgaaatgtagcatagctaagatctggtccaaaaagatttctgatatctccatgaatcctagttagggattgataggaaaaaaaaatcttgtgccacagcttcatgctatttttaggaacctttctgaaaccagtggcagcccaagttagagcccagcattaagtccgcctctgcacatctacagttgccagcttatggtaaaagctttctgcaaagcttttctgctcctgggttaaggccttccagcatcagtcacatgtaattaacagctacattgtgtgcttactttttgctagatgtttcataaacattatctcatataaacctcacaataactaggtattattatcccgtatccctgttttacagctgtggaaagtgaagtgaaggattnnnnnnnnnnnnnnnnnnnnnnnnagaactgacttgaacctagctctctgtcttgattcaggaactactgctctttccattggtggctcctggctaatcaatgtgatagtctttg

SEQ ID NO: 6963 - DNA, 4229 bp, Homo sapiens
  misc_feature (1024)..(1087): n is a, c, g, or t
  misc_feature (1202)..(1229): n is a, c, g, or t
  misc_feature (1359)..(1375): n is a, c, g, or t
  misc_feature (1879)..(1896): n is a, c, g, or t
  misc_feature (2275)..(2313): n is a, c, g, or t
agcgggtcgggtggccgcgctgtggccgccggtggccgttaggctacctgaggccgttccttctggtctctctctcctgggccgcggagagaccgtctccctgccgttacagcaggccccatcccagcgcccagccgtacttggggaaaggccggttgcgattccggggctttcccgccagagctgggtcttctctggggagagctgttttcaccgggaagctcggctttctgtggtaccggcttcatctcccgccttccttgagacccgagtgatatttcttgactacttctgcgtctcacgtaaacatttctccaactctcctactctgtggtatctccctgagatgtgatatcgctagtgccaccatcagaaagaaacgtctggaccctcctgctcaggactttgtatctttgctaaagtcagtgatgtgaaaagacttgaaatggatgatattgctgataggatgaggatggatgctggagaagtgactttagtgaaccacaactccgtattcaaaacccacctcctgccacaaacaggttttccagaggaccagctttcgctttctgaccagcagattttatcttccaggcaaggacatttggaccgatcttttacatgttccacaagaagtgcagcttataatccaagctattactcagataatccttcctcagacagttttcttggctcaggcgatttaagaacctttggccagagtgcaaatggccaatggagaaattctaccccatcgtcaagctcatctttacaaaaatcaagaaacagccgaagtctttacctcgaaacccgaaagacctcaagtggattatcaaacagttttgcgggaaagtcaaaccatcactgccatgtatctgcatatgaaaaatcttttcctattaaacctgttccaagtccatcttggagtggttcatgtcgtcgaagtcttttgagccccaagaaaactcagaggcgacatgttagtacagcagaagagacagttcaagaagaagaaagagagatnnnnnnnnnnnnnnnnnnnnnnnnnnnnnnnnnnnnnnnnnnnnnnnnnnnnnnnnnnnnnnnnacacattttcctttacacctgtctcgatgtcttagttccagtaaaaatactttgaaagactcactgtttaaaaatggaaactcttgtgcatctcagatcattggctctgatactnnnnnnnnnnnnnnnnnnnnnnnnnnnnttttaactaaccaggaacagctgtcccacagtgtatattccctatcttcttataccccagatgttgcatttggatccaaagattctggtactcttcatcatccccatcatcaccactctgttccacatcnnnnnnnnnnnnnnnnngcttcaaatacacaatctgaaggatcagactctgtgattttactgaaagtgaaagattcccagactccaactcccagttctactttcttccaggcagagctgtggatcaaagaattaactagtgtttatgattctcgagcacgagaaagattgcgccagattgaagaacagaaggcattggccttacagcttcaaaaccagagattgcaggagcgggaacattcagtacatgattcagtagaactacatcttcgtgtacctcttgaaaaggagattcctgttactgttgtccaagaaacacaaaaaaaaggtcataaattaactgatagtgaagatgaatttcctgaaattacagaggaaatggagaaagaaataaagaatgtatttcgtaatgggaatcaggatgaagttctcagtgaagcatttcgcctgaccattacacgcaaagatattcaaactctaaaccatctgaattggctcaatgatgagatcatcaatttctannnnnnnnnnnnnnnnnngcgaagtaaagagaagggcttgccaagtgtgcatgcatttaatacctttttcttcactaaattaaaaacggctggttatcaggcagtgaaacgttggacaaagaaagtagatgtattttctgttgacattcttttggtgcccattcacctgggagtacactggtgtctagctgttgtggactttagaaagaagaatattacctattacgactccatgggtgggataaacaatgaagcctgcagaatactcttgcaatacctaaagcaagaaagcattgacaagaaaaggaaagagtttgacaccaatggctggcagcttttcagcaagaaaagccagattcctcagcagatgaatggaagtgactgtgggatgtttgcnnnnnnnnnnnnnnnnnnnnnnnnnnnnnnnnnnnnnnncaacttcacacagcaacacatgccatacttccggaagcggatggtctgggagatcctccaccgaaaactcttgtgaagactgtctcacttagcagaccttgaccatgtgggggaccagctctttgttgtctacagccagagaccttggaaacagctgctcccagccctctgctgttgtaacacccttgatcctggaccaggccctggcgagatgcattcacaagcacatctgcctttccttttgtatctcagatactatttttgcaaagaaactttggtgctgtgaaaggggtgagggacatccctaagctgaagagaagagactgcttttcacttcttcagttctgccatcttgttttcaaagggctccagcctcactcagtccctaattatgggactgagaaaagcttggaaagaatcttggtttcatataaattcttgttgttaggccttactaagaagtaggaaagggcatgggcaaaaggtagggataaaaacctccagcatatacatggacatacatacacacccacacacacaaacacacacacacacacaattttcacgatgtatggtcaggaatgtgactgtaaactggactttggggcccaggcataagtcccttcctccaggacctttcctatttatatgtccctatacaaaatccatctgcttttatacgtagctgttttatcatctgtagcttcatcctatccggaggcacagcacatgagccctggacaggtcccaaagttccaagcagtcctttccgtaaaagcaggggtttgcatgtgctaccaacacatgatacggggaagacccacccagggagcggtttcagtggcgcaacaaagcaccacttttactgttgcctacttctgaccaagaagaaaaaggaccttagtatttagcataaaattccagcgctggatgaatgcagatctagtttggtctgtggctagtttaaatatgtttctaaccacagagaatttcatatatatatacatatatatatacacatacatatatatatatatatgtatgtataaaatttcacagggatatgcttttttttttaaagactgaatgtgttcaccatttagcctgtagatttatttccattttccaaattccagcacacagagatcccagcccctatgagtagggtgttgtggactacctaatggaatatttttgaggcctggatgaactttgccatatgggtagaggttacagagggaggtgatattttcagctaaaaaaaaaaacgggtggagtttggactgatcaacttgagatttaaaaactgctattccttttgttctttctagcatctctccccaccctctgagagctcctcaggcttagatagtgaagtgatcaaatgccagtgtcatttggtacttaagttccaaagtaggaacattttatactttttctgtattgtaataggtagtttgtatgaaatcttttctcctctcccgtgtgtacgtgcattctttccagcatgtgcttttccctgggcttatttgaacaatttactgttttatacaagctcgttcagtacatcttctatgttttaccacaactcacacttcgaaacgacaactaattttttctaaatattcccattgttacctgaagtgttactggttccacttcaagcaatatatgtcctccttaaatgcctgctttggcgaagaacacttggttgttagtcctccctttctaccttctcttacactccctaatacatacttaacggttgagttccaaagacaacagcttaatttagatgggactcaattcttaaaggggagcgcatgcagaccgcaaatggtgtaggttacgtatgcaccgagggatttgtagcacaacactttctttgggaacactttgtgtgcatccccacaaat

SEQ ID NO: 6964 - DNA, 2392 bp, Homo sapiens
ttcggtggcagttcggaccctaggacccgcaggaggtggtgggctcgcaggaaggttcctctcccagtggccatgggtagcaacagtgggcaggctggccgccacatctataaatccctagctgatgatggcccctttgactctgtggagccgcctaaaagacccaccagcagactcatcatgcacagcatggccatgttcggaagagagttctgctacgcggtggaggcagcgtatgtgaccccagtcctgctcagcgtaggtctgcccagcagcctgtacagcattgtgtggttcctcagccccatcctgggattcctgctgcagcccgtggtcggatcggccagcgaccactgccggtccaggtggggccgccggagaccctacatcctcaccctgggagtcatgatgctcgtgggcatggctctgtacctcaatggggctactgttgtagcagctttgattgctaacccaaggaggaagctggtttgggccataagtgtcaccatgataggtgtcgttctctttgattttgctgccgacttcattgatgggcccatcaaagcctacttatttgatgtctgctcccatcaggacaaggagaagggcctccactaccatgccctcttcacaggttttggaggtgccctgggttaccttttgggtgctatagactgggcccatctggagctgggaagactgttgggtacagaattccaggtcatgttcttcttctctgcattggtgctcactttgtgttttactgttcatctgtgcagtatctctgaagccccacttacagaggttgcaaagggcattcccccacagcaaacccctcaggaccctccattgtcatcagatggaatgtacgagtatggttctatcgagaaagttaaaaatggttacgtaaatccagagctggcaatgcagggagcaaaaaacaaaaatcatgctgaacagactcgcagggcaatgacattaaagtcactgctgagagcactggtgaacatgcctcctcactaccgctacctttgcatcagccacctcattggatggacggccttcctgtccaacatgctgttcttcacagatttcatgggccagattgtgtaccgcggggatccctatagtggcacacaactccaccgagtttcttcatcgaaagaggagtcgaggttggatgttggggcttctgcatcaactccgtgttttcctcactttattcttactttcagaaagttttggtatcctacattggattaaagggtctttacttcacgggatatttgctgtttggcctggggacgggatttattgggctcttcccgaatgtctactccaccctggtcctgtgcagcctgtttggtgtaatgtccagcaccctgtacactgtgccctttaacctcattactgagtaccaccgcgaggaagaaaaggagaggcagcaggccccaggaggggacccagacaacagcgtgagagggaagggcatggactgcgccaccctcacatgcatggtgcagctggctcagatcctggtcggaggtggcctgggctttctggtcaacacagccgggaccgttgtcgtcgtggtgatcacagcgtctgcggtggcactgataggctgttgctttgtcgctctctttgttagatatgtggattaggtcaataaagagacaatgaccctaaaaaaaaaaaaaaaaaaacgaaaaaaaaaaaaaaaaaaaaaaacaaaaaacaaaacaccgcctggggctatcattattggcggggggccggaaaacaaagggtatactacgtaactcgcgcctgtgctctcatacatcgtttctcctgcgaccacaactagttttttcttacaccagggtggtcatatcaccgcgggggatccccattatagtgagggcgctcgtcattacttgatgactacacgcccaggtttttccccccttttttaagtctcctctcgtaatacacctagtcgtagtaatacaggacaaagaagcgcagagaactgatcaaaaataacacactcacaacgacatgccccacaacactagtagaccacaataaacatcatctcttaacaaaaaaacaaccttactacaagtcgctcgtcactaactatgttataccatcactttatttccaacgcaagataaagagtatacacaacctcttacattctcttacttattctcttttatcttttcatcttatttgtctcttttttattttatttttcatatttataacttatttcaaatgctctattttattcatgatctcgtctactctcactctctcgatctactcgttcatatagaagaagtagaataacatattatcaaacactcatcatgtgatcctctctatgcaaaatcgaccacaa

SEQ ID NO: 6965 - DNA, 6833 bp, Homo sapiens
  misc_feature (1328)..(1342): n is a, c, g, or t
  misc_feature (1957)..(1993): n is a, c, g, or t
gcggccgctgcccggagcctgggctcggctacccccccgccggcccccaccgagcggcgctgcttcctcctcgccgcatccctgagggaagcgccgcctgtgctgtcgggttctccgcccgccgactccttcctggccggaccccgctgtgctccaccccagtggctggaggagcagctctccagtcagcctttgcagcccctctctttttccctttccaccgggcctcctcggatcccttggctgggcactgaggcgggggaagaggctggggtcgccacggcggaggttgctgccgccacccccctgcgggggtggccggggttcccggctgggggggtaccgttctgggtgaggcatccaccatggtgaggcccctgtgccgctgccgcggctcccctctctcgggcgtgaggagctggcccgctgagctgctgttgctcccccgcctgctgttgctcctccatctccagatcggatcacggtgagggaaagatgagcgaggagacggcgactttctgacaacgataatagttatgcacgagtgcgagctgtggtgatgacccgagatgactcaagtggtggatggttaccacttggagggagtggactaagcagcgtcactgtcttcaaagtccctcatcaggaagagaatggctgtgctgacttttttatccgtggagagcgactcagggacaaaatggtggttttggaatgtatgcttaaaaaagacctcatttataataaggtcactccaacatttcaccactggaagattgatgacaaaaagtttggtcttacgtttcaaagtcctgctgatgctagggcttttgatagaggtatccgaagagctatagaggatatttctcaaggatgccccgaatcaaaaaatgaagctgaaggggcagatgacttacaagcaaatgaagaggattcttccagttctctagtgaaggatcacctttttcagcaagagacagttgttaccagtgagccttatagaagctcaaatataagaccttctccctttgaagatctgaatgccagaagagtctacatgcaaagccaagccaatcagataacatttggtcagccaggcttggacattcagagcagaagtatggaatacgtacagcggcaaatatccaaggaatgtggaagcctaaagtcccaaaatagggtccctttgaaatcaatcagacatgtcagctttcaagatgaggatgagattgtcagaataaaccctcgagatatcttaatacgtcgctatgcagactacagacatcctgacatgtggaaaaaaaaaaaaaaaaaaaaaaaaaaaaaannnnnnnnnnnnnnntctaaaccagacagtaaaaaatcagactatctgtactcttgtggggatgagactaagttaagttcacccaaagactctgtggtatttaagacgcagccttcctcattaaaaattaagaagtcaaaacgaagaaaagaggatggtgaacgttctcgctgcgtatactgccaggaaaggtttaatcatgaagaaaatgtcaggggaaaatgtcaggatgctccagaccctattaaaagatgcatatatcaagttagttgcatgctctgtgcagagagcatgttgtatcattgtatgtcagactcagagggagatttttctgatccctgttcgtgtgacactagcgacgacaagttctgcttgcgatggttagccctggtagctttgtctttcattgtaccatgtatgtgctgctacgtccctttgggaattgggccatcgctgtggtgaggcatgtggttgctgtggtgggaaacataaagctgctggatgaaatggtccagtgccaaaatgagcttaaaatctttgtttccaggaattagctaacttggatttgtggaagcttttggcaagcaatatggaatcttgcctggtatcattgagcccacacatggaggnnnnnnnnnnnnnnnnnnnnnnnnnnnnnnnnnnnnntgcctaacttttcccttgagtgcatggcatgttttgttacaggttgtagagtatttgcagaaggaaaccatttctggttatttggctataaaaagtcagcataaaatatgatccaactaaaagggattaatttttggcatttttgtatatttatgcattaggtgatgggacttttaaaggtttgaatttattaggacacgaactaaaaataaaagtgcactaggggacagttgatttcaatctaagaaaagttaacacttgggaattacaagaagtaaaacaagtgcaactaaatcatttattagttgttttttgaaagcagttttatgtataaataacaaatgtttatatttaactaaatgtaaggtacgaattattacatattaaacttttcttccccttcctagttctgaagtagatatatatatatatatatctactgtcacattccatatattttgaatatttaactcatctagttaataatgtttttattccatgcgaatgatttgatattttcatccttatttctctttggctacaatttatattgagttatatctgtacattctggtaatctaaaatccttaaaaatactctaatagccttgagtgaccaactttttttttaaagcacagatgtaattgtctaatgttctgatgggaacgtaacacttatttttatataaaaagagactgagtaaacaaacattatagaaaaaaagtgaagttttttagttgttttttgtggtattcaaccagcaagttgttttctttcagagtttcctccttcaaaaagttatattgcatttacaaatgttttacaaggcagaaagtttgactggatagttagtgtaaaagcttcatgttgagatcttcacgtatcattctgctaaaccagaatatgttcagctgtgttactaatttttcagcttaatcctcagtgcttattatttacataacaataactttttatcagttacattttatttttatttaaactggccaaaagcaaaattattttatgttaaaatgtgtgctaaactatcccaggaaagtatttaatccaacattgtaaatgaagtatcttgtacatataaatttatttcttttgcagagcattatattactggatgtttaatttacaaaatagttgggtaaatgttccaacaaactttaaagtaccttgaagtcaaattgtctgtttttgttttgttgttgttgttgttgttttcttaagtgttacattaaaactctaaccaaggaaagggttctttaagaacattcccttagagggataaagttgagaagtgtgccttttttttaatggcttgaagtttcagaggtgataaaaattaaaatcacactactatttgaagctcattttctatgcaggtttttaaacgtcatttatgtatcattctttttatatatcacacttaagcttgtgttagcttttttcttttgccccagatcaaactgaacaatgtatataacactatctgtctgtaaaatactttttttaagaaagcatttatatttatatgacagcttgaactgacaacattgtgtatatagatcatcttgaagtattatttcacattgaaaagaagaaaatatattgataactatagatgttatgaagaagagggtatttctagttttgtactaaaaatcaattggatgaactaaatccaaaacatgacactgtaggcagcagttttaagtcttatttttactgtttatatatttgaatgctgctacaacagatgatcttcatccctgaagttttcagctaaacttggtttcctagaatagactgttaactttcaaaatttttattggtgaaatggaaatactgtttttccttgtgaatgaattttcatatttgtaagtgctaagtttataattcaggtttgatcaaggtgtgaataactgaagaaaataacttgctggctatataggaaaatgctgtggaaatgaactgtgtatatacttctgggaggaacaaatttaatcatttcttctgttaagcactaatcagtatagtgcaactcctggttctgtactgtattttatatgcaacatatatgctttaatattttaatgtttgtgcattaatattttcaatttgtttaaccactttgctgctaagattttgccgtcccattcccattttttcctttacaattttaaacaagtttcttcattaaaaactatggtgatgaaatggtttttattttaccttggatctttatagttaacatacccagtttcttaatcagtctacaagactaactgatgatataatgttctctgaatccctatatggaaattttcttttgagtaaatgagaattcctttgtgaaagcaaatgggtagtttaaatcactgattcttaaacatgtgtataggcaccttcaggaacattttctcattctctgtacagattcggcactgccaattggcttttcctctaaaacttttctttgtttttatctgatataagcagatggctcaagacaactgcttgagtaatagtattgaaaatggaatcatctagacggcatgacaagcaagactggtctgatgaacttgttcagaattgataattcttaaatatttctcttggcttcaaaagggacatcatttgatttctgaagaagtatgtcatgtggagcttcagcaccacctactggatgatttccaggccagagacatgagatggcaatagggatctgacagggttcatcactactaccattaaagggctatttatgtggtgaccacctctaccagggaaaccaggaataagaactgtctcaaaggaattgtaaaatggttatttacctaatgtgtcttgttggcttgctgaaagattttaagcacttttttcttacatatcctgttttaaaatatttgttgatatttgggactggcaatcaaacttaatggatgtactgaggcatttatagaaccagttgctttaactctcaaaagccattaccaaaatggtatttttttcctccttccgccagtcagggagaatttttaaaaataataatcaaaacatgaaaaaacataatcacacctgtattttatcatgacagcttcagagagtgtgtgtgtacgtttttctctcttttatttgagacggagtttcactcttgttgcccaggctggagtgcaatggtgcgatctcagctcactgcaacctccgcctcctgggttcaagcgattctcctgcctcagcctcccaagtagctgggattacaggcacccaccaccatgcccagctaagttttggtattttagtagagatggggtttcaccatgttggccaggctggtcttgaactcctgaccttaggtgatccacccacctcggcctcccaaagtgctgggattacaggcatgagctactgcgcccagccgtgtgtatgtttctgaaatgatgatggggtggggttaaaatctaaagggaaaaacttgaaactacctattttcattggttattcagcagtgcctaaaatgagcttttgaagtaatgtaaatgcgctttcaattcatgtgtatagtgccatctgatatcttgggtaagtcttgctttttcttttctttttcctctcccctgcccccttaattaaatggcacggaaatgtttcttaatatacacgtgagtctccagagtacaggaaatgtgctttcctctaaatggtcaatgtaaagaatcttaaggatattccttgtgttgaaatttacattcgattttgtgattacacttggaaatatgtgttaaattgggtttttaattgtagcctaaaggtgcattaagcaagtgtaacattttttccacataaaacttagaaaactttagttacctgaaaagcaaggattctttactaattattatgctcattcttgatttgacttccatgttcacacttcaaagtgtaagaggaagcactagaaactggcattattgttgcactaaaaaagtctataaatcataatagcaccatgaggtgttttgcaatgagacaaacatgaagaatgaatttctttaagagagaaacacaaccggaggtgatttatataaaccaaaagaaaaaaaaaggctttaaggtattaggtactgtttgcctagcagccaggtggttataaaagattcatatgctttggtacactgataaatgttagccattattcctgaaagcttcttaaattgcatcagttgttttgaaattttttcaagaataaactagttgaaaagtctttgtattaaaaatacacatagatttttgtgaacatttccagtgtgtagtgtcgtttgctttctatttctgacctcaaaagtgcctcacttgtatattatttccattaaaagcttgactgcattctttctaatgaacaatgaaaaactgtttaactcatgtcataatgtgtctcctcagatatagttaactagcttgatagttttgagtatataatgtaaataatacataataagtttgtaaccatttctgttacttcatacccgtgtaattggacatagcagatgattatcataagaatttgttttaatggtttttttccctcctggaattacctgattaaacctgtcatgaattataaaaaaaaaaaaaaaaaactagaggtattaaattatccttgaaataatatggggggaaggtacaggcggttggaaataggggatgaaaggatatttagggagatatttgcattaaaattttgagctaaggagaataaggtaaaaagatatgggggagggagaagaaagaggtaaagatgtttaaagggtattgtaaaaagtgggaattt

SEQ ID NO: 6966 - DNA, 2385 bp, Homo sapiens
caccacacccagataattttttgtattttgagatggggtttcaccatgttggtcaggctggtctcgaactcctgacctcaggtgatccacctgccttggcctcccaaagcattgggattacagatgtgagccatcgcgcccagcctttaggcttaaattctattcccttttgcttacaaacaacttcataaagactgtactccaaagcggtacagaaaaaagttacagtatctagaaaggactgtctatcctactaggaagtgctagacctctagatacagtttaaggagtttttccaaatctacagggacttaatttatgagtcatttagtgcttaggaaataaacatctatctattgaaagcttttcacttgcttgaaaaagagaaaatgatgtttaaccaactaggacagagataaaacttggaactcttccacaagccattaacctcgaaggtgatctccagagtgagtcacaaaggcaggccaggaacaggagaggaaaccacaacgctcgggcggatagccaaatgggcaactgattccagatgggaaaacagctttgactcaaaccttcagatactaaaggaaagaagctctgcaatgtatcgatagatcatgctttagtttaaaagtttatggccgggcgcagtgggaggccaagacggatggatcactaaaggtcaggagttcgagaccagccaggccaacatggtaaaaccctgtctctactaaaaatacaaaaattagctgtgcgtggtggcaggcacctgtaatcccagctacttgggaggctgaggcaggagaattgcttgaacctgggaggggaaactggggaagtggggaaccgaggggcaaccaggggaagatggggtgctggaggagagcttgtgggagccaaggagcaccttggacatctggagtctggcaggagtgatgacgggtggaggggctagctcgaggcagggctggtggggcctgaggccagtgaggagtgtggagtaggcgcccaggcatcgtgcagacagggcgacatcagctggggacgatgggcctgagctagggctggaaagaagggggagccaggcattcatcccggtcacacttttggttacaggacgtggcagctggttggacgaggggagctggtgggcagggtttgatcccagggcctgggcaacggaggtgtagctggcagcagcgggcaggtgaggaccccatctgccgggcaggtgagtcccttccctccccaggcctcgcttccccagccttctgaaagaaggaggtttaggggatcgagggctggcggggagaagcagacaccctcccagcagaggggcaggatgggggcaggagagttagcaaaggtgacatcttctcggggggagccgagactgcgcaaggctggggggctatgggcccgttccaggcagaaagagcaagagggcagggagggagcacaggggtggccagcgtagggtccagcacgtggggtggtaccccaggcctgggtcagacagggacaaggcaggggacacaggacagaggggtccccagctgccacctcacccaccgcaattcatttagtagcaggcacaggggcagctccggcacggctttctcaggcctatgccggagcctcgagggctggagagcgggaagacaggcagtgctcggggagttgcagcaggacatcaccaggagggcgaagcggccacgggaggggggccccgggacattgcgcagcaaggaggctgcaggggctcggcctgcgggcgccggtcccacgaggcactgcggcccagggtctggtgcggagagggcccacagtggacttggtgacgctgtatgccctcaccgctcagcccctggggctggcttggcagacagtacagcatccaggggagtcaagggcatggggcgagaccagactaggcgaggcgggcggggcggagtgaatgagctctcaggagggaggatggtgcaggcaggggtgaggagcgcagcgggcggcgagcgggaggcactggctccagagcccgtggccaaggcgggcctcgcgggcggcgacggagccgggatcggtgcctcagcgtcgggctggagacgaggccaggtctccagctggggtggacgtgcccacccagtgccgaaggccaagacgccaggtccggtggacgtgaccaagcaggacatgacatggtccggtgtgacgggaggacagaggaggcgcgtgcgggccttcctgaacaccttaggtggtgggggctgcgggcaagaaagcgggcgtgtgtcttaacttcctccacggagtcggcgcacaatggggtgcctctggggtccgaacccaacaactgtgaacagatggcggtcccaagtaaaccgg

SEQ ID NO: 6967 - DNA, 645 bp, Homo sapiens
ctactactaaattcgcggccgcgtcgactttttttttttttttgctaccatctaaaaatataaaaatcattcttagctccaagatggatttggcccataggttgtgcggtctgccacctcctagcttaaaacaacatcctaatcccaatagtccgtctaacctaccttttgtttattttgttgggaaagggggctctgtgaattatcacctatttaattcatgttaaaaaccactatgcaactatttccaatttccaaaagaagaatcccactcaggcataggaacaccccaaaaactaaacaaaactgacaaaaaaattgaacactgcctagagcaaaagtgccaaataggttttaccttcggagtcaattccaatcagcgttagtaatggctgcctagggcactataccaagaaagattttgaggatatttttagagaggatttcatagtattggaagggaaggggagcagcattagtgtcttgtatttgccatcctagtctagaaaaaagataaacaaagggccattttatttattaaaaagatatttccaccattttttaaggtagataggattaaggatggttttctagatctaaactagagtggtatttttcataagtagaaacctcgtgccgaattct

SEQ ID NO: 6968 - DNA, 1264 bp, Homo sapiens
cttctaggtggtgtgggcgaagtttgggactggtttagggcggggataagaccaagaacacaagtttccttgtactaagggagagagggaggggaggaaattggagaccccagcacccccttgctcactctcttgctcacagtccacgatggcccggtccctggtgtgccttggtgtcatcatcttgctgtctgccttctccggacctggtgtcaggggtggtcctatgcccaagctggctgaccggaagctgtgtgcggaccaggagtgcagccaccctatctccatggctgtggcccttcaggactacatggcccccgactgccgattcctgaccattcaccggggccaagtggtgtatgtcttctccaagctgaagggccgtgggcggctcttctggggaggcagcgttcagggagattactatggagatctggctgctcgcctgggctatttccccagtagcattgtccgagaggaccagaccctgaaacctggcaaagtcgatgtgaagacagacaaatgggatttctactgccagtgagctcagcctaccgctggccctgccgtttcccctccttgggtttatgcaaatacaatcagcccagtgcaaaaaaaaaaaaaaaaaaaaaaaaaaaaaaagaagagatagcaacaaaaggccgcttgtgtgaaggcgccaaaagttttcgcccaagagaccttcggcctcccccagggcgcgcgcaaaggcgccttgttttgacaacctcttggacaaccggaggggctaccgcccggagacccctgtggtggaccccccgggcaacccggtgtgacagggtactcacccccacggctttgtcgggggtcccaccaaaggccccaaagaggctctttcaaggcactattccttgttgtagaccttgtgtgtgccacaggcgccaaagaaacctcggggggctaacaaacgcacgtgcttggcagctccgagaaggctctctcccacccgaggggtggacgcaacagggggaatgggccatcatattgttgcccccggtgggcaccaactctttttcccccatagagaggccttagcacactatgtggggcacgttattgccgcctagagaaaccgagcgccagaaaatttcgaaggggggggcgcttctcatcattttgcgcaaaacccccttgtgggagtatgccccgaactcctctggaacacacaagcgacacttgcgcggggtctgcaaaaaacctcctgttgggaagccggcttcac

SEQ ID NO: 6969 - DNA, 1803 bp, Homo sapiens
  misc_feature (33)..(35): n is a, c, g, or t
cctcccgcctcctctaggccgccggccgcgaannntctgagtcacggtgaggcgactggacccacactctcttaacctgccctccctgcactcgctcccggcggctcttcgcgtcacccccgccgctaaggctccaggtgccgctaccgcagcgtggtacctggggctcctgcaggggtccactagccctccatcctctacagctcagcatcagaacactctctttttagactccgatatggggtcctccaagaaagttactctctcagtgctcagccgggagcagtcggaaggggttggagcgagggtccggagaagcattggcagacccgagttaaaaaatctggatccgtttttactgtttgatgaatttaaaggaggtagaccaggaggattttcctgatcatccacatcgaggttttgaaacagtatcctacctcctggaagggggcagcatggcccatgaagacttctgtggacacactggtaaaatgaacccaggagatttgcagtggatgactgcgaactgtgggttggctcctctagagatgccttgctcagaggagccagcccatggcctacaactgtgggttaatttgaggagctcagagaagatggtggagcctcagtaccaggaactgaaaagtgaagaaatccctaaacccagtaaggatggtgtgacagttgctgtcatttctggagaagccctgggaataaagtccaaggtttacactcgcacaccaaccttatatttggacttcaaattggacccaggagccaaacattcccaacctatccctaaagggtggacaagcttcatttacacgatatctggagatgtgtatattgggcccgatgatgcacaacaaaaaatagaacctcatcacacagcagtgcttggagaaggtgacagtgtccaggtggagaacaaggatcccaagagaagccactttgtcttaattgctggggagccattaagagaaccagttatccaacatggtccatttgtgatgaacaccaatgaagagatttctcaagctattcttgatttcagaaacgcaaaaaatgggtttgaaagggccaaaacctggaaatcaaagattgggaactagtggaaagcggaagagcaggtcttgatgtgtcctagaattttgccatttctgagattgagccattgaaggcattccatttctaaagcttatttagccggtgcttctaaagaattccacactaacgtgataacatggtttttgtaacaataaatgtaggatatttcctggcacatgcaaataaacctaatcattgtttctttaaaaaaaaaaaaaaaaaaaaaaacacaatagcattaccctccacaatcccatattacaaaaccaccccgccattcttcttattcactatcatctataaaatccatttctttattcccaccatccacactactgtcctcttttctccccacacgggggacttctcgggctttttctacttggggggggtattatactccccccccacatcctcctttgacttttgtgggaggggggcagagcagactcctctctgcagggggagtttctttctccccgttagggagggctccgataaatacgtttcctcgtgctttgtgggtgccgcctcgaaggcgggcgggcgtatttttctttggtctccagccctgaatacaacacaagaagtgccgccgtgaagggcggcccgcgctaggaccaatgccccgctcgctcccgttagacccgcgtctgttcttcgagctccctgatgagactgatccgccgtattttg

SEQ ID NO: 6970 - DNA, 2504 bp, Homo sapiens
  misc_feature (315)..(338): n is a, c, g, or t
cgcaagcttcgcctcttgggttcatgccattctcctgcctcagcctcccgggtagctgggactacaggcgcctgccaccagcctggctaatttttttgtatttttagtagagacggggtttcaccgtgttgaccaggatggtctccatctccagacctcgtgatccgcccgcctcggactcccaaagtgctgggattacaggcatgagccaccgcgcccggtggcttgcatgttttcttaaaaagctacagaaatttccaaatatcttctttcagataatagttggtggagtggcaagtacatcacaagatatgnnnnnnnnnnnnnnnnnnnnnnnnttggctgcaagtatgaaagaagggaagcaaggaattcagagaaatcaagagtctgttcagcttggagcgattgaggcctgtgtgatgtggctactagaaaatgaattcatccagagtacagaagccagtgatggaacagaaggtaagtgtgacttctcagttgcaatttactcactttttcttctttagtgagggtgtatgactgctcagtgaatggaaattgtcttttcatgtagtataaaaggaatttgattttttgagcagtgtatcaactcatttttagtaaatcagtattgtatttagcaacttcagaccattatgatagagcctgctcatacattttcatgctctggataaggtactatttgtaaaatttatcagccgggagggttagcatggaaaacagaaagatagtattttgttttattttattttgaatgtttgttcctctgtttcctcaccctaaccctaaaccaggaaaggtgtatcatccaacacatcttggttcggccactctttcttcttcactttctccagctgatactttagatatttttgctgacctgcaaagagcaatgaagggctttgttttagagaatgatcttcatattctctatctggtaagttctgttttaacaattatgtttgtgaaaatagggagaaaaaaatagatatataatcctgaacatcaaagataccctaacagaacatctcgtctgttttccatgcctaggttagtactggtgggaatagagaagaggtaagaagataattgttttaaagtaataatctaaatgttctagttacctttaaatttattttctccaacctcctttcaaaaaagatttgagttgttttataaaaaatatatatttttacaacgtataaaagaacagcaaagaaaaatgggatatcagaaaattaaagatcggatcatgatgtaaaactcaagcaaaggtcagtacacaaacatgcgtgccattaagtcatgtccaatgctgttgtcaactttgattctgggttttctagcaactaaaagaaagaggaaagcttgattagtgttaatattcataagataaaaaacaaaacaagtttaggaaaaacattgcatttccctgcctaagagaaatttagtcctaaaaggatactttggaacttaacattgtttgataaaaatctctataataaatgcaataaggaattttaaaagtttgtttatattagacaatgctctgtgaatattattttgtataacaaagatattaataagaattggatagtgtttaaggtcatgttctctggcaagaacctgatcagaaataattaattttgtcagttaagagcagatgcatgcattttgataagcaagtgataaggggaggtgagtaaaattgaaattctcattagaatgaagggggcttatcaggaaatgtgtttcaataaaaatcgctatgtagtgagcagaggggaaatgtctagacagtaccaattttcttttattacaaactcgcataatacatgggtgataataggctcaaaggtctgtgcccaagaatgtggctgggaggaatctcaaagcaggtttcaccggtcatctatcatggccttaaaaataagtcatttattatacagtggctaagattgtgggctctaggatcagactgccttagttcaacttttggcctcatcacttagtaatcatataaccttgggtaagtatttaacctctcttacgattccatttcctcatttgtaaaatggagataataatacccacctcagggctgatagtctttgatgaatgtttggtatctgaataaatgtttaataacatctattatttctagtaaattctcccataaacattatgtaagtcatttgccaaattacctaactactcctactcctgttccctctctaaaacgtgaagactgttggcagtgttagtatgctgaatgcttgtggttagtggtcttgtatacttctctcaccattcgagttgtatgcccttcaagagttagttgtgttcccaaacttgttcatgtcagtttgcttctgagaaaattaggctgaggcagaaggatcacctgagtccaggaatttgagaccagcatgggaaacagagcaagaatctgtcgctaccaaacaaaaaaaaaaaaaaaaaaa

SEQ ID NO: 6971 - DNA, 5317 bp, Homo sapiens
  misc_feature (845)..(860): n is a, c, g, or t
  misc_feature (1554)..(1569): n is a, c, g, or t
  misc_feature (1632)..(1646): n is a, c, g, or t
gataaagaggcgacggagcgcagtcgctccgcgatggactcgccggtcccggcctctatgttcgcccccgagcccagctccccgggggcggccagggccgcggcggccgccgcccgactccacggcggctttgactcggactgcagcgaggacggcgaggcgctcaacggcgagccagagctggacctcaccagcaagctggttctagtgagccctacatcagagcagtatgacagcctacttcggcagatgtgggagaggatggacgagggatgcggagagaccatatatgtcattgggcagggatcagatgggactgagtatgggctgagtgaagctgacatggaggcctcctacgccacagtgaagagcatggcggaacagatagaggccgatgtcatccttctgcgggaacggcaagaagctgggggccgcgtgcgtgattacctggtccggaaacgagtaggagacaatgacttcctggaggtcagggtagcagtggtgggcaacgtggatgctggcaaaagcacgcttctgggggtcctgacacatggggagctggacaatggccgaggctttgcccgccagaaactcttccgccacaaacatgaaattgaatctggtcgcaccagcagtgtgggcaacgacattctgggctttgacagtgaaggcaatgtagtgaacaagcctgacagccacggcggcagcctggagtggaccaagatctgtgagaagtccacgaaagtcattaccttcatcgacttggctggtcatgagaagtacctgaaaaccactgtcttcggcatgacaggccatctgcctgacttctgcatgctcatggtggnnnnnnnnnnnnnnnntcgtggggatgaccaaagaacacctgggcttggcactggcactcaatgtacctgtctttgtggtagtcaccaagattgacatgtgtcctgccaacatcctgcaagaaaccctgaagctgttacagcgcctgctgaagtcaccaggctgccggaagatccccgtgctggtgcagagcaaagatgatgtgattgtcacagcctccaacttcagctctgaaaggatgtgcccgatattccagatctccaacgttacaggcgagaacctagatctgctgaagatgttcctcaacctcctctccccccgcaccagctacagggaggaggagcctgctgagtttcagattgatgacacctactccgtcccgggtgtggggacagtggtttcggggacaacactgagaggcctgatcaagctgaatgacacgctgctgctgggcccagaccccttgggtaacttcctgtccattgctgtcaaatccatccatcgcaagcgcatgcctgtcaaggaggtgcggggtggccagacagcatcctttgcgctgaagaagatcaagcgctcgtccatccggaagggcatggtgatggtttccccacgtttgaatccccaagcctcctgggagtttgaggccgagattctcgtcctccaccaccccaccacaattagcccgcgctaccaggccatggtgcactgtgnnnnnnnnnnnnnnnnagccaccattctgagcatggacaaggactgtctgcgcactggggacaaggccactgtacactnnnnnnnnnnnnnnncccctgagtacctgcacatagaccagcggctggtgttccgggaaggccgcaccaaggctgtcggcaccatcaccaagctcctccagaccaccaacaactccccaatgaactccaagccgcagcagattaaaatgcagtcgacgaaaaagggccccctgacgaaacgagacgaggggggcccgtctggtgggccagcagtaggagcacccccacctggagatgaagcctcctctgtaggggcagggcaaccagctgcgtccagcaatctccagcctcagcctaagcccagcagtggaggccggcgacgagggggccagcgccacaaggtgaagtcccagggggcctgtgtgactcctgccagcggctgctgaaccttcccctggcccaccctcaccacccaaggggtcatcatctctggccaccactccaccagatgggcagagcagctatgaccgccacccagccctcccgctcaggccacagccggagcctccgcattgcccccacccccattttccaggggggttgtaatttataagctgacgaaggtagccagacttccggaggactgaccatctctcactgtcctccccaccttcttcctcactcacacattttttgtacatctgggcccttagtttttattctgtttattatatgtctctgtctctctctattgtgtgtgtgtgtgtgtgtgtgtgtgtgtgtgtgtgtgtgtggtgcaggagtgccacccccagggccctgtcaacctctcttttctcctccatggctgtctgcctgcgtatctgtctctgagaatcctcggggcggtcaggggatgtcaggaggggaaggagccgccctccctatcttgctgctcctcttggcactcaggggcaccttccatggagccagaccgggtggaggggcttctgggatttggtgtctgctgctgccagagcaggaacccccagtctaggacttgggcattttaacagggagaaagtagtggcttcccttttctctctctcctcctttttccctttaagcccacagattcaggtcatgccaaaagctctctggttgtaacctggagacatgtggaggggaatggcgatgggattataggactctccccatctcgggccctgaccctgacccttgccaccaacccaaagacagctggtgggtttccccttggagacaatcctgcgtttgcctgggccggccctggctgccctcagctttcgctgatctgcccggcctggagcctcccatcaccccgcttcttgttgggcctcaggcactggttaccagaagggggtctgggtctgctcaggatcatgttttgtagcacctcctgttggaggggtggagggatgttcccctgagccaggctgagactagaaccccatcttccctgagccaggctgagactagaaccccatcttccccaccacgccacccctgtggctgctacaggagcacagtagtgaaggcctgagctccaggtttgaaagacccaactggagcgtggggcgggcaggcaggggttagtgaaaggacacttccagggttaggacagagcatttagccttctggaagaacccctgcctggggtgggactgtgcaggccagagaaggtggcatgggcctgaacccacctggactgacttctgcactgaagccacagatggagggtaggctggtgggtgggggtggttcgttctctagccggggcagacacccagctggctgggtccttcctcagccttgcctcctcctgtccccaaccctttcctttcctcctgcttgcggactgctggtcccctctccttccctccttccagctgtttctagttaccacctacccctggccgtggactgatcagaccagcattcaaaataaaagtttgttccaagttgacagtgtggtgctccctgcccagcccctccaggtggaggtgctgccacgggaacgcagttgctctgcctgccctggggcccctggcgacagctgggagcagggcagtgctgtgaggagcccagctttcccagtcaggcaggcatggcttccgtgttcaggctccctcaccagctggtgacacgggacaagcttacaaaccttctctgaacctcagttttctcatttacaagaggcaaagccatccatcaccttgtgtggattcagagaatgtgaggccctggggtgtcctacacaagggaaaggcttgctcagtgagcggtctgcacaccgttagccaccctgccacctctgtgccctgggcaggctccaaaggaaagctctggctgggactgccaggagtctcacacgctcctgttgacattcccagcagccgcccctgaggtcgatgtttgttctgtttttctttttcttttttgagacggagtctcgctgtgttgccaggctggagtgcagtggtgtgatctctgctcactgcaacctccgcctgccagtttcaagtgattctctgcctcagccttctgagtagctgggactacaggtgcacgccaccacgcccagctaactttttgtattttagtagagacagggtttcgccatgtcggccagggtggtcttgatctcctgacctcatgatccacccgcctcagcctcccaaagtgctgggattacaggtatgagccaccgcaccgggcctgttctatttttctagttaagggaactgaagctcagagaggtgtcaccagcaggtgttcattcccatgccagccttgccccccggcttttcccaggcaggctcctgcgtgcccactggctccagcctggtcctctgtctcttggctgcttcactcctgctctttgtcccgactctggccctgcttacaggggccactacctgctggtgcctccataacaagcgtctggcgttgagacccctggcatggcaggggctttggggtctggtttccacaaggcttagccatggcagaacctcgttttattttaactctttgcccctacaaacaaacagcagtacttgccagaaccattcttgggattcaggagctcgggcgactgccttggcctctggccgcacccaggagggtggggttggatctgtgtagttgccaggcccacacctgccagcagggggctgactggatccatgctttactgtgtttaatgggggtaacaggggtccctacagccctcccagctaaacatttggaacaaaacaccagcccttttgtagtggatgcagaataaaattgttaatccaatcacctacaaaaaaaaaaaaaaaaaaaaaaaaaaaaaaacctcgcagggatatacaatagccgggggcgcaaaagaggggcacaacaacgggcactgcggcccacgaggcagcacccatgcaacccccgacatcccctgtgacccagcgggggccaacacacaggcgcggtacccccaaataagcgacgctccaaccaaaattgcgaaataaggcgcgggggaaaccccgcgccttaaagaacccgccggagccaaccaaccgcaacaaaacaaccagcaacgcgaagcaaggacaacgaccaacccacgcggagcgaacaaacgaaacgaagccacaaaacacaccgccaccacggcagcacaacaaaacccaccgcaacaacaagagccgaccacacccacacaccaccgaggcaggaggccc

SEQ ID NO: 6972 - DNA, 1992 bp, Homo sapiens
gaattttgtggggacacagatagtgagattatagtggttgttcatctcttccctgccatgccatgcacacacgtggcaccttgggtttgtctggggggagaatgatgttcccgttatcccgatggtgtccagcttttgtatttgtcatgtcagctgctgggcctgtcttagaagttgctaataacttccactttaatattactcttattgatgcattgggtttttttattgaccaataaataatttaggcattggcaatgttaagaccataacataaaccttttctaagtaatttttccatattgagcttattagcatcttttggtatctgctgggtttttagctttacaacaggcactcacatataaacatgtttatcctatttagatttgtagttcctgggagtcagagttctgtgagcagtcttaacttataaagcatgttcagacatgcttttcagatgattttgtttcattttaaaaggggaaatggcattaacctaataggaattctcctcctgaacctcagaggcagcagatggtacagctctctttgaactttactgcccaggtgaacgttctctgcatttagatcttcaggagttttacagactagtgtggagtggacatgtaaggacaagaggaagaggcaggtttcagctgagctcttctcctccttagagcaggacagtgttgggatgggctgattgtgagtatggagttctttctggaggagctccagcaggagctgggcaaatactgggagctttgactaaggggcatgcattgcagatgaggtttgaccagaggttttccaggatccctgaagaactctgcacttctaagcctgtaaggccacaacaggtgagatgaagggggagttgaacttccagctccttgtgtgtcccctagggttccccttttgggtccacacaaaggctcttgagcccaatctgaaggtctaaggctatggatatctcctccatttctaagttgggacaaggttgtccagcaaaaagaaaagcaaagactggtccaatcttagagacgtttgttttggaagcagagctgggctattagctttcctcaagaaggaaaaaggagtgctacaaagttaaatactgatttttaaaaaaaattggcattcacacaatttctactaccacagatgagacttctttttgtttttctcaaaaacttaggctctccgagggattggtggaggctgtggtacagtgagggagcagagttctctgccacgttggaaatcagcctcagacaggagcaggccttgggttccctatggtggtggaggcgagctgagagatgttgaggcagtgagagcgattgatagactgctacccagcattggagagatgactctctagatgtcctgggctggcattctagcttctgacatgccagtcaaacccatagattcacacgcctgaagggaccatcagtggtaagatttatcctcctgacttcagacaaagccacatccaagccatctcaggcatttaaggatctatcctatttttgaagtctccaaaaaggatcccttggtctctcagtttaatgtcataaactctgtaagtcaggaaatttaactttagagcaagctcagattctttctatggttcaaagaccattttctttggcaatcatcctctctctgagtacccttcatgtatttgaaaaccaatactaaattggctttcagctgtctcttctccccaggtggaataatttcagttctagtcacttgaattcagaagaaaaagcatgctagcaaaattcaaatcaagtaaatataagccttttttaggcaacacaacaacaacacaccctcggcaactcccgagacacgcgcgaacccaccaccaacacatgtccaatctgaagtcccggcaacccttcaacggaacccaacggctcaccctcacatcgcagaccgtgcgaagtcccatggtacgccatcggctctaggcgg

SEQ ID NO: 6973 - DNA, 2341 bp, Homo sapiens
gtctgccgcgatctagaggatcccgactttaaaaattgaggctctacaggagctcttgtttatgtgggctatgcctatcaatgtttaccttagtagtcagtaaaactgggatttttttttcaaaggaacaccattatgaatagatgatgctaacattggtgtatccaccactcagcttcagaaatcaaactttactgatatccttgaatccccatatgtgtccttccctgaatgcattcctttgtcccccagaagtacagactatccaggattcagtgtttatcattcccatgtctttctttatgggttttctaaatttagaatatccccagagacagtttaaaatttttaagccaatgcagccataacacagtatgtgtattattttggaacttttattgacttggttcatccacccctccaggtgccattggtcacccaaccccctccaaagcagaggggcagttctctctagtactttattagctgccttgatgtcttgtttccagtcccttcagaaattatggtggagatacacacatacacattaatggaataaacactcttccctcctctcccttggggctccttcccccaaagaggtccattgtccacaagtactcatttgtgggactcaatatgttcccagccacaacaagagcattacattagaataggagctaacatgtgggaatcagcatatgtttagaattacatcttacacactgaaaaatgcactggaagagcagccattattgacagagacggtcctggctaatagatctgcctagttttaggctgcttaggggaacaggggtcctggaataagaagccccaccccctcctatgaagagaggaaagctggagacaaaaagaggaagcaagagatgaattgcaaaaaactaatcagattgcaacctcaaggtaacattttgcataataagttctaacaatgttttcttgtttatatcagcctcctcctcttagcctggcttactaggctggtgtttaattccaatgcttctgggttaatttattcaactttattatccttactatagtagcctcccctagcgttctcccctacctctcaaaggtctcatctaagtgtgtataaagctgttaaatagaggagaggaatcaggatgaactgcacagcattttcttaaggcctgtgggttctggagcctatgcttcagcaactgaagctgaactgtgtggttgttgctaacattggtgtatccaccactaagcctcagaaataaaactttactgatatctttgaatcccatgtgtgtccttccctgaatgcattgctttgtcacccagaggtaacagctatccagcattcagtgcttatcatccccatgtctttctttattggttttctaaatttggaatatccctggagacaactttggcaactgaagctaaactgtgatggttgttgacctctgatgtgctactttttaatcaagaacttattttccctctttctctctcagctcccacaggcccattctggtgactcatgacttgtatacacagaacaacagagaaaagaaaaatagaattagataaacaagcaggggcaacagtgagggctatgtcttacaaagaaccatttttaattgaattcattttctctcttgaaattcttttttttttccctcaaaagtgggaaaaaattctcaaataacaacagcaaaccaagaaagcagcttagtctgcactgcatttgcatttcttagtttcattccctattcaaaaatgtcttaggcaaatgtgtgggaatgaacatgcactttaaaattatgggacctagtagatttaatggagtgagccctggattgggagccaggggacctggctttgaatggtcccaacccaggcacttatttaccttagtttcttcacttataaaattaaacacaccatctattgatgaatggataaacaaaatgtgatatatccacagaagggaatcttgttcagctgtgagaaggaatgaagtatggacatgtgctataatgtggatgtgcgttaaagacattatgctaagtgaaagaagccagacacaaagaccatacatttcacgattccacttacatgaaatgtacagaatagctaaatctaaggacataaagtaggttagctaatgggtacaggtttcattctgggttgatgaaatgttccaaaattgattgtgctgatggttgtatttaaaactctgcatatactgaaaaccatttaattgtacattttaaatgagtgaattgtatgctatgtgaattatatctcaataaagttgttcaaaaaaaaaaaaaaaaaaaaaaaaaaa

SEQ ID NO: 6974 - DNA, 3021 bp, Homo sapiens
gtgtgtttgagtgtgaaatgtgctaataaggaggagagacctctcctttgcaatgtgctgcggcaggagaaagcaggctgccggcccctgcctccctgaatcctcagtggctgactggataccgcttctgggggttgctgtgcacatgaatgtttgctattgttccaggcgcacgtcggccttaagaaatagcacaaaacaggcccatccttattcagaagccgggccccctccatcactcaaactgggcctttcaggtcacatgccggaggctgctgcagacaggacccagctgcctcaaatctgccgcctaacataagctgcggttcgaaaatcctgacagcacagggcttcctgggctctgcagagcaaactggaaagagctgggatccaggcactatgttctctgaagaactgtggctggaaaatgagaaaaagtgtgctgtggttcggaagtctaagcagggcaggaaacgccaagaactgctggccgtagccttcggggtgaaggtgggtgtcaaaggcggctttctttggccccctctcaaactctttgcctgttcacagatctcctccctggttcgaagggctgccctcacacgcaacgacaaccacttcaattatgagaagacacacaactttaaggtccacacgttccgaggcccacactggtgtgaatattgtgccaatttcatgtgggggctcatcgcccaaggggtccggtgctcagactgtggattgaacgtacacaaacagtgttccaagcacgttcccaatgactgccaacctgatctcaagaggatcaagaaagtgtactgttgtgacctcacaacacttgtgaaggctcacaacactcagagacccatggtggtagacatatgcattcgggaaattgaagcaagaggattaaaatcggaaggcctttacagagtctctgggttcactgaacacattgaagatgtcaaaatggcatttgacagagatggtgaaaaggccgatatatctgccaatgtctatccagacataaacatcatcactggagcccttaaactgtatttcagagacttacccatccctgtcatcacatatgatacctattccaaatttatagatgcagcaaaaatctccaatgcagatgagaggctggaagccgtccatgaagtgctgatgctgctgcctcctgcccactatgaaaccctccggtacctaatgatccacctcaaaaaggttactatgaatgaaaaagacaatttcatgaacgcagaaaatctggggatcgtgtttgggcccactctgatgaggccccctgaggacagcaccctgaccaccctgcatgatatgcggtaccaaaagctgattgtgcagattttaatagaaaacgaagacgttttattctaatccatcagggaaatgagctgaatggccccagcaccatccaagttgacacagctaaaggaataaaaacatttcttaccacttgatttgttttccaagcaagtgctagaatttgctggactgcagaggatcgctgagtggggtactgtgtctcatagacatgcgccacctccacgtgagaacaagggtgaaggtgagggaagcccctcaccttgggtcttttgctgtgcctcctatgtatgtctggtttgctggaagagtgattaatacatctttaatttattaaaaaacaatgtagacctttaaacttcagtcttattggtaataaaagggaacttaattcatacaggtacttgatacagttatacattttccacttacaaaaagaagacaattctgttaaatgaaacctgtatcgtaaaatgtatttttattttacccacgagaatgttgttatttttagcaaatagaactcaatgcagtgcattggttattaccctgtgtaccttgtccctcattttgctgtgacaccctgaaaaagctgaccacaaatgcagtattatcttgacatacctctgtcctcctcagtgctttttaatgaaatttcacctgccccttgtgttcctgctttggatagtttttgctcttaagcattggcattcttctattgtatggtatgtattaattgtagggatgggcctggaaatgtccacacactttctatggcatacaaattttggtgaattcccaaagtatgctttggaattggtcatagtcttttcgtatcatgagtgtgtatcccagaagatacagaatgcggtcattttacctgaaattatttgagaacactggatgtatctggtctgtgtaaaaagttagcacttttaccctcttttcttcctggccaagccctctgaattcatctgttaatatcaaattgtatttttgccacatttctgtattggtgaaaagcgaatctgcagaataactgccaacgtttttcattcttgttttacaaacctattttttaaagtgagaataaggttggtttttaccaaatatttgttcctccttgacaaaagtagctctgtgtggataatatgattttattactacagttccagtcacttggttatatttatcttagcatgagcctttcacaccaagatttctatattttgtaacataggtgaaatatttaaaacatcaaaaactgtaaatctagatttttaaaaaatccaactgcaatgtcttttcctttgattgagatgatttgtgtaaactcaccagtcttgctttggagtgagcagaagagaatgactattttacgtggagcatcattgtgtgactgttgacctggacagtcccaagggctatgcagatggactccattggcacagggaggtttgacctcttccctgctattatccctcctcccaactgtacagatttgtttgttgtagtttatgtacttcttgatactgtcaaaaaattatctggaaatggttttattttgtgaagtgaacaatactttgtaatttatgatagtgtaaatggaaggcaaagcatcacatgtattaaattcttctgtctattaaaaaaaaaaaaaaaaaaaaaaaaatataa

SEQ ID NO: 6975 - DNA, 2329 bp, Homo sapiens
gagcatccgcgacacccccgggagacccaccccagctgctgctgccacactcgcgggcgctgcccggtaatggcctgggggagtcccgagtccgacgcgccgctggcctcagcctggacgcggacccctccgcgagcgcgtctgtgacccacggaaccggcaggcgctctctgcttgtggcgcccagagggcggcgctgacacgggcgcgatccgggaggcgaggcagggcagggcactttcgtcccggggcgatcccaagagacgccggctctgggaccctcgccgggtcctcgtcccgcagcctcttctcggcctcccgcgatcctgcctgcgccctctgcccaggactcgtctctcacgtcggctccccgccagtctcgggagcctccgcttccctcggctcccgctagcccctcccgggacctctccccctccaccccctcccccaccccggaggccgggctggacgcgacccagagcctccgccacccgcttctgccactcaatggaggacggtctgctggagatcatgaccaaggacggcggcgacatgccggcgcccctggaggtgtccaccgtgccggcagtgggggacgtgatctccggggagtacaacggcggcatgaaggaactgatggagcacctgaaagcccagctgcaagccctgtttgaggacgtgagggccatgaggggggccctggacgagcaggcctcgcacatccaggtgctctcggacgacgtgtgcgccaaccagcgagccatcgtctccatgtgccagattattaccactgcgccccgccagggcggcttgggcgtggtcggcggcaaggggagcttccagagcgacccccaagagccggagactccttcgcctgggatcggggacagcggcttgctgggtcgcgatcccgaggacgaggaggaagaggaagaagagaaggagatgcccagccccgccacaccctccagtcactgtgagcgccccgaaagcccctgtgctggtctccttgggggggacgggccacttgtggagcccctcgacatgcccgacattaccctgctgcaactggagggcgaggcctccctgtgaggggactccgtggggcactaccttcccgggctgtctttgggtttccgagtgcatgacgcgagggggactgaacggcgcggtgcggcatgcttcacttggacagctgctcttgtgggtcaggcagagagagactccctcgaggaaggatttgtagggtgaaggactttgggagcatcgagaattctttctgcccaactaagcgaattatagcgaactgcggaaaggtgaggctccgggagaggaagcgcccatctctggactcccatccatccctatcctgtcctttcccccttcccagacaacaggagaacccgtgaattgtgtaaataaaattctgctttttctattctgaaaaaggacttacctaggaccatggcaaataatctctaacaatttacctggaaattaaggaattgggggtattttgttctggcaacaggaaatttacccttctgctgaaatccaagatattcagtgctctgcagaagcctctccccctcacagatctctgcggctgctgattggtaaaggaagcttgaggagggaactgcagccctaggaatctgggtgaatggggttccaagggcccctgggctgggaggagctggctatgaatgtgcatgaagacataatagctcaacctctaggattttgcatgcagagcggatcctgccttgtcactgacttcatctgggattgcttttccactccctggggcttagagaacaaagagcccggttcacaggcagagactcgggggtgctcagcagcagcccagatttaggggacatttgagggactcttggggccgcagccaaaaactgtctctcctggctacacctgcttaacttcagttcctttttctgtcaatatgtccttgcccactgcctctcggtgttgccttcataatgtcttgtgtgtgttatgtgtgtctacttgtgtagtagtgtgtgagccctcaggggcagggcttgtggctctggtgttaggttcaggggcttcagacccttctacgagctccaagctatcaatggcgcttttctctccctcttcccccaaccagggcatggagcatgtggctgtcctgaggttcttttactgatgtgccgcccttccacctcctcaagtggtgactttgtgtgccctccccctcctttgtgtattccttctcaatgctttccttggtgttaaccttaataaaaaggcgtcatctcccctcaaaaaaaaaaaaaaaaaa

SEQ ID NO: 6976 - DNA, 695 bp, Homo sapiens
cttttcttttaaaaagtttctctttatgatatactatgtgcacacaaccacttgactttctcctgacatttctccttaatgataaattggaaaattcaaattttgactcttcagccatcagagtgtggagtatcaaacattgattattcaaacttatgaactagtgaaccaacccatcatggctcaagaaaataattatccatctctgcatttataactccctgctgctgttcaccctgaagcacactatgtagacttgccatgtgcaaagcagcttcttagccaatcaatatccacaactgctgggaaggatacctgcttatctctttgcggtgctactgccaatcaccagactaaacatcatttctattccatggcaacgttttaagtcagaccatctggaatgtctccagatttggtaaaaatgcaaataaaactttgctttacattcacctagcaatgaataaaaattaacatattcttatttgaccatattgttctcccctcctgggaatccaatactttgtataccttactgtagttctaaataatgtggacagtttgactggtacttttacatcataggtaggagtacatttgtgtaattcctgtttttccaaaactcatgtaatgagtcatttaactatcattaattttagaaagtaaacctttaggctaaaaaaaaaaaaaaaaaa

SEQ ID NO: 6977 - DNA, 2615 bp, Homo sapiens
atttaaactgtctataaatttctgcctggggaaagttaagagtggcgccagggatttgaaccgcgctgacgaagtttggtgatccatcttccgagtatcgccgggatttcgaatcgcgatgatcatcccctctctagaggagctggactccctcaagtacagtgacctgcagaacttagccaagagtctgggtctccgggccaacctgagggcaaccaagttgttaaaagccttgaaaggctacattaaacatgaggcaagaaaaggaaatgagaatcaggatgaaagtcaaacttctgcatcctcttgtgatgagactgagatacagatcagcaaccaggaagaagctgagagacagccacttggccatgtcaccaaaacaaggagaaggtgcaagactgtccgtgtggaccctgactcacagcagaatcattcagagataaaaataagtaatcccactgaattccagaatcatgaaaagcaggaaagccaggatctcagagctactgcaaaagttccttctccaccagacgagcaccaagaagctgagaatgctgtttcctcaggtaacagagattcaaaggtaccttcagaaggaaagaaatctctctacacagatgagtcatccaaacctggaaaaaataaaagaactgcaatcactactccaaactttaagaagcttcatgaagctcattttaaggaaatggagtccattgatcaatatattgagagaaaaaagaaacattttgaagaacacaattccatgaatgaactgaagcagcagccatcaataaggggaggggtcaggactccagtacctccaagaaggaagactctctgtggcttctactccatcagccaacgacgctcgcaaggccggtcttgtggccctgcaagtcagagtaccttgggtctgaaggggtcactcaagcgctctgctatctctgcagctaaaacgggtgtcaggttttcagctgctactaaagataatgagcataagcgttcactgaccaagactccagccagaaagtctgcacatgtgaccgtgtctgggggcaccccaaaaggcgaggctgtgcttgggacacacaaattaaagaccatcacggggaattctgctgctgttattaccccattcaagttgacaactgaggcaacgcagactccagtctccaataagaaaccagtgtttgatcttaaagcaagtttgtctcgtcccctcaactatgaaccacacaaaggaaagctaaaaccatgggggcaatctaaagaaaataattatctaaatcaacatgtcaacagaattaacttctacaagaaaacttacaaacaaccccatctccagacaaaggaagagcaacggaagaaacgcgagcaagaacgaaaggagaagaaagcaaaggttttgggaatgcgaaggggcctcattttggctgaagattaataattttttaacatcttgtaaatattcctgtattctcaacttttttccttttgtaaatttttttttttttgctgtcatccccactttagtcacgagatctttttctgctaactgttcatagtctgtgtagtgtccatgggttcttcatgtgctatgatctctgaaaagacgttatcaccttaaagctcaaattctttgggatggtttttacttaagtccattaacaattcaggtttctaacgagacccatcctaaaattctgtttctagatttttaatgtcaagttcccaagttccccctgctggttctaatattaacagaactgcagtcttctgctagccaatagcatttacctgatggcagctagttatgcaagcttcaggagaatttgaacaataacaagaatagggtaagctgggatagaaaggccacctcttcactctctatagaatatagtaacctttatgaaacggggccatatagtttggttatgacatcaatattttacctaggtgaaattgtttaggcttatgtaccttcgttcaaatatcctcatgtaattgccatctgtcactcactatattcacaaaaataaaactctacaactcattctaacattgcttacttaaaagctacatagccctatcgaaatgcgaggattaatgctttaatgcttttagagacagggtctcactgtgttgcccaggctggtctcaaactccaccaaatgtacttcttattcattttatggaaaagactaggctttgcttagtatcatgtccatgtttccttcacctcagtggagcttctgagttttatactgctcaagatcgtcataaataaaattttttctcattgtcaaaaaaaaaaaaaaaaaaatcttccaccctttcccaccacaccctcactcccataatgaaatcacggggggggccggctcttaaaaaattcccctcggagggggggccaaggttttacccggtaccccggtctttttttgttaaaaggggggcccccccatagggggagccccaattaatcaaactaagccctctggcccccctctttttacaaccccccgggacgggggaaaaccgccctaacctgggggaattctttgggaaagagaactcttattttggtggggggggacaataattgtgaccaaccc

SEQ ID NO: 6978 - DNA, 779 bp, Homo sapiens
  misc_feature (7)..(13): n is a, c, g, or t
ttcaatnnnnnnnccaccggccattgggttaaaatatagcctgaaacaaaaagtttaacaggaataacaaaatatttacgcctccaatttgggcaaagggggacttccaaagcgatttagttgggtaaccccagggtttttccagttccgaagttgttaaaacgccggccaattaaatttttatcggcctccctatagggggaatttgggatttttttctttttttttttttttttttttttttttttttttttttttttttttttttttttttttccaacaaaagcagcttgattttattgcagggaagctaggaaggaataggacaactgagggtctccgcaggaacaccatcacccggcatgactgccaagtcccaggtctgtctggaagccagcgggaggatcagcatcctgccccctttggtccatcctgtgggctgtggggaccaggcccctgctactcaaggccaaggtaggaaacagtctttcctgttttcttcagggttgcaagcagagtgtccatgctgtgctcagattcaatgcagaccttcttgttgggcaggtcaatgtcatacttaactcctccaagcttattgaggacccgagagacagcttcagcacagcctccacaggtcatgtccacagagaactcgtgcttcggcatgactgaggcagcggcggtgtggcggcggtgtggcggcggtgtcagcagcgcctctccacccggatcctggccatgaaggcctcgcacacgcgggtcaccgtgcagggcgacag

SEQ ID NO: 6979 - DNA, 4077 bp, Homo sapiens
  misc_feature (3405)..(3405): n is a, c, g, or t
gcgcggcgggatcactggctccgcgagcctggcccgggggagtcggctggagccggctgcgctttgataaggtcctggcaactcagtaacagcccgagagccgggaaataaaaataacccctcagagcgatggatttcggggccgcccggcggccgaggcgcccgccgaaggccctgctgtaaaagagaggaggttcagatgagcccctgctgacttgagagagacagagagaccacgccgattgctgagaggaactggaagaagaagagattccagactcagtgggaagagctccctcaccatgagtagcgctatgttggtgacttgcctcccggaccccagcagcagcttccgtgaggatgccccgcggcccccagtgccaggggaagaaggggagaccccaccgtgtcaccatggtgggcaagggccaggtcaccaaacccatgtctgtctcttccaacaccaggcggaacgaagatgggttggggagccggaggggcgggcatctccggattcccctctgacccggtggaccaagtccttacactccttattgggcgatcaagacggtgcttacctgttccgaactttcctggagagggagaaatgcgtggataccttagacttctggtttgcctgcaatggattcaggcagatgaacctgaaggataccaaaactttacgagtagccaaagcgatctacaaaaggtacattgagaacaacagcattgtctccaagcagctgaagcctgccaccaagacctacataagagatggcatcaagaagcagcagattgattccatcatgtttgaccaggcgcagaccgagatccagtcggtgatggaggaaaatgcctaccagatgtttttgacttctgatatatacctcgaatatgtgaggagtgggggagaaaacacagcttacatgagtaatgggggactcgggagcctaaaggtcgtgtgtggctatctccccaccttgaatggaaaaacaaggaaggggactttgggcccgcaccttcagtggcaaatttttaaccttggcttgtccagcaaaactctgagggccacggcgagtgtgaggtccacggaaactgttgacagtggatacaggtccttcaagaggagcgatcctgttaatccttatcacataggttctggctatgtctttgcaccagccaccagcgccaacgacagtgagatatccagtgatgcgctgacggatgattccatgtccatgacggacagcagtgtagatggaattcctccttatcgtgtgggcagtaagaaacagctccagagagaaatgcatcgcagtgtgaaggccaatggcagagtgtctctacctcatttcccgagaacccaccgcctgcccaaggagatgacccccgtggaacccgccacctttgcagctgagctgatctcgaggctggaaaagctgaagctggagttggagagccgccacagcctggaggagcgcctgcagcagatccgagaggatgaagagagagagggctccgagctcacactcaattcgcgggagggggcgcccacgcagcaccccctctccctactgccctccggcagctacgaggaagacccgcagacgatactggacgatcacctgtccagggtcctcaagacccctggctgccagtctccgggcgtaggccgctatagccctcgctcccgctccccggaccaccaccaccaccaccattcgcagtaccactccctgctcccgcccggtggcaagctgcctcccgcggccgcctcgccgggcgcctgccccctcctcgggggcaaaggctttgtgaccaagcagacgacgaagcatgtccaccaccactacatccaccaccatgccgtccccaagaccaaggaggagatcgaggcggaggccacgcagcgggtgcactgcttctgccctgggggcagcgagtattactgctactcgaaatgcaaaagccactccaaggctccggaaaccatgcccagcgagcagtttggtgcccaaagcacaaaaaaggcctaccccttggagtctgcccgctcgtctccaggcgaacgagccagccggcaccatctgtgggggggcaacagcgggcacccccgcaccaccccccgtgcccacctgttcacccaggaccctgcgatgccttccctgaccccacccaacacgctggctcagctggaggaggcctgtcgcaggctagctgaggtgtcgaagcccccaaagcagcggtgctgtgtggccagtcagcagagggacaggaatcattcggccactgttcagacgggagccacacccttctccaatccaagcctggctccagaagatcacaaagagccaaagaaactggcaggtgtccacgcgctccaggccagtgagttggttgtcacttactttttctgtggggaagaaattccataccggaggatgctgaaggctcagagcttgaccctgggccactttaaagagcagctcagcaaaaagggaaattataggtattacttcaaaaaagcaagcgatgagtttgcctgtggagcggtgtttgaggagatctgggaggatgagacggtgctcccgatgtatgaaggccggattctgggcaaagtggagcggatcgattgagccctggggtctggctttggtgaactgttggagcccgaagctcttgtgaactgtcttggctgtgagcaactgcgacaaaacattttgaaggaaaattaaaccaatgaagaagacaaagtctaaggaagaatcggccagtgggccttcgggagggcggggggaggttgattttcatgattcatgagctgggtactgactgagataagaaaagcctgaactatttattaaaaacatgaccactcttggctattgaagatgctgcctgtatttgagagactgccatacataatatatgacttcctagggatctgaaatccataaactaagagaaactgtgtatagcttacctgaacaggaatccttactgatatttatagaacagttgatttcccccatccccagtttatggatatgctgctttaaacttggaagggggagacaggaagttttaattgttctgactaaacttaggagttgagctaggagtgcgttcatggtttcttcactaacagaggaattatgctttgcactacgtccctccaagtgaagacagactgttttagacagactttttaaaatggtgccctaccattgacacatgcagaaattggtgcgttttgttttttttttttcctatgctgctctgttttgtcttaaaggtctgagggttgaccatgttgcgtcatcatcaacatttggggggttgtgttggatgggatgatctgttgcagagggagaggcagggaaccctgctccttcgggccccagnttgatcctgtgactgaggctccccctcatgtagcctccccaggcccagggccctgaggcctgctagaatcactgccgctgtgctttcgtggaaatgacagttccttgttttttttgtttctgtttttgttttacattagtcattggaccacagccattcaggaactaccccctgccccacaaagaaatgaacagttgtagggagacccagcagcacctttcctccacacaccttcattttgaagttcgggtttttgtgttaagttaatctgtacattctgtttgccattgttacttgtactatacatctgtatatagtgtacggcaaaagagtattaatccactatctctagtgcttgactttaaatcagtacagtacctgtacctgcacggtcacccgctccgtgtgtcgccctatattgagggctcaagctttcccttgttttttgaaaggggtttatgtataaatatattttatgcctttttattacaagtcttgtactcaatgacttttgtcatgacattttgttctacttatactgtaaattatgcattataaagagttcatttaaggaaaattacttggtacaataattattgtaattaagagatgtagcctttattaaaattttatatttttcaaaaaaaaaaaaaaaaaagaggccgctcgcga

SEQ ID NO: 6980 - DNA, 2010 bp, Homo sapiens
  misc_feature (1779)..(1949): n is a, c, g, or t
  misc_feature (1969)..(1997): n is a, c, g, or t
gagtgcaagatcgttttctcagtggtggtggaagttgcctcatcgcaggcagatgttggggctttgtccgaacagctcccctctgccagcttctgtagataagggttaaaaactaatatttatatgacagaagaaaaagatgtcattccgtaaagtaaacatcatcatcttggtcctggctgttgctctcttcttactggttttgcaccataacttcctcagcttgagcagtttgttaaggaatgaggttacagattcaggaattgtagggcctcaacctatagactttgtcccaaatgctctccgacatgcagtagatgggagacaagaggagattcctgtggtcatcgctgcatctgaagacaggcttgggggggccattgcagctataaacagcattcagcacaacactcgctccaatgtgattttctacattgttactctcaacaatacagcagaccatctccggtcctggctcaacagtgattccctgaaaagcatcagatacaaaattgtcaattttgaccctaaacttttggaaggaaaagtaaaggaggatcctgaccagggggaatccatgaaacctttaacctttgcaaggttctacttgccaattctggttcccagcgcaaagaaggccatatacatggatgatgatgtaattgtgcaaggtgatattcttgccctttacaatacagcactgaagccaggacatgcagctgcattttcagaagattgtgattcagcctctactaaagttgtcatccgtggagcaggaaaccagtacaattacattggctatcttgactataaaaaggaaagaattcgtaagctttccatgaaagccagcacttgctcatttaatcctggagtttttgttgcaaacctgacggaatggaaacgacagaatataactaaccaactggaaaaatggatgaaactcaatgtagaagagggactgtatagcagaaccctggctggtagcatcacaacacctcctctgcttatcgtattttatcaacagcactctaccatcgatcctatgtggaatgtccgccaccttggttccagtgctggaaaacgatattcacctcagtttgtaaaggctgccaagttactccattggaatggacatttgaagccatggggaaggactgcttcatatactgatgtttgggaaaaatggtatattccagacccaacaggcaaattcaacctaatccgaagatataccgagatctcaaacataaagtgaaacagaatttgaactgtaagcaagcatttctcaggaagtcctggaagatagcatgcgtgggaagtaacagttgctaggcttcaatgcctatcggtagcaagccatggaaaaagatgtgtcagctaggtaaagatgacaaactgccctgtctggcagtcagcttcccagacagactatagactataaatatgtctccatctgccttaccaagtgttttcttactacaatgctgaatgactggaaagaagaactgatatggctagttcagctagctggtacagataattcaaaactgctgttggttttaattttgtaacctgtggcctgatctgtaaataaaacttacatttttcaataaaaaaaaaaaaaaaaaaaaaaaacacagggcacgaacattgtccggccgcgcaatcggggccaacgagaaaggcctctttctgggaggcgatattgaattgggcccccgcgggggaccccaaatgggggaaaaaacgaaaaaaacggggggctctaaacccttggannnnnnnnnnnnnnnnnnnnnnnnnnnnnnnnnnnnnnnnnnnnnnnnnnnnnnnnnnnnnnnnnnnnnnnnnnnnnnnnnnnnnnnnnnnnnnnnnnnnnnnnnnnnnnnnnnnnnnnnnnnnnnnnnnnnnnnnnnnnnnnnnnnnnnnnnnnnnnnnnnnnnnnnnnnctcttaacgaacggggactnnnnnnnnnnnnnnnnnnnnnnnnnnnnnatcacggccatcc

SEQ ID NO: 6981 - DNA, 2116 bp, Homo sapiens
  misc_feature (620)..(640): n is a, c, g, or t
ttttttttttttttttttcagtgactgataaatctttaatataaaaattgtacaagaattttgatacaaattacaagaggtatttggacaaaatatgaataaaattccatttacatccccaaacccttatgcattttatgcaaaagacatactgtaggcagttatagtacagaaaatacaaccaaagtaacagcaaattaaaaaatttaattaccttagcctaccaataaaaacaaaaagcaaaacagaacaaaacaaaaataaaacccttgttcaaggtacatacagtatttaggaagctaccaacgtcacaatgattagatcagggtgatgcacactgtcccatcccttggtgcagttaccttttgaagtacagactttgattctgcggcaggcttattgcaagagactggttttatgcagatgagaacaatataaacaaaaaaaaggaataaacagctaaactctgggagagggagaggacatatcttagtgaaaattccttttcttcaagatatttcaactccctctggccacttttgctgtcaaatatggaggctgagtccaataattttgttactggagacacaccaatgggtctggagtaagaaaggtgtgtnnnnnnnnnnnnnnnnnnnnnggatcttgctagttctaaaaggcctagtccatcaccagcaggagagaacagagaactggctttcccagatccccaaccagccccttcccctcacctttggggaggcagaaaagcagcaaggacttcatggaagaagccaggcaaggtgtgaggggagaggggaaatgggcatttgcctcacttggaaaccacccactggtgtgtcagtcatcctcatactgctgagtgagctacacatgaaaagcccaggtcgtctcatgcccaagtcttctccccatttctcgaccgtcctcacccctctgaccttcatgtacccaggtttagctctcctgcattctttatactggcactgacctttgccagctacctgggggagggcttgccactggaaaacctttcaggccgcctccatcagtgggctccaaagtaaatggctgaaaacaaaaatgtttcacttcctaacagttttcctttttccactgtgtgactgaaagctcctatatcattttatatttctgaatctataaaacaaaacaaacaagcctgacagtgtttggaggagccaaaggtggcctccctgtccccaaatatattggctatatgagagtaatttaacctctcaacgtacctaaaggcacccagttcactagtctgtggggtcctggagcctgtctcttctttctggaggttcaaactgaatagcaataattacgttacccaaagcatgtggaggaaaagtgaaaccagccacggagacgccggcccacgggctcggcctgcggtgtggcctgctttgctcaccagcgtcagccgctcatttccttctcatgaagtcccatctggtcatggggacgagggccgggagggcaccgggtagccttttcacacttggggattaggggagtgagaaaagatttgggccatgcatgcaaagtcaaagtttaaaattttatccttttcaaatagatgatataatatacctatacatgatataatatttgtatatatgaaatctctctatatttgtttaatttgagccattcaatctaaaccaatgtacaggtgtacaatgaaaaatttaaatgcttagttatttttcccaacacagtgtaaagtcaccctcctctgagagtgggatgtgcagagtttgatgttgcagctttgctcacttcctggcaagggcaggtcatgcctcaatttgtaatgggagtctggggtaagggtgggggttgaaagttgttatctttaaatacatgtacaaatcgttgtcaaaagtaacgttattaaaactagatttattatccctgaaaaaaaaaaaaaaaaaaaaaagaaacaaaaaaaaggggaaaaaaaaaaaaaaaaaaaaaaaaagttgtgtgggggagcaggggggcagaaaaaaggttttaaaaaaattgtgttgggggggggggcccaggggtgagaaaaaggggggaaagggggggcgaaaaaacg

SEQ ID NO: 6982 - DNA, 3960 bp, Homo sapiens
  misc_feature (2263)..(2289): n is a, c, g, or t
  misc_feature (2294)..(2312): n is a, c, g, or t
ctgagtgtaaagtacacacacacacacacacacacacaccgtacactcacacacaatcacagacacacactttctattccattccagtgctaaaccgtgacttcttagaaaattcaaccaaaatctcatgggttagttaaccaggtgcaatacagcacaccaaaagcttgactgccagtgaagatggacctgctcttatactgttgattactttcagtattaatatactattccccaattattttttgattggtatgtattaatgggtaattgaataatgaaaataagccaggtatttttgtgccggaagtttactagattgcatgttaccaaataccctgctcttcctctaattcccttcccccatctgactctattatcaactaaatgcattccaggcaaacagatggacactcacagcccttcccagccccacctccaagtagtatgcaaatggcactgagatttagcaaaaacgcggcgtctttgaaagttaacagacactaaggtagcagtgcctgtgtgttggagctcagttaggagttgaagttttctgcacctgtgataacaagcccaccagccacatgcatttcttcttcctgccactgtgactcggtggctgtagagccacatggcatttgtcagccaatctgtttcaagtcttttctttccaccaatagctttcttacagattttcttggctaaatggggccattacctagattgtcccttcagtaggagcctgaatccttcgcttaccaggctgagagctatttgccatgataatgctgattctctcactcctcatgcagaatgtgcacctgcagccctttgatgcgttttgatttgggggcgatttttcaggctttgattagcaggctgcttgcaatgcagaagatcacagttcctttctggggcagcagcaaccagagcctcttcctgtgtcctgtgtgtctggtatgtttacaccttgctctgagtttttctcttgttttctttttttaattaagtttacattttagtttctttgacatcttgtttacagtttttgtctgatgttttttcttttgtagtgtcttatgccctagatttagtcatcttgttaaatatatttggatatgaaatcttgacgaaaagaaaataactcctgaaaaagagggtctatcttgccacacgttaaaaacaaaaataatgtccttgtggcctcttacttgataaagttgcaccaggacggtctgagaaaggcaggcggtgtaatatgtggtgcaatccattttttcaaggtgatgacggcacaaaatacttagactagatgctgatccataaacattcactgatattcttacaggttggtttgcagtgttaacatttttgttagcctgatctgtaggtgggaagtaagatcatcataattccttagctctgagcactgattcaaaattgtataaatgactgaacaacttagatgatttgaaattaattgaaaataagaagggcttgtggaatttgcatttggctttggccttcaagcatttggaaatattaagagaatttccattttacatgtctccaactggggtgcttcttacaaccctttcactttttttttgagacgagtttccgctctgttgcccaggctggagtgcagtggcacgatctcggctcactgcatcctctgcctcctgggttcaagtgattgtcccgcctcagcctcccaagtagctgggattacaggtgtgcactaccatgcccagctaatttttgtgtttttagtagagactgggtttcaccatgttggccaggctcgtctcaaactcctgacctcaggtgatctacccgcctccacctcccaaagtgttgtgattacaggcgtgagccaccacacccagccctttcactaatttttggcagagttcacaatcccatcctatgtcagaaacttgaacctaacttaagaaattttgagtcatttttttggaggactgaggctttgttctacctactcttgaagaatcctgatgaaatattcaaacacataaagggatggccctggaggtctatcctgcatacctggagagcttctctggtcctgcccaccttgaaagttgcagactttgttgtaacatctatgtgatgagcttccctgtgaagccccatttgacaggtgggccagcagtgttttatcagcactctgatggcccacatttcccaggaaaacttcttgaaacttaccgttgtgggcagtggtcagagcgtgtagttnnnnnnnnnnnnnnnnnnnnnnnnnnntgtgnnnnnnnnnnnnnnnnnnntggtacagcagtttctgtggggtttggcatgggtgattttggttagtaaccatcctccaattgttgcttgtgaaagtcattcataacttgttccttttacttagttttgttgttactgctgttgttgttggtttggttggttttgagaccgggtctggctctgtagcccaagctggaatgcggtggcgcgatcatggctccctgcagcctcaaactcctgggctcaagcaatcctcctgcctcagcctcccaagcagctgggaagataggcacgtgccaccacacccggctaattttttctttattttttttgtagagatgggggtctcactatgttgcccaggctggtctcaaactcctgggctcaagcgatcctttggcctcggcctcccaaagtgcatgagccaccatgcctggcctgtttagttttgtttcaagttgaaatacctttcttgtgttttctaattagaaaagtaatatctactcattgtaaaaactcaaacagtgcagaaatgtagaaagtagaaagtgtaagtccctggttgtcccttctgcctgagacaaccactgctcacagtttgatgtatatccttccagagactctcaaatttaagcaaataatttttattaccatgtctttttatttgaagacgtacatttgcctccaaagttcaacacaagttcaactgaccatatccttccatgacctgaatagatgctatcctttatcacgatgttcaattgcctttgaaagagagtagtccaggtatattcctgatcaaaatttggcatttttgatgatactactctacacagatcagactcatgtgcagaatcgtgcctggagagagaggtttggttaagacagagatttctggaaacattcaaattgcaaatggaaacttgaaacccacaatctaatgaggaatgtactggaaaaataatctgaagagttgacaaattgtgtactagattgaacacatggaatgcaatgcaatgagactttctgcactaaaacttatcctcatatgtacaacaatgatgtgtgtattatataacagtgatgtgtacatttctgacaccccatacataatatacacagtttgtataaatgcatacatttaaaaatatatatgtacaatacagctaacataaaactgtagtacgcctgaaggatattactagtgcctaatattgagtatgagtcactgcgtgttcgcatcaacttggaagtgcagtaattgttataaaattaatcagtgcagccaacattatttatgaatcacatctttgaaactgtgcagtagcatatacatatatatttttaaataacatttttcacagttttccagagttactgttgaaatctgcatcaccaaaaaaaaaaaaagcaagatttttttaacaatgtagacactcttcagacccagtaatctgcgtgtgatttcctatttgtagattcccaagagactttagcagtcaccagccttaatgcatgtacaggatattattgtgacttaatttatctgcagtttttaatccatgtgaaattggaatttataaacggacttggattaaacatgtctgcctttctaaggttgcaaatgttacattaaatgatttatgttgtaaaaaaaaaaaaaaaaaa

SEQ ID NO: 6983 - DNA, 3144 bp, Homo sapiens
gtgccaggtcagtggcctaatacggaactccatttcccggcgtgctcgcggaggcgggggtcagaagcgggaggccggttccggttgcatcagcgaggcacgaggggcgaaatgagactgttcgtgagtgatggcgtcccgggttgcttgccggtgctggccgccgccgggagagcccggggcagagcagaggtgctcatcagcactgtaggcccggaagattgtgtggtcccgttcctgacccggcctaaggtccctgtcttgcagctggatagcggcaactacctcttctccactagtgcaatctgccgatatttttttttgttatctggctgggagcaagatgacctcactaaccagtggctggaatgggaagcgacagagctgcagccagctttgtctgctgccctgtactatttagtggtccaaggcaagaagggggaagatgttcttggttcagtgcggagagccctgactcacattgaccacagcttgagtcgtcagaactgtcctttcctggctggggagacagaatctctagccgacattgttttgtggggagccctatacccattactgcaagatcccgcctacctccctgaggagctgagtgccctgcacagctggttccagacactgagtacccaggaaccatgtcagcgagctgcagagactgtactgaaacagcaaggtgtcctggctctccggccttacctccaaaagcagccccagcccagccccgctgagggaagggctgtcaccaatgagcctgaggaggaggagctggctaccctatctgaggaggagattgctatggctgttactgcttgggagaagggcctagaaagtttgcccccgctgcggccccagcagaatccagtgttgcctgtggctggagaaaggaatgtgctcatcaccagtgccctcccttacgtcaacaatgtcccccaccttgggaacatcattggttgtgtgctcagtgccgatgtctttgccaggtactctcgcctccgccagtggaacaccctctatctgtgtgggacagatgagtatggtacagcaacagagaccaaggctctggaggagggactaaccccccaggagatctgcgacaagtaccacatcatccatgctgacatctaccgctggtttaacatttcgtttgatatttttggtcgcaccaccactccacagcagaccaaaatcacccaggacattttccagcagttgctgaaacgaggttttgtgctgcaagatactgtggagcaactgcgatgtgagcactgtgctcgcttcctggctgaccgcttcgtggagggcgtgtgtcccttctgtggctatgaggaggctcggggtgaccagtgtgacaagtgtggcaagctcatcaatgctgtcgagcttaagaagcctcagtgtaaagtctgccgatcatgccctgtggtgcagtcgagccagcacctgtttctggacctgcctaagctggagaagcgactggaggagtggttggggaggacattgcctggcagtgactggacacccaatgcccagtttatcacccgttcttggcttcgggatggcctcaagccacgctgcataacccgagacctcaaatggggaacccctgtacccttagaaggttttgaagacaaggtattctatgtctggtttgatgccactattggctatctgtccatcacagccaactacacagaccagtgggagagatggtggaagaacccagagcaagtggacctgtatcagttcatggccaaagacaatgttcctttccatagcttagtctttccttgctcagccctaggagctgaggataactataccttggtcagccacctcattgctacagagtacctgaactatgaggatgggaaattctctaagagccgcggtgtgggagtgtttggggacatggcccaggacacggggatccctgctgacatctggcgcttctatctgctgtacattcggcctgagggccaggacagtgctttctcctggacggacctgctgctgaagaataattctgagctgcttaacaactggggcaacttcatcaacagagctgggatgtttgtgtctaagttctttgggggctatgtgcctgagatggtgctcacccctgatgatcagcgcctgctggcccatgtcaccctggagctccagcactatcaccagctacttgagaaggttcggatccgggatgccttgcgcagtatcctcaccatatctcgacatggcaaccaatatattcaggtgaatgagccctggaagcggattaaaggcagtgaggctgacaggcaacgggcaggaacagtgactggcttggcagtgaatatagctgccttgctctctgtcatgcttcagccttacatgcccacggttagtgccacaatccaggcccagctgcagctcccacctccagcctgcagtatcctgctgacaaacttcctgtgtaccttaccagcaggacaccagattggcacagtcagtcccttgttccaaaaattggaaaatgaccagattgaaagtttaaggcagcgctttggagggggccaggcaaaaacgtccccgaagccagcagttgtagagactgttacaacagccaagccacagcagatacaagcgctgatggatgaagtgacaaaacaaggaaacattgtccgagaactgaaagcacaaaaggcagacaagaacgaggttgctgcggaggtggcgaaactcttggatctaaagaaacagttggctgtagctgaggggaaaccccctgaagcccctaaaggcaagaagaaaaagtaaaagaccttggctcatagaaagtcactttaatagatagggacagtaataaataaatgtacaatctctatataaaaaaaaaaaaaaaaaaaaaaaaaaaaaaaaaaaaaaaaaaagagctaattgttctctcactctctcttctcttctcctccccgggtgagaagaactccgggggtgctccccaaggtgggagcgcgacggccacagccgacgtgtgtgggtacccgcggcgttttgggcgaaaaagaccaggcgcgggggaccccagaagagggtctccgctactaggcgcgggggggtgtcccctctgatgggcccaaaaagattacg

SEQ ID NO: 6984 - DNA, 706 bp, Homo sapiens
agtaagggaacttggtgaaaaatcgacttgtgaggtctccagaaacacttaattgataatgagtcaaaaggcattactcttggcatgtgaatattggatgtgactcaagggtgagtcaaatgcctgtggagcctggattcatgttcttttccccgtttgtcagtaatcctttctaatgttccagttccatgatgtgattttagtggaattaaacttgaaccacttagttatgatgttgttactgtgttgggaacgcagcagccaccagaccaccaagagcaactgtaggttgggcttggtggtgctggtttagtgttgtggctgatgaggtgtaacccaggaaatttttatttttgcttttaaaaaaacaactcatctgtggtcatcttgtaagtgaagtattggactataaggactcttgagcccgaaaaacattttgtgacttagcctgaggctaacaggaataaacttgtcccatgttcagatagtttaggcatatctgagttggtggaggaaatgtgatctgttcctagccctatgtgctaggcaggatgcctgggtatccagagagtgagtgagaggcccggccgatgccgcatgcctgtaattccagcactctgggaggcgaagcgcttgagcccaagagttcaagaccagcctgggcaacatgggaaaaacctgtctctacaaaaaaaaaaaaaaaaaa

SEQ ID NO: 6985 - DNA, 1700 bp, Homo sapiens
  misc_feature (764)..(797): n is a, c, g, or t
  misc_feature (1150)..(1150): n is a, c, g, or t
  misc_feature (1152)..(1152): n is a, c, g, or t
  misc_feature (1155)..(1155): n is a, c, g, or t
  misc_feature (1163)..(1163): n is a, c, g, or t
  misc_feature (1307)..(1307): n is a, c, g, or t
  misc_feature (1355)..(1355): n is a, c, g, or t
  misc_feature (1503)..(1503): n is a, c, g, or t
  misc_feature (1519)..(1519): n is a, c, g, or t
  misc_feature (1531)..(1531): n is a, c, g, or t
  misc_feature (1572)..(1573): n is a, c, g, or t
  misc_feature (1619)..(1620): n is a, c, g, or t
  misc_feature (1641)..(1641): n is a, c, g, or t
  misc_feature (1661)..(1662): n is a, c, g, or t
  misc_feature (1673)..(1673): n is a, c, g, or t
gcagccgggagaaagcggaagatggcggcggcggccgggaggccgtgaggagagcggcggctgcgagggcggccgatggcggccgggaggcgccctcggacacttgcgggtcgttagggcgcgacgctgggaggcatgtcggagcacgtggagcccgcagctccggggcccgggcccaacggcggcggcggcggcccggcccccgcgcgcgggcctcgcacccccaatctcaaccccaaccccctcatcaacgtgcgcgaccggctcttccacgcgctgttcttcaagatggctgtcacctattcgcggctcttcccgcccgccttccgccgtctcttcgagttcttcgtgctgctcaaggccctgtttgtgctcttcgtcctggcctacatccacatcgtcttctcccgctcgcccatcaactgcctggagcacgtgcgtgacaagtggccgcgtgagggcatcctgcgtgtggaagtgcggcacaactcgagccgcgcgcccgtcttcctacagttctgtgacagcggcggccgcgggagcttcccgggcctggccgtggaaccaggcagcaacctggacatggaagatgaggaggaggaagagctgaccatggagatgtttgggaacagctccatcaagtttgagctggacatcgagcccaaggtgttcaagccgccgagtagcacagaggccctgaatgacacccaggagttcccccttccccgagaccccccccatactgtggccgcccgcgctagtannnnnnnnnnnnnnnnnnnnnnnnnnnnnnnnnntggggtcgcctttcccccttgtacgtacaggcccccctcgcgcccacggtccggcggaagcgatcccgcctgatttcgccgcggaagaggcgaagctgcgtggtcgctcctacatgaaccctgacgacccccccatagattcaatgttaccattcgaggaagatgtaacgcacctccgcggtaacagcgcgtgaagactagggagaacacagacgaccccccccgcatccccccatctactaatatccactcccccctatcgtcgccccccagattcgccccccccccctatttcatcgctccccccgggaggtcctccgccacctcccggaatgtctagtaagaatacgtcntnttntctaagcngcccggattccacgatcactaccaccccaccatgcctaggtatttgcccaccggcagtgcgagcgcaccgtgcgcccgcactcatcaagccattcagcgcccacgcgatgacaacaccaacacatccgatcactgtgcgtccanatacgcgcggatccttcttctaccgtattcaccaccgcctcgtccacnaacctcaacgtcgcccccttttttcccccccttccgccaccgcgcactacggatatacccaccccgccagtcgtgcctcgccccgccgcggctatcaacccgtttacagcatccgtctcccacttccgcaacatcggcatgaccccgncggctgacatttcgtncggcgcttgcancttacgtctcgctgacgcaactaccccagctgagttgtggnntagtcgcatgacgcctcactacttcacgtgccacacggaatcgatnngagacgccctggttaccagcntcatcgcggctcgtgctacnnatgcagcgcangttcgtcgtcgcggtcctacgccgcct

SEQ ID NO: 6986 - DNA, 2009 bp, Homo sapiens
ggccacccggcccacccgggcctctcccttctgcctgggacgtcagcggacggggcgctcgcgggccggggctgtatggggctcccgcgcgggtcgttcttctgggtgctgctcctgctcacggctgcctgctcggggctcctctttgccctgtacttctcggcggtgcagcggtacccggggccagcggccggagccagggacaccacatcatttgaagcattctttcaatccaaggcatcgaattcttggacaggaaagggccaggcctgccgacacctgcttcacctggccattcagcggcacccccacttccgtggcctgttcaatctctccattccagtgctgctgtggggggacctcttcaccccagcgctctgggaccgcctgagccaacacaaagccccgtatggctggcgggggctctctcaccaagtcatcgcctccaccctgagccttctgaacggctcagagagtgccaagctgtttgccccgcccagggacacccctccaaagtgtatccggtgtgccgtggtgggcaacggaggcattctgaatgggtcccgccagggtcccaacatcgatgcccatgactatgtattcagactcaatggagctgtgatcaaaggcttcgagcgcgatgtgggcaccaagacttccttctatggtttcactgtgaacacgatgaagaactccctcgtctcctactggaatctgggcttcacctccgtgccacaaggacaggacctgcagtatatcttcatcccctcagacatccgcgactatgtgatgctgagatcggccattctgggcgtgcctgtccctgagggcctagataaaggggacaggccgcacgcctattttggaccagaagcctctgccagtaaattcaagctgctacatccggacttcatcagctacctgacagaaaggttcttgaaatcaaagttgattaacacacattttggagacctatatatgcctagtaccggggctctcatgctgctgacagctttgcatacctgtgaccaggtcagtgcctatggattcatcacaagcaactactggaaattttccgaccactatttcgaacgaaaaatgaagccattgatattttatgcaaaccacgatctgtccctggaagctgccctgtggagggacctgcacaaggccggcatccttcagctgtaccagcgctgaccccaatgcactgagccctttgcttcttcaagagttgcggccctgatcctctcaagtggccaaaagcttttttaacttttcaatcttcaccttcccttgccaacagagggcactggggtgaattcaagattttcatcgaggtctgttcaatataggacaccccagcttgtccttggctcatccaagaactcttctgtatctaaaacaatacatctcaatcttggccaagggaaaatggactgctttgctggattggcactgagcaactttaggaaatgtcggtggagtgttcagcaagatcagacagcagtccaggtcaaaggcaaacacacacgctccagcccaaatcctcctggtggcacatcctaccccagatgctaaagtgattcaaggactccaggacacctcttaagagcctttctaagaacatgataggcttacttctgctccataataaagtgggagaaaaaagccagaatataacttaagactagataactgcgtacatgatggaccattttttttttttttggctgggtagagaaatcatataaaacgcaggctgtttagcatggagatgactctcagaacactgggagggtctggcacttgatgggggttagttgcttggcagcctgcctgccactgagggaagtcccattagagatgtatcaccaccttgtcaccaacaggatgatgtcaccaacaggatgatgtcaccaggtaataaaccttcatcctcacatcatggggtcagtaaatttgaactcagctgaaaaaaaaaaaaaaaaaaaaaaaaaaaaaaaaaa

SEQ ID NO: 6987 - DNA, 4851 bp, Homo sapiens
aggcgggggtgggcgggcgcgccgggcggcaggtgtcggcgtcggcggcattcggcggcgatggagcggccctggggagctgcggacggcctctcgcgctggccccatggcctcggcctcctcctcctcctgcagctgctgccgccgtcgaccctcagccaggaccggctggacgcgccgccgccgcccgctgcgccgctgccgcgctggtctggccccatcggggtgagctgggggctgcgggcggccgcagccgggggcgcgtttccccgcggcggccgttggcgtcgcagcgcgccgggcgaggacgaggagtgcggccgggtccgggacttcgtcgccaagctggccaacaacacgcaccagcatgtgtttgatgatctcagaggctcagtatccttgtcctgggttggagatagcactggggtcattctagtcttgactaccttccatgtaccactggtaattatgacttttggacagtccaagctatatcgaagtgaggattatgggaagaactttaaggatattacagatctcatcaataacacctttattcggactgaatttggcatggctattggtcctgagaactctggaaaggtggtgttaacagcagaggtgtctggaggaagtcgtggaggaagaatcttcagatcatcagattttgcgaagaattttgtgcaaacagatctcccttttcatcctctcactcagatgatgtatagccctcagaattctgattatcttttagctctcagcactgaaaatggcctgtgggtgtccaagaattttgggggaaaatgggaagaaatccacaaagcagtatgtttggccaaatggggatcagacaacaccatcttctttacaacctatgcaaatggctcctgcaaagctgaccttggggctctggaattatggagaacttcagacttgggaaaaagcttcaaaactattggtgtgaaaatctactcatttggtcttgggggacgtttcctttttgcctctgtgatggctgataaggataccacaagaaggatccacgtttcaacagatcaaggggacacatggagcatggcccagctcccctccgtgggacaggaacagttctattctattctggcagcaaatgatgacatggtattcatgcatgtagatgaacctggagacactgggtttggcacaatctttacctcagatgatcgaggcattgtctattccaagtctttggaccgacatctctacactaccacaggcggagagacggactttaccaacgtgacctccctccgcggcgtctacataacaagcgtgctctccgaagataattctatccagaccatgatcacttttgaccaaggaggaaggtggacgcacctgaggaagcctgaaaacagtgaatgtgatgctacagcaaaaaacaagaatgagtgcagccttcatattcatgcttcctacagcatctcccagaaactgaatgttccaatggccccactctcagagccgaatgccgtaggcattgtcattgctcatggtagcgtgggggatgccatctcagtgatggttccagatgtgtacatctcagatgatgggggttactcctggacaaagatgctggaaggaccccactattacaccatcctggattctggaggcatcattgtggccattgagcacagcagccgtcctatcaatgtgattaagttctccacagacgaaggtcaatgctggcaaacctacacgttcaccagggaccccatctatttcactggcctagcttcagaacctggagctaggtccatgaatatcagcatttggggcttcacagaatctttcctgaccagccagtgggtctcctacaccattgattttaaagatatccttgaaaggaactgtgaagagaaggactataccatatggctggcacactccacagaccctgaagattatgaagatggctgcattttgggctacaaagaacagtttctgcggctacgcaagtcatccgtgtgtcagaatggtcgagactatgttgtgaccaagcagccctccatctgcctctgttccctggaggactttctctgtgattttggctactaccgtccagaaaatgactcccaggtgtgtgaacagccagaactgaagggccacgacctggagttttgtctgtacggaagagaagaacacctaacaacaaatgggtaccggaaaattccaggggacaaatgccagggtggggtaaatccagttcgagaagtaaaagacttgaaaaagaaatgcacaagcaactttttgagtccggaaaaacagaattccaagtcaaattctgttccaattatcctggccatcgtgggattgatgctggtcacagtcgtagcaggagtgctcattgtgaagaaatatgtctgtgggggaaggttcctggtgcatcgatactctgtgctgcagcagcatgcagaggccaatggtgtggatggtgtggatgctttggacacagcctcccacactaataaaagtggttatcatgatgactcagatgaggacctcttggaatagctcttcagaggagctggacccagcatggatggtggaaccacagtacctcttacactccctgtggctccaacttcaggaaataaatttcccattgcgagggacccagctctgtttctgctgcttccatcaaagccaaaaggacctacactaaagaaatgcagggtgggggtggggaaccctgagcacttttttacaattggctctgagaaaaagggagacattttaaattctttaacttcttatttctcgtcctgtctctttgcaaagtatgggcttttgtttttgttttttaagggaaacgaaatggaattcgaagggaccttttcactaaccccacttctgtgtgttctgcatggtgcctgccccagggcatctgccaactccagtatcagctctcacagtgtacttggtaccatccctgggctctgctggcgagacgaaacagctgtagagatgaaaacaggctgcagaggctggcacagctggccggcttttctccatctggggacagtcctactccaagaacactgcacaccagctcctcacacagatcccacttacggcgcgcaacgggttctaggctgcaggcagctcgaggacccgcggccccgccccggctcggcctggcagatagcagaggcagcaggccgtgccgggggggcatgttgctgtaaccagtggcccaggggatgttacggtggacagtgcacctggagggcgggccccgcagggtgaaccatgctgcagtggctgtcgggcatcgggtatactccttcgggggttactgctctggtgaagactatgagacactgcgtcagatagatgtgcacattttcaatgcagtgtccttgcgttggacaaagctgcccccggtgaagtctgccatccgtgggcaagctcctgtggtaccctacatgcgctatggacactcaaccgtcctcatcgacgacacagtcctcctttggggcgggcggaatgacaccgaaggggcctgcaatgtgctctatgcctttgacgtcaatacgcacaagtggttcacaccccgagtgtcagggacagttcctggggcccgggatggacattcagcctgtgtcctaggcaagatcatgtacatttttgggggctacgagcagcaggcggactgtttttccaatgacattcacaagctagataccagcaccatgacatggactcttatctgtacaaagggcagccctgcacgctggagggacttccactcagccacaatgctgggaagtcacatgtatgtctttgggggccgtgccgaccgctttgggccattccattccaacaatgagatttactgcaaccgcattcgagtctttgacaccagaactgaggcttggctggactgtcccccgactccagtgctgcctgaggggcgccggagccactcggcctttggctacaatggggagctgtacatctttggtggttataatgcaaggctgaaccggcacttccatgacctctggaagtttaatcctgtgtcctttacctggaaaaagattgaaccgaaggggaagggccatgtccccgccggcgccagtgctgctgtattgttggtgacaagattgtcctctgggggtaccgccatctccgggaagccgggggatttgccttagatttcacttacacctttggattacctactgatcttgcctatgcgggtcttctaccaacacgttggccagaacgggagatcagcacaccagcaatatcagtcgccccatcgtctcctcccatgggtaggaggaagtttctgccacctcccctcctgagcctgctgtcatcttcactgcccctgcccatctgtcacccacctgctccttgacccctggacttggtatacctccatgtggagttgttgggcgagaggtgttctctgtgctgtgaactcagtggggagctgtagcgggtgggggcatggttcctccccccttggccgagggttccccttggtgctctgtccccatccacctcctttcagctgctcctgggcctcagctctgcccagggccagccaggttctgctgggaagggaagggaatggggagaagggagaagcaagcagtgtctgagcctcaggagcttccccctccccctttgcctatcccctcccctctgcttgagccttgagccttgactgggagctgaaaggagttgcagctgttggcatgagacctccttctccccgtcttggggaggtggggaccagcagataaatcccacccttccttgagctgtcgctgtactctgaagttcagccagctc

SEQ ID NO: 6988 - DNA, 1698 bp, Homo sapiens
  misc_feature (78)..(78): n is a, c, g, or t
  misc_feature (103)..(103): n is a, c, g, or t
  misc_feature (116)..(116): n is a, c, g, or t
  misc_feature (128)..(128): n is a, c, g, or t
  misc_feature (130)..(130): n is a, c, g, or t
  misc_feature (133)..(133): n is a, c, g, or t
  misc_feature (159)..(159): n is a, c, g, or t
  misc_feature (187)..(187): n is a, c, g, or t
  misc_feature (202)..(202): n is a, c, g, or t
  misc_feature (230)..(230): n is a, c, g, or t
  misc_feature (239)..(239): n is a, c, g, or t
  misc_feature (241)..(241): n is a, c, g, or t
  misc_feature (246)..(246): n is a, c, g, or t
  misc_feature (275)..(275): n is a, c, g, or t
  misc_feature (286)..(286): n is a, c, g, or t
  misc_feature (292)..(292): n is a, c, g, or t
  misc_feature (323)..(323): n is a, c, g, or t
  misc_feature (332)..(332): n is a, c, g, or t
  misc_feature (346)..(346): n is a, c, g, or t
caggcgggcagacaggaccccaagcaggactggccttccagacaggaaagagggttgcggagacacaggaggccagtngagagtggcagaggagaaaggagtntcatgggaggatngggcttggagananatnagggagggaaaacgggggccgccatncatcctcagcttccgggggactttgganagggtcgaggctcantgggaactggaggttgggccgctgggangcggatcantngacanacatcggcccgcgggacggcggaaggacncgcgcaccgangctcanggggtccggccgcgcgccgaggagtcgcttntaggcccanggccccggccagtncccagccccgctgggagacccggccagcaccacggacggcgcccaggaagcccgagttcccctggacggggccttctggattccgaggcccccggcaggttcgcccaagggctgcttcgcttgcattttcaagccccctgccctgcagctccggcggcccctgcccctgagccctcggcctctcccccgatggggccccaccactgttcccccatggagtcccaagagcaggcaagcaccgacagcgtgcggggctgccggcgcgcccccctgcttgcaagcacctagccgagaagaagacgatgaccaaccccacggccgtcatcgaggtctacccggacaccaccgaggtgaacgactattacctgtggtccatcttcaacttcgtctacctcaacttctgctgcctgggcttcatcgccttggcctactccctcaaagtgcgagacaagaagcttctcaatgacctgaatggagccgtggaggatgcaaagacggcccggctgttcaacatcaccagttctgccctggcagcctcctgcatcatcctcgtcttcatcttcctgcggtaccccctcaccgactactaaggcccgccaggcacggctgctggcggagacaagcactgagacatgtttattctcatggtccctgaaacgcaggatcccatgaggttggggcagggcagggcttcttgtcctggggcccccttgagctgtgaactgggcagcaaggccatcagaagctgagtacagcaagggggcagtgagcttggccctcagtccaccccctccgcctcctggcctccaccctgcctgtgtctggggcctgggggcttctcccctcgctgctgcaccctggcttccagcgtctgtgtccctgccctcacgtgccccttcccaggctcctggggccccttggacctgacacctagcaggaagggcttatgcaaaattgtcccaggttgggaggactcactctgtgctccccgaccctgcctcctccacgatgtgaccccgctcagagcccttgtgtctgtgaactttcaatgaaatacccatgcagctccaaaaaaaaaaaaaaaaaaaaaaaaaaaaaaaaaaaaaaaaaaaaaaaaaaaaaaaaaaaaaaaaaaaaaaaaaaaaaaaaacaaaaaaaaaactataaaaaaaaaataacatttaaatatcataaactcatactttattacatcttccactacctttcaaacccccacccttccctttccaacctctcctacactcctcttatttatcaccctcccctacacttttttaaacttcctctacccccatcttatacaacatctctaatcctatccccccaaacca

SEQ ID NO: 6989 - DNA, 2355 bp, Homo sapiens
  misc_feature (2298)..(2298): n is a, c, g, or t
ggggaatcgcgtaatggcggacacaggcagggcgagcgcggctgggggcgtagcgcgctgagggggtccggccgtttggcagcccgcgaggcggtccgcgggagcacactctgtgcggagactgggcggccggccgacccttcctgtcgctgacggcgactgcgggaggccaggttgtttttcaccattcagaacattgcctgaagcaggtccaccatgccgttagtaacgaggaacatcgagccaaggcacctgtgccgtcagacgttgcctagcgttagaagcgagctggaatgcgtgaccaacatcaccctggcaaatgtcatccgacagctgggcagcctgagtaaatatgcagaggacatttttggagagctctttactcaggcaaatacctttgcctctcgggtaagctcccttgctgagagggtcgaccgactacaggttaaagtcactcagctggatcccaaggaagaagaagtgtcactgcaaggaatcaacacccgaaaagccttcagaagttccaccattcaagaccagaagctttttgacagaaactctctcccagtgcctgtcttagaaacatacaatacctgtgatactcctccccctctcaacaatcttaccccttacagggacgatggaaaagaggcactcaaattctacacagacccttcatacttctttgatctttggaaggagaagatgctgcaggacaccaaggatatcatgaaagagaagagaaagcataggaaagaaaagaaagataatccaaatcgagggaatgtaaacccacgtaaaatcaagacacgtaaggaagagtgggagaaaatgaagatggggcaagaatttgtggagtccaaagaaaagctggggacttctgggtatccacccactttggtgtaccagaatggcagcattggctgtgttgaaaacgtggatgcaagtagctatccgccaccaccacagtcagactctgcttcttcaccttctccttccttctccgaggacaacttgcctcctccaccagcagaattcagttacccagtggacaaccaaagaggatctggtttggctggacccaaaagatccagtgtggtcagcccaagccatccaccaccagctcctcctctaggctctccaccaggccctaaacccgggtttgctccaccacctgcccctccgccacctccgcctccaatgataggcatcccacctccaccaccgcctgtaggatttgggtctccagggacgcctccaccaccctcacccccatctttcccacctcaccctgattttgctgcccctccacctcctcctccaccaccagcagctgactacccaactctgccaccacctcccttgtcccagccaacaggaggagcacctcctcctccccctcctcctcctcctccggggccccctcctccccctttcactggtgcagatggccagcctgctataccaccaccgctttctgataccaccaagcccaagtcctccttgcctgccgtgagcgatgcccgtagcgacctgctttcagccatccgtcaaggttttcagctgcgcagggttgaggagcagcgggaacaagagaagcgggatgttgtgggcaatgacgtggccaccatcttgtctcgtcgcattgctgttgagtacagtgactcagaagatgactcctctgaatttgatgaggacgactggtccgattaaatctttctgactgctgaacacctactttttcactccttcctacctgccttcatttaaaaccaaccccaacaagacccgaagggggcacacaagggaaaaaaaaaataaattttaacgggccaaatcttttccctagcatcaaccgcgaacaaatatccaaagcgccatctctccacagtcaaacatgaaatttacactacccccagtaggacaaggaacagaggacagcccccatgaacagacgcaaataaacctagaaaatgtttaaccatcgatttcagctcccaattagtactgtagaggcaaaatttagcacaccgtaaggataataaaaccccccacaacaccaaaacaacccaccacagaaacacggcaatagcgtgtatatgaaaataaagacggcggggtacccacttgatcagcagcgcgaaataatagcgaaaaaaaaataccacatatctataaagagcaacatatgtcacccgaacaggaacagtgatataaaaaggcgaagatcagactgatgtaatgggcttaattataaacaacaagggcgaagaacatataacaatacatgcgtagcancagtgcagcaacctcttctaactgcaacgcctggtaaatataaaaaaacagacacaa

SEQ ID NO: 6990 - DNA, 1164 bp, Homo sapiens
  misc_feature (1093)..(1093): n is a, c, g, or t
tgtcgggtcccaaaatacgtggtctaaagtcctttgggctcctgccgctgccagcactgatcatatgctcttgaccctggtcgggtggggggatgtctggatacctcctctgtggaaagaactggccacacatccgcagaggtgactcgggctgagaacccaggctcctcctccctttggtgacacgcccctcggtccctcactggcacttctccctccggccacacggcggcgtctcgccatagcgcagcggccgatggtacagcccgctcccccctcgcgctctcggacagtgggtccttccacttgtagaaaagcattgtgggacggaagcctgtcctttcttccttttggtgcgagcttgctgtggtttttgctctgggtcctctgggatggcgcctggctgtggccgcgtggtctctcacgcaggggcgccgggcgggggaacgcggccaccctgagtctggtgagtcgactgcggcggcctgtgtccgaagtgtccggggccgtgaacaagggcagcggcctggcctcaggcctgcgttcccacgtttggaaacggggagcttcgtcgatttgtgtttacatcatcgactatgccagggagttctccagataagcctggttttattttcgtcagtgaaaaggccttaccgtataactgactttatgcttgccctgcccccgtataaaataacttaaaagcagcgtgcctggttacagctgtttccacgtgcggtgctcgtcgggagtgatcacctaccctacaggtggaagatggatgcctgaagtgtagactgctgctagctgaataccatctgggagcataaaggtgacctgaaggatgtccttggtgaggattttgaaaatttgatcttcacaagagttgcctggatcatttgaaatttctgggagtctgaggagtactgacataattacctgctggagtctgtaaatacacatttaagacagtgaggatgtgaataaatatattaatgcaaaaaaaaaaaaaaaaaaaaaaaaacaaaatggcgggtttatttagcgggggcggaaaagagggttaggaaggcatggtaattgttctcaccantttttaagaggaaagggccccaaagggggaaaaacgaggaaaaaaaagaggcggaaaacaaaagcagtacg

SEQ ID NO: 6991 - DNA, 442 bp, Homo sapiens
  misc_feature (441)..(441): n is a, c, g, or t
gcctcctgatccaccaagaccatatggtgtttttcataaaagagagagatcattcccttgactttggacttcgcttattgaacccctggacagaatcaaggttgctaagagaccacctgtgctgaatacactttgttctggcaagagcagaaaactgagaagccgtgttacctaccactacctgggattaattcagggagcgggataattctggatatgactggtaaaaactggatattaatttctactactactcccaaaagtctagaagatgaaattgtgggaagacttctaaaaattttgtttgttatctttgttgacttaatttctattatatatgttgtgataacttcttagaaagctgacttcctttccatgtacatttcaaactgaattacagtgaataaaaatttgtattttaaaaaaaaaaaaaaaaaaagnt

SEQ ID NO: 6992 - DNA, 1182 bp, Homo sapiens
agcgggctgagacagaaggccggggaggggggaggccggctagtcgcggactcgggcgaacccaccctcgcgatctgtcaagtctgtccccaggggaggtccccctttcgggaggaagtttttaaggggatttctcaaaatcacccccgcgcttccttcactccttccttagagccggagcgcttgcagggaccatgtcggcggagaccgcgagcggccccacagaggaccaggtggaaatcctggagtacaacttcaacaaggtcgacaagcacccggattccaccacgctgtgcctcatcgcggccgaggcaggcctttccgaggaggagacccagaaatggtttaagcagcgcctggcaaagtggcggcgctcagaaggcctgccctcagagtgcagatccgtcacagactaaggagatggcaggcattgacagcttcactccatgaaggccatctctgtttctctcctccgcttaaccaagctgttgtggtttttcagcatagtgttgtatgttccattgctagctgtcctgctgtttaacacagtgttgtattttttttctaaatgtacataattagaaaagaaaataacaataggaagctatgtgtatcttctgtgtaaagcagtggcttcactggaaaaatggtgtggctagcatttccctttgagtcatgatgacagatggtgtgaaaaccatctaagtttgcttttgaccatcacctcccagtagcaatttgctttcataatccatttagcaatccaggcctctgttgaaaagataatatgagggagaagggaacacatttccttctgaacttacttccctaagtcactttccttatgtatcatctaatacaatgatggttgagtgaaaatacagaaggggtgtttgagtattcagatttcataaaacacttccttggaatatagctgcattaacttggaaagaagcctgttgggccagaagacagaaactccaactggcaaaaaagcaagcatctaagaaaaaaaaccaccaaagttcttgaatttactatatttaaatgcattggttaagtttattttgctaaataaagtgaactgctttttgtctctaaaatgatattctaaataaaaccttaactttttgttgaaaaaaaaaaaaaaaaaaaaaaaagcactctcagggcttctattgt

SEQ ID NO: 6993 - DNA, 1113 bp, Homo sapiens
  misc_feature (883)..(1107): n is a, c, g, or t
  misc_feature (1109)..(1109): n is a, c, g, or t
  misc_feature (1111)..(1112): n is a, c, g, or t
ggcccttccaccttttgtgggcactcaagttcggacctctgggatcggcgattcccctctggccagggctggttttaatgctctccgtgggcgggcttcggttgagtttggtccgcttttcctttctgctcctcaggggagcattgcttcgtggggtagagtgaccatgacgaaattagcgcagtggctttggggactagcgatcctgggctccacctgggtggccctgaccacgggagccttgggcctggagctgcccttgtcctgccaggaagtcctgtggccactgcccgcctacttgctggtgtccgccggctgctatgccctgggcactgtgggctatcgtgtggccacttttcatgactgcgaggacgccgcacgcgagctgcagagccagatacaggaggcccgagccgacttagcccgcagggggctgcgcttctgacagcctaaccccattcctgtgcggacagcccttcctcccatttcccattaaagagccagtttattttctaaaaaaaaaaaaaaaaaaaaaaaaaaaaaaaaaaggggggggggctacaaagtttgacctgtagtgaggcgttttagaggtttagcgcgcgatacccgagagtatcctgtgtggtccaagggggggccccataataggggagtcgatataaataagcacaaggacagcgggcgccgagcgtattataacacagagctcgtagacttggggaaacactttgggtaccattgaggagactcttgggagaagagaacctttaattcgcgggggggggagaccaataattggggcgcaaaattaccttaaaggaagattttaaaaccgtcataagggtaaattttaacaatttcaaggtgttaaacgggggannnnnnnnnnnnnnnnnnnnnnnnnnnnnnnnnnnnnnnnnnnnnnnnnnnnnnnnnnnnnnnnnnnnnnnnnnnnnnnnnnnnnnnnnnnnnnnnnnnnnnnnnnnnnnnnnnnnnnnnnnnnnnnnnnnnnnnnnnnnnnnnnnnnnnnnnnnnnnnnnnnnnnnnnnnnnnnnnnnnnnnnnnnnnnnnnnnnnnnnnnnnnnnnnnnnnnnnnnnnnnnnncncnna

SEQ ID NO: 6994 - DNA, 4936 bp, Homo sapiens
  misc_feature (2735)..(2778): n is a, c, g, or t
  misc_feature (4022)..(4037): n is a, c, g, or t
atggccccctcggcctgggccatttgctggctgctagggggcctcctgctccatgggggtagctctggccccagccccggccccagtgtgccccgcctgcggctctcctaccgagacctcctgtctgccaaccgctctgccatctttctgggcccccagggctccctgaacctccaggccatgtacctagatgagtaccgagaccgcctctttctgggtggcctggacgccctctactctctgcggctggaccaggcatggccagatccccgggaggtcctgtggccaccgcagccaggacagagggaggagtgtgttcgaaagggaagagatcctttgacagagtgcgccaacttcgtgcgggtgctacagcctcacaaccggacccacctgctagcctgtggcactggggccttccagcccacctgtgccctcatcacagttggccaccgtggggagcatgtgctccacctggagcctggcagtgtggaaagtggccgggggcggtgccctcacgagcccagccgtccctttgccagcaccttcatagacggggagctgtacacgggtctcactgctgacttcctggggcgagaggccatgatcttccgaagtggaggtcctcggccagctctgcgttccgactctgaccagagtctcttgcacgacccccggtttgtgatggccgcccggatccctgagaactctgaccaggacaatgacaaggtgtacttcttcttctcggagacggtcccctcgcccgatggtggctcgaaccatgtcactgtcagccgcgtgggccgcgtctgcgtgaatgatgctgggggccagcgggtgctggtgaacaaatggagcactttcctcaaggccaggctggtctgctcggtgcccggccctggtggtgccgagacccactttgaccagctagaggatgtgttcctgctgtggcccaaggccgggaagagcctcgaggtgtacgcgctgttcagcaccgtcagtgccgtgttccagggcttcgccgtctgtgtgtaccacatggcagacatctgggaggttttcaacgggccctttgcccaccgagatgggcctcagcaccagtgggggccctatgggggcaaggtgcccttccctcgccctggcgtgtgccccagcaagatgaccgcacagccaggacggccttttggcagcaccaaggactacccagatgaggtgctgcagtttgcccgagcccaccccctcatgttctggcctgtgcggcctcgacatggccgccctgtccttgtcaagacccacctggcccagcagctacaccagatcgtggtggaccgcgtggaggcagaggatgggacctacgatgtcattttcctggggactgactcagggtctgtgctcaaagtcatcgctctccaggcagggggctcagctgaacctgaggaagtggttctggaggagctccaggtgtttaaggtgccaacacctatcaccgaaatggagatctctgtcaaaaggcaaatgctatacgtgggctctcggctgggtgtggcccagctgcggctgcaccaatgtgagacttacggcactgcctgtgcagagtgctgcctggcccgggacccatactgtgcctgggatggtgcctcctgtacccactaccgccccagccttggcaagcgccggttccgccggcaggacatccggcacggcaaccctgccctgcagtgcctgggccagagccaggaagaagaggcagtgggacttgtggcagccaccatggtctacggcacggagcacaatagcaccttcctggagtgcctgcccaagtctccccaggctgctgtgcgctggctcttgcagaggccaggggatgaggggcctgaccaggtgaagacggacgagcgagtcttgcacacggagcgggggctgctgttccgcaggcttagccgtttcgatgcgggcacctacacctgcaccactctggagcatggcttctcccagactgtggtccgcctggctctggtggtgattgtggcctcacagctggacaacctgttccctccggagccaaagccagaggagcccccagcccggggaggcctggcttccaccccacccaaggcctggtacaaggacatcctgcagctcattggcttcgccaacctgccccgggtggatgagtactgtgagcgcgtgtggtgcaggggcaccacggaatgctcaggctgcttccggagccggagccggggcaagcaggccaggggcaagagctgggcagggctggagctaggcaagaagatgaagagccgggtgcatgccgagcacaatcggacgccccgggaggtggaggccacgtagaagggggcagaggaggggtggtcaggatgggctggggggcccactagcagcccccagcatctcccacccacccagctagggcagaggggtcaggatgtctgtttgcctcttagagacaggtgtctctgcccccacaccgctactggggtctaatggaggggctgggttcttgaagcctgttccctgcccttctctgtgctcttagacccagctggagccagcaccctctggctgctggcagccccaagggatctgccatttgttctcagagatggcctggcttccgcaacacatttccgggtgtgcccagaggcaagagggttgggtggttctttcccagcctacagaacaatggccattctgagtgaccctcagagtgggtgtgnnnnnnnnnnnnnnnnnnnnnnnnnnnnnnnnnnnnnnnnnnnncagagggtggaaatggcctctaagctagcaccccgtaagaagagcctacctgaccgacttggggagggaacacagaggtgttgggaaggtggagcaacaatgcacctcccctcctgtcgcgccgtgatatcttggtggctccctgccactgcccaccgcctcttctccatctgagaatcacggagaggtgtagataatctagaggcatagactgctagagcccccagggatctggggtggtcagggctcaggcttcactttgtaaaccaggtgggggcatctcacagcctgacttcccttccccaggccagggttgctgggatgcctgcccctcctgagaggaccccctccccattgtcaggctctccatgtccacgagcggggaggggtgggttctggggcattgttgtcccttgtgtctgtggactagagatagggtgggggagctggggaagggtgcaggcgggaagagtgggctgtctttcccagggtgatgcaagcatgccgcagccctggaggctgggaatgtggaggctctgtgagccctgcagccctcagaatcagggccagggatgcagaagattgagaggatatggagatggatagagggcaggagacccttaggatagattgtgggacccaggcaggaacaggtgtccacaagaactcaggatggcatcagttagctcagaagccacctggaagacccagtgtttccatctctggaatctctgttttatgctaaatggatttaggaagactgtttttcttttaagggggaaacaaggtagagaaaaggacgaagaagtgtaagtcccgctgattctcgggggtaaggctcggatggcaaggacgcgttctgcctgggcatgtaggggaggtgtttttgccatcaccagtttctcaggctggggagcacagaggggaggaggaggactaaatgaaaagttgttcccagcctgcacatgaacacattcatgacacacaaaactggctggaaggagataagagcactgggtttgagattccctccattaaaacaaccaagacaaagaaaggaggggaaaaaaagataaaaagcaagccagggttccctgccctattaaactcaaacccagactgctttgggttttatctttcccttacccctggcacctccagagaactgggacctgaaatagtccctccgttctcccctttgaccatgtaataaatgaaccagaagcactgagattaacctatcnnnnnnnnnnnnnnnnttccagcctgcggtgctgtctgctgggaggtcagctggtcaaggcagaggaggagaggaggaaaggatgggggctgaagagcagaagggaggggagacagaggggattaaagaggggaggagagagtgcagagctccaggaaagggtatcagagctgcagccagctctgccctctaccctagggaggccagaaagacacaaacagccctccgggcctttacgctggactctggcttggcaggctccaggcagggtcctctgggaagttactctagaaaacgaagggaggaggagcacaagatcctcagcaacgaacacctgcacttagaaaaagtggacagcttctgccaaccacaccctacccatggtactgtatgctattaactcctggaaacgccccgtaaatgcgagttgtttttgtatttgtgtgttgagatgggccttgtggtttctctgtactcagagcacatttcttgtaattactattgttatttttattgtcatgactgcccctgagctctggtgagaaaagctgaatttacaaggaaagggatgaagttaatatttgcatcacataattatatcattactgtgtatctgtgtattgtactaaatggactgatgctgcgcacatgagctgaaaatgaagagccctcccatccattctatgagaaagaaggtcaccctgagtgacttctgtttcatgatttcccaaacaggttttagagctggaaaaggacttaaagaaagagactgggtggtgctttctagaaaggaggaagatgggtatcaggggaaggaaggagttagagggctttgtacaaagccgagattgctcattaaatgaggaacatcctggcctgtgggattgtaagaatgccaaaaaaaaaaaaaaaaaa

SEQ ID NO: 6995 - DNA, 1459 bp, Homo sapiens
agcggcacgaggggagcgcggacggctgggctgctgctgggcggccgcggggcagcggagggcgccggcactccggtccccgccgctccccgtccccgctgctcctagcccctgccgcgtccccggcggagcgggcatggcgccacccgcggcgcctggccgggaccgtgtgggccgtgaggatgaggacggctgggagacgcgaggggaccgcaaggcccggaagcccctggtggagaagaagcggcgcgcgcggatcaacgagagcctgcaggagctgcggctgctgctggcgggcgccgaggtgcaggccaagctggagaacgccgaagtgctggagctgacggtgcggcgggtccagggtgtgctgcggggccgggcgcgcgagcgcgagcagctgcaggcggaagcgagcgagcgcttcgctgccggctacatccagtgcatgcacgaggtgcacacgttcgtgtccacgtgccaggccatcgacgctaccgtcgctgccgagctcctgaaccatctgctcgagtccatgccgctgcgtgagggcagcagcttccaggatctgctgggggacgccctggcggggccacctagagcccctggacggagtggctggcctgcggggggcgctccgggatccccaatacccagccccccgggtcctggggacgacctgtgctccgacctggaggaggcccctgaggctgaactgagtcaggctcctgctgaggggcccgacttggtgcccgcagccctgggcagcctgaccacagcccaaattgcccggagtgtctggaggccttggtgaccaatgccagccagagtcctgcgggggtgggcccggccctccctggatctcctccctcctcccaggggttcagatgtggtggggtagggccctggaagtctcccaggtcttccctccctcctctgatggatggcttgcagggcagcccctggtaaccagcccagtcaggccccagccccgtttcttaagaaacttttagggaccctgcagctctggagtgggtggagggagggagctacgggcaggaggaagaattttgtagagctgccagcgctctcccaggttcacccacccagccttcaccagccctgtgcgggctctgggggcagaggtggcaggaatggtgctgggcactagtgttccaggcagccctgggctaaacaaaagcttgaacttgccacttcagcggggagatgagaggcaggtgcactcagctgcactgcccagagctgtgatgctctgtacatcttgtttgtagcacacttgagtttgtgtattccattgacatcaaatgtgacaattttactaaataaagaattttggagttagttacccttgaaaaaaaaaaaaaaaaaaaggccgctcgcgatctagaactagtctttctacaaaccccaaggactttgggaacccttatacctattatcg

SEQ ID NO: 6996 - DNA, 4787 bp, Homo sapiens
  misc_feature (110)..(128): n is a, c, g, or t
  misc_feature (679)..(700): n is a, c, g, or t
  misc_feature (1737)..(1791): n is a, c, g, or t
  misc_feature (2099)..(2127): n is a, c, g, or t
cagtcgcgcgcggtgcagtcgggaggtggaggcaccggctgcattgttttcgggatcgaggggtgagggcgctatggcacccggctgcaaaactgagttacgcagcgtgnnnnnnnnnnnnnnnnnnnaaccaagtaatgaaggtgatgccatcaaagtttttgtgcgaattcgtcctcctgcagaaagatctgggtcagctgatggagagcagaacttatgcttatctgtgctgtcctccacgagtctccggctgcactccaaccctgagcccaagaccttcacgtttgatcatgttgcagatgtggataccactcaggaatctgtatttgcaactgtggctaaaagcattgtggagtcttgcatgagcggttataatggtaccatctttgcatatggacagactggctcagggaagacatttactatgatgggaccatctgaatctgataatttttctcataacctgagaggagtaatcccacgaagttttgaatatttgttttccttaattgatcgtgaaaaagaaaaggctggagctggaaagagtttcctttgtaagtgttcctttattgaaatctacaacgagcagatatatgatctactggactctgcatcggctggactgtacttaagggagcatatcaagaagggagtctttgttgttggtgcggtggannnnnnnnnnnnnnnnnnnnnngaagcctatcaggtgctgtctggaggatggaggaatagacgtgtggcatcaacatcaatgaacagagaatcgtctaggtctcatgccgtctttacaattacaatagagtcaatggagaaaagtaatgagattgtgaatatacggacctccctactcaacctggtggatttagcaggatctgaaaggcaaaaagatacccatgcagaagggatgagattgaaggaagcaggtaacataaatcgatcattgagctgcctgggccaagtgattacagcacttgtcgacgtgggtaatggaaaacagagacatgtttgctacagagactccaaacttaccttcttactacgggattcccttggaggtaatgccaaaacagccataattgcaaatgttcatcctggatccaggtgttttggggaaaccctatcaacacttaactttgctcaaagagccaagctgattaaaaacaaggcagtagtaaatgaagacacccaaggaaatgtgagccagctccaagctgaagtgaagaggctcaaagaacaactggcggagcttgcttcaggacagacaccaccagaaagcttcctgaccagagacaaaaagaagactaactatatggagtatttccaggaagcaatgttattctttaagaaatctgaacaggaaaagaagtctctgatagaaaaagttacccaattagaagacctcaccctcaaaaaggaaaaatttattcaatctaataaaatgattgtgaaattccgagaggatcaaataatacgcttggaaaagctccacaaggaatcccggggaggttttctgcctgaggagcaggatcgtttgctctcagaattaaggaatgagattcaaactctgcgagaacaaatagagcaccaccccagagttgcaaagtatgctatggaaaatcattccctcagggaggagaatagaagactgagattattagagcctgtgaaaagagctcaagaaatggatgcccagaccattgcaaaactagaaaaagctttctctgaaataannnnnnnnnnnnnnnnnnnnnnnnnnnnnnnnnnnnnnnnnnnnnnnnnnnnnnnagaaagagccatgtttgtttgcaaacactgagaagttaaaagcacaactcctgcaaattcagacagagctgaataattcaaagcaagaatatgaagaattcaaagaacttactaggaaaaggcagctagaattggaatcagagcttcagtctttgcaaaaagcgaaccttaatcttgaaaaccttttggaagcaacaaaagcctgcaagcggcaagaagtttctcagctgaataaaattcatgctgaaacacttaagattataactacaccaaccaaggcctaccaacttcattcccgaccagtaccnnnnnnnnnnnnnnnnnnnnnnnnnnnnnggctctctatacactcagaattctagcatattagataatgatatattaaatgagccagttcctcctgagatgaatgaacaagcttttgaggccatttctgaagagcttagaacagtgcaggaacaaatgagtgctcttcaagccaaactggatgaagaagagcataaaaacctaaagcttcagcagcatgttgacaaactggaacatcattctacccaaatgcaggagcttttctcatcagaaagaattgattggaccaaacagcaggaagagcttctctcacagttgaatgtccttgaaaagcagcttcaagagactcaaactaaaaatgactttttgaaaagtgaggtacatgacctgcgagtagtccttcattctgctgacaaggagctttcttcagtgaaattggaatatagttcattcaaaacgaatcaggagaaagaattcaacaaactttccgaaagacacatgcatgtacagcttcaattagataatctcaggttagaaaacgaaaagctgcttgagagcaaagcctgcctacaggattcctatgacaacttacaagaaataatgaaatttgagattgaccaactttcaagaaacctccaaaacttcaaaaaagaaaatgaaactctgaaatctgatctgaataatttgatggagcttcttgaggcagaaaaagaacgcaataacaaattatcattacagtttgaagaagataaagaaaacagttctaaagaaatcttaaaagttcttgaggctgtacgtcaggagaaacagaaagagacggccaagtgtgagcagcagatggcaaaagtacagaaactagaagagagcttgcttgctactgaaaaagtgatcagttccctggaaaagtctagagattctgataagaaagttgtagctgacctcatgaaccagatccaggagctaagaacatcggtctgtgagaaaacagaaactatagacaccctgaaacaagaactgaaggacataaattgcaaatacaactctgctttggttgacagagaagagagcagagtgttgatcaagaagcaggaagtggatattctggatctgaaagaaacccttaggctgagaatactttctgaggacatagagagggatatgctctgtgaggacctggctcatgccactgagcagctgaacatgctcacagaggcctcaaaaaaacactcggggctgctgcagtctgcccaggaagaactgaccaagaaggaagccctgattcaggaacttcagcacaagctaaaccaaaagaaagaggaagtagaacagaagaagaatgaatataacttcaaaatgaggcaactagaacatgtgatggattctgctgctgaggatccccagagtcctaagacaccacctcactttcaaacacatttggcaaaactcctggaaacacaagaacaagagatagaagatggaagagcctctaagacttctttggaacaccttgtaacaaagctaaatgaagacagagaagtcaaaaatgctgaaatcctcagaatgaaggagcagttgcgtgaaatggaaaacctacgcctggaaagtcagcagttaatagagaaaaactggctcctgcaaggtcagctggatgatattaaaagacaaaaggaaaacagtgatcagaatcatccagataatcaacagctgaagaatgaacaagaagaaagtatcaaagaaagacttgcaaaaagtaaaatagttgaagaaatgctgaaaatgaaagcagacctagaagaagtccaaagtgccctttacaacaaagagatggaatgccttagaatgactgatgaagtcgaacgaacccaaactttggagtctaaagcattccaggaaaaagaacaactgagatcaaagctggaagaaatgtatgaagaaagagagagaacatcccaggagatggaaatgttaaggaagcaggtggagtgtcttgctgaggaaaatggaaagttggtaggtcaccaaaatttgcatcagaagattcagtacgtagtgcgactaaagaaggaaaatgtcaggcttgctgaggagacagaaaagttgcgtgccgaaaatgtatttttaaaagaaaagaaaagaagtgaatcttgaggattccggtcagctacctaggcatcaccttgtttgaagatgtttcttctcttttacaagtaagacctactcctggccacttaggagagctgaatttatggaccttaattattaaatgtttataaggtggtggtaaccacctcaagtttctgatgaacattctgcatccatatacaccctgtgacagtcagcagtctgctattaagtggcctacttcaaggctttgaatcaacttaagggaaaaccttttgtctttgtaaaaataaaagcctgtagctaaggtttacagtggacattagccagatcattttcttcttagattatgccataatctcctttgattcttatggaagttctaacaatatatggtggttccaacacctgcagtgagtttaatgactgacttagtagcaggtacaagaagcaaacttgttaatatagattatttttgtattcttactttaggtattttacttgagcattttccatgactgtaaataaagccattttttaagataaaaaaaaaaaaaaaaaaaaaaaaa

SEQ ID NO: 6997 - DNA, 1750 bp, Homo sapiens
  misc_feature (114)..(116): n is a, c, g, or t
cccagcccgccctccggggagcttagcaacggttgctacggcccggagcgggcgccgccccgccccaccgcgcgcggtctgacgtcacttccgcccgcgacccccttccagacnnnggcacgaggccttgtcgaaggaccaaaggcgaccggtgcaggtgcacgacgccagctcccttctggggggccggggcctgggggttgccatggcccccagccacctgtcagtgcgggagatgagggaagatgagaagcccctggtgctggagatgctgaaggccggcgtgaaggacacggaaaaccgcgtggccctccatgccttgacacggccgccggccctgctcctcctggcggcggccagcagcggcctgcgctttgtcctggcttccttcgccctggccctcctcctgccggtgttcctggctgtggccgccgtgaagctgggcctgcgggcccgatggggctcgctgcctccgccgggtggcctggggggcccctgggtggccgtgcggggctccggtgacgtgtgtggggtcctggctctggcccctggcacaaatgcaggggacggggcccgggtcacccgcctgtctgtctctcgctggcaccgccgccggggcgtgggcaggaggctgctggccttcgcggaggcccgggctcgggcctgggctgggggcatgggggagccccgggcccggctcgtggtccccgtggctgtggccgcctggggggtgggagggatgctggagggctgtggctaccaggccgaggggggctggggctgcctgggctacacgctggtgagggaattcagcaaagacctgtgaagctacagactgacagccagggcaggggaggagggaggggcgccagcacctgatgatcgcctactgtctgcgggttcttttacctgctctccctcagtgagtcctcaaccaccctgggcccagaaacagaggcctgccgaggggaggagcctggcctctgtccacccgtcagcagtgtgaagtctgttgtgtttgagcttctcagagtggaatgactccttttccttcctggccctcgggggcctctcgaggtcagcctctccaacccctacctcagctcctgtctgcactgagaaacctccccgggtgatgtctgcaaagtctgtgctgtccgtgccccaggctgggagagctatctggggagggggagaggaggccgagcagaatacaccccagagttagggtttgcgactccgcctccctgggacctggattgggtcagatgcctgtccttggaggggacaaggttgactgcttaggaggcgcgacgcacagggctgccaggcctggcccctctctgggaaggttgagagctgagacgggcagccctgtcccttcctccagatccgtctggttttttacaccgtttgttaataaagcctgaaaccgctgaaaaaaaaaaaaaaaaaaaacatcccagggtttgttcgtgtttttcttattcctccgtgcgcgggggggggcggtctcccccccggggagttttatttacgggagggcgccacggagaacctggggccacggccccattggtgtattatcccggcacacacacaaaaaaatacctggggcacaagaatactcgtcgcacaacgcgggagaggagcccgccttctctgcccacaaaataaagaaaatgtaccggttccccgcccgccacgcgggtggggtgaaatgttagcggactagcgctaatgtgaggac

SEQ ID NO: 6998 - DNA, 4832 bp, Homo sapiens
attaagatgctcaacactcaaatcggggtattgatctccacggaagccccaaaccctcgccatcgagagacccccatggcccggggtgatggctgtggggcttggtgctcccagagagctcagtggctacagaatgggtggggattctgcgtgtctcccggagcctgaacccctttcctggttatggccggtagctgtctccagggctaacgtgggcagcgcaggggggcggaaaccgggttttagccaaatgcctcgacatcgccgcgcctccgcctcctcgtcgctgaaagaaatgtcggggtttcatcagagctagggagcgacagtcgggaacagcgagtctgccgaagccggctgttgtgtgagggtgtgagacggcggggcggtgaggggccaccgcggcttgggggatagtgcgtgtggggttgaccgtgtgtctgcttgagaggctgtgaagatatggggggcagatatgggagaaatgctcgggcctgaagtccccagcccaccgtgctcaagagtagcggacgttttgccaccatccttgtctgtgctactgtctgctgcagcttccgtgccccgttctcctggagcagggcgtaaaagcggcttgcattcaattagcagcgaagctcgcgggcgctggcgggacaggcgcgtgaggccacaacacatgcgtgtatcttgcttgggctatcttccctgctctgccacgccgggtctggagaaggggtttcagccccaggacatttactgagagtcggcgaatattgggagccgcgatgttcccccttcgggccctgtggttggtctgggcgcttctaggagtggccggatcatgcccggagccgtgcgcctgcgtggacaagtacgctcaccagttcgcggactgcgcttacaaagagttgcgtgaggtgccggaaggactgcctgccaacgtgacgacgcttagtctgtccgcgaacaagatcactgtgctgcggcgcggggccttcgccgacgtcacacaggtcacgtcgctgtggctggcgcacaatgaggtgcgcaccgtggagccaggcgcactggccgtgctgagtcagctcaagaacctcgatctgagccacaacttcatatccagctttccgtggagcgacctgcgcaacctgagcgcgctgcagctgctcaaaatgaaccacaaccgcctgggctctctgccccgggacgcactcggtgcgctacccgacctgcgttccctgcgcatcaacaacaaccggctgcgtacgctggcgcctggcaccttcgacgcgcttagcgcgctgtcacacttgcaactctatcacaatcccttccactgcggctgcggccttgtgtggctgcaggcctgggccgcgagcacccgggtgtccttacccgagcccgactccattgcttgtgcctcgcctcccgcgctgcagggggtgccggtgtaccgcctgcccgccctgccctgtgcaccgcccagcgtgcatctgagtgccgagccaccgcttgaagcacccggcaccccactgcgcgcaggactggcgttcgtgttacactgcatcgccgacggccaccctacgcctcgcctgcaatggcaacttcagatccccggtggcaccgtagtcttagagccaccggttctgagcggggaggacgacggggttggggcggaggaaggagagggagaaggagatggggatttgctgacgcagacccaagcccaaacgccgactccagcacccgcttggccggcgcccccagccacaccgcgcttcctggccctcgcaaatggctccctgttggtgcccctcctgagtgccaaggaggcgggcgtctacacttgccgtgcacacaatgagctgggcgccaactctacgtcaatacgcgtggcggtggcagcaaccgggcccccaaaacacgcgcctggcgccgggggagaacccgacggacaggccccgacctctgagcgcaagtccacagccaagggccggggcaacagcgtcctgccttccaaacccgagggcaaaatcaaaggccaaggcctggccaaggtcagcattctcggggagaccgagacggagccggaggaggacacaagtgagggagaggaggccgaagaccagatcctcgcggacccggcggaggagcagcgctgtggcaacggggacccctctcggtacgtttctaaccacgcgttcaaccagagcgcagagctcaagccgcacgtcttcgagctgggcgtcatcgcgctggatgtggcggagcgcgaggcgcgggtgcagctgactccgctggctgcgcgctggggccctgggcccggcggggctggcggagccccgcgacccgggcggcgacccctgcgcctactctatctgtgtccagcggggggcggcgcggcagtgcagtggtcccgcgtagaggaaggcgtcaacgcctactggttccgcggcctgcggccgggtaccaactactccgtgtgcctggcgctggcgggcgaagcctgccacgtgcaagtggtgttttccaccaagaaggagctcccatcgctgctggtcatagtggcagtgagcgtattcctcctggtgctggccacagtgccccttctgggcgccgcctgctgccatctgctggctaaacacccgggcaagccctaccgtctgatcctgcggcctcaggcccctgaccctatggagaagcgcatcgccgcagacttcgacccgcgtgcttcgtacctcgagtccgagaaaagctacccggcaggcggcgaggcgggcggcgaggagccagaggacgtgcagggggagggccttgatgaagacgcggagcagggagacccaagtggggacctgcagagagaggagagcctggcggcctgctcactggtggagtcccagtccaaggccaaccaagaggagttcgaggcgggctctgagtacagcgatcggctgcccctgggcgccgaggcggtcaacatcgcccaggagattaatggcaactacaggcagacggcaggctgaacctccgcccgtccggcccgcccattcccgacctccacctagggtgcctgggagcagcagtctagggctggcaggacttatgtcccccgtccccaaccttcacctactcctcccccttactactccccaaccttgactaccagggacttctattagggagtgggccgatttcaccagtccctgctacccacggctgccattctccctgcgggctgaatccccttccccgccaagcacagtgtttatcttaccccatgcaagactccacccggagacggtgggctttatctatgtgcgtctgtatgcagtcgatattatattcgatttgcaccccgcagcccgccccaccgtgggctctggagccagaggaaacgagcgaagactttggaaacctcgcggtaacgcggtggtttcgggggccagccaaggccagtggagtgctgtggggtcccacctcgacccctcctcctccctttctttctttcctttttttttattttttaattttatttatttatttatttattttttgacggagtcttggtctgtcgccaggctggagtgcagtggcgcgatctcggctcactgcatcttccgcctcccgggttcaagcgattctcctgcctcagcctgcctagtagctgggactacaggcgcgcgccaccacgaccagctaatttcttctatttttagtagagacggggtttcaccatgttggccaggatggtctggatctcttgacctcaggtgatccatctgcctcggcctctcaaagtgctgggattacaggcgtgaggcaccgcgcccggcccctcctccctttcaatccctactcccagaagccgggattcgtggcaacccctagtttttagttccaaagcctcctgccggcagggaaccaaatccttctgtcctcccacccccaccccacttctggccagttggagtccagcccggtgcctggggcgcctttcagctccgcgctcagattttcctgttttcgttgttttcaaagacagcgacatttcgggtctggtgctaacacccccttcccagcctctgggaaaatcgagtgtgtgtgtcggggggtagggagggaatgcgttttctgtcgtctctctcctaacttaaagcgccgcaggaccgcgcgccccttggcggctgagcctgtggacttggtcgcgggccaatttcgttgtccgtgtgttgggctttccggaggtctgtgcgcccaacagcgccgctcccgcggctccacccgacccagaccctagctggaaagcgccggaggcggaggaagctgactgtggcctcccgggccgcggctctctggagggctcgcgccctagttcgcacaaagcctgctcgtgactgtgcgactgtgcgacgggatccggatggagccgagcccctccgtcctcgcgtctcggtcctcgcgtcgccccgccccacccgcccctgcttcggcgggaatcgtgtttgcccggcgtgtagtccctgacaagcgtgccctgtaggagaaaagtctgtgtcctgtgaagtgtgaccgtgtagtgtaggggggcgggcgggggggcggatgggcggggagggagggaaggggaggggcgcggcgcggcgactcggggcggggttcttttttccattttgaaagaaagcgtcggggttggggtggggggagtttcagtcctcgggatcagccctctccgcgaagcgcagcacaagcgcgggcctgggacggagtagccccccggagcccgtgcccttttctaaacgcgtctgtatgcagtcaataaaacaatcgatttg

SEQ ID NO: 6999 - DNA, 5065 bp, Homo sapiens; identical to SEQ ID NO: 5900
  misc_feature (520)..(614): n is a, c, g, or t
  misc_feature (4376)..(4392): n is a, c, g, or t

SEQ ID NO: 7000 - DNA, 4798 bp, Homo sapiens
  misc_feature (273)..(292): n is a, c, g, or t
  misc_feature (1091)..(1118): n is a, c, g, or t
  misc_feature (4750)..(4773): n is a, c, g, or t
agcgggctgctccgcgcgcagccggctcgggccgctcctcctgactgaggcgcggcggcggcggtggctgtgaccgcgcggaccgagccgagacattcgcgccgggggatcgggcgccgccgccgctgggccccgggcgcgtggatgcggctgggtcgggcggcgccgtacacctgaggcggagaacggggcgcggcgcgggtgacgctgtcagggccgcggttcctgacgcccaggcgctcgccaggacgagccaggcagtgatttgaggcnnnnnnnnnnnnnnnnnnnntggtccggagagcctagcggggctcgccaccgcctcccggctccccttccacgcctcatcctgccagcctcgccgccccgccagcgccgggcaaccgcctcgcccgaagccctccctcgttactgtccgcataccccggcggcgccgccgcgggaagcggctccccctcctcttcctccgcgtcctcttccctctttcccccgccggggccgcttgttgcaccgccccgcggcctgcgggagccgctcgccccggccttgtgctcgcgtccgcacccctttcctgtcgccccccggggcccgcaccacagcccggccggcgagaccccggccagaccccgctgcccgcacaaaatgtcggcccggacgccattgccgacggtgaacgagcgggacacggaaaatcatacatctgtggatggatatactgaaccacacatccagcctaccaagtcgagtagcagacagaacatcccccggtgtagaaactccattacgtcagcaacagatgaacagcctcacattggaaattaccgtttacaaaaaacaatagggaagggaaattttgccaaagtcaaattggcaagacacgttctaactggtagagaggttgctgtgaaaataatagacaaaactcagctaaatcctaccagtctacaaaagttatttcgagaagtacgaataatgaagatactgaatcatcctaatataggtgaagtatttgattacttagttgcccatggaagaatgaaagagaaagaggcccgtgcaaaatttaggcagattgtatctgctgtacnnnnnnnnnnnnnnnnnnnnnnnnnnnnccgtgatcttaaggctgaaaaccttctccttgatggtgatatgaatattaaaattgctgactttggttttagtaatgaatttacagttgggaacaaattggacacattttgtggaagcccaccctatgctgctcccgagcttttccaaggaaagaagtatgatgggcctgaagtggatgtgtggagtctgggcgtcattctctatacattagtcagtggctccttgcctttcgatggccagaatttaaaggaactgcgagagcgagttttacgagggaagtaccgtattcccttctatatgtccacagactgtgaaaatcttctgaagaaattattagtcctgaatccaataaagagaggcagcttggaacaaataatgaaagatcgatggatgaatgttggtcatgaagaggaagaactaaagccatatactgagcctgatccggatttcaatgacacaaaaagaatagacattatggtcaccatgggctttgcacgagatgaaataaatgatgccttaataaatcagaagtatgatgaagttatggctacttatattcttctaggtagaaaaccacctgaatttgaaggtggtgaatcgttatccagtggaaacttgtgtcagaggtcccggcccagtagtgacttaaacaacagcactcttcagtcccctgctcacctgaaggtccagagaagtatctcagcaaatcagaagcagcggcgtttcagtgatcatgctggtccatccattcctcctgctgtatcatataccaaaagacctcaggctaacagtgtggggaaagttgaacaggaaagaggagtgggacaaagatgtggctcgaaaacttggcagcacaacagttggatcaaaaagcgagatgactgcaagccctcttgtagggccagagaggaaaaaatcttcaactattccaagtaacaatgtgtattctggaggtagcatggcaagaaggaatacatatgtctgtgaaaggaccacagatcgatacgtagcattgcagaatggaaaagacagcagccttacggagatgtctgtgagtagcatatcttctgcaggctcttctgtggcctctgctgtcccctcagcacgaccccgccaccagaagtccatgtccacttctggtcatcctattaaagtcacactgccaaccattaaagacggctctgaagcttaccggcctggtacaacccagagagtgcctgctgcttccccatctgctcacagtattagtactgcgactccagaccggacccgttttccccgagggagctcaagccgaagcactttccatggtgaacagctccgggagcgacgcagcgttgcttataatgggccacctgcttcaccatcccatgaaacgggtgcatttgcacatgccagaaggggaacgtcaactggtataataagcaaaatcgctttgcaattttgttcgcagaagtacatcaggggaaccaaaagaaagagacaaggaagagggtaaagattctaagccgcgttctttgcggttcacatggagtatgaagaccactagttcaatggaccctaatgacatgatgagagaaatccgaaaagtgttagatgcaaataactgtgattatgagcaaaaagagagatttttgcttttctgtgtccatggagacgctagacaggatagcctcgtgcagtgggagatggaagtctgcaagttgccacgactgtcacttaatggggttcgcttcaagcgaatatctgggacatctattgcctttaagaacattgcatcaaaaatagcaaatgagcttaagctgtaaagaagtccaaatttacaggttcagggaagatacatacatatatgaggtacagtttttgaatgtactggtaatgcctaatgtggtctgcctgtgaatctccccatgtagaatttgcccttaatgcaataaggttatacatagttatgaactgtaaaattaaagtcagtatgaactataataaatatctgtagcttaaaaagtaggttcacatgtacaggtaagtatattgtgtatttctgttcattttctgttcatagagttgtataataaaacatgattgcttaaaaacttgtatagttgtctagatttctgcacctgaatgtatgtttgatgctttgatttgaaaatgttcttccctgttatttacattctggtgggtttttaaaattcttacctccatcatgcaattttgaaaattgtgtccagaattaaaagtgcatagaaatagcctttacaattgtagcatggacctttaaaaattgttttaaaatcttatttaaatttaaaccagaagctgaaaaatagatcagctttattatacacaaaattattactgcttatctttgctcttttccttgttatcccgcaaggtttagttgagaagatacaaaatgtttacagtgttggcacttagagtttttaaattcaagtacatgaaattcagtaatagcattgccttgagctaactaggaagtaccgggaaaaaagttaaatctacatcaagtttcttttgaactttgaagtgttttctgacccactgctaactgtagcaacaaaatttaaaagaaaaaaaacatactttatctggctattataacataaactgtcacgtaggtttgctgccttcagaataccgcaatttaattgcgggaatataataatattgggactgtttcacagcacaaactcatctttacagtgttgatcaatgcatcagttaagaaataatgccacctcaggaattaactggcattgggaacatttgcctcattctcctgctatcctcttcattcacccctgccactgtaatatctataagtacttaagagacttgtgagcaaaacatactatttataacagtatatgattgatttatgcttatgtggttgttcagtttgttcccatgtaactcgtttgttttaaatattttgccagatttcttgtatttattccacatcattatgcctataatgtgccgctttgtgattgggcatttgcctacttttctttcataattagtgatatatgcgatgtaaaaccactagtaaaggtacattttaatacttgttattttatactgaattagccttggaggttgactgtgcaatgttatttactgttgtaattactgtaataccaacatatgggccccatctgcacactcctgaaaaacagaaagtgtattcaaattttatcagtttaaagaaaataaagctgtgataaatactgtaattccaacctacattagaaggtctaagtgtaggtgatgtgccattccataatggcttccagactagggtgaattttatgttctgtactgtactgtgatgtagctttcttctgtaacagttatgttttaaaattaagtgagttttttttttgccttagcaaagggtggtgtttgaaaaaaaaaatgtgtagcccctttttaacctagtgttcattcaaaaaaaaattgatgcaaatctttattcactttcactggtgcacactgaaattttacttgaacagttctcataataaagcacttgtcttttgctctttaaaaaaaaaaaaaaaaacagttttctggtacaaaagttattctgttatggggggttttnnnnnnnnnnnnnnnnnnnnnnnngggcaaagggtgaaggccgtgaagg

SEQ ID NO: 7001 - DNA, 569 bp, Homo sapiens
ccgcgttttttttttttttttttaggtttgtaagggaggcttccttcatgatatgaccgtaggatgctgtcaccctgacccggttcctgatgcgtgatgtttctaagtgctcagtaagtaccaatctactcccacactgcagtatgtgggcgtgtgatgctgaacagagagagcacgatgtgatcatagttaattccctctggtatcaaaaaaataaaaacctatcaaaaaataaaaacgtatgttgctctcgtctgcgtcatcattgttgttcagacttttacataacatgccgaatgagaagactcagaaagccaggcagaatcatgaagaaataactgaatagttctgattccaagaactgtgtgaccttatgacatttaaagagtgaggaagagaaagcaacaggttccaagtattatagcaagcataccagctttacttcaggaaggctcgtggagaagctgtgatcacattgtggttatttagatacttccaaatggaaatggcattgataactattcagctgtgatatgaaggtacaaaaaaattttccaaatggtgaaagg

SEQ ID NO: 7002 - DNA, 767 bp, Homo sapiens
tttttttttaatgttaacattgagagtcattacggctaaagctttgccttcatcacatagctaaaaagaaggttgagctggaacttaggatactttaaagcatttcctgtttaggtattaggctgatagagaatcatgtgtaactggggtcagcattcctataattttttgagccaaagacagaatacacactttaccctgacaggtttcttccagaatttaggacagctgatgaaatgaaaagacacacacccaagccaagagtgcaaaaggatgtagtagcatgattccgccaaccaaatgcctcataccctcagacgtcccaaatccagtggtgagcaggtaaatttttaacaacaatctttctttgtgaggaaaaaagttcctgatttccataatgtaaatactttcactgactggtttgaagccatcaacacgtcaactaacaattggttcctgcatgtctataagctggctttagcacaccactgcaaacctacttattacttatattttcagatacattacagcacttatcaattctaacattgtgaaaaactgctgtgctttaggcatcttgtccaaacttgctccttcagctaaatttgactcatgtttaacatggaattgcacttcttgaataatatgttctttggactttgggccagtctggtaaaacataagacaacaataacatcattatggttatatacatttacaaataactcactaagtgctgttgtaaacattttacagagattaaagcc

SEQ ID NO: 7003 - DNA, 2525 bp, Homo sapiens
  misc_feature (1124)..(1180): n is a, c, g, or t
tccaaccgcctgcataaactcccgcccgacgggctcttcctgaggtctgcagggcacctgggcccaatgccgcccaccccgctgaccgtcagcttcggcggcaaccccctgcactgcaactgcgagctgctctggctgcggcggctgacccgcgaggacgacttagagacctgcgccacgcccgaacacctcaccgaccgctacttctggtccatccccgaggaggagttcctgtgtgagcccccgctgatcacacggcaggcggggggccgggccctggtggtggaaggccaggcggtgagcctgcgctgccgagcggtgggtgaccccgagccggtggtgcactgggtggcacctgatgggcggctgctggggaactccagccggacccgggtccggggggacgggacgctggatgtgaccatcaccaccttgagggacagtggcaccttcacttgtatcgcctccaatgctgctggggaagcgacggcgcccgtggaggtgtgcgtggtacctctgcctctgatggcacccccgccggctgccccgccgcctctcaccgagcccggctcctctgacatcgccacgccgggcagaccaggtgccaacgattctgcggctgagcgtcggctcgtggcagccgagctcacctcgaactccgtgctcatccgctggccagcccagaggcctgtgcccggaatacgcatgtaccaggttcagtacaacagttccgttgatgactccctcgtctacaggatgatcccgtccaccagtcagaccttcctggtgaatgacctggcggcgggccgtgcctacgacttgtgcgtgctggcggtctacgacgacggggccacagcgctgccggcaacgcgagtggtgggctgtgtacagttcaccaccgctggggatccggcgccctgccgcccgctgagggcccatttcttgggcggcaccatgatcatcgccatcgggggcgtcatcgtcgcctcggtcctcgtcttcatcgttctgctcatgatccgctataaggtgtatggcgacggggacagccgccgcgtcaagggctccaggtcgctcccgcgggtcagccacgtgtgctcgcagaccaacggcgcaggcacagnnnnnnnnnnnnnnnnnnnnnnnnnnnnnnnnnnnnnnnnnnnnnnnnnnnnnnnnngtggagtcccaggctgcccccgccgtcgccgtcgaggccaaggccatggaggccgagacggcatccgcggagccggaggtggtccttggacgttctctgggcggctcggccacctcgctgtgcctgctgccatccgaggaaacttccggggaggagtctcgggccgcggtgggccctcgaaggagccgatccggcgccctggagccaccaacctcggcgccccctactctagctctagttcctgggggagccgcggcccggccgaggccgcagcagcgctattcgttcgacggggactacggggcactattccagagccacagttacccgcgccgcgcccggcggacaaagcgccaccggtccacgctgcactccagcctgggcaacagagcgagactctgtctcagaaaaaaaaaaagaaatatctgacagtagaggacagattaaataaattatgatctgctatatcatgacataaaatacatttactagtgatactgatccatataattgagaaagcatttatgatgtattaccaaatgaagaaagtagatttaaaaaggtacatgtaatttgggcagaggtactttggagaaattaagaacacaggctctgcagtacaactttcagggtgtgattctgaactctgacagttactaacctcgcagtgtctttttcctcactggtgaaactggaatataaataccatgagatatggctatctcaattatcaagtaagataatctacataaaacatagtaatacataacaattactttacataagttagctgtttttattaaagatcactgacattacatatcccttaatccatttttagaaaagaaacatgaggctgctgttttcttatgctaaaatatgtgcttctcaatcagctatcaatatcatgaatgctaactaaaaataactttccaagcctgatgttaagcatgaatttatttgaatcagcagaattagcaaaaacgattctaagacacgtaagaaaatgttccctctttaccagcaactagggaaatagagacatgattctgcatcagaaatcaagtttaaagaatctaatctgagaagagataccaaatcaagaatattagcaagagactgaatcatgtgttctatgtgatatgggagattcgtgtaattatttcaaattgttgccatcttagtcatttcatatatttggatttcatataccttggatttgttacttgtacatataatcatggaaatgttacttgtgtatatttggaaggcatcagatatcactgattatcattctctgtcaaagaaacattaaaatcatagaaaatctaaaaaaaaaaaaaaa

SEQ ID NO: 7004 - DNA, 1162 bp, Homo sapiens
tccccaatattttgaggaaggaagagatttatgcgatgaaaaaaaccttccttttgacggtaaacggcaacgtttccattcaccccaccaagagccaactgtagttaaccagatagtgcctttatcaggtgaacgaagatactcaatgccaccattgtttcatacacattatgtaccagatatagtcagatgtgttccaccttttcgagaaattgcatttttagaacctagagaaatcacactgcctgaggccaaagataaggtaataataatgtagattttagttttgccttttgggaatttagtataaataatgtattaatcaaaaatatttaatatcctggattaagtagaacgtgcctttttttgttgcaatgtttaaagtactattcagcctaattttctgtccaaacattactttgatttttgttagctattcttttatagaaatgcagccatcaggaaatcagattttccctgatatatgaaaattttattagaacccagacactttctgagtttagagaactgtcttgttacttgtttttactgaaaaaaaaacacgcttgtcatattagctattggtaatacagcgttagaaacacattctattcatgcggatattcgctgtcactaacatgaggttccagaatgtcacacactcgagaatccaggagtcactgagaaacacactaccttccaaggtggatattaagtcaaggaaagacattctctcccacaaacatctttttcacccactttcccaaatacacgtgacaatgaaggctctttcacataccactttctgtgcacaatgcactctgtccacattgtggacacacgggctatctacatctccagtcaagacacgttgtctccgtgcccatttgcggaaaccttgacaaacacacccttagcaaaagagcacgagacgtcagactgccacatcctcgtacactggcaggacgctgcgacaatcatacgtacaagattcaagtaagggcccctttgaaaaaacctcttcgttctgatcagacacagagaactaacatctgactcgctgcgcgacacacagtgtcagatgccacgatgaagaaagctcaagaacacgcagacagatcgagtatcatcagcatgtttcgtactgtcgacgtacatttcc

SEQ ID NO: 7005 - DNA, 4547 bp, Homo sapiens
cagaaatcgttttacagaaattccttctgatgtctggttatttgcaccccttgaaacattaaatttatatcataattgcatcaaaaccattcctgaagccattaaaaatctgcagatgttaacataccttaacattagccgaaatcttttatcaacattgccaaaatacctatttgatcttccccttaaagttttggtcgtcagtaataataaactggtatccattccagaagaaattgggaagttaaaagatttaatggaattggatattagctgcaatgagattcaagtccttccccaacaaatgggttacattcacttagagagctaaatataagaagaaataatcttcatgttttgccagatgaattaggagaccttcccttagtcaagctggatttctcttgtaataaagtgaccgaaattccagtttgttacagaaagctgcatcatttacaagtaataattttggataacaatccattgcaagtaccaccagcacagatatgtttaaagggtaaggtgcacatatttaagtacttaaatattcaagcatgttgcagaatggataagaaaccagattccctggatcttccatcattgagtaaacgaatgccctcacagcctctcacagacagtatggaagatttttatccaaataaaaatcatggccctgactctggaattggaagtgataatggagagaaacgattatccacaacagaaccatcagatgatgacacagtcagccttcattctcaagtctcagaatcaaatagagagcagacatcaagaaatgacagtcacataataggaagtaagactgattctcagaaagaccaggaggtatatgattttgttgaccccaacacagaagatgtagcagttcctgaacagggaaatgcacatattggatcatttgtatcattctttaagggaaaagaaaaatgttctgaaaaatctcggaaaaatgaagaattaggagatgaaaaaagacttgagaaagaacagttactggcagaggaagaggatgatgatttgaaggaagtaactgatttgaggaaaatagctgctcagttattgcagcaagaacagaagaacaggattcttaatcattcaacttctgtgatgagaaacaagccaaaacaaactgtggaatgtgaaaagagtgtctcagcagatgaagttaattcaccattatcacccctcacctggcagcccttagaaaatcagaaggatcaaatagatgaacaaccgtggccagaatctcaccctataatctggcagagtgaagaaaggaggcggagcaaacagattagaaaagaatatttcaagtataaatcaatgaggaagagttcaagtggcaatgaaaatgatgagcaagacagtgataatgctaatatgtcaacacaatctccagtatcatctgaggaatatgacagaactgatggtttttcacacagtccctttggcttgaagcctagatcagcttttagccgctcatctcgccaagaatatggggcagcagatccaggatttacaatgagaagaaagatggaacatttacgggaagagcgagagcaaatacgacaacttcgcaacaatcttgaatccaggttaaaagtaattttgcctgatgacattggagctgcactgatggatggggttgttctttgccatttagccaatcatataaggccacgttctgttgctagtattcatgtaccatcaccagcagtgcccaaactgagcatggcaaaatgtcgaagaaatgtagaaaattttcttgatgcttgtaaaaagttgggtgtctcacaggaaagactttgtttgcctcatcatattttggaagaacgaggacttgtgaaagttggtgtcacagttcaggcgctccttgaattaccaacaaccaaggcatctcagctttctgtggcttaatataacattttaaaattctaagtgtatagtttcatttatttgaagtgatttcaaatatttcaaattcatgaataagaatattccgtcaaaaatagtttgccttaggtcacgccttaggattttaaaaaaattacattgaaacatcaaacttaaacattgaattgcccgaacttctttgggggaaaactggattaacttaataagagtatttgataaactcaaattctctttttactaagtcagttgataatcttgattatttttcagaaagcagactgatactaaatttaaaatgtagtttcaatttaataatcacattaggtttaatttttttacatcatagcatattagtaaacatctggataaaggtaattttttttagcaatttagagcaattctatatttgagttatttaatacacttctaattctagtttatacacaatttcttcaatctttggtcttagttttctagaaaaaaggagtagaaaaaacaattctggctttatattaaattcttttagtattataggttggtgccaaaatattttcagttgtactgtagattgtttacatgtgaagtgcctgtgtaattgatgactcttacatagtcttaagcatttttgcaattttttaaatgtattaatagagtcaatggaactttaaaatattttagtagattttgtaaagtcagtaatatgtgaggatttaaatgagcctcacattgtgacatttgtggctttttagttagtccattgcagtttcccttaaattggttatttcatgttgtcaaaaataccaatgttaatatgattaatttatgctatttaattttgtgaaacttaatcatcttttaaaatgtattatttgaagagtattttatttctgtattgaaaatgttacacaaagcagtaaagtttttgagaactagtgaagtactaattatcaaggacattttgataaaactgccaaagtttgggtttatatcttccctttgagcagcattctatcagtgctgcctttagctatactcagagagcagcagttgaggaataggtttttactcaaaatctggccatttgtgaatcctgtaaaccttgtgatcttcaattactttgatgttaaattaaacacagactcttctataaatattttcatgagatactgtgttacacaaagtccttgttttaacttaggtatgggtaaatttacatcggtggtattgcaggaatttttcaaaaacattactgtaatgaataactgagtttcctatagaagaacctgaataattacttttgtagtaaccaagcaagcatcatatcttaagtatgtgatcatttgcacttgttacctcttaatatggatgcaacttattaaaaatgttggcctgggtatttcaaagggtatatataaaaggtaaaaaactagtgtgccaaatggtataggaacaactgtactttttttgatcagttggcatgaagccatagaattaaattttggctttagaatacagatgtgttcattacattccccaagggtcaaattggagcttttaaagaattaaagcttctatgagtatatggtttaagaattaaattattagtaatttattattttaaatatttgacctcattagttgttaattttttagttggataaaaaaaaaaactcgctgacataatctccctagtgaaagcttgggtaatatatgtaagaaatggcaaataaataccttagttaatgactttttatgtagaaatttgacagcattacaaattaagtgaccattaaaaacacagcaatcattcatactgctttcataggtgttatgatagtctctgattaatcaatctagtatgaattattttacaagtgttgtcctgtttcatatctttgaagtagtagtgaaattgtaggccattttcttataacatttcagttacttttcagttaattattcctttaaaaagaaaatacagcagaacctcactgtagcattctttactgcagagcaaaattcaatttaagatgggcttctctgaggtccacatcatggcagttcatttactcttgtgccaaatggcaacaccacgtctaaagcagtttcacagcatggtcccctacaatgttataccaaggctctgatgtatttcttttagtagtttctaagtgtaaaatttattctaaatgtttttatggctattatctatttcatcagttattgaattaagaatgattttcattacttgagtgggatttgtgatttaatgacagttgaataatcaaaaatattttattaggcccccaaaatttaatagatatctatttctgttacattttattactgtatggcacaagaaagaagtgacattgggtatgttagaaatgaaataaggagtaaaaatgcattaccatttgtttaataattatctttacagaatgctagtttaatgacttttttaactgaattttttgaataaatcagaaatgtttgtattggtcacagatctatcataattgcttttctgatgcatttaaaaataaatggaacacttaaatgtatattaccgatgcaaactgtggataaagttgaaagaaaaaatttaaaaa

SEQ ID NO: 7006 - DNA, 4697 bp, Homo sapiens
  misc_feature (378)..(392): n is a, c, g, or t
  misc_feature (1118)..(1133): n is a, c, g, or t
aattgtcagcagagaagccaaacttcagtttgcctatcttgaaaattttaaaaccaaaatgaggagtacagtgtctgtgcgtgaaggccagggagttgtgctgctctgcggccccccaccacactctggagaactgtcatatgcttggatcttcaatgaatacccatcgtttgttgaagaagatagtcggagatttgtctcccaggagacagggcacctctacatatctaaggtggagccgtctgatgtgggaaattacacatgtgtggtgacaagtatggtgacaaatgcccgagtgctgggctctccaactcctttggtgctacgttctgatggtgtgatgggtgaatatgaacctaaaatagaagttcagtttcnnnnnnnnnnnnnnncagctaaaggttcgactgtgaaattggaatgttttgcccttggaaatcccatacctcagattaattggagaagaagtgatgggctgccattttccagcaaaattaaattaaggaagttcagtggtgtgcttgaaatccccaacttccaacaggaagatgcaggttcctatgaatgcattgctgagaattcacgaggaaaaaatgttgccagagggcgtctcacttactatgcaaagccccattgggttcaactcataaaggatgtggaaatagccgtggaggacagtctttattgggaatgcagggcaagcggcaagcccaagccttcctaccgatggctgaaaaatggagcagccctggtgctagaggagagaacacagatagaaaatggtgcccttacaatatcaaacctaagtgtgactgattctggcatgttccagtgcatagcagaaaacaaacatggccttgtttattccagtgctgagctcaaagttgttgcttctgctccagatttttcaaagaatccaatgaagaagttggttcaggtgcaggtgggcagcctggtcagcttggattgtaaacccagagcctccccaagggcactctcttcctggaagaagggggatgtgagcgtgcaggagcatgaaagaatttctttgttaaacgatggaggactcaaaatagccaatgtgactaaagctgatgctggaacttacacctgcatgnnnnnnnnnnnnnnnnggaaagcaaatggcacaacacatttggttgttacggaaccaacaagaataactttggcaccatctaacatggatgtttctgttggtgaaagcgtcatattgccctgccaggtacaacatgacccgctgttagacatcatctttacctggtatttcaatggggcccttgcagattttaagaaagatggatctcactttgagaaagttggtgggagttcatctggtgatttaatgatcagaaacattcagctgaaacacagtgggaaatatgtttgtatggtgcaaacgggggtggacagtgtttcatctgctgctgacctcatagtaagaggttcacctggaccaccagaaaatgtgaaggtagatgaaattacagacacaacagcccaactctcttggaaagaaggtaaagacaaccatagcccagttatatcctattctatccaggctcggacacctttctccgtgggttggcaaaccgtcacaacagtgcctgaggtcatcgatgggaagacgcacacagccactgtagttgagttaaacccatgggtggaatatgaatttcgggttgtagccagtaacaaaattggaggtggagaaccaagtttaccctcagaaaaagtaagaactgaagaggcagttccagaagtgcctccttctgaagtcaatggaggaggcggaagccggtctgaacttgtgataacctgggatccagtccctgaagaactacagaatggtgaaggttttgggtatgttgttgctttccgccctcttggggttaccacctggatccagacagtggtgacatcccctgacaccccaagatatgtctttaggaatgaaagcatcgtgccatattcaccatatgaagttaaagtgggtgtttataataacaaaggtgaaggaccatttagcccagtgacaacagtgttctctgcagaagaagagcctacagtggccccatctcaagtctctgccaatagcctatcttcctcagaaattgaggtttcatggaacaccattccttggaagttgagcaatggacatttactgggctatgaggtgcggtactggaatgggggtggaaaggaggaatcatccagtaagatgaaagtggcaggaaatgagacatcagccagactacggggcctgaagagcaacctggcctattacacggctgtccgggcttacaacagtgccggcgctgggccttttagcgccacagttaatgtaaccaccaagaaaacgcctcccagtcagccaccaggaaatgttgtttggaatgccacagacactaaagtgttacttaattgggagcaagttaaagccatggagaatgagtcagaagtaacaggatataaagttttctataggactagcagtcaaaataacgtacaagtactgaacacaaataaaacttcagctgaacttgtgctgcccattaaagaggactacattattgaagtcaaggccacaacagatggaggggatgggaccagtagtgaacagatcaggattccacgaataaccagtatggatgcaagaggatccacttcagccatctcgaatgtccaccctatgtcaagttatatgcctatagtactgttcttaattgtatatgtcctgtggtgatattaactcctttttattatttattggaaagttatttggttaccaaaaaaagtgctttcatgaaatgcagtgattatgcatgtttttttcaactcttatttttaactttctacttcattataggtaaatatgaatataattaaaaaaacagtaaatccttttaggggaatctgaaatgccttaatattaacttgataaaccaaaggaatttacatattacatacttcagacttttgatataaatgttcttaaactatgagtttaagcactgcctatggataaagactcacacactctcacatgtacacacacacgcatgagaatttctttttacattgaaaaactctttcatttaattcaaatgctattttcccattataatagcattatttggaagacttaaccagtatcaatttgaaatgctgatttaagtccccaaggatgaaaaatacattttaaaaattattttgttggagaggagtggcatgtgattcaaaagagcattgttggaaaatgctactgtggggcttagaagaatgatgtttggtttggtatgctgctaactagttgtaagactttacaaatcactttgccatctgtacctctcaattattcctctataaaatatggagataataatacctatctgatcagactttgccccatgaattagtttttaaaagataaagactgaagtatgaaagtgcttttgtcaccccaaatgcaattgacccatgcaaaatattagcatgaatttatttaatcacataaaagtcatgaagaccagccagattttcaagcttcattctgtttcattcagttatattccaaaattcaaatgatcacattttattctttctcaaaaaaaaaaagtttttttaaattaaaaaaggaattgtttccttcacagctatgaataagctttcaggttttattaaaacctagaggaaaaaatcaggaatgacctgaatctcaacccaaatattaaacaaaatccacataatccctcatttcaatttccaattccattaagggaccctctctttttggatggcagagatggttttttaatgaaatcccaccatctatctgagtgagtctggcaggctttttagttcctgagttaaatttgtaatagaaccaaggcaatgctgctgactttgatatgtatgactcagtctttcaatatgtggttttcaaaaaattgttgaagacgtgacttcatagcaatatatagagaataaattaaaatcagcagattgagttttcaacattgcaaaatcagttttttacctctttcctaccaatttcacattttgcagaaacttgttcacatttccaacaatatcagaattagaaaacagttcagataacaagaaagattaaaaattagggaaattctgatatcaccataaagcactattttacatttagagattacatttaagataaagtcatcatacacaaaaacaataaatatttataactttctctataaggtccgcatatactgtatatattgaaacaatctgaatgactagtagatttcatatgaccattgttatttccactttctccaatacttgtattttatgctacatgtaatgaagttggacctttttattatttagtaattcctatatgttcctatacttttcattttcaagatgattgctctattgtttcatgttgtttctagcaatatatctccatgagatatgcactttgtttcatattgaaaagtataaaatttatctttcaattcctgtgtgtgtatcctatggttatctgtatgtattattttctattctaataaaatttataacaagcaaaaaaaaaaaaaaaaaaaaaaaaaaaaaaaaaaaaaaaaaaaaaaaaaaaaaaaaaaaaaaaaaaaaaaaaaaaaaaaaaaaaaaaaaaaaaaaaaaaaaaa

SEQ ID NO: 7007 - DNA, 1629 bp, Homo sapiens
gcttaaaaggggcccgggtggatgaaagcgggggatctcggtcagatttgtgtgtgcaccgcgtctccagcgatcccggatccactgcgctgccaggggcctgggggtgggtctcttgctgtctctgcgacgacatccttacgtttcggcactctaatgctgggtttgtgcgtgtgtgtctgcttagcggtctagcgggctgttaggctccctcgcccccagctccttggctcgctcagctcctccaccgcagcccagcagtgagacgcgcgcgcagccagctccccacgagatggaacagaccgaagtgctgaagccacggaccctggctgatctgatccgcatcctgcaccagctctttgccggcgatgaggtcaatgtagaggaggtgcaggccatcatggaagcctacgagagcgaccccaccgagtgggcaatgtacgccaagttcgaccagtacaggtatacccgaaatcttgtggatcaaggaaatggaaaatttaatctgatgattctctgttggggtgaaggacatggcagcagtattcatgatcataccaactcccactgctttctgaagatgctacagggaaatctaaaggagacattatttgcctggcctgacaaaaaatccaatgagatggtcaagaagtctgaaagagtcttgagggaaaaccagtgtgcctacatcaatgattccattggcttacatcgagtagagaacatcagccatacggaacctgctgtgagccttcacttgtacagtccaccttttgatacatgccatgcctttgatcaaagaacaggacataaaaacaaagtcacaatgacattccatagtaaatttggaatcagaactccaaatgcaacttcgggctcgctggagaacaactaaggggcaccaaaccctctgaggttttactttaaggttcgctgtatgtttgccttggacaaaaaggctacctaccacgtgctatccagtaatatacttaaataagccaatacttagatctactgtaaggcagatgctaattataaggcattaagtaagcaaatagtgccctcagctactgcagaagaaaagtcccactgaggaaaagaaagtcttgtgatttttaaaggcaagttttcaagtgctctcatagttctatcctctaattccattaaatccatactaggagcgtcagtgagggttttcatagcttttggaaatactttggtctctgaactgtaattagcaagaagtaaaaacagaaacgtcaaacgtcaaatgtttgctttgttacctggaggactaaatgtagatgtctttagtatactttgtatgttcttaatattggaagataattttgtgaatctgtagattttattttttcagtcttaccttacaaatttcttttctatgaataatagaggaacttacggcactctgccatttgttaatgaaaggaagtgcagaggatttagaaaagtacatgatccccagaccacaacaaaccaaaacataaactcatgtctgtgtcccatggtcatagtcaaagattttgtactgctaaaattaccaaataatttaaataaagtggatttgaacacaaaaaaaaaaaaaaaaataaaaatttagaggtctcc

SEQ ID NO: 7008 - DNA, 793 bp, Homo sapiens
agcgggagcgtccgcggcccgcgcgcccgcgcggcggaggagaggtgttaagtgtgatgcttccataatacatttggatgctgtcagctaagttcacttctgaactaaggggttcctccaaatgttggctgaaattcatcccaaggctggtctgcaaagtctgcaattcataatggagctactgtactggctattggaaggaggagattctgaagataaggaggtaaaacctgtttagaaattaaaaatgagttacgatttaaagaaaattcagatgactcattgtgagtgctagttctcttgtaggatgccactggaaatgttgaaatgaaaaatattcagccgttggtctttgaaatttcctgtgatgtgtttcaatctagatgcaaagaacatggaaaaatcaaagtgctcgagtggtttaaatatgttttgggtattcctgtttatagactataatacttttccaattaaaatcctcagttgtcacgcagaagaaggttaagctgtatttgattgccagttttactgaaaatgcttagtattttacagtatcaccaaatatattttgtttagccaaggtataggaaaaataaaataaattgtataggttgaaaaaaaaaaaaaaaaacaccccacacccgccaagaccaccacccccacacaaaccacaccgacaaacaaaaacacgaaacgactccactctccccgcccactccctccaccaccagcggcccaccacaccgcagaaagcgcgccctctacagccacaggcgacgcccccattaaaccg

SEQ ID NO: 7009 - DNA, 1815 bp, Homo sapiens
  misc_feature (369)..(412): n is a, c, g, or t
  misc_feature (836)..(836): n is a, c, g, or t
  misc_feature (1052)..(1075): n is a, c, g, or t
acaacaaacaaaaatgccaccctaactgtgactagaccccccacgattcgtcttatggacgtatttctctcgaggttggtctgctgtcctgtgtagcggccaccagctgcatgtggcagtttaaatgtaaatgcattcaaattaaataaaaggggacattgtgctcctcagctgcacaggccacattgcaggtgctcggcaggctgtcgcattgcacctggcagaatgttcctgttgttggagaaagttccatcggacaacgtgggccagggcagtgggcgtgtgtattttacttgactttggccttaggacctttggcagtattatagtagaaaaatgaagtgctgtgcggtgcttacagacgcatgnnnnnnnnnnnnnnnnnnnnnnnnnnnnnnnnnnnnnnnnnnnnagtccaggagacttgaatatggaagccagtttggagcctctcctcactcctggccttcctatggaaggagcttattcaagggaaagagcttattcaagctgctctttccccacccccaggtgtgacccacaggcctccacctgtctgggacaggcaggactgtgagctttgggaatcaaatggaaaacacacttgtcccactgctgccagctggttgtcctagggctaatgtgtcacctctctgtgacttagctcttcacgtgtagaatggtgtggaaaagtactcggtgtggctgttttcaggatgaaggggtcttagcggtgctcgcagaagagccacggtgttgggagtgtctgctctctggaggggaggctgcctcactaactggcctctgccccacaggccttcctggatgctctgcanaaccaggctgaggccagcagcaagatcatcggccagtttggagtgggtttctactcagctttcatggtggctgacagagtggaggtctattcccgctcggcagccccggggagcctgggttaccagtggctttcagatggttctggagtgtttgaaatcgccgaagcttcgggagttagaaccgggacaaaaatcatcatccacctgaaatccgannnnnnnnnnnnnnnnnnnnnnnngcgaggcccgggtgcgagatgtggtaacgaagtacagcaacttcgtcagcttccccttgtacttgaatggaaggcggatgaacaccttgcaggccatctggatgatggaccccaaggatgtcggtgagtggcaacatgaggagttctaccgctacgtcgcgcaggctcacgacaagccccgctacaccctgcactataagacggacgcaccgctcaacatccgcagcatcttctacgtgcccgacatgaaaccgtccatgtttgatgtgagccgggagctgggctccagcgttgcactgtacagccgcaaagtcctcatccagaccaaggccacggacatcctgcccaagtggctgcgcttcatccgaagtgtggtggacagtgaggacattcccctgaactcagccgggagctgctgcaggagaccgcactcatcacgaaactccgggacgttttacagcaaaggctgattcaattccttcttgcccccaataaaaatatggtgaagaattatccccggtctgcttgaccataccgccctgtttatgcgggcggggcactgtcgaccgccccccggtcgggaggggcaggtgaggctttacctaagccgcctacccccctatttccttttgtgcgcgccccccgaggacacggcgcgccactacactcacaccgccccgcgcacccggcctgggtccgtactttgcgcgctactccgtccccccgcatcggcgcgccca

SEQ ID NO: 7010 - DNA, 1315 bp, Homo sapiens
ataggaacagccgcggcggcccggctcgcgcgctgcttgcctgcctcggtctccgccgctccaggggcgggtggggtgggctgagccggagcccgggccgccgccgccgccgccggggagaggccgaacgcgcagccggcgcgggtccctgagagagcgcggccgccgggcggtcggtccccgtccgggtcgaagccaggggcgcgcggcgatgtgagccatgagcgcgacgtggacgctgtcgccggagcccctgccgccgtcgacggggcccccggtgggcgcgggcctggacgcggagcagcgcacggtgttcgccttcgtgctctgcctgctcgtggtgctggtgctgttgatggtgcgctgcgtgcgcatcctgctcgacccctacagccgcatgcccgcctcgtcctggaccgaccacaaggaggcgctcgagcgcgggcagttcgactacgcgttggtgtgaggggcgcggcgccccctagccggccctgcgccggggtctcagagggccggcccggcggggggcgccgcggggccaggactgcgctcaggatcccgccccggagcccccagcccgggggagagggggagggagttgggagaagcccagcccctccccctcgagacccctcccatgtcccttcctggcctggccggagccccacctcgtgcctttatccgccctgtcccttcctctctgcgcatctcacccgcccggctggcccccacccccgactctgaatcccgggcgggaggaggacccccgcaccgccccctccccagcgtgtaagtggctctgctattgtgcgtccctggaagtggggacccccttgtccctcctccctcccctgttgtctggccgtcgtcaaccccaccttgactgagtgttgagcccgtccttgggctctggtccctgcggggcaggctctcccgggcccacggggcggacgctgcataccaatttgccctgcaccgcctgtcccggagacggagcccgaaggcctgccatggcggctgtgtcgaggatgcgtggcgcctgccgtggcgggacagcgtgggcaggctcatttctgcccccaacccgggccccaggacaggtcagcgcgccctgccccggtgcccaccgctgccccccatccgccctcctgccacttgcccctgacccccctgccgtgcctcccgcagccctcccatgccgttccactcctccctgcctctgagccgaacatgataataaaagctattattgagcgcttactgcatgccaaaaaaaaaaaaaaaaaagcagctgctgttgatctagaactag

SEQ ID NO: 7011 - DNA, 3161 bp, Homo sapiens
  misc_feature (2753)..(2772): n is a, c, g, or t
agactaagctgcaacactggcagagcctcccaaggaagggaggagggaggacagaggccaaggcggctcctggccaccctcgcagcttcctccctccctggccacaaggacccaaagctcagagggatggatgaacagacaggaaggctcaggctggacacgtattgtatgagtgccaagcagatctgggcatggagcaaatgctcaggaaggctgtgggatgagcacatgaaatggatggaaggatggacggacagatggacagatggatggatggatggatggatggatgagtggagcccaacaccagctctcaggtcctacggaggtggcctctctcagcagacgttcatcttcactgacggggaagatgaggccctggccaggcacacgggcaacgtggtcatcacaaactgctcggccgcccacagccgccaggcgctgtcctgcaagatggccgtggagtatgaccgcttcatcgagtccggcaggaagtggttctgccacgtggacgatgacaactacgtcaacctgcgggccctgctgcggctgctggccagctacccgcacacgcgggacgtctacgtcggcaagcccagcctggacaggcccatccaggccatggagcgggtcagcgagaacaaggtgcgtcctgtccacttctggtttgccacgggcggcgctggcttctgcatcagccgtgggctggctctgaagatgagcccgtgggccagcgggggtcacttcatgaatacggctgagcggatccggctgcctgatgactgcaccatcggctacatcatggaggccctgctgggtgtgcccctcatccgcagcggcctcttccactcccacctggagaacctgcagcaggtgcccacctcggagctccacgagcaggtgacgctgagctacggtatgtttgaaaacaagcggaacgccgtccacgtgaaggggcccttctcggtggaggccgacccatccaggttccgctccatccactgccacctgtacccggacacaccctggtgtccccgcactgccatcttctagtggccatggctgagacccaatccctgggcgcccctggtatccaaagggcccagggaccctgttgcgctgccctggcctcggcattcgaggctcccctagggccgtgcctgtgcgtgtgcgtgtgcgtgtgtgtgtgtgtgtactgcatgcccacccgggtagcaggctgctgggcagttctgctctgtggaggggcgggcaccagcgccacttatgtgcctctgctccgagggccagtgggctgcagggcctgcttggaggaaggatttgtgtgtcggaggccactccgagggcaattctgttaggatttttggatctttctacagctacggggctccgggctactttgcagggatgcgatgcgtaggtgcctttctcttcctgctgaccacaagctctgtgctgggggtacctgtgccctgaagtcctggcccctgtgtcatagccccaagtacgactcactgagccatgctcactgcaggggaggctgggtctgggggtgcgtgacccaatccccttcctcctggcctggacgctgtggcttaagagtaacagcagccaccgcccagttccagtggccccacgaagcccccagtggctggctgtccagctgggcaaacagtggcacccctcccagctcttctgagtggggagtcttccaggcctcctcagaggtcttccctttgcctccccaggacagggtgagtcagagctcagcatttaatctcctctccaaagtagagagcaagtcgcccacagtgggcgtgtctgtaaatattgtgacagtatttttttactgtgctgttttttttgaaaggggatgggtaaaaagtagggtgttcttgttttttgcttgggagggtgggggtgggggagggtcttattttatcttatcttctctgtggatcagaaaaaacagaagccaaactcggggtcatctttgtttttaaagctgaagtgggactgtctggcactctgtgtatttatgcgttccagcatctggaacctcccatccctgccctcctcctgtgtagctgccacctccccgctgggcccagcatggctcacctgtcccgtgggctgtgtttcttgttgtttttctctttgcaaagacatagctaggaaagcgaatgataagggaaaagttctcagggaattgaagtgttgttgctatggtgacgtccttttgctgtgaataaaggtgctctttgcagcaaaaaaaagggtcctggtcttggctggaggtggggcctaagccccagggcagccagggtcaggagaggcacacaggtgaaggggaggcttggccttgggtgcaccgcatggagcaggtagataggaaacgcttagagacaactattttggaacgaaacctggcgtcactatagctgcctgctggtgactacaggtgcggcccacccagggtcagggtggtcgctggagcgtgagccctgtgcttccaggaggaacaggtctaggatgctgggggctctaggtcccagccaaaagcacaaccccaaggctctggcctggtctggccactggggagcccagcccctgcaggagggacagtgactcctgtgaccgggcctggggcctccttatccaacttcactcctgccacgagctcacagagtccacatcatcgcctcactttgcaggtggggaaactgaggcacggagcagctgatgcccaaggnnnnnnnnnnnnnnnnnnnnggctggggaggcgctcagactccaagccaggcaggccgtgggtcccggccgcccccacagctggtaatgtttgcacctccctctcctgggatgtggccccaggccccgaccccgcttaggggtgggtgggaacagtcctggagagcacgaacactggcgggaccccccactggaagtgggtcccaccccctgcaaaaatccaaaaccttttttttaatacagcagattctgggggggcctttcccttcctcaaatccacgcctcttaagggggactgaataatgggaaccgcggttccctacccctctcgggggaaatccccccccttaccccccctggtaacccccggggcgggttaaccttccctcttcccccaggagacccccccc

SEQ ID NO: 7012 - DNA, 3449 bp, Homo sapiens
tttttttttgcctgctgctatatctgaggttgtacttttgttctgatctttgtaacacctcaaaaaaaaaaatgggttaagagaaggatgaacagaagaatggatatgagacctatctgataaggcaagcagattaatagacgaatggaggaatgtttggatgtatatgtatatgtgttcattgcagttttcaactttttgtgttgaaatttttataaaaagaagttttttttttttttttttttttaacagaaccataagatttttatttaacatttttgattaaaggaattgtattgcaaattatgactttttaatttggcaacatccttttaatggtgttctttctttgtccttctctttctcttcctctctctctccctctcttccctaaagctccattccgacttagacaagggagagggcactgcgaaatacaccctctcaggagatggcgctggcaccgtttttaccattgatgaaaccacaggggacattcatgcaataaggagcctagatagagaagaaaaacctttctacactcttcgtgctcaggctgtggacatagaaaccagaaagcccctggagcctgaatcagaattcatcatcaaagtgcaggatattaatgataatgagccaaagttttgggatggaccttatgttgctactgtcccagaaatgtctcctgtgggtgagtaggcaaatcaaaattctgtgagatacaatgagacctcttcaacattgactttttgcaggttgatgtaaacatcttatctatcatctaaaagaattatttttcaattctagaaaatacagttcttttcatttatttttgtaacttttttgtttttctttctgcttcattatgaagataactacaggaatatataacattagttcctgttttccaccctgtgaatttacctgaattcatagaatccttgcgtgctttaagcaaaaaatgtattttgtattgaaattgattcttatctcaattccagacacctatacagtgctggagacacctaccctacaccacgaaatgccagacagtaattcctagatcaaagtaaatgatctaaagcatgcatcacatctgatctggaagtggtccagaaacaggtgtgttgcatcttctgtagctgtaaatagagattctggaagggtgatactgtttccttttcagggtaaataacccatacttgttatgccatcaagccaagcagcaaatgaataatgtcatgaaaatattattagaacaaattaacaaattacaattacaattatcaaattaacaattagaatatagtagcaccatcattctaaaaatttaaatttgatataaatatacatttccatatcagcctaaatttacaaagtcctataatatgtaggatataaggtcaataagttaagaattccagccttaaggacaattttaaattataatttttattcctcagtcaccactgctaatccttcaatttatttcaaagtaacttctggtttttattacatttggaagataaagcaacttatcacatgtaggttacaacttaaaattcgtgtatgagccattgcttatattttctaaatctgacatgacccagggggtttctactgctcctaccaccacccaggacatgcgatgaagattgtgcacgctaccgtgagggcagaagcaggttagtagctgtaggagctgtcacatggatttactataatgcacttgaaattgtgtatgtgaccttatcaggcatttaaggaccataatctctccttgacctaagaaatcagcttgaagtaattcacttagatttcaaattttaatgtggatacccaaggctgcaaatctgttattcagtacctgctacacttttggggttgcctcttttatgcactgttagaattgctagaaatttagaagtccaattggaaagaagcatatcttgttagaaagtattcccagaaaatgaggaaggctacattttaactgtgtcttgattttacagggagaaaaataaagttaatattttgaggaaaaaataaggcttttaagatgacatgctatatagtagacaaatagtttaactcggtgcctacttcatgtacactggatgtgttaacatgaatttatgaccctcagtgactttttattaccaaaacagcttccttaaagcaaacacacacacatgcctctacagtattggaaaattccgtctccttagataaaacaattaggatttttcttgggccaactagaataattagggctgcagagttggagcctttatataaggagtttgcagctcatatccgaagagagaaatgtatttcgaaagtcaaaagtgtagttaagtgagaaagcagagtagtttcagcttttgcatttggagtgggtataatttactgtgttgtcataagatactggaaagatctttggaagaataggttcttaaagtgttttctcatgtgcccttactgacatttcccattgggccttcaagacaactccagtaaatacttaaattgattttcagtgcactgctttctttcatttttatttatttattttgagactgggtcttggtctgttgccctggctggagtgcaatggcccaatcttagctcactgaagccttaaattcctgggctgaagagatccctccacctgagcctccttaatagccagtcatgtgccaccctgcctagctattttttttttttttttttttttttttactttttgtagagaagggatctagctatgttgcccaggctgttctcaagtagtcctggcctcaaatgatccctccaccttggcttcccagagcactgggattacagtcatgagccaccctcctggctcctttttttttttatttttaataacagaagggtatttcttttgaatgtgaaattttaccacatggtatgaattagtccaagtgtttttatactaaatttacataatatacacttttcaagtaagtacaaagaggtataaacactgcttatgaattgaatgttaaaaaataaatctctatgcattacttttgtctttccccataatctcacgtatacacataaaacaaaaaacaaggagacccagttatagttgtggtatctgctgtttctgccttgaaatttccagcttacagctaagcaacaactactgtgcatccagaacttacatctatgttcctagagtacttgaaccccattctcaagtgcacccttcttaccaggtggaaatagttcactgctgtaataatctaagaaaacattatgtttctctctactttttttttctctcatataatctaggcaattctccctctgtatcattttcctgagaaaactaaaataatttttaatcaagaccagatggaactttgtatggtatattgacagtataccaattgttgtgacgagcgatcagggaaagg

SEQ ID NO: 7013 - DNA, 964 bp, Homo sapiens
  misc_feature (572)..(962): n is a, c, g, or t
gtggtggctggcacctgtagtcccagctactttggaggtttaggcaggagaatggcgtgaacctggaaggaagaggttgcagagagccaagattgggcccctgcactccagcctgggcatctagagcaagatctccttttcaaaaaaaaaaaaaaaaaaaaaaaagagttgttttctcatgcacgttatagttcattacagttacatagtccgaaggtcttacaacctaatcactggtagcaataaatgcttcaggcccacatgatgctgattagttctcagttttcattcagttcacaatataaccaccattcctgccctccctgccaagggtcataaatggtgactgcctaacaacaaaatttgcagtctcatctcattttcatccagacttctggaactcaaagattaacttttgactaaccctggaatatctcttatctcacttatagcttcaggcatgtatttatatgtattcttgatagcaataccataatcaatgtgtattcctgatagtaatgctacaataaatccaaacatttcaactctgttaaaaaaaaaaaaaaaaaaannnnnnnnnnnnnnnnnnnnnnnnnnnnnnnnnnnnnnnnnnnnnnnnnnnnnnnnnnnnnnnnnnnnnnnnnnnnnnnnnnnnnnnnnnnnnnnnnnnnnnnnnnnnnnnnnnnnnnnnnnnnnnnnnnnnnnnnnnnnnnnnnnnnnnnnnnnnnnnnnnnnnnnnnnnnnnnnnnnnnnnnnnnnnnnnnnnnnnnnnnnnnnnnnnnnnnnnnnnnnnnnnnnnnnnnnnnnnnnnnnnnnnnnnnnnnnnnnnnnnnnnnnnnnnnnnnnnnnnnnnnnnnnnnnnnnnnnnnnnnnnnnnnnnnnnnnnnnnnnnnnnnnnnnnnnnnnnnnnnnnnnnnnnnnnnnnnnnnnnnnnnnnnnnnnnnnnnnnnnnnnnnnnnnnncg

SEQ ID NO: 7014 - DNA, 3413 bp, Homo sapiens
  misc_feature (3187)..(3202): n is a, c, g, or t
agcggggcagaagaggaagatttctgaagagtgcagctgcctgaaccgagccctgccgaacagctgagaattgcactgcaaccatgagtgagaacaataagaattccttggagagcagcctacggcaactaaaatgccatttcacctggaacttgatggagggagaaaactccttggatgattttgaagacaaagtattttaccggactgagtttcagaatcgtgaattcaaagccacaatgtgcaacctactggcctatctaaagcacctcaaagggcaaaacgaggcagccctggaatgcttacgtaaagctgaagagttaatccagcaagagcatgctgaccaggcagaaatcagaagtctggtcacctggggaaactatgcctgggtctactatcacatgggccgactctcagacgttcagatttatgtagacaaggtgaaacatgtctgtgagaagttttccagtccctatagaattgagagtccagagcttgactgtgaggaagggtggacacggttaaagtgtggaggaaaccaaaatgaaagagcgaaggtgtgctttgagaaggctctggaaaagaagccaaagaacccagaattcacctctggactggcaatagcaagctaccgtctggacaactggccaccatctcagaacgccattgaccctctgaggcaagccattcggctgaatcctgacaaccagtaccttaaagtcctcctggctctgaagcttcataagatgcgtgaagaaggtgaagaggaaggtgaaggagagaagttagttgaagaagccttggagaaagccccaggtgtaacagatgtacttcgcagtgcagccaagttttatcgaagaaaagatgagccagacaaagcgattgaactgcttaaaaaggctttagaatacataccaaacaatgcctacctgcattgccaaattgggtgctgctatagggcaaaagtcttccaagtaatgaatctaagagagaatggaatgtatgggaaaagaaagttactggaactaataggacacgctgtggctcatctgaagaaagctgatgaggccaatgataatctcttccgtgtctgttccattcttgccagcctccatgctctagcagatcagtatgaagaagcagagtattacttccaaaaggaattcagtaaagagcttactcctgtagcgaaacaactgctccatctgcggtatggcaactttcagctgtaccaaatgaagtgtgaagacaaggccatccaccactttatagagggtgtaaaaataaaccagaaatcaagggagaaagaaaagatgaaagacaaactgcaaaaaattgccaaaatgcgactttctaaaaatggagcagattctgaggctttgcatgtcttggcattccttcaggagctgaatgaaaaaatgcaacaagcagatgaagactctgagaggggtttggagtctggaagcctcatcccttcagcatcaagctggaatggggaatggagaatagagatgtggtgcccactaggctactgctgatagggagctgaaattcctccaccaagttggtattcaaaaatggaatgactggtagggaaaaagattggactagaaacactggccataccactggacagggttatgttaacacctgaattgctgggtcttgagagagcccaaggagttctgggagagggaccagattggggggtaggtccacgggcttggtgatagaattatttctcgattgacttcttgagtgcaatttgaactgtaacatttgcttagtcacctttagtggagtaatccactgggcttgtttctatatttatataaagcagccaaatccttcatgtaatattgaagtccatttttgcaatgttgttccatacttggagtcattttgcatcccatagaggttagtcctgcatagccagtaatgtgctaagttcatccaaaagctgggggaccaaagtctaaatagggctcagtatcccccatcgcttatctctgcctccttcctcctccttcccagtctatcatcaaccttgagtattctacacaatgtgaattcaagtgcctgattaattgaggtggcaacatagtttgagacgagggcagagaacaggaagatacatagctagaagcgacgggtacaaaaagcaatgtgtacaagaagactttcagcaagtatacagagagttcacctctactctgccctcctcatagtcataatgtagcaagtaaagaatgagaatggattctgtacaatacactagaaaccaacataatgtatttctttaaaacctgtgtgaaaaaataaatgttccaccagtagggataggggaaaagtaaccaaaagagagaaagagaaaggaatgctggtttatctttgtagattgtaatcgaatggagaaatttgcagtattttagccactattaggaattttttttttttgtaaaatgaagactgaactctgttcaaatgctttcatgaacctggtttgagacggtaggaaagcaacaaaacgtgggaacctggtgactaagggcctggtgcaaggacttgggaaatgtcattaataatagatggtggggttttcccccctttagaaatgttggatattaagtgatataaacacttcttttaactccgaaaatcttctgagaaatcacaaaattcacggtatgcttggaacgattgagattttctaggtagatgctgaatagcctagacatcaaagttggtgtgaaccaaaatagagtcagctgacccagcatcagccacactctgggttggaaaatgtttgcctgttggaattaatttaagcttaagtatatatcaacattattttattgtgcaattaaaacaatacaaattcatggttttttaaagttaaaaattctaaccactgtaacaacagtttttgtgttattttctgtattaaacatcttgttgcacgcatttgaggtcatcagggtgcaaaatttgtattcctgaaaatgtcatatattttcattaataaataacctaaatatgataaaacataaaaaaaaaaaaaaattcatctggaattttgctgtactttaaatctttcagactcagctactgataaatgaaacgttacacaggtgtgaaccaaatccaaataacctcgactggtctactatcataatcacctaaacannnnnnnnnnnnnnnntcagctttaagagtccagggcttcggataacagctgccatctgccacctgctaccattgacctacgtgaacacagacattctgtctccaccttgatggtgggtgggctgctccccttttctttgttaaattttgtgctttcatcacattttctctattctgacctctgttatgagaaataaaagtcactgattccattttaaaaaaaaaaa

SEQ ID NO: 7015 - DNA, 2372 bp, Homo sapiens
  misc_feature (97)..(97): n is a, c, g, or t
gctctattaatatgttaccttatttttgattcctggcttggtcaagaacaacctgatttttttttttttaatcttgcagaaaagttgattgcaaagngtggtagaaaaagaaataatggtagcagtagagaatttataaataagagtttatctttatgaatgagttaattgttctacaattttgatcagtggtatttaagcctgtatatgctaagtgtatttatgcccctttgagccaaaatttttttttttttttcagaatccataagagtttatttgttggcttcacttgggtttagatgcaaattttactgcatcacaccctgatcagctgggtatttgcttagtgtattcatcaaatcttcagtgccagtttccttgagaagcagctttcatgcttattccttaaaaacaacagaagagtgtttatcctgagattggtattgcactattttattttattctgcaaatctgtatcctgaagtgtacatttcaacccatattcttctctgttcactgaaattaagttgaatttgaatggctgaaagacaaaatatatgttaatacaatctcttacctagagcattcaaagcctggctgtctctgtttgcacatgtaacagatgcagaactgtgtttgtaattctaagaaaatgtatgtcagaaagtattttatcagatgtttaaaaatctctgcctgttgattcataagggatatagacagtactttaacttgtgtttccagataaggcagattttggtcatctttctgtgaaagtatctctaactgaatccacttcttaaacaaactactctattttaaataaggaaagaatggagaatctagacattttacaggtgtatctgagcaaaatatatatttgggttagtttttatcacattatcacgtttgtctttatattttatcttcatcctaaattttctccctatcaaaacagcaggaaatttttaaacttttatattgtacactatttttgcataaaataagagctgtagctaccaaatactatttactacttagtaaaggtggcttctgtgtattaaactacgaattacaaatatcacttcactaaccactataattatttttggctttttcagccactggaactttttttggggggatttaaatacaggaaaactgtttaagcaaaaaatgcactgctttcatgtaaaatgatataatcttctttaacaaatattttcttcattgataactgacagatatctcatagcattaacataaaataccagaaacaaactttatctccctattcttacatttagtgcaaattggaatgcgtatgtgaatgttagaagatggacttaatctctgacaactttattaatttctctagctacagcaatgctatttaaaagccagttaggtatgaatagtacagtaatagtttgggttctcccttgataaatgaataaaaggctcaattctgataagtgatcaaatttcttgaaattctttcaaatcagctgaaaatttggttggggtgaattgatggtttttgagaagtaggccaggtatcctcacaaagaagttttagaatagggtttcttttaagtttttaaatatcatcctttgtctttccatatggttttcataaccaaatacatgactatagcatggttatttttctagtactgccatttgtgatatagccacatcttggcgtgcaagctagacatctcaggtaaatttgtttttttttttttagccctagaggtaacattataactaaaatgcattcctgcaattctgtttgcagtgcttcactaaacattgaaataaagttgtaaatttttttcttcagtaatccattttatagttaatcataccaaatttaagttgatgacctaaagtccaggtagtgttgaagatagtatgtatctagaatactggtaatgagaaattgttgtaattgaagaaaacaagatgctgccctatattaagatagaatataattaactccatgagaatgggtactcaggaactagttaaagagcaaacccatttctcccgcttcactctgtttcagatatttttattggaaaatgttagggtagaggcctgagaaagttagacaatgctattgactgatactggctctggggtcttccggtgatttttagtttgggtttttacaggcaagccctactgcttggcaatttaagattattcattctgaaaatggcatcctggtaatttcccggacccccaggggccctttatttgtcccatttattcttttaaaagaaatcctttcatttggggagggatggaaacaccctggaaccttttttgccattaggggggcctctcctttaacccttccaggc

SEQ ID NO: 7016 - DNA, 1916 bp, Homo sapiens
tcctacgtgaggaaaagcctgttgataatttcaggcaggcagtcagcaagcctagtagacttttgttttctgttgtcctcctagtggatagaaaagcctagtacccccatttcttcatatgctgtctttcatgcccatttctgttggaaggtatcggttcttaccaaaccctttgtctactaaggacctccctattgcagacgtcttcttattcttacaggttcatggcggctactatagcaggccttagttcactcccacttccatttgattattgtgtggaggtgtgtgtgcaggcgtgtgagagagaaaactggaaatatacattagagtgaaagtcgttgtcttttgtgagaagcgtccgcgccgcgaggaggaggccctgctggtttctgtgcgggctcttgtcaggatggtgaagctgttcatcggaaacctgccccgggaggctacagagcaggagattcgctcactcttcgagcagtatgggaaggtgctggaatgtgacatcattaagaattacggctttgtgcacatagaagacaagacggcagctgaggatgccatacgcaacctgcaccattacaagcttcatggggtgaacatcaacgtggaagccagcaagaataagagcaaaacctcaacaaagttgcatgtgggcaacatcagtcccacctgcaccaataaggagcttcgagccaagtttgaggagtatggtccggtcatcgaatgtgacatcgtgaaagattatgccttcgtacacatggagcgggcagaggatgcagtggaggccatcaggggccttgataacacagagtttcaaggtgaaccaccctctttgggtagagggctgaacacaaggctgtgtgcagaaaatggttggataagtaaaaggagaggtttggtaaagataacagctcgttggctggctggtgatgaagaaataagtgtgggtgatggacttcttatgatgtagaatgcatgggacttaggggctttaccttaggcaaatgtctcctggagaaaagccactcaccttttatttggagcccctacggcttttgtgcttatcagtgcagaaacccttttctttgaaggctttctgagttactgggccttttttattttttatttttttgtagtagagcacagttcagagttcctcactctgaatttattgccctcagcacaggatcagaattctgcattttacgtgaagaacctctcaaaaacatgtcaagcgacacttataggaccagaatccttgttaagctgtcctaccttacacaaactctttaaagggttacagctcttgttgcttttatattatacctgtaccaagggattgtattttgagtttaaggccactctagaattacaaggctgattttaggacttcctggggaggaggcactggggttttaggggcggtaatgactgtcttttcattggtttggggggctggactttataagattttggtgaatagagcacttagatttgtgttatcttggagtcttaaccaaatgaatcttttgtgcctggagggcagcatgggtgatatgtggattgtcacttcatttggaagcatctcaaatccccagcattttgaatgcctacatgttgctcaaaggaaatgcttgttagagcattttggattttgaattttcagatttgggatgctaaaatggtacgtagaacgcaaatattccaaaatctgaggtctgaagcaacagtggcagttcaggggtggtgatcatggtgagttgctatctgaactcttctttcacctcctttgggttcccagtgtcaaaaagagtggtgtccttttttagcttaattaagcaggactgaacaaaaataataaaaaataaaaaaagccttattcaaattaaaaaaaaaaaaaaaaaaaaaaa

SEQ ID NO: 7017 - DNA, 2467 bp, Homo sapiens
  misc_feature (529)..(550): n is a, c, g, or t
  misc_feature (2028)..(2050): n is a, c, g, or t
ggcacgaggggcggaagtcggccaccttcctccgtcccggccgttagcccagccaagcccagccaagcccagccaagccccgccgatcgcgggcaccggagccagccccgcagcgggagcctaacccagaggaagtggagactcctttactgcacatctgtctgctccaggccaggcactgttctaggagccaggatacagaggtggagacagaaacaaacaaaccgataactgtatacaatactctaacgtcagagggaccacagagcaccagcctgcatggaacttccttcctcactcagcttcccacgttgccagctgggacaggggagatggagtaattttgctgtggaaagacttcacgtcttgccgaatgaaagtcccgcctgtctgtcacgctgatgcccgtgcagctgtctgagcacccggaatggaatgagtctatgcactccctccggatcagtgtggggggccttcctgtgctggcgtccatgaccaaggccgcggacccccgcttccgcccccgctnnnnnnnnnnnnnnnnnnnnnntttgtgggtgctgccatcctctggctgctctgctcccaccgcccggcccccggcaggccccccacccacaatgcacacaactggaggctcggccaggcgcccgccaactggtacaatgacacctaccccctgtctcccccacaaaggacaccggctgggattcggtatcgaatcgcagttatcgcagacctggacacagagtcaagggcccaagaggaaaacacctggttcagttacctgaaaaagggctacctgaccctgtcagacagtggggacaaggtggccgtggaatgggacaaagaccatggggtcctggagtcccacctggcggagaaggggagaggcatggagctatccgacctgattgttttcaatgggaaactctatctcgcgtggtatgaccggacgggggtcgtctaccagatcgaaggcagcaaagccgtgccctgggtgattctgtccgacggcgacggcaccgtggagaaaggcttcaaggccgaatggctggcagtgaaggacgagcgtctgtacgtgggcggcctgggcaaggagtggacgaccactacgggtgatgtggtgaacgagaaccccgagtgggtgaaggtggtgggctacaagggcagcgtggaccacgagaactgggtgtccaactacaacgccctgcgggctgctgccggcatccagccgccaggctacctcatccatgagtctgcctgctggagtgacacgctgcagcgctggttcttcctgccgcgccgcgccagccaggagcgctacagcgagaaggacgacgagcgcaagggcgccaacctgctgctgagcgcctcccctgacttcggcgacatcgctgtgagccacgtcggggcggtggtccccactcacggcttctcgtccttcaagttcatccccaacaccgacgaccagatcattgtggccctcaaatccgaggaggacagcggcagagtcgcctcctacatcatggccttcacgctggacgggcgcttcctgttgccggagaccaagatcggaagcgtgaaatacgaaggcatcgagttcatttaactcaaaacggaaacactgagcaaggccatcaggactcagcttttataaaaacaagaggagtgcaaaaaaaaaaaaaaaaaaaaattttggaactgtgcctgggttggaggtctggacagggagcccagtcccgggccccatagtggtgccgggcactggacccccgggacccacggaggccgcggtctgaactgctttccatgctgccatctggtgggtgatttcggtccacttcagggcattgactcaagggcctggcttaactgggctgggtacgttttttccatccgacctcgtttgattttcatttccatatgttcattatgtttagtgaactatccctagagcctcctaccatatggccaggccccaatgccttccccccgcaaacccaatggagcatgaagggggacctnnnnnnnnnnnnnnnnnnnnnnncaaagtccatacccctgtttccttccgtactcctgtggtcctgggaggaatctaggctccaccccctggcagaattccttgggaaaaaaaaaaaatgcctgtaaggtgggcaagagaaattggccattgggcacagaaatggacgggcaaggccccctgtgggggaaacacatcttggcccgagaaagcttgaaacagggcgcaggggcgccccaaggtaccattttggtattccggttcattccgggccccaccacaataaaaaaaccctttctttcccccatctatcactgggcccatttggcccacaagctcttttcccccccttctatcgaacaaagaaaatttcccttggccgccctagtccccaccaatatcttttttgaaaaggtcgttaagttagtattttcacgaccc

SEQ ID NO: 7018 - DNA, 435 bp, Homo sapiens
tttaactaaagatcaggtaactctttccaaaaagaaactcagtctaagggggtagaactgttctgattgaacaagtagctgtgtcaatcatttcaaccctagactcctggcgccgagaatttgggggcggcgcaacccgggggcggggcaagcggaggcagggctcccagtgcgtggcttttctgtctccgccccctgaattttgcattctgcgtttccagggcccctcatgcacttaatccacacccacttgtgatctggtttaagagattggggagggcggggtggggggattgcggagggaggaattgcggggcgggggtggaagtggtggtggtgccaggaatctgcataggcgaggaagttgaaagctctgaatctcacatccccttttgcctcccagccctatgtccacctttcatcctaggtaaaatc

SEQ ID NO: 7019 - DNA, 1426 bp, Homo sapiens
atggttgcctcacgagtgcgcccgccggagggtgtttatcgcggctagagatgtcgctgctgcggtcgctgcgcgtgtttctggtcgcgcggaccgggagctacccggctgggtctcttctgcgtcagtcgccccagccaaggcacacattttatgctgggccccgtctgtctgcctcggcctccagcaaggagctcctcatgaagctgcggcggaaaacaggctactcctttgtaaattgcaagaaagctctggagacttgtggcggggacctcaaacaggcagagatctggctccacaaggaggcccagaaggagggctggagcaaagctgccaagctccaagggaggaagaccaaagaaggcctgattgggctgttgcaggaaggaaacacaactgtattagtagaggtaaactgtgagacagattttgtttctagaaatttaaaatttcaactgttggtccagcaagtagcccttggaaccatgatgcattgtcagaccctaaaggatcaaccctctgcatacagtaaaggtttcttgaattcctctgagctttctggacttccagctgggcctgacagagaaggctcactcaaggatcagttggctttagcaattggaaaactgggagaaaacatgattcttaaacgagctgcatgggtgaaggtgccatctgggttctacgttggctcttatgtccacggagcaatgcagagtccctcacttcacaagctggtgctggggaagtatggggccctggtcatctgtgagacgtctgaacagaaaacaaaccttgaagacgttggccgccgccttgggcagcatgtggtgggcatggcccccctctctgttggctccctggacgatgagcctgggggagaggcagagactaagatgctgtcccagccgtatttgctggatccctccattaccttggggcagtatgtgcagcctcagggggtgtcggtagtagactttgtgcggtttgaatgtggagaaggtgaagaggcagcagaaactgaataggttccagagacttttggcccaggaggaatatttacttttagctctggacatcattacaaaaaggaatatttcccaaacctcttcagaccgagaatgcatgggtaaaattattaaatagttgtataataaaaataattttttccttgtttgcgtaaaaaaaaaaaaaaaaaaaaaaaaaaattggtgtgcggccggttcggggctcagagaagcttgcccaaacccatctgtggggggcgggcccatgcgtcaggtggacctcggtcaagggctgcccaagaaacccgggtctgcctacgtggtggtttctcacaattaaaaaacgccgggaaccggcggtctaacaatcatgggtcggagcttcggtttcccgggccagcggctagtatccccagtgg

SEQ ID NO: 7020 - DNA, 477 bp, Homo sapiens
  misc_feature (281)..(295): n is a, c, g, or t
atgcttcattcgcctcacaaacaaccacagaaccacaagtgcggtgcaaactttctccaggaggacagcaagaagtctctggtttttaaatggttaatctccgcaggtcactaccagccaccgagaccaacagagtcagtgagtgctctctaaccacagtctatgcagtaatatttaaggctgcaagcagtatttacaacagagggtacaagttctatctgaaaaaaaaaggagggactatggcatcaaacagcctcttcagcacagtgacaccatgtcannnnnnnnnnnnnnngggtgaggaactgaagtccagaggggtttcttgaactgcccaaggacacactactatttagtgatacaagctgggactaaaactgaggtcccccgacacctggtccagagttctttctactatacatcaaagaatatacaaataaaagtttatcataactaacccaaaaaaaaaaaaaaaaa

SEQ ID NO: 7021 - DNA, 2786 bp, Homo sapiens
aggggctgttacggagcggcacgagggagcagcgcggtgggtgcggctgtgagacggcaggagacttctgccccgcggtgcacgcgaccctcgagacgacagcgcggctactgccagcagcgaaggcgcctcccgcggagcgccccgacggcgcccgctcgcccatgccgagctgagcgcggcagcggcggcgggatgctggcgctgctggccgccagcgtggcgctcgccgtggccgctggggcccaggacagcccggcgcccggtagccgcttcgtgtgcacggcactgcccccagaggcggtgcacgccggctgcccgctgcccgcgatgcccatgcagggcggcgcgcagagtcccgaggaggagctgagggccgcggtgctgcagctgcgcgagaccgtcgtgcagcagaaggagacgctgggcgcgcagcgcgaggccatccgcgagctcacgggcaagctagcgcgctgcgaggggctggcgggcggcaaggcgcgcggcgcgggggccacgggcaaggacactatgggcgacctgccgcgggaccccggccacgtcgtggagcagctcagccgctcgctgcagaccctcaaggaccgcctggagagcctcgagcaccagctcagagcaaacgtgtccaatgctgggctgcccggcgacttccgcgaggtgctccagcagcggctgggggagctggagaggcagcttctgcgcaaggtggcagagctggaggacgagaagtccctgctgcacaatgagacctcggctcaccggcagaagaccgagagcaccctgaacgcgctgctgcagagggtcaccgagctggagcgaggcaatagcgcctttaagtcaccagatgcgttcaaggtgtccctcccactccgcacaaactacctatacggcaagatcaagaagacgctgcctgagctgtacgccttcaccatctgcctgtggctgcggtccagcgcctcaccaggcattggcacccccttctcctatgcggtgccagggcaggccaacgagatcgtgctgatcgagtggggcaacaaccccatcgagctgctcatcaacgacaaggttgcgcagctgcccctgtttgtcagtgacggcaagtggcaccacatctgtgtcacctggacgacacgggatggcatgtgggaggcattccaggacggagagaagctgggcactggggagaacctggccccctggcaccccatcaagcccgggggcgtgctgatccttggacaagagcaggacaccgtggggggtaggtttgatgccactcaggcatttgtcggggagctcagccagttcaacatatgggaccgcgtccttcgcgcacaagaaattgtcaacatcgccaactgctccacaaacatgccgggcaacatcatcccgtgggtggacaataacgtcgatgtgttcggaggggcctccaagtggcccgtggagacgtgtgaggagcgtctccttgacttgtagccgccttctcctctgtccaggaggccgggatcaggctgttgccatggaagttcagggccatagactgccccacttaaactcttgtcagtctgggctcagggttcccagagctcattccccaggaatctctaagaccagggctggggcagtgtctgtcactggcttgtttgttccctaccaatattctgttgctgtttgaagtagtgccagggtcccctgggaagatgcccccaagacacctgccccaagtgggtggatatctgccttcctgctgcaagtggaggcaggtccagcagcccctcttcagagcccctgtaaatgctatcgcagcctgagtcctgccgccttccagttccttggtgtcccgtgcaccccttctgtctgtcccctttcatggctgtgcagccgtcccgctggagtggccatgtcccttgtgcattgagtgcatccccgctggtgactaagctcgcagcaagcggctaccccccgatctgcaaaagggcctctccctttgtgttctatacattgtgaatcttcccgtctgaagaacgcccagcctgcccagacaaagccccgccttccccaaagcagaggggctgtctgtgtctccagaaaggggacatcgggggggaggggggctcagaaaggagaagggctgtgatctccggtcccttcccccatcatccttccttagactgatgctttgactgaatcatcactagctatggcattaaaaggcctctcttctcatctggtgccaaaggttccgttgcagctttttacaaccatccggtgtggtttggaggatttgttttttttttttcccaacagaaaagaacagccattagaagaaggctcccattttctgatgttccgccccactgtgaagagtgtgctcgttttaaattcatgttgattcttgtaagcactggactgtcttcatcaagtatttccctacagaactcctcaagaaaacagagatcatttggctagagattgtctgagtgactccaagctactcactgtattggacgggagtagtaatttattttaaagataaagtgactaagtggggaaatttataaagctaaatattatatattttatttttcatacatgtttgaagtgcaaatctgtggatattccatttgtaggaccaagtcgacatgcccatcctgacattgtatgctacgagaactcttctgatgatggaatttcgattaaagtgcactgaaagatgaaaaaaaaaaaaaaaaaaaaaaaaaaaaaaaaaaaaaaaaaaaaacacaaacagg

SEQ ID NO: 7022 - DNA, 1034 bp, Homo sapiens
gatccattagcgtataattgaatatcaaagggaattttaccttaaacatatatcaagtctatactcagctaatcgttttgtctaaacacagccttgttagcatttgaatttacaaatattcatttgcttatttgcagtgttccttttgcttttagaataaatcataaataatatttccccaatactgtcaagatacttcttcaactttgtccctgaaccatcagctttctttagggtccgggtatcctttacacttcaatggggttttcttgtgtgtgtcattgggggtaactccattgacctcagcatttctatctcaagagatggctctggaacacagaaccagaggcaacaggtactaatggttgataaaattaacagcgactgcacaaccattttccacatggcagggctgtgcttaagccccacacctccaataatcaatttctatgacggtactaataaccttaactatatgcaaattcttcaccacttatgatatggtacaaactggagtttacagatggccttggccttgcctagcccatttgttcatcctaacttcttcatcacttcctgatgcacttggggaagcatgttgacacaacgttaccaatatttgattacctatggttatctgcaattacctacgcttatcttatcagaccctagatgccatttgagccccttacttctttgggcagtgggtgaaatgggagaacatagagaaatgttcactttgacctaagaaacgcataaaagggaatgccatgcacaatgtaagataaaatgtttggggacaggggatcatcgtgaaatttatttctgctattctgccctattgaggtcattaattataatggatttaaagatttttttttaaactctacaaacactaagccaaggaattcaggttatctgctatgttaacctaataaagcaaaggaaaatatgttgctttaatccttgcttgttaacctaataaagcaaaggaaaatatgttgctttaaaaaaaaaaaaaaaaaaaaaaaaaa

SEQ ID NO: 7023 - DNA, 2212 bp, Homo sapiens; identical to SEQ ID NO: 4608

SEQ ID NO: 7024 - DNA, 753 bp, Homo sapiens
  misc_feature (262)..(277): n is a, c, g, or t
  misc_feature (737)..(737): n is a, c, g, or t
ttttttttttttttttttaatttataaagaaaggaagtttattttggctcacagttatggaggctgagaagtccaggagcatggtgccagcatttgtatgaggctaacttaatactactttatttattttttttgtgggggtgggggtggagggggacagcatctcaggattaatactatacaagttcaccacaacaatccatttgtatgaccagttagctggccacagatgcctgatctctagggttttctagatttcttnnnnnnnnnnnnnnnncaatcttgggattttcaggcatcaagatcccagatctcaagatttttttaacagtaacaagttgatagtttatctcctatgactgtaaataccctgagcatttagccaagtgtcatctttgaaaaactgcctgaggaatggaggggtagctttccatcaccctcaaaaggctctttgtgatcagttccccaaggtaccagaagaggaggaagagaaagcaaagcaataagggagctggccctcctggaaccatcatccaggtgggccatcttcctagagtagattttgtttaggaagaagctagcaaagagtgctctttgagaaatcactggattatgtagtttgtactgaatttgaaatcttattttgtttaacaaaaccttttagaataaaagaaagtattgtacagtggaaacagcacacgctctggaggcaggagactgtgtgggcttttcctcangctctgtgaccttgag

SEQ ID NO: 7025 - DNA, 2975 bp, Homo sapiens
  misc_feature (591)..(619): n is a, c, g, or t
atgctggcccgggttcttttaagacgggttctggacacaagcgacggcagcttccgcgacccccatcagccccgcctcactctggacaccgggctgtgagctctgggacgcgcccaacttggaaagcgtcttgcttgcccagcgcgcgctacttctcggacgagcacccggcggcggggcacatgctgcccccgcccctgcgcgcctgcggctcccggctctccctcccctgcgccgcgctctcgcctcgctttccgcgggagccttccaaccggttctcggctagggagaaggacgggagcggtgggaagagcgagggtgtagagagggaagttagggctttcgctttctccccccactccagcggcggcgttcggtcctctgggtggaatgtgctcgcagcagcagtgacggcggccacagcacgggaggcacccgagccatacaccctgcagctggagagaaaaggatggccgaggtgggagagactagagtgaaccagcaggaggaagtcccagggccgcgaagctacgacggagatccgtcctggaaaagccttctccaccctgggcactttaagcggcggtggcnnnnnnnnnnnnnnnnnnnnnnnnnnnnnagcgagactccctcattccagtcttgctctgccctccggagatgacaagtgagaaagaagtgtccggccgggccatccccttcagttaccaagaataactgtaaaatgtgctgggaatgcaatgtcctgagataaggaagaactgcctgaaacagcctggatcttattcctgtacttcctagggaatgtaacatctcaagttaaagaggaactgcccggaacagcccggggattgttcctctctcctgagaaggaagattacctccaaagctcatccactgagtcacactgcccctgtggtggagggcgggctgcctttccaggttcctcagctgtggtgtaactgaagcaggcacaatcaagactccatctgctcgaggcagctttctcgaaccttggggaacctactcacaatggatcacaggcttcttttgttttgtttcttgctgcctatctgtaagtaattaacttgcttcatgtaacatgttgcatatgagtgtgttctgtctcatagactcagggaattggtaacactgcagctgaggacgcagtggacagaagtgttcagactcctgttccttgtggttgacacagtgatgatgatctcttctgtcctccacagagtggaagtcctctcttgggattggttattggtgaaaccacttcgcaatttattaagatggcaaaagcttacggagggacagatttgaggggaagatcaagatttttctgtcagtattgcaaatagtcaagaatatgtggtccaagaagtgatcattatctttggcattgtgcaagtcattagtgaccttcacatgaacagtctcagtggagtgttggaggaaaaagcctaactgaagaaggttcaagagtgaatggaaaaagagcagtagtatgtggagagtacagacaagtatttccaggagcctttctgtaaagagtggtagagaatgggacatcatttttggatgggggaagagttatttatagcatgttcatatgctaatggaagtgatctactcatggggaaaatcttgatgatgcaagaaagaaagggatttgttggaatcttgtcctataacgggtgagaggggatgggttctagaagaaaaggcatgggtctttgtttgagatcaggcaattcatctgtaggaaccagtaggaagatggttaagtgggtacctgtggtagtggatgtttgtgaacattcttttcttttccattgtttctattttctcaataaagtgggaagcaaaaatcagctgagtgaagatgaggaagaaggtgttaaaggtttgaagaaaaaaggaaaaggatatactaatccaagaggacaagtaagtagaacatagataatgaaaatgctggcccttaggactgttgggcctaaatgctcatattatattggtagtcacaaatttgaactttctctagagccaatttttgcatgtgtgtgcaggcctggagtagttggagagttggatttaatagaattgagggtcaagcaactacaaccagggaagagtgggacaagggagataaaggatattggcaggggagcaattataaacatggaccatgatcaaaactggacaggaaggaaaatagagataagaggggtggaaggttaaaaatagtgaaaatgagatagaatgaataggttgtaggtccctgtaaagttgaagaagtattattatgcagtactcgttattgaaatgaggtcactatgcttaaggcacagtgaatcctagaaaatagtggttttgtttctcattaggcaatacattcctccttgctccagaatgcaacatacatgtatccttttctgtactattttttattaagaattcatacttaattccactgactgccactcaattttaatgtacagtagggaattcctgtactatgtattatgaatccattcctttgaatttcatttataatacttcatgactgacacctggctttccaccaagactcaattttcatagcaagcctcatcatcataagcccccaaattaacaggatgaggaggaagaattggcaggctaaagaagatgattatatcaattaatgcagaaaaagcatttgataaaatccaatattcatttgtaattaaaaactctcagcaagttagggataggaattacttcaacttaatgaagagtgtctttaaaaaccttattttcatcagttataacaaatgtaccactctggtggtgaatgttgctaaggagggaagctatacatgtgtggggaaaggagatgtgtgagcaatttctgtaccttctactcaatcttctgtgagactaaaattgctgtaaaaaataaagttcatttttttaaaaacaaa

SEQ ID NO: 7026 - DNA, 1372 bp, Homo sapiens
  misc_feature (46)..(107): n is a, c, g, or t
aaaagcaagttcctcctgtgactgcaacgtcttactgattgggacnnnnnnnnnnnnnnnnnnnnnnnnnnnnnnnnnnnnnnnnnnnnnnnnnnnnnnnnnnnnnncgccctggggaatgaaagggtcacttttgcatcatcactagctagatttccagtgtttgagaggccttcaaatgtttgccaattttttcaataaagtggtttttgaagccttgattctttggtgaacttgtggctttttaagcgttcttcttcttggaatcgagaggtatcattgtcttcctccaaggagttagaatttcccagtttaaaacaaaaagggaaatgtcctaggttttctttgtgcttctcatttttcctttgttgattcaattcctgtgatttttgttctcttccctgaagtgctttacagtgcatggaatctccatcattgttattttaacgatagtaattcacagtcctcagaagcctatttttaaagcagaagcaaaaaagaaaaacaaaataacaaaaacaacccttcctcttttctctcatctcacctctctgtgttgattactaatcatcttagatattattgctagtggatgtatggtagatgggttgaagcttttctgataattattacacaatttaaaacaacatatatatttaaaataaatatatacagtaaatatattgagccatgttaacctgccaatgagatctgtgaaaaaataatggcctcatttttctctttttaatttcttttacccttttgtgaagcagctatacgtggcatacatgtatttaaagaaaaaaaaatagatgtagagtgttttttttacacttttaacttagcatgtggtgttgaagtattactgtagatcaagtttgtcttccgcactaagatgtgaggaaattgtgatttgttctctccaccacaaatgaattacacatttattatcttctatcattttgaaacactgcagtttaccatgggacactgtatatatttcttgccataatggtaaaggactgattgatatatttaagagttaataaatttgtgatttctgctgaaaaaaaaaaaaaaaaaaaaaatagttttgaacttgatctttgtgacttgtgcttttttagcttctctcttgaatcagagtatcattgtcttcctccaaggagttagaatttcccagtttaaaacaaaaagggaaatgtcctaggttttctttgtgcttctcatttttcctttgttgattcaattcctgtgatttttgttctcttccctgaagtgctttacagtgcatggaatctccatcattgttattttaacgatagtaattcacagtcctcagaagcctatttttaaagcagaagcaaaaaag

SEQ ID NO: 7027 - DNA, 1855 bp, Homo sapiens
  misc_feature (1199)..(1199): n is a, c, g, or t
  misc_feature (1346)..(1346): n is a, c, g, or t
  misc_feature (1412)..(1412): n is a, c, g, or t
  misc_feature (1467)..(1467): n is a, c, g, or t
  misc_feature (1799)..(1799): n is a, c, g, or t
ttcgtgcccggtggaaagtggttaagtcaaaaacccccattgttcccggatttaaaggccctcggcgccaaagctggaacccgaagaagataaaacggaaaaagccgcgaggatgtgattctcctccatacggaactttctcatatacgtggccctcctgcgagtcactccatttatcttaaagaaattggacagcatatgaagacaggacatcacatatgaatgcacgatatgaagagcctggttacagtttcgactcctctctgcaagtgaataggcccagaaaggtgtaagagactctttgaatggacataaaattctgcttgttaagaacaagtttggctctggtaactgaccttcaaagctaaaatataaaactatttgggaagtatgaaacgatgtctcgtgatctggtgtacccttatccctgtgacgtttggcctctgacaatactggtataattgtaaataatgtcaaactccgttttctagcaagtattaagggagctgtgtctgaaatggcactgtcttgtcagtcatttctgtttacctttttcttctgcccagagtgtatttgtgaagagtctcttatattatgttttgtggaaatcagcacacaaccacaatgacatttaagcacaggatcattattagtctatgtttttaataaacatatcaattaagaaaaaaaaaaaaaaaaaaaaaaaaaacaaaaaaaaaaaaaaagaaagaaaaaaaaaacaaacaaacccaataccaaaaaaacaaaccacaagaccaaacaaaaataaaccaacagagggggggggcgcttcaaaaagaccccccgggggggcccaatttacgccaccccccccttttttttaaaacaaggggccccccataagaagggaccataaaaataaaaatagggccctcgccccccctttcttttaacccccccctcgccgtggggaaaaaaacgtggacaatattgttgggaattctatttgagagaaagagacacccttatcttttttgtgtggggcgggaaacaccctaatctgggggcaatatcacccccccttactaaagagaattatattagaggcctcccccaggcgcggacccaataataacaaatattttttctcccaaggggcttaataatagtggtgttgtaacacaacaacacccactgccacaaccaaaagtgctgtncctagcgggtggctgcaatacacagagaaaaatctttctgcgctctcttcctctcattgcgcgagacgtttagtagtattattttcttcttgcggcggcacacttatttattttattctttcttcctctcctcccggcggcaggggncttcttgatgatgaggggaaacattcccccacaaataattgtgcgctctgcactggtgggatgctnttaatttaagaaagagcaacctctccccgttcaagatccacgcccagaggcaggngacaaaaacttttattctcggggggggcctccccccttcgttcttcagacctcccctccgaagtattcccttccccttctcccctgcgagcaagttaattaaactgtgggaccgaccgcactaatcaaaacgacctttttttttttaaacacacacagcgcggttccccaacctgtagatccccctatgagaaaaaaagagaaccaagttcaccccgatgaatatctactcccccccccacccccagaattaccccgtcgcacgtctaggtacaaaccgtttttcccacccgcaccaaccaacccgaaccctggccgccaaaaaaaacactncctccaccacccttctagtggcagacctcctcaagtaaaaaatcccaccaccacga

SEQ ID NO: 7028 - DNA, 1911 bp, Homo sapiens
tattctccccctggtgtcagacagggctgtgcctgaattactccagacatatggctgtagatggtattctttattttataagaaggagattctgtaacctaccctgctgatcagatagttctttgtatgtcttagagaaattcaagccagcttccttttgttcggcttgtagtggagaaagaacagctggtcaccttccatgtattcaaaaaccacagtgaagtcatccccctggtgtttttatttcagtgataaataattccacccacttaaaccattcttcatggctcttgttttccaggggcctaataattttcactgctgtaatgtttctcagcttcacacttagtttagttgcccaaacaatgttggtgccttactcacattggtgccttgtgaagacgaggctcaggatggggattatggggaaattcttgcacacccagctcctcttaccacttaaaaatataatggcacttttacaaaatgatatgtcacctatattcattgagaattatttgactaccacatttttcccctgatgatagtcatctatcataacttgtgtttgttttcctcctgagatcaaacacttggtgcttattcctgatgtatactctgagaccagctcttaccttctgagtggcagctacccctccctcccaattttagatcctatttttacacatctctatagatatcccctttatttcatgactcacaatattaaatggtacagacttcagtttaaccactggtgtggtaacagcagtagttgctaagtaccaccttcccattgctgtgtgagggctaatttgcaaagacatttgaatctcccagtgaagatgtctggggaattttggccagttgtcttccctcttgcccttttgttctttaaaattcagcttggaccatagacacctccaggatcttgtttatgttctgctctcaattgaccaagcactgcgttttgcgcaatcagaagtctcacaaaagcaaacagttatgactgcatatctgatgtttatatcctataaaatttcaggaagattcagagtcaatcttctatttgtacatgatgtagacaaaattagctgctccaattgttagacaaaaaattgccattggattacactaatgtgctcatctgttgttttaaaagtttggtatcaggcggggcacggtggctcacgcctgtaatcccagcattttgggaggccaaggtgggcggatcacctgaggtccagagttcaagaccagcctgaccaacatggtgaaaccctgtctctactaaaaatacaaaattaatcaggcgtggttgtgtgtgcctgtaatcccagctactcgagaggctgaggcaggagaatcgcttgaatccgggaggcagaggttgcagtgagctgagatcacgccattgcactctagcctgggcaacaagagcgaaactccgtctcaacaacaacaacaaaaagtttggtatgtttctctcaagaaaaaagcatggtgagtccagacagcagcaaaagcttttgtgaaaaccaattgtgttcatctagatagtaagtaactcctatttttactgttaattttttaaaagagaatttttccctgtggaaactccctgttagtacgtcctaggggagaaagcctgtggaatatggtggttattgatggcgttgcctttgtttcatctttgagtttgccctttgtgggatctagtgggataatgagcactgacagaactcttaacagcgtgctgtatttttgacattgaaaatgttaatgacttgatttgtacataactctgtaactaggtgaaagtagatcacagctgacatttacaaaatgtttttgtaccttagaatttctgcattaaataaaatgttttgttttaaaaaaaaaaaaaaaaaa

SEQ ID NO: 7029 - DNA, 604 bp, Homo sapiens
  misc_feature (496)..(496): n is a, c, g, or t
  misc_feature (527)..(527): n is a, c, g, or t
agaacaaggcaagttggtgagagctagatagataactgatagtgcctcttatcttggacaaagacagaggcctggcgaggcttcctccaacatgccctgggtacacaccaaaataaacacccagcaggcataaggtgtagttagcaatgcagttcatttttattagttataaataaagtacaaaaaatccaccaaaagtgaatctaagcatttacacaattcctaatgtctccgccttttcattgatgcactattgctttaatattcataataaatattcttctagctttctgctataaaatagtctatgtagcaaaatgttgcacagcacaacagaacagaacagcaggaggattacaaaaaaggacaatcaacactgagggataatcctttcacttgccaggggcaaccaaaattaccccctcgagggctgggttcagctggctccatggctgagaaattagccgcatccgaggccaggggtggagtgtgtttntttttttttttttttttttttttaataattnaatttttattattattttttttttttttatttatttttttttattatttattttttatttttttttttattttatta

SEQ ID NO: 7030 - DNA, 1274 bp, Homo sapiens
ggtccggaatttccgggatttcagcccagccaggctgcccttcttccctgcggagggagggcctgggcggtcgcgttggcgggagggaggttacctttcccagtctcgctctggccgcctgagccaggaggaagcagcggcgaggtctgcgggaggcatggcgggagctccggacgagcgccggcggggccccgcggcaggggagcagctgcagcagcaacacgtctcttgccaggtcttccccgagcgtctggcccaggggaatccccagcaagggttcttctccagcttcttcacctgcaaccagaagtgccagcttaggctcctgaagacgctggagacaagtaggagccatgacctggaggctgtggttccacagaatggatccatatgtcaaacttctgcttgatgctatgaaacactcaggttgtgctgttaacaaagatagacacttttcttgcgaagactgtaatggaaatgtcagtggaggttttgatgcttcaacatctcagatagttttgtgccagaataatatccataatcaggcccatatgaacagagtggtcacacacgagcttattcatgcatttgatcattgtcgtgcccatgtcgactggttcaccaacatcagacatttggcgtgctcagaggttcgagctgctaaccttagtggagactgctcacttgtcaatgaaatattcaggttacattttggattaaaacaacaccaccagacttgtgtgcgagacagagccactctttctatcctggctgttaggaatatcagcaaagaagtagctaaaaaggctgttgatgaagtttttgaatcttgtttcaatgaccatgaaccttttggaaggatcccacataacaagacttatgcaagatatgctcacagagactttgaaaaccgtgatcggtattattcaaatatatgagcacaatgacatttttatattacagagcttccatcatcatgaagaaaaaaaaatttggttctcaagtgaacaaacatataaaatgtaaacaatccctacaatccagataaaacagagaagactgtgattctagcatattatcagaaaaagtaactatggcaaaaaatgaaactgctttaaactccaaggcagaaattgtatctttatagctaaccatttagtaaataaatacattacatttttgtattttaaaaaacaccgacaccagcgcccaacacatcaccacacacacaagaacaacaaaaaaaacccgcgcacccccacttgaaaacaccg

SEQ ID NO: 7031 - DNA, 721 bp, Homo sapiens
caggtccctccgcagcgggttctcagttgctcgctgggcagacccaggtcgcgctcccactgccgagcccgcgagatgctccccagagctgcctggagcttggtgctgaggaaaggtggaggtggaagacgagggatgcacagctcagaaggcaccacccgtggtggggggaagatgtccccctacaccaactgctatgcccagcgctactaccccatgccagaagagcccttctgcacagaactcaacgctgaggagcaggccctgaaggagaaggagaagggaagctggacccagctgacccacgccgaaaaggtggccttgtaccggctccagttcaatgagacctttgcggagatgaaccgtcgctccaatgagtggaagacagtgatgggttgtgtcttcttcttcattggattcgcagctctggtgatttggtggcagcgggtctacgtatttcctccaaagccgatcaccttgacggacgagcggaaagcccagcagctgcagcgcatgctggacatgaaggtgaatcctgtgcagggcctggcctcccgctgggactatgagaagaagcagtggaagaagtgacttgcatccccagctgtctccctgaggctccgccctggctgggagcctctggcggcccctcccctcccctgcccttaaccccagtaaagctccaaaaaataaaaaaaaaaaaaaaaaaaaaaaatcgcgg

SEQ ID NO: 7032 - DNA, 2086 bp, Homo sapiens
ggcacgaggctcacctcccggaggctctgctggtgcaggccccgcattggagggctcgattggctgcccggctggcactgacgtccccttggagctgggtggcagaggagataaacagccatgtgcaactctccacactatatttaacagctgcggcggagaaggcagggaggcagccacggtggcggctctgggggcagctcttgtcttcggggagaaggcccttggagccgggctggcatcggccttctcggggtgagcgaggtcaccatgccagcttcccagagccgggcccgtgcccgggaccgcaacaacgtcctcaaccgggctgagttcctgtccctgaaccagccccccaaggggggcccggagccccgcagctcgggcagaaaggcctcgggcccatcagcacagcccccacctgctggtgacggggccagagagcgacgccagtcacagcagctgccagaggaggactgcatgcagctgaacccctccttcaagggcatcgccttcaactccctgctggccatcgatatctgtatgtccaagcggctgggggtgtgcgctggccgggcggcgtcctgggccagtgcccgctccatggtcaagctcatcggcatcacgggccacggcatcccctggatcggaggcaccatcctctgcctggtgaagagcagcacactggccggccaggaggtgctcatgaatctgctcctggccctgctcctggacatcatgacggtggccggcgtgcagaagctcatcaagcggcgcggcccgtacgagatgagccccagcctcctggactacctcaccatggacatctacgccttcccggccgggcacgccagccgcgccgccatggtgtccaagttcttcctcagccacctggtgctggcggtgcccctgcgcgtgctgctggtgctctgggccctctgcgtgggcctgtcccgcgtgatgatcggccgccaccacgtcacggacgtcctctccggctttgtcatcggctacctccagttccgtctggtggagctggtctggatgccctccagcacctgccagatgctcatctctgcctggtgaagcgcccgccggcccacacaagcctctgggggcagggctggccctagagaaggggcagggggtggcgaggtggcgggcgtgggtggaacagagcggccaggagtcagagcggccacccccacctcatcttcccctcctggctggaggctggcgaacccaggccacccctcccggagacaagcgtgtttggcagtgccaggcctcttgcccctttgcttggactccaagtctcctctctgggcagccaggacccacccatggggacagccctatttagcttctgctctgggaacagcaaaaatcaggatggtgggaggggccgagtcttgtcttgtcctttcatcatcatgactgttgagttcttggctgtgcccatcacgccacagcacgacgcctgccaaaatgcccccaacctactgcctgatgcaggtgccattgccattagcggtcatcgacagcttagggcagcactttccaacgggtgcccatgggacaccagcctgcgagatgcttttgtgggaaaggggttttgtggttcaataactttcggaagtgctgcacactctgtccccaagttggacattcacaaaggccgttattgccgtaaaggctctgacaagccctatagaaaagcttcttgctaaaccttctttaacccatgttttctaaacttatttgaccacagaacccttttcttggggaacagctattaacccccaaggaattattggttcctcaagtgcgttttgggagctgctgccagagagctaaagggcctggggtgtgagctgactctccgctggggaggccgggtgcacacgccacagcccgaggaaagtgctggccaccgcccgtgggcatcgatgaggctttggcccccaggggccggactccgtgtgacctaataggtcgtttccaagtcacccgttttggatgtgcatttcatgtgacaatacagatgacatgcaaatggaaaaaaaaaaaaaaaaaaaaaacgggg

SEQ ID NO: 7033 - DNA, 1074 bp, Homo sapiens
  misc_feature (673)..(699): n is a, c, g, or t
ctactactactaaattcgcggccgcgtcgacttccacctccagcctgtgagatgcctgcagggagccatcctgagtcctccgaattgacacagtgtctttggggtaggaatttcccagtgaatgcttacttaaatgaattcagaaagagaaaacatttccatggaagaggaaacaggaaattccaacagatcagcaacagttggagtgctaacctgtcactggaatggaaaaaaaaatgctgtcgttgacacatcttttccttgtttttgacacaaattagaaacaccacctggaacacagctgtgacttgataaacaagtgaaacattctttggtgtggtgaggggaaaacaaatttctcaaaggacacgcaccatggtgtatgagaggacactggagcccagccagcatctgacatgctgaattcaaagtgcaggtgaaagtaggacaactgattcacaagctgggatgcctgtgttgttgtttgccagtgtgcgtgtgtgtgttttcctggcacccttcattcattccccagcacagttgacatcaggttggaagcagtgagttctgagggagactgctagaggacccaacttggagaatcaacgatctgcgatgaagataatgaagataaagacaatgtcaatgtcagcgtccaaaatcataaggaccnnnnnnnnnnnnnnnnnnnnnnnnnnnactgtgcaagaagggccaataaagtctaggcaatgcacgaccaggcgcggtcgctcacgcctgtaatcccagcactttgggaggccgaggtggttggattacctgaggttaggagtttgagaccagcctgaccaacatagtttcaccccatctctactaaaaaaaaacaaaaacaaaacaaaagttagcccaggtgtggtgcttgcacaccttttatcccagctactttggaagctgaggcaggagaatcgcttgaacccaagaggcggaggtggcattgaactaaaattgaccgttgttttcaacctgtgagcacaaagggaaactgtgctgaaagtgaattataatgttatgatgataatagagccgatgcgg

SEQ ID NO: 7034 - DNA, 455 bp, Homo sapiens
  misc_feature (250)..(250): n is a, c, g, or t
  misc_feature (410)..(410): n is a, c, g, or t
ccgttatatgtgttcaccatcacttgccgggcagttaggacattagtagttgatttaggctggtatcagcataagtcagggaaagcccctaagctcctgatctatgctgcttccagtttgaaaagttgggtcccatcaaggttcagcggcagtggatctgggacagaattcactctcacaatcagcagcctgcagactgaagactatgcaacctattactgtcagcagcttcatagtctccctccgggtntcggccctgggaaccacagtgggatatcaaacgaactgtggctgcaccatctgtctttcatcttcccgccatcttgatggaggcagttggaaatctgggaacttgcctcttgtttgttgttgcctgcttgaattaacttcttattccccaggaggagggnccaaagttacagttgggagggttggattaacggccttccatttaa

SEQ ID NO: 7035 - DNA, 1469 bp, Homo sapiens
tagtaataccagctgtaatcccagctacttgggaggctgaggcagaagaatcgcttgaacccgggaggcggaggttgagcaactacactgcgctgcatcggactcgacgcccgctggtgacgcacacgctgcgccggaagtgtgaactgtctgcctccaggctttgtcatggcggctgctgctgcacgctggaaccatgtgtgggtcggcaccgagactgggatcttgaaaggggtaaatcttcagcgaaaacaggcggcgaacctcacggccggaggacagccgcggcgcgaggaggcagtgagcgccctgtgttggggcaccggcggcgagacccagatgctggtgggctgcgcggacaggacggtgaagcacttcagcaccgaggatggcatattccagggtcagagacactgcccgggcggggagggcatgttccgtggcctcgcccaggccgacggcaccctcatcacatgtgtggattctgggattctcagagtctggcatgacaaggacaaggacacatcctctgacccactcctggaactgagagtgggccctggggtgtgtaggatgcgccaagacccagcacacccccatgtggttgccacaggtgggaaagagaatgctttgaagatatgggacctgcagggctctgaggaacctgtgttcagggccaagaacgtgcggaatgactggctggacttgcgggttcccatctgggaccaggacatacagtttctcccaggatcacagaagcttgtcacctgcacagggtaccaccaggtccgtgtttatgatccagcatccccccagcgccggccagtcctagagaccacctatggagagtacccactaacagccatgaccctcactccgggaggcaactcagtgattgtgggaaacactcatgggcagctggcagaaattgaccttcggcaagggcgtctactgggctgtctgaaggggctggcaggcagtgtgcgtgggttgcagtgccacccttcaaagcctctactagcctcctgtggcttggacagagtcttgaggatacacaggatccagaatccacggggtctggagcataaggtttatctcaagtctcaattgaactgcctcctcttgtcaggcagggacaactgggaggatgagccccaagagcctcaagaacccaacaaggtgcccctagaagacacagagacagatgaactttgggcatccttggaggcagctgccaagcggaagctctcgggtttggagcagccccaaggagctctccaaacgagacggagaaagaagaagcggcctgggtccaccagcccctgacgcccctgtgcccactttgtaaataaactgctgaacacccaaaaaaaaaaaaaaaaaaaaaaaaaaaaaaaaaaaaaaaaaaaaaaaaaaaaaaaaaaaaaaaaaaaaaaaaaaaaaaaaaagccagagaaaaaacaaaaggg

SEQ ID NO: 7036 - DNA, 3651 bp, Homo sapiens
  misc_feature (535)..(582): n is a, c, g, or t
  misc_feature (826)..(845): n is a, c, g, or t
  misc_feature (1189)..(1214): n is a, c, g, or t
  misc_feature (1444)..(1472): n is a, c, g, or t
ggtagagcgtgtactatttttgtcctcacccacattcatgtttttctccttcactgattcaacaagcacatatagagctgtgtgccagacttggcatgaggtgttgaagatgcagagatgaagaagccacagtctctgccctcaagaagcatacagtcagcctgtgctccttagttctggagtagagaaagtgctggaggtctttcccaaggacacggttctcccagttccctttccagggctcacttctctccttctcccagagggacatcctgatgtggctcttctgttgatacaggccccacactgctgactctgctcccctgacctgggaggtgatggcctccaactctgaggtccccacagaccagcatcctctagtcaatccttcctatccctgtcagagcccacaaaccacccacaccctttccacaggatcaacccaagacctcgctttactgcccactagacacatggctcctggggaagcctttccctgtctctctccagttgcaccccatcctgtgttcctaannnnnnnnnnnnnnnnnnnnnnnnnnnnnnnnnnnnnnnnnnnnnnnnggagggacctaacatcagttgggtatgacttgcagactttgaaatctcccttccctcctggaagcccctctgaaagtgtctttgactttctctacttcccactttgaccaccttgatggagagatcaggaagtgaaatgttgggggtggccaattcatcctgatttgtttagattttcccagttttaacactgaaagtcctctatcctgaaaacccttccattacaaggaaactcggctggttnnnnnnnnnnnnnnnnnnnnccaggagaaatggtgggccagtggaagtggtgagtggttggagaggtggctttgattctctcccaacttgcttttagagtacattgaagagaagaagagagtggacatttgtcgggaaactcctaacatatgcccccattctggagagaacacagagtacgacacaatccctcacactaatgtgagtcccttctcatctttcctgagaactgatcctgtctctgaggctctccttgtgaggtttttccatgggtttggacaacatgggaatgaagaggggagtgaggatatatagacttaaaactcaatgcacctgtgcctcctccaagtcttcatggattctnnnnnnnnnnnnnnnnnnnnnnnnnngctggtggtctctggagcacctggttctgactcacaatgctcatgctgtggtctgtgaaatcacctgctcccctccacagttcataacggccacacaaaaggccagattccttttgcataaggcagtgggtagaagagtgtgactttgacaggatgtttgaatcatggtatcagaagacttctctagagatctctctctctctctctctctctctctctctctctatatnnnnnnnnnnnnnnnnnnnnnnnnnnnnnacacacatatatatataatatttttgaaattcattttaacacagtacagtttaaaaataatgtaatggcttcctgaaaaaagttatcaaaatttattataatagcagtcaccaacaagagaacttcctacctcccttccctgttccagaaccctccttttcctctcacatctcctcccatctctgctttcccctctctggattctgaatgtctctctggccttgtctatgtgattcaggaggtgggtgatgatttcttttgtttgttgtttgtttttaaaagagaacaatcctaaaggaagatccagcaaatacggtttactccactgtggaaataccgaaaaagatggaaaatccccactcactgctcacgatgccagacacaccaaggctatttgcctatgagaatgttatctagacagcagtgcactcccctaagtctctgctcaaaaaaaaaacaattctcggcccaaagaaaacaatcagaagaattcactgatttgactagaaacatcaaggaagaatgaagaacgttgacttttttccaggataaattatctctgatgcttctttagatttaagagttcataattccatccactgctgagaaatctcctcaaacccagaaggtttaatcacttcatcccaaaaatgggattgtgaatgtcagcaaaccataaaaaaagtgcttagaagtattcctatagaaatgtaaatgcaaggtcacacatattaatgacagcctgttgtattaatgatggctccaggtcagtgtctggagtttcattccatcccagggcttggatgtcaggattataccaagagtcttgctaccaggagggcaagaagaccaaaacagacagacaagtccagcagaagcagatgcacctgacaaaaatggatgtattaattggctctataaactatgtgcccagcactatgctgagcttacactaattggtcagacgtgctgtctgccctcatgaaattggctccaaatgaatgaactactttcatgagcagttgtagcaggcctgaccacagattcccagagggccaggtgtggatccacaggacttgaaggtcaaagttcacaaagatgaagaatcagggtagctgaccatgtttggcagatactataatggagacacagaagtgtgcatggcccaaggacaaggacctccagccaggcttcatttatgcacttgtgctgcaaaagaaaagtctaggttttaaggctgtgccagaacccatcccaataaagagaccgagtctgaagtcacattgtaaatctagtgtaggagacttggagtcaggcagtgagactggtggggcacggggggcagtgggtacttgtaaacctttaaagatggttaattcattcaatagatatttattaagaacctatgcggcccggcatggtggctcacacctgtaatcccagcactttgggaggccaaggtgggtgggtcatctgaggtcaggagttcaagaccagcctggccaacatggtgaaaccccatctctactaaagatacaaaaatttgctgagcgtggtggtgtgcacctgtaatcccagctactcgagaggccaaggcatgagaatcgcttgaacctgggaggtggaggttgcagtgagctgagatggcaccactgcactccggcctaggcaacgagagcaaaactccaatacaaacaaacaaacaaacacctgtgctaggtcagtctggcacgtaagatgaacatccctaccaacacagagctcaccatctcttatacttaagtgaaaaacatggggaaggggaaaggggaatggctgcttttgatatgttccctgacacatatcttgaatggagacctccctaccaagtgatgaaagtgttgaaaaacttaataacaaatgcttgttgggcaagaatgggattgaggattatcttctctcagaaaggcattgtgaaggaattgagccagatctctctccctactgcaaaaccctattgtagtaaaaaagtcttctttactatcttaataaaacagatattgtgagattcacataaaaaaaaaaaaaaaaaagggcgggccggctctaaaagtatcccctcgagggggccccaagacttacgccggtacccccagctttttctttgtaaccaaagtggggcccccctaataaggggagg

SEQ ID NO: 7037 - DNA, 1077 bp, Homo sapiens
  misc_feature (207)..(229): n is a, c, g, or t
  misc_feature (579)..(607): n is a, c, g, or t
  misc_feature (969)..(1076): n is a, c, g, or t
caccccttttggagtttttttttttttttcctttccagccggagtttccactcttgttcgcgcacggcctggaagtgccaatggcggtgatgtccactcaccacaacctctgcctccttggttcgagcgtttttcctgactcagcctccccagtagctgggattacaggcatgcgcccatcacacctgactaattttgtgtttttannnnnnnnnnnnnnnnnnnnnnntggcccagcaaggtctcggactacccacctcagggggtccgcccgcctcggcctccccaaagctgggattacaggcctgggcccttgcccccggccccttttttttttttttttttttttctaagtgcaatgggaagccactcaaagggctttaagcagggaagtgacattatctgattttcgttttataaagatccctgcggctgccgtcagtgattgtaggagggcaggagtggatgcaaggacagcagacattagtgcaggagttcaggtgaaagatgataatagcttggacagagtggtagcagtggacatggagggaggtagacagatttaagatgtctcggagnnnnnnnnnnnnnnnnnnnnnnnnnnnnnatgggagtgacaatgacaaataaaggaacctagaataagccccagaattttgcttaagcaactgagagttcagccatggcagatctgttaagcacaaaagttaaacacaaatacaaattcatactgcattggactcttttaagcagtgtcttatagaaaaaacattttatctagggaaaaatgcaacaacaaaaaccactgaaaacaaaagcctatgaataaaagcagacccgttttagactggatgcacaaaacaaaaacacacaggattcttgtggtggcgttgggagtaagtgaagaggtaacaggttgcaagttattttaaggactaagacccaatgttcagaaaccaaatcttgtgnnnnnnnnnnnnnnnnnnnnnnnnnnnnnnnnnnnnnnnnnnnnnnnnnnnnnnnnnnnnnnnnnnnnnnnnnnnnnnnnnnnnnnnnnnnnnnnnnnnnnnnnnnnng

SEQ ID NO: 7038 - DNA, 1059 bp, Homo sapiens
gagggtttttttttttttttttttttttttttaataaataagtatattttattataggaaggtatttgtatataatttatgaggttattgccaaaccatttgtttgtttgtttagacttttttctgggtccctcaggagtggcatttggcatatgtgcaaaaatatctgtatatcctagatggtgccctaggactggaattgctaggtcaaaaggtgtgaagtctgttcttttggtaattattgccaaatttcctctgtagagggtgaaccaatttacaaacctatctgtaacttatgagtatacccatgttttttcatcttggtcaatataatatgaaaagataaatatctgaggagagttttaacttggatcttttatgaggaatgaggttgaatattttttaatgtttctgagaactgtctgttcataccctttgtccatttttatataggttatttttttcttatgaatttgaagttctttgaagttagccttttatgttatgagtagcaactgtgatttttttttggccatatggagatttttgatcttgaagcagtggaattaatatctttttatttaaaaatgcatttgacttttgtatcacagttagggaggccttcccagagtttatttcagtatgtttaaggtttctttttctttctctctgaccctccatttattccttttacatttcatccatttgcaatttgtatatgaagtgtgaatctcatttttttcctcagatgcctactcagtgcactatttgttgaataatctatcattttcctgttgtgttgaaatgtcacgttttccttaagttaaaattctccacatagctctatttattttgggactttctattttcttccttgggtctgtctgttaatatcttaatatcacactgttttaatgattgagacttttttttttttttttgagacagagtcatgaaagtggctcatgcctgtgattccagcaccttgggaggctgaggagggtggcccgcctgagcccaggagttcacgaccagccaacatggcgaaaccccatctct

SEQ ID NO: 7039 - DNA, 1721 bp, Homo sapiens
  misc_feature (1140)..(1157): n is a, c, g, or t
agacgctgcgtgcaaagcactgggtgctgatgtggcttagcatctcctgacacctgtggcctgtcctccctccagccgggtgacacccagacccccagctcctgcacacccctgggcaaccctgctgtgcccccggggtgctgagcgtggctttgccagtgggtcagaggcatcaattgctaaaacaattcggcagaaattaccatttagaacatctttgctctagagttgggcacttcactcacgtgtttgtggacgaggctgggcaggcaagtgagccggaatgcctcattcctctggggctgatgtcggacatcagtggccaggtcacaaagctggtgaagaactaccggtcccacgaggccctgctgatgctgccctcacggctgttctaccacagggaactcgaggtctgtgcggaccccacagtggtgacctccttgctgggctgggagaagttgcctaagaaaggcttccctctcatcttccatggtgtgcggggcagcgaggcacgggagggaaaaagcccatcgtggttcaacccggccgaggccgtccaggtcctgcgctactgctgcctcctggcccacagcatctccagtcaggtgtctgccagcgacattggcgtcatcacgccctaccggaagcaggtacgccctgcccaggcacgcctggttctgtgaggtccctgcagccctgctccttggctcctgcagctccacagaggcaggaacaagctccttgtgagcagcagcaggtttttaaaggggcaggaccgcacttgaatgtcgttcaacatgagaggtcacccaactgccatccatgggccagttccgggcagctgccagcttttctacggccagagcctcgaacagtctttacatttctaaatggttacatttatatgtcccttgatatttggccctttgggaaaacatttgccaacccccagctctaacccagtgtttctcaaagggggcactttgggtatatttgaatgggacgcttctcatttcgtatgactctgtgatgtgattataggagagttagcgtccccaggccccaggggctggtcccaggaagcatctccacacgttcacagtggctctggagctctggtggggacacaggtgcctcccnnnnnnnnnnnnnnnnnncattcatgaagcatgtgtccctgtggtgttcacaccaccaagcagaacttggaaagaacccccaaaatacagaagaaaaggtgagtcccctaggccatcacagtaacagatcacctgtaccgcgcgtgtgctgaccgcagagcccgtcaaagatgttatgtttccttttttctgacctcggggactcgagaggtgagtgcttagttctcccagaggtacagagattacgaaggcttatggagacaagtaagttgccagacatcacacagccagtgtcctggtgtcttaacctcagcttgtaggtgccatcctgctgagacatccagcttagagctgccatcctcagctctaagcatcagacatgcatctcgtttctcctgaaggatttcctccatccttgatgtgtgcttgtggggagggaggattttccacatgaaacttggctttcctagtaagcattgtcccccgtccccagtttaactaaaactgcaatttgtgttctaatcaattcagattagaagaaagcaataaagaattaaaaaacaaaaaaaaaaaatcgtgccg

SEQ ID NO: 7040 - DNA, 1525 bp, Homo sapiens
cagatgatcccactagcttagatgtcagatattagttgtagagctgtctcctgggattgtgcaaaaggccaggcgttcttctagaatgctctgaaatttttaaagttatttatttcctgaactttttccttattccacataagaacgtggattaggactttggactattttactggcaaatgttatagtctcagtatctgattttaatatataagatcaagttaaattgttttcatctgatgagattttgaccccctgggaacatttggcaatgtctggagacgtttttggatgcacaactggagcaggggggcttccagcatctagtggatagagggcaaggaagtcccgatgcctcaagtgtgctttgaaaccaagagcccagttgtcccccatgccagaaagaaatcctgttgtgagcctctggtatgagaaataaaatctgccagttttataacattcactttctgcctctgaggaaagatacagggaacaaaaatcaatttgtacagtcttaatattaaaagcagcttgactaaatacctgatttaaaaatagaagacatccccagtcctcatgacataccgcaaatatctgtggggtcctgttgaaaagaacaaaataaaggagcccaaggggtcattctgtctcagcaccatccagcctggcacttctcttcccatatatccattggatttttttttttttcctaaacaaagtttttacactgagcagatgctctgtcatgatggcggttgtgcaattctggtatcctctaaatttgtaagcattcataaaacaggaaaaagtaaactatcattcggaagcacagcccattcctcccatttttgcaatgatgtctggatgttatttaaacagtgtgtctgtgtttcccaaatccagctggccccaccagctcagattccattttttttgtgtgtgtgtgtgaaacgtagtctgcaactctgcctcccggcaattatacatgtgtcaggatgtcaaaaagcaattctcctgcctcagcctcctgagtagctgggactacaggttcctaccaccacacccggccaatttttgtatttttagtagagatggggtttcaccgtatcggcgaggatgatctctatctcttgacctcgtgatctgcccgcctcggcctcccaaagtgctgggattacaggcgtgtgccactgcgctcggcctcagattccatatttgaacaccagctgattgagagaaggggaatgagaagagctggatgagtttaaataactttcattgttcagattcctgaacaggagttgggataatggccatcttttctttcctatcctttcttcccccctcactgtgaaaaataacagtccaccccaagtcatacactggacccagtgcctgcggggacaggactgtgggtttcttggtcacacctgtgttggtgctcaatgcagtgtagacatgttttcaaataaaacaaatgattgtgtacaaaaaaaaaaaaaaaaaaaaaaaaaaaaaaaaaaag

SEQ ID NO: 7041 - DNA, 2521 bp, Homo sapiens
gctctgacgcagccaacatggctccagtggagcacgttgtggcggatgctggggctttcctgcggcatgcggctctgcaggacatcgggaagaacatttacaccatccgggaggtggtcactgagattcgggacaaggccacacgcaggcggctcgctgtcctgccctacgagctgcggttcaaggagcccttaccggaatacgtgcggctggtgactgagttttcaaagaaaacaggagactaccccagcctctctgccacggacatccaagtgcttgcactcacataccagttggaagcagagtttgttggggtgtctcacctaaaacaagaaccacagaaggttaaggtgagctcatcgattcagcacccagaaacacctctgcacatttctggtttccatctgccctacaagcctaaacccccacaagaaacagaaaaaggacactcagcttgtgagcctgagaacctggaatttagttccttcatgttctggagaaaccctttgcccaacatcgatcatgaactgcaggagctgctgattgacagaggtgaggacgttccaagtgaggaggaggaggaggaagaaaacgggtttgaagacagaaaagatgacagcgatgaccgaggggggtggctggataaccccccagtaacatcaagcaaatccagcaggagctggagcagtgtgacgtccccgaggacgtgcgggttggctgcctgaccacagacttcgccatgcagaattgttctgcctgcagatgggggctgcacgtgctggcggtgaacgggcatgctggattcgtgaggcccggagctacatcttgcgctgccatggctgtttcaagacaacgtctgacatgagccgagtgttctgctcacactgtgggaacaagaccctgaagaaagtgtccgtgacctgtcagcgacgacggcaccctgcacatgcacttctcccgcaacccccaaggtgctgaacccccgcggcctccggtactcgcttcccactcccaaagggggcaaatacgccatcaacccccatctcaccgaggatcagcgcttccctcagctgcgactctcccaaaaggccaggcagaaaaccaacgtgttcgcccctgactacatcgccggggtgtcaccctttgtcgagaatgacatctccagccgctcagctaccctgcaggtccgggacagcaccttgggagctgggcggagacgcttaaatcccaacgcttccagaaagaagtttgtgaagaaaaggtgaagagcgagttcccgcaggcaaattggatgggcgtctggccgccgtggagttccggtgacccatttccccagccgtgtcgtctccaggaccacccgatggaaataacaggcgggcttcacggtgcggctctgtccgcccatgccccgctgggtctgcagggaactggactgtcccatggcctgtgagcaccggagcgcctggctgcctgccaaggaagtgcaattgcataaaaacagaaagaacaacgccctggagccaatcttcaagaaaggaatttccaaaggataatatttttctaataaatgcggctgcaacctcctgtgcatttaattaaataggccaaatttttgctgcttaggtcatatcaagcgctgatacttgagctgtgtgcccagagatcatgcatttagatttatatttttgccagaaaatacaaggttataataaaactaagaactaccaaaaaaaaaaaaaaaaaaaaaaaaaaaaaaaaaaaaaaaaaaaaaaaaaaaaaaaaaaaaaaaaaaaaaaaaaaaaaaaaaaaaaaaaagggggggcccccaaaaaaatcccccgggggggccaaattttacccaccccctttttttttgaaaaagggggcccctaaagggggctttattaaaaggggggggggggggcgttttttaaaacctgggggggggaaaaaccgccccttgggattttttggaaaaaaaccttctttggggggggggcaattttgggccaaccccccccaaaaatttaaaccccccggggaaaaaaaaaaatttttaggggaaaagggggaaaaaaaacggcaaatttcttggggttaaaaaatttttccaccggggatgttttttaaaaaattttcccccgggcttggggggccccatgggggggggattttaaaaacccaacccccggggttttttttgggccccccaaaccccccaaaggtgttttattgtctaatatccccccccccaccctttgtgaagaggttttttttttgttttaaaaaaactcccccacccctccccccgcggaactgggaaaaaaaaaagaaagaggcaaaattggtggtgtacaaaacactggtttttttggcgcctttaaagagggggccacaaaaaaagggcataatccctcccacaatatttccccaaaaaaaaaaagaatttttttttttccgcgggaattattaaaaagggggggggtggtgtgcgccaaaaaacctctcacgcacggggttt

SEQ ID NO: 7042 - DNA, 3171 bp, Homo sapiens
aagtgctgtctgtgatgtttggcaagcctggtttatatccatctacaaggtttgcgaacccatgttgccaacaactcccttggtacaataaaaaagacgagtatttacttttcattgaaagtggagaacctgaaaaggaacctggaaagaagcagctggaaaaggtgagaggaaaacctagagtgtgtgttatcctgcaagccaattgagaatggagcttgcttgatatttcactagataaagaatttaaggcgagtatctatctttgttctccttggcaactgagagtctgcccttggaaacatcaggcaccatggggaagcgggataatcgggtagcctatatgaatcctatagcaatggccagatggagaggcccaactcaatctgtgggcccaacaatccaagattatctaaatcgaccaagacccacctgggaagaagtaaagaaacaattagaaaataaaaaaacaggttcaaaagcattagctgaatttgaagaaaaaatgaatgaaaattggaagaaagaacttgaaaaaagcagagagaaattattaagtggaaatgagagctcatctaaaaaaagagaaagaaagaaaaagagaaagaagaaatcttgtcggtcttcatcttcttcatcaagctctgattcttcaagcagttcttcagattctgaggatgaggaaaagaaacaaggaaaaaggagaaagaaaaagaagaaccgttcatacaaatcatcccaaagctctacgcatgaatcagaatcagagagcaaggagtctgtaaaaaagaaaaagaagtcaaaggatgaaacagagaaagaaaaggatgtaagaagcctcagcaaaaaaagaaagaaaagttaccctgatgataaacctttatcgtctgagtcctcatctgaatcagattatgaagaggatgtgcaagcaaaaaagaagagaaggtgtgaagagcgagaacaagcaaaggaaaaagtaaagaagaagaagaagaaacagcacaagaaacatagtaagaagaagaaaaagaagtctggatcaagtcacaagtcaaggtaacatcaagaaaaaaagcaagaatgagtttgccgagttcccctgtgttagtagaattatttctggactttgagttgcctatcaaatcccactgtgccagtaaggggcatagtggctgctggcaacttcaatatacatttttgtttgtttgcttgtccttccttctaatggttaattcctctgagagctaaaattctgttgtcataccagtgaataaaatgtttgaaattaaagtaaaatgtgttagataatgaataacttcgacaaaaaaaagtgtatctaaggttaaatgtatctaattcgaatacatctttgaaatatcaccatcaatgaaacataaatgtaatttccagacaattgtagttggtatttttgatgcaaggacttaatattgatgtctcaaattccttgcttttgtaaataagtttagttcattttccttttttctttaatgaatctttgtttacatggggaaagagcatgtggggtgggaagggcaagtgtttgctaatcactgtggctagctgaatagtgtgcctttgactcttacacatcctatttttgccagagcagcagccgtccttttcttactttatgaaattctggggtgttgtatgctgcttcaagtgaacaagaaggacaggagtttacagcataagtaagcccccatatctatgaaatttacctcttcttcagcactgtttactatacagtactgaataatatttagtattacaatattacatgatttgaaataactttatacccattttgtatgggaaccattctaaacagaccctgatgttgtttgattaagaaatattctgaaattttttttgcatgttttatactgttaagttttaattatctgaccatattctatataactgatgatccttttttaagatatgatttatgcttaggatataagtttcaagtttttagtttcttagccttgctatattaatttcattactgtgtttaattgcacccttgccaaaatatttagcatgtgaaaaggttttttttaaaaaatatgtaatgccttcatattgaagctggttactgtacgcaagttgagtgccagacctctagtacgccgtatgttacatgaaactactgccaaaatcttagtaagattgttgttgaaaagattgttgtcttaagcattaatattgaatttatatagaagttaaatgtagatgataatgacatcattgatcttcctgtgtccgtattttcctacaatttggtgccttgtatctgttgctgattcacttttaccactagtgtaaaaataagtgaaaaaatatttttactttacatttttatatatcagagtaacataaattataaatttgtgtctcaaaaccacctgtgatggaggatgtgctaattgtaatgtcataggtacaaagtattttggcatgatgaaaagctcaatagctattgtttttcaatagcagattttatctcggctaccttcaatcacaagtaaaattataaagataaaaaacatctacataaacatgttggctgccaaattttttgcattggaaatactggaatctctcattaaagttcttggaacattatagtgatgccatgttagattaccttggagcttcataactttagctttttcctaaaaatatatgtttatgctgataaaaactattacatttatgggatattttgtatccatatagagtttttcagaattgttcattaaaatgctttttataagcttatattatttgtagaatatggcaaaagcatttacagctcatcatgtatctatctgctcctgttcacttccaaacctcttgtagttaggcaatgccatttgactacttcaagcagagggattgtaaacagaagtgattttctatttccatgttggactgtaaaaagttctgcatgaccctccagttttcttttgcctgtcatggtgacctgaaagcaagatgttccaaatggcatacttacaagacggatgcaacctgggtccttaggtcgctgtttagaagggacctgactggagtgctgatggacttgcagtaaactttttaagtgtaagaaataaactgttatgtgttaaaccactgtgaaaa

SEQ ID NO: 7043 - DNA, 715 bp, Homo sapiens
ggttcactgcaacctccacctcccaggttcaagcgattctcccgcctcagcctcctgagtagctgggattacaggcacccaccaccacgcccaggtaatttttgcattttttttttttagtagagatggggtttcaccatattggccaggctggtcttgaactcctgacctcaggtgatctgcccgcctcccaaagtgctgggattacaggcatgagccaccgcacccagccgcgttatcaggatctttatccctcaaagcagcctggtcaattcttttccatttagggaagaaataaagagattttttaggagtgagagcattttattgcctgactaaatcacagaacacagagtttcctaggaattgcatgaggtcagaaagacaaatgcagctgttctctcactttgaacttagtttctaactctgctatctctagttattaaaaattaagaccagtactagctccttaaagtttttggttccctgataatagctaaaacaaaacaaacgaaaaggcaaggcagagaacctatttggtctagcgttcttttcagctatatctaattaagaaacaaccccatggccaggtgcagtggctcaagtctgtaaccccagcactttggaaggccgaggcgggcagatcacgaggtcaggagtttgagatcagcctaacatgttgaaacgtggtctctactaaaaacacaaaaattag

SEQ ID NO: 7044 - DNA, 936 bp, Homo sapiens
aatcttttttttttttttttttcatcaatcaaacaaatatttactctgggcccacatcgctaagcacctgcaggctgctctgccagtggtctgcacatgccactgactgtgggaaatgcaatcccagcgtaaggtcagggctgactttttattcacttaggactagtaaagccatcactcatgctttcaagacaaatcccaacatatgcccattcccagggaaagccagcatctgcacactgttgaaacacacccaccctcggccctcacaacagccctgtgaggtaggctttcaggtgacctatggcttagagaaaaggagattgagggtcaaagaggcaaagggttaattaagtggcccctgggtctgccagatcctaaggctacgcgctttctaacataaaacacagattcgcatcagacagctcaagttccatcaacatgacgccgaaacaaggctcctgctcttcaaacgtggcatacaaacgtccgtaagatacaatatggtggttgttaacaggtccatgaagagcaaaataataatctcttagtaaaggttataaacatcaaggcttgtcattggttacaatttcattagctatccatccattcaacagaaaagaaacgtaagcgctaccactcgccaggcactgtgttgggcacccagcctgctgcatttgagcccaaatgttgtcagttggggggaggggtgggggaggcaacaatgcagtatctttgatggctggtgcctaatattttggggaaaaggacgccacccagaagggccttttgaaggcggacacaagtaggtgctgcacacaggccaggcacagaggcaggaagcacacagcattcagaaagcacagccaggcgcttccagcctctcagaggtgagcgtgaacgcgtacccccggggggggaactcggtcagaggtg

SEQ ID NO: 7045 - DNA, 1558 bp, Homo sapiens; identical to SEQ ID NO: 5211
  misc_feature (137)..(154): n is a, c, g, or t

SEQ ID NO: 7046 - DNA, 2218 bp, Homo sapiens
gagctggcaggcgggccgcggcggcggcgggcagcggacgggcggactgacgggcgcctccaccttgctccctccctggctgccggcttccttttgtctttctgggcggcgatgagcgcagggccggcgcagcagctgcgggcgcacggaggcccgcgctgctagtcactcctcccggcctcggcgcgcttgtcccgggcagcggcccgggcccgctgcagccgccgccggcgccgaacttgggctcgggaagccggcggaccgcgtcctgcgccggagcaggggcatggtctagtggcccagtcaggacgcggaaacactccctggaggttctgacccactccctctcagcctccgcctggtctctggtgtagtcgccgccgccagccgccatgggcaaacagaacagcaagctgcggcccgaggtgctgcaggacctgcgggagaacacggagttcaccgaccacgagctgcaggagtggtacaagggcttcctcaaggactgccccaccggccacctgaccgtggacgagttcaagaagatctacgccaacttcttcccctacggcgacgcttccaagttcgccgagcacgtcttccgcaccttcgacaccaacggcgacggcaccatcgacttccgggagttcatcattgcgctgagcgtgacctcgcggggcaagctggagcagaagctcaagtgggccttcagcatgtacgacctggacggcaacggctacatcagccgcagcgagatgctggagatcgtgcaggccatctacaagatggtgtcgtctgtgatgaagatgccggaggatgagtccaccccggagaagcgcacagacaagatcttcaggcagatggacaccaacaatgacggcaaactgtccttggaagaattcatcagaggtgccaagagcgacccctccatcgtccgcctgctgcagtgcgaccccagcagtgccagtcagttctgagcgagcggcccctggacagttgcagagaaacacaggcttgtcgtgccgtttaagctttgcttgcaagagtggatgccccgcaatcgttcctgctctcccgggccccgggcctggggcatgcgttgcacctgcccggcccggtggctgcgcctccctcctccacctgaccaacgcgacattcctcccctcacgcctggcccggtcccttccagggcaactcccagggatgtggtgacatgcagggttcaagtgttcttggttccaggcacctcccggctcacggggagctcagaggtccatgccgaggagaccaggcaggacctcccgaggctgcgccccggccggcccatgcgttttgtgatcccaagtgactctgtgggaagggtggggacgaggcgtcgggagggtatacagggagcccctcccgtgcatggctgcccccccgttcattttctccaccacagccgcttgcacgtatagatactgtggtcccctttcttttaatatataaattatgtatggtgaagtggagtgtattgtgtaggtcccgtatttaatgcctctgactgcctttgaagcgcagccctctgtggcccgcagccccctgagcctggctgttgtgtggtatttatgctctctttgtctgcctgtttctaaggaaatgcatgtgtgccctgagccgtgatgatcctcccatccgtgttgtgagcacaggcatttgtgtctggtctgtcctccctgttgattggtctggcatttccggtattaaaatgataaaataaatggcaaaaaaaaaaaaaaaaaaaaaaaaaaaaaaaaaaaaaaaaaaaaaaaaaggacagaaacacaagataaaaaacgaacgagggggagggcgcgcgcgatcaaaaacagatactacccccgcgggagggggagccacgctaagatcgagcagcagcccaagtcagtagtggaagacagatgggtctgccataattaagtagagtactaatataatattaagacacgcacgcgggccgccaactttattaaaagaccgaagatttagatagaaagaagcagctcatcctgtgtaattttattggtgaaacacactcttgttgttgtggtgagcaaataagtgaacacactatccgtgttgatttagaacagcggagcgtatatacaatcttgtggagttttatgaggagaacaaacacaatggcgagcaggaaagaatgaccgcgtgttttagaacttgc

SEQ ID NO: 7047 - DNA, 2908 bp, Homo sapiens
  misc_feature (2)..(21): n is a, c, g, or t
  misc_feature (2509)..(2527): n is a, c, g, or t
cnnnnnnnnnnnnnnnnnnnngtcgccgcagacatccttgtggaaccagcgttgtttttccttggcagctgcggagacccgtaataattcgttaactaattcaacaaacgggacccttctgtgtgccagaaaccgcaagcagttgctaacccagtgggacaggcggattggaagagcgggaaggtcctggcccagagcagtgtgacacttccctctgtgaccatgaaactctgggtgtctgcattgctgatggcctggtttggtgtcctgagctgtgtgcaggccgaattcttcacctctattgggcacatgactgacctgatttatgcagagaaagagctggtgcagtctctgaaagagtacatccttgtggaggaagccaagctttccaagattaagagctgggccaacaaaatggaagccttgactagcaagtcagctgctgatgctgagggctacctggctcaccctgtgaatgcctacaaactggtgaagcggctaaacacagactggcctgcgctggaggaccttgtcctgcaggactcagctgcaggttttatcgccaacctctctgtgcagcggcagttcttccccactgatgaggacgagataggagctgccaaagccctgatgagacttcaggacacatacaggctggacccaggcacaatttccagaggggaacttccaggaaccaagtaccaggcaatgctgagtgtggatgactgctttgggatgggccgctcggcctacaatgaaggggactattatcatacggtgttgtggatggagcaggtgctaaagcagcttgatgccggggaggaggccaccacaaccaagtcacaggtgctggactacctcagctatgctgtcttccagttgggtgatctgcaccgtgccctggagctcacccgccgcctgctctcccttgacccaagccacgaacgagctggagggaatctgcggtactttgagcagttattggaggaagagagagaaaaaacgttaacaaatcagacagaagctgagctagcaaccccagaaggcatctatgagaggcctgtggactacctgcctgagagggatgtttacgagagcctctgtcgtggggagggtgtcaaactgacaccccgtagacagaagaggcttttctgtaggtaccaccatggcaacagggccccacagctgctcattgcccccttcaaagaggaggacgagtgggacagcccgcacatcgtcaggtactacgatgtcatgtctgatgaggaaatcgagaggatcaaggagatcgcaaaacctaaacttgcacgagccaccgttcgtgatcccaagacaggagtcctcactgtcgccagctaccgggtttccaaaagctcctggctagaggaagatgatgaccctgttgtggcccgagtaaatcgtcggatgcagcatatcacagggttaacagtaaagactgcagaattgttacaggttgcaaattatggagtgggaggacagtatgaaccgcacttcgacttctctaggcgaccttttgacagcggcctcaaatacagaggggaataggttagcgacgtttcttaactacatgagtgatgtagaagctggtggtgccaccgtcttccctgatctgggggctgcaatttggcctaagaagggtacagctgtgttctggtacaacctcttgcggagcggggaaggtgactaccgaacaagacatgctgcctgccctgtgcttgtgggctgcaagtgggtctccaataagtggttccatgaacgaggacaggagttcttgagaccttgtggatcaacagaagttgactgacatccttttctgtccttccccttcctggtccttcagcccatgtcaacgtgacagacacctttgtatgttcctttgtatgttcctatcaggctgatttttggagaaatgaatgtttgtctggagcagagggagaccatactagggcgactcctgtgtgactgaagtcccagcccttccattcagcctgtgccatccctggccccaaggctaggatcaaagtggctgcagcagagttagctgtctagcgcctagcaaggtgcctttgtacctcaggtgttttaggtgtgagatgtttcagtgaaccaaagttctgataccttgtttacatgtttgtttttatggcatttctatctattgtggctttaccaaaaaataaaatgtccctaccagaagccttaaaaaaaaaaaaaaaaaaaaaaaaaaagactggaagcttttaccaggttcatcatttcctatgcatcaccttcatgcaggcagagtctggataatgaatgctttagcagcaaaaaagcatcttgggtcttggatttcagacctggtttcaacacttgtgttccctctaagtgtcagtgtccttttctggaaagtagggtaaatagtttctctttgtctcccagagaacatagcacatgtgttcatgatgtaatgctgttataatgtgtacttcatttttaaattttnnnnnnnnnnnnnnnnnnntgatacacagatgtatacttaaaaaaaatatgtaggtgagcaggagcactgtgtcaacaccaagttagaaaagagaacgttttccagtcagtacctcggagcccctcgttgaaactcttcctaagattaaattttctttaatggccccaggcattttgggaatatatcatggctcatggagtggtggactcattcctttggtgtttatagttaccatctaagatagatcctattagtagttttggggtccggatggatttcatataaggggttctaaaaaagggggggggaatcaagcggcaaacgaacgtgtagggcaaaggtataaaggggcaacgagaaagttgacttgtggaacacaaattggtggtataggatggc

SEQ ID NO: 7048 - DNA, 5816 bp, Homo sapiens
  misc_feature (308)..(351): n is a, c, g, or t
  misc_feature (713)..(730): n is a, c, g, or t
  misc_feature (1115)..(1140): n is a, c, g, or t
  misc_feature (4624)..(4638): n is a, c, g, or t
  misc_feature (4701)..(4701): n is a, c, g, or t
  misc_feature (5452)..(5452): n is a, c, g, or t
cacagagcgacagagacatttattgttatttgttttttggtggcaaaaagggaaaatggcgaacgactcccctgcaaaaagtctggtggacatcgacctctcctccctgcgggatcctgctgggatttttgagctggtggaagtggttggaaatggcacctatggacaagtctataagggtcgacatgttaaaacgggtcagttggcagccatcaaagttatggatgtcactgaggatgaagaggaagaaatcaaactggagataaatatgctaaagaaatactctcatcacagaaacattgcaacannnnnnnnnnnnnnnnnnnnnnnnnnnnnnnnnnnnnnnnnnnnccaactctggcttgttatggagttctgtggggctgggtccattacagaccttgtgaagaacaccaaagggaacacactcaaagaagactggatcgcttacatctccagagaaatcctgaggggactggcacatcttcacattcatcatgtgattcaccgggatatcaagggccagaatgtgttgctgactgagaatgcagaggtgaaacttgttgactttggtgtgagtgctcagctggacaggactgtggggcggagaaatacgttcataggcactccctactggatggctcctgaggtcatcgcctgtgatgagaacccagatgccacctatgattacagaagtgatctttggtcttgtnnnnnnnnnnnnnnnnnnatggcagaaggtgctccccctctctgtgacatgcatccaatgagagcactgtttctcattcccagaaaccctcctccccggctgaagtcaaaaaaatggtcgaagaagttttttagttttatagaagggtgcctggtgaagaattacatgcagcggccctctacagagcagcttttgaaacatccttttataagggatcagccaaatgaaaggcaagttagaatccagcttaaggatcatatagatcgtaccaggaagaagagaggcgagaaagatgaaactgagtatgagtacagtgggagtgaggaagaagaggaggaagtgcctgaacaggaaggagagccaagttccattgtgaacgtgcctggtgagtctactcttcgcnnnnnnnnnnnnnnnnnnnnnnnnnnagaacaaggaacgttccgaggctcttcggagacaacagttactacaggagcaacagctccgggagcaggaagaatataaaaggcaactgctggcagagagacagaagcggattgagcagcagaaagaacagaggcgacggctagaagagcaacaaaggagagagcgggaagctagaaggcagcaggaacgtgaacagcgaaggagagaacaagaagaaaagaggcgtctagaggagttggagagaaggcgcaaagaagaagaggagaggagacgggcagaagaagaaaagaggagagttgaaagagaacaggagtatatcaggcgacagctagaagaggagcagcggcacttggaagtccttcagcagcagctgctccaggagcaggccatgttactgcatgaccataggaggccgcacccgcagcactcgcagcagccgccaccaccgcagcaggaaaggagcaagccaagcttccatgctcccgagcccaaagcccactacgagcctgctgaccgagcgcgagaggtggaagatagatttaggaaaactaaccacagctcccctgaagcccagtctaagcagacaggcagagtattggagccaccagtgccttcccgatcagagtctttttccaatggcaactccgagtctgtgcatcccgccctgcagagaccagcggagccacaggttcctgtgagaacaacatctcgctcccctgttctgtcccgtcgagattccccactgcagggcagtgggcagcagaatagccaggcaggacagagaaactccaccagcagtattgagcccaggcttctgtgggagagagtggagaagctggtgcccagacctggcagtggcagctcctcagggtccagcaactcaggatcccagcccgggtctcaccctgggtctcagagtggctccggggaacgcttcagagtgagatcatcatccaagtctgaaggctctccatctcagcgcctggaaaatgcagtgaaaaaacctgaagataaaaaggaagttttcagacccctcaagcctgctggcgaagtggatctgaccgcactggccaaagagcttcgagcagtggaagatgtacggccacctcacaaagtaacggactactcctcatccagtgaggagtcggggacgacggatgaggaggacgacgatgtggagcaggaaggggctgacgagtccacctcaggaccagaggacaccagagcagcgtcatctctgaatttgagcaatggtgaaacggaatctgtgaaaaccatgattgtccatgatgatgtagaaagtgagccggccatgaccccatccaaggagggcactctaatcgtccgccagactcagtccgctagtagcacactccagaaacacaaatcttcctcctcctttacaccttttatagaccccagattactacagatttctccatctagcggaacaacagtgacatctgtggtgggattttcctgtgatgggatgagaccagaagccataaggcaagatcctacccggaaaggctcagtggtcaatgtgaatcctaccaacactaggccacagagtgacaccccggagattcgtaaatacaagaagaggtttaactctgagattctgtgtgctgccttatggggagtgaatttgctagtgggtacagagagtggcctgatgctgctggacagaagtggccaagggaaggtctatcctcttatcaaccgaagacgatttcaacaaatggacgtacttgagggcttgaatgtcttggtgacaatatctggcaaaaaggataagttacgtgtctactatttgtcctggttaagaaataaaatacttcacaatgatccagaagttgagaagaagcagggatggacaaccgtaggggatttggaaggatgtgtacattataaagttgtaaaatatgaaagaatcaaatttctggtgattgctttgaagagttctgtggaagtctatgcgtgggcaccaaagccatatcacaaatttatggcctttaagtcatttggagaattggtacataagccattactggtggatctcactgttgaggaaggccagaggttgaaagtgatctatggatcctgtgctggattccatgctgttgatgtggattcaggatcagtctatgacatttatctaccaacacatatccagtgtagcatcaaaccccatgcaatcatcatcctccccaatacagatggaatggagcttctggtgtgctatgaagatgagggggtttatgtaaacacatatggaaggatcaccaaggatgtagttctacagtggggagagatgcctacatcagtagcatatattcgatccaatcagacaatgggctggggagagaaggccatagagatccgatctgtggaaactggtcacttggatggtgtgttcatgcacaaaagggctcaaagactaaaattcttgtgtgaacgcaatgacaaggtgttctttgcctctgttcggtctggtggcagcagtcaggtttatttcatgaccttaggcaggacttctcttctgagctggtagaagcagtgtgatccagggattactggcctccagagtcttcaagatcctgagaacttggaattccttgtaactggagctcggagctgcaccgagggcaaccaggacagctgtgtgtgcagacctcatgtgttgggttctctcccctccttcctgttcctcttatataccagtttatccccattctttttttttttcttactccaaaataaatcaaggctgcaatgcagctggtgctgttcagattctaccatcaggtgctataagtgtttgggattgagcatcatactggaaagcaaacacctttcctccagctccagaattccttgtctctgaatgactctgtcttgtgggtgtctgacagtggcgacgatgaacatgccgttggttttattggcagtgggcacaaggaggtgagaagtggtggtaaaaggagcggagtgctgaagcagagagcagatttaatatagtaacattaacagtgtatttaattgacatttcttttttgtaatgtgacgatatgtggacaaagaagaagatgcaggtttaagaagttaatatttataaaatgtgaaagacacagttactaggataacttttttgtgggtggggcttgggagatggggtggggtgggttaaggggtcccattttgtttctttggatttggggtgggggtcctggccaagaactcagtcatttttctgtgtaccaggttgcctaaatcatgtgcagatggttctaaaaaaaaaaaaaaagataaaaaaaaagaggggaagaaaaaaacgaaaaagagcaacagcgctggtgccctttgggtttatgtggcccagaacacttgtgccgctggtgaacgagcttattaaaccacgtgcccctcaatgtaaagcgggttaaaatgtctgtgggttttaacgccttagacgttgccccnnnnnnnnnnnnnnncccccagagtttctggcactttgcgcggaaagaagagggaacaaacaaattttcccacagccnccactgtgttcttcttgtcttgtcgttatggggcgccgtccacccccactagggggttctctagagagtgcctctggagagagaggggcgacaatgtgacggtctctacatctgggctttgtggggggagaaaggaagacctccctttcgaggggcgtcgtcatatattaaatctcctttgatatcgccccaaaacagcgagcacccctagagatttgtggaggagtgtgtgccgagcgctgtcttttatatttggggcggcgcccaaaaatttcgcgacggggcggccaccaaagagatcactgtgggtgcccctttgagagcagagtttgcggcggacaagattgagcgcccgttaaggggggcgtgagaaatgcgcgcgggtgtttaccattttaaccaccagcgttgtttttagaggaagaaccccgaagaaattttgcgtcttctgtctggctgtctttctcacggccaagcaaatttctcgcccccccagctatacgacaggggctgcgtggatgtggggcgacacgaccttgtgtgggtggccacagtagtggataccgaccaagaggacccctctcaatgtgggttctcgcctcggaaatttcaaacaaggaggggtctgtggctgctaacccaacaagcaagggcgggtggggctccacacttttagagagaaatatggtggctcccccaaacaaacatgttgtgtgttcagacgtggtgtttcgtgcgagaggaagccccnttatccctctcaggtggaggggagggcgcgggaaggacatgtcccccccccttttcttcgtaataagacgatgtcgcggcgtggtcggcgataaaagaccaccttatttttgtgaaaagacaactgctaggctgtgttcacacactcttccggctggtgaatttccccaaacaaaaaggaggggggggcgcaccacctccgcgggagggaagttacaacaggggtgcgactcaatctatcaagacagccgccgggcggattaatcccgtcgctgtcctctacacgaagtgtagccactcgtggggttgaccactgggtagatttttaaaacccgccagtttctcacctgtcggagacaattatc

SEQ ID NO: 7049 - DNA, 1074 bp, Homo sapiens
gccgtccttcctctcctagcctaaggcgtgcaaacagagcgccactgggaggctgaaacctttaggccgatgcttgcttgcaaggtcaggcaagctggattctggtccccacctttgcagagagaacagcgatgttgtgcgcccatttctcagatcaaggaccggcccatcttactacctccaagagtgcttttctctctaataagaaaacatctactttgaaacatctactgggcgagaccaggagtgatggctcagcctgtaattctggaatttcgggaggccgaggcaggaagattccttgagcacaggagttccagaccagcctgggcaatgtagcaagacgctgtctctatttatacaataaaatttttttaaaaaaggaaaaaaaaaaaaaaaaaaaattgtgtgtggggggatgggccctgggaaaagtttttaaaaccatttggtgggggggcgggggcccaaagggttagggaacacggggaccaacgagcagtgtacacaaggagagcaccgggcgcacaaggaccatagggcgctgggggatatacttccaccaagtttaaaagagagcgccggggggaacacccgaggttttctaaaaacaaattccaagaagagggtcacggagggcaacaaacgggcgctctatacacaggaggaatccaaaaggcggaaggctctgaaagtactaaaaaatataagcccgcggacccaggggtagaggagaaacacagcgacacacggaaggcacaaacgcaagaggcgaaagcagagccaggcgagaagaagacaagacgacaaagaacgaaaggaaacgagcaaggagcaagagaggcaaaaggaagaaggacggaacaacagaagacgaaaaaggaagcgacaacaaaagaaagagaaaagacaagagaaagggcgaaagaacaaagaaaaagaaaaaagacacaaaaagaaaagaagaaacacgagcaaaacagacaagagagggagagagaaaagaaaaaaagaagagagaaggacgagaaaggaccacgaagaagaaacggagaagagagagaggaaaaagac

SEQ ID NO: 7050 - DNA, 691 bp, Homo sapiens
tattttttttttttttttttaaatgaatttaatctctctctagaaacagtgcactgattttacaaatgtccacatttggttttcagtttaccaagatgatgccagtatagctagtgagatgcagcaccccatcctcagccccctcgcctctggaagagacaccagactgcaaagggcaccgcgtacagaagctaacggaacttgaatgacaagacaaaaagagcagaatcagttagtgtgacacaacattctaacatgcctgattcttacatcaaatatggtaactttggggttggtagggggagacaaacaaggagaatccacttgggaacaatttgatgaagtttgcaaatcagcactttacccccaaattaacaacagcttgtatggaaaaaaaaatgctcttttaaaagtatatggtttggacaggtatatttgttttctcttgtagtttttgtaaaaaagtatcaaaaccttggctttaaatatatatatatatatatatacacacacacacacgtggctttttaaaaattacttttttatagcacaaagtgtttgtaaatgcagagggtttctgctaattcttgactgtgcacatggtgcatagcctgaatgaacagagcttcctgatttttttttaactgaaaaattgagcagtaattctttaaccttctaaattctccatacc

SEQ ID NO: 7051 - DNA, 1010 bp, Homo sapiens
tttttttctatttttaatccctgttttttttcttcaaagttgctacagggctggagtatgctttatcctatttggtcatgttagaatttttgcgcgtattttgtctgtcctgtttatcaatctggttgacttgtatcccgccatgtcctctatgtacttaagtgcactcgtgcctcttggcagggcccattttcagaaatgtttatggacggggtcggttctttgtgcctagctggatttaattacgttttatccccaccaggaccagaagcccatacccaaggttctcagagtcaaaagatggctttttatgcagatggagctaatctcccagttcctataaagcttgcggttgacctatggtgtctagtaccaccgacatctttcagacggtggatctatgggatagggaaggacatggcagctgtgcagaggaccttgatggctttagtcagcgttgcagtcatccaaggatgatggctgctatcggggagagccatcctggtttcacaggaaagcccagcagaatcggagaggcttttccgaggagcagcttcgccagggacagaacgtaataggcctgcagatgggcagcaacaagggagcctcccaggcgggcatgacagggtacgggatgcccaggcagatcatgtaggacgcggcatcctgcccctggtagagaggacgaatgttccacaccatggtctctacgaaaaagaaatagttagtcaccttctgaccttctcctctttctcaaagccttctgtccctggtttttgcaagtgctgcatttccgccgagaatccgcgttgcctactgctgccacctcctgttcatttagaactatgcaaagactccgcttccgttttcctgagctcctcgggccccagagtctctgtttgattatttatttatttatttatttatttgccaaaaattctcctcttcaacttatagaatgcacctaataaagtaattagtcttgtgtcaaaaaaaaaaaaaaaaaaaaa

SEQ ID NO: 7052 - DNA, 1162 bp, Homo sapiens
cggtccggaattctcgggatgaggatttctgcggctgagtggatgcttgcggccgcgtcgactacggctgcgagaagacgacagaaggggcagcgaggcaagatggagttagtgcaggtcctgaaacgcgggctgcagcagatcaccggccacggcggtctccgaggctatctacgggtttttttcaggacaaatgatgcgaaggttggtacattagtgggggaagacaaatatggaaacaaatactatgaagacaacaagcaattttttggccgtcaccgatgggttgtatatactactgaaatgaatggcaaaaacacattctgggatgtggatggaagcatggtgcctcctgaatggcatcgttggcttcacagtatgactgatgatcctccaacaacaaaaccacttactgctcgtaaattcatttggacgaaccataaattcaacgtgactggcaccccagaacaatatgtaccttattctaccactagaaagaagattcaggagtggatcccaccttcaacaccttacaagtaaagacaatgaagaacagttgaaacatgcaaaatatggagcttttcatgtaattactcttttactgtttaccattcactataattcacaattaaaattgtgtgactaaaaaaaaaaaaaaaaaaaaaaaaaaaaaaaaaaaaaaaaaaaaaaaaaaaaaaacgggtttagggagtctattcccgcccctcgggggcgccccccttcaaaaaacccccccgggggggcccaagttttccgggacccccattttttttggaaaaaagggggccccttttagggggggcccttttataaacttggcccctgggcccccctttttttaaaccccccgtggacggggaaaaaccggcctaattttggggaacttttgggaaaagaaaccctctcctcttgggggggggggccatatttgtgggaaaaaacttccccctacgggaaattttaaaaccccctcgggggaaaaaatcaaaaaattttttataaggggaaaataggggggaaaaacaaaaccgcgacataatctcttccgcgcctcttagaaaaatttttttccttttcccggggtgtggttttttttgtggaaaaattattttttccccccgggcgccgtctttgttgtttc

SEQ ID NO: 7053 - DNA, 568 bp, Homo sapiens
atttattctatacgttttttttttttttttttttttttaactttttaaactttttggttaaaaactaagacacaaacacacattagcctaaacccgcacagggtcaggaccatcagtgtcgctgtcttccacgtccgcatcctgtcccactgcaaggtcttcaggtggaataaccggcacagagctgtcgtctcctacgacgacgacggcttgttctagaataaccggcacatagctgtcgtctcctacgacgacgacggcttcttctagaataaccggcacagagctgtcgtctcctacgacgacgacggcttgttctagaataaccggcacagagctgtcgtctcctacgacgacgacggcttgttctagaataaccggcacagagctgtcgtctcctacgacgacgatggcttgttctagaataacaggcacagagctgtcgtctcctacgacgacgatggcttgttctagaataaccggcacagagctgtcctctcctacgacgacgatggcttgttctagaataaccggcacagagctgtcgtctcctacgatgacgatggct

SEQ ID NO: 7054 - DNA, 3873 bp, Homo sapiens
  misc_feature (3583)..(3583): n is a, c, g, or t
  misc_feature (3796)..(3796): n is a, c, g, or t
  misc_feature (3832)..(3832): n is a, c, g, or t
  misc_feature (3857)..(3857): n is a, c, g, or t
atccttaatctggttcggcccacctctgaaggttccagaatcaatagtgaattcgtgggatttcggcctgagagcgggccgaggagattggcgacggtgtcgcccgtgttttcgttggcgggtgcctgggctggtgggaacagccgcccgaaggaagcaccatgatttcggccgcgcagttgttggatgagttaatgggccgggaccgaaacctagccccggacgagaagcgcagcaacgtgcggtgggaccacgagagcgtttgtaaatattatctctgtggtttttgtcctgcggaattgttcacaaatacacgttctgatcttggtccgtgtgaaaaaattcatgatgaaaatctacgaaaacagtatgagaagagctctcgtttcatgaaagttggctatgagagagattttttgcgatacttacagagcttacttgcagaagtagaacgtaggatcagacgaggccatgctcgtttggcattatctcaaaaccagcagtcttctggggccgctggcccaacaggcaaaaatgaagaaaaaattcaggttctaacagacaaaattgatgtacttctgcaacagattgaagaattagggtctgaaggaaaagtagaagaagcccaggggatgatgaaattagttgagcaattaaaagaagagagagaactgctaaggtccacaacgtcgacaattgaaagctttgctgcacaagaaaaacaaatggaagtttgtgaagtatgtggagcctttttaatagtaggagatgcccagtcccgggtagatgaccatttgatgggaaaacaacacatgggctatgccaaaattaaagctactgtagaagaattaaaagaaaagttaaggaaaagaaccgaagaacctgatcgtgatgagcgtctaaaaaaggagaagcaagaaagagaagaaagagaaaaagaacgggagagagaaagggaagaaagagaaaggaaaagacgaagggaagaggaagaaagagaaaaagaaagggctcgtgacagagaaagaagaaagagaagtcgttcacgaagtagacactcaagccgaacatcagacagaagatgcagcaggtctcgggaccacaaaaggtcacgaagtagagaaagaaggcggagcagaagtagagatcgacgaagaagcagaagccatgatcgatcagaaagaaaacacagatctcgaagtcgggatcgaagaagatcaaaaagccgggatcgaaagtcatataagcacaggagcaaaagtcgggacagagaacaagatagaaaatccaaggcaggaggaaaagaggggatctgatgataaaaaaagtagtgtgaagtccggtagtcgagaaaagcagagtgaagacacaaacactgaatcgaaggaaagtgatactaagaatgaggtcaatgggaccagtgaagacattaaatctgaaggtgacactcagtccaattaaaactgatctgataagacctcagatcagacagaggtaagtgtattgtttctcactttgattagggctttttgttactgtttgacagtgcagcgtaagtatgcacagatgaagatggaactaagccgagtaagaagacatacaaaagcctcttctgaaggaaaagacagtgtagtcctgcaaaacattttgaggtacattgttttgtctcagctattttgtagcagactcgtgcccccattagtgtgcctctttggaaattatcgcccacatttgtaatatagtcgccattgaaaagttaattatcctttttttagggattttgatgtcatttcttttttttttttaataaaaaggttgaactgtttttttttttctttttggtattaagtccatcttgtgttggtacattggcagagacatatgctttaaaaacttaaatatttcggaggcacatgttggactactttgttttaattaaactgctagtatttctttgtcaaggatgtttctagttttttgctttattgccttgcattctaatgcagtttgttctgtaactcgagagccagtagcattggattgatggaagtgtagggtttatgaattattgcagctgactaccatacctcacacagcgttggtgttgtgagcggcccatgaaaagccaaattaaaaatcaaggattcagtcaaactaagcaggtactcatgccaggtactcctttctctacccacatccatgtttgaatgctattgcctgtgatctttacgcttaactgttgtgtatcttttttgttctttacaagaagtgcagaggggttttttgtgtattgcgtgaaaacttataaaacaaatgttaacagaatggaattttttttcaactgtatgtagggctgcagtggtggccagaattagatatctttaaagaattttaaatacaataaacacttcatattattcgccttgttacactcaatgcaattctcaagtctataagaggtatgtgcttaatatttcctactgtgtaggagaatttgcagtcagccataggtatgtaggaatagtcactcactggctgatacatttaaagcagcagtgtgaatagcaaggacagacaccttcaatttgtgaaatcaaagaactgatgcactatatagaacgaatttgggtttttaaagaaatattaaaagttaggtactgtaagtgttcttaaaacctgtaaacttcattctgtgggctagtggtgtgggacaaaatattcctaatgaaaggaagtaccaattagttgatttgttggtggcattccccttttgggaaagcaatgtaaggttatgtctgtgtatgtcattcacacttaggcaagcatacacaggcacatggctttaagaaccacactgatgccttgataattaaaaagaatacaagcattccatgtacacatgttaattagcagttagtgactgggccaacactttctcataaaaattggccttttacatgttgtctaattatcatttttccccaaattttgcgttgtaggactactgttcgaagatttttggaagaatactgagaacggcataaagtgaagatcgacatttaaaaaatgaggtgaaagaaagctatagtggcatagaaaaagtataaagctcagttagtttttttattattattattattaaaagttaattcaggactgatgtgacctaccagatttcagaacatgtgttaatagtatatatgccactgaaaacttaggtcctgtatcatacttttttctttaagactttttaagaaatattacttaaacatgtggcttgctcagtgtttaattgcaagttttcaatcttggactttgaaaacaggattaaacgttagtattcgtgtgaatcagactaagtgggatttcatttttacaactctgctctacttagcctttggatttagaagtaaaaataaagtatctctgactttctgttaaaaaaaaaaaaaaaaaggttattgaaaagttttagtattaatctttttctaataaagttattgactctgaaaaaaaaaaaaaaaaaaaatacaagagttacactattactagaggtgttggtgtacagttttatctgatttgntctgtttaagactaatttttatagactttctaatgttttaaataatggtgcttcaattttaggtggttatgaataaatttgaattttgcttttaatagcaaagatgtgcagtgaactagaatatatttttacatccctgagagattcatttagtagaaaattccaagtatcctgacaagcactctttagctggctagctatgggatgatgtanaaaagcattcaagagctagtttttggtaaagcctgnatcaagattaacccactggggcagnttataaaggatttctg

SEQ ID NO: 7055 - DNA, 2326 bp, Homo sapiens
aagattcctggaagaggtcccagcgtgagtgtcgcttctggcatctgtccttctggccagcctgtggtctggccaagtgatgtaaccctcctctccagcctgtgcacaggcagcctgggaacagctccatccccacccctcagctataaatagggcatcgtgacccggccagcgggaagaagctgccgttgttctgggtactacagcagaagggtatgcggaagcgagcaccccagtctgagatggctcctgccggtgtgagcctgagggccaccatcctctgcctcctggcctgggctggcctggctgcaggtgaccgggtgtacatacaccccttccacctcgtcatccacaatgagagtacctgtgagcagctggcaaaggccaatgccgggaagcccaaagaccccaccttcatacctgctccaattcaggccaagacatcccctgtggatgaaaaggccctacaggaccagctggtgctagtcgctgcaaaacttgacaccgaagacaagttgagggccgcaatggtcgggatgctggccaacttcttgggcttccgtatatatggcatgcacagtgagctatggggcgtggtccatggggccaccgtcctctccccaacggctgtctttggcaccctggcctctctctatctgggagccttggaccacacagctgacaggctacaggcaatcctgggtgttccttggaaggacaagaactgcacctcccggctggatgcgcacaaggtcctgtctgccctgcaggctgtacagggcctgctagtggcccagggcagggctgatagccaggcccagctgctgctgtccacggtggtgggcgtgttcacagccccaggcctgcacctgaagcagccgtttgtgcagggcctggctctctatacccctgtggtcctcccacgctctctggacttcacagaactggatgttgctgctgagaagattgacaggttcatgcaggctgtgacaggatggaagactggctgctccctgatgggagccagtgtggacagcaccctggctttcaacacctacgtccacttccaagggaagatgaagggcttctccctgctggccgagccccaggagttctgggtggacaacagcacctcagtgtctgttcccatgctctctggcatgggcaccttccagcactggagtgacatccaggacaacttctcggtgactcaagtgcccttcactgagagcgcctgcctgctgctgatccagcctcactatgcctctgacctggacaaggtggagggtctcactttccagcaaaactccctcaactggatgaagaaactgtctccccggaccatccacctgaccatgccccaactggtgctgcaaggatcttatgacctgcaggacctgctcgcccaggctgagctgcccgccattctgcacaccgagctgaacctgcaaaaattgagcaatgaccgcatcagggtgggggaggtgctgaacagcattttttttgagcttgaagcggatgagagagagcccacagagtctacccaacagcttaacaagcctgaggtcttggaggtgaccctgaaccgcccattcctgtttgctgtgtatgatcaaagcgccactgccctgcacttcctgggccgcgtggccaacccgctgagcacagcatgaggccagggccccagaacacagtgcctggcaaggcctctgcccctggcctttgaggcaaaggccagcagcagataacaaccccggacaaatcagcgatgtgtcacccccagtctcccaccttttcttctaatgagtcgactttgagctggaaagcagccgtttctccttggtctaagtgtgctgcatggagtgagcagtagaagcctgcagcggcacaaatgcacctcccagtttgctgggtttattttagagaatgggggtggggaggcaagaaccagtgtttagcgcgggactactgttccaaaaagaattccaaccgaccagcttgtttgtgaaacaaaaaagtgttcccttttcaagttgagaacaaaaattgggttttaaaattaaagtatacatttttgcattgccttcggtttgtatttagtgtcttgaatgtaagaacatgacctccgtgtagtgtctgtaataccttagttttttccacagatgcttgtgatttttgaacaatacgtgaaagatgcaagcacctgaatttctgtttgaatgcggaacaatagctggttatttctcccttgtgttagtaataaacgtcttgccacaataagaatacaaaaaaaaaaaaaaaaaaaaaaaaaaaaaaaaaaaaaaaa

SEQ ID NO: 7056 - DNA, 6306 bp, Homo sapiens
  misc_feature (1206)..(1207): n is a, c, g, or t
gcggagtgaggacggtgacagccacgcgcgcgcgtacgcgcccgatgcagcgcggccccgtgaccctagtcggccgctgagaggcgcgcggagtctgggccgctgccgtctaggggtcccgtcccgaggcgtccccggcatctccggcccgaatcccggagtgccgggtcgcgcctgcaccgaaggtcccggctcctgtgccctccctgcagccgtcagggaccgtcccccaactcccctttccgctcaggcagggtcctcgcggcccatgctggccgctggggacccgcgcagcccagaccgttcccgggccggccagccggccaccatggtggccctgaggcctgtgcagcaactccaggggggctaaagggctcagagtgcaggccgtggggcgcgagggtcccgggcctgagccccgcgccatggccggggccatcgcttcccgcatgagcttcagctctctcaagaggaagcaacccaagacgttcaccgtgaggatcgtcaccatggacgccgagatggagttcaattgcgagatgaagtggaaagggaaggacctctttgatttggtgtgccggactctggggctccgagaaacctggttctttggactgcagtacacaatcaaggacacagtggcctggctcaaaatggacaagaaggtactggatcatgatgtttcaaaggaagaaccagtcacctttcacttcttggccaaattttatcctgagaatgctgaagaggagctggttcaggagatcacacaacatttattcttcttacaggtaaagaagcagattttagatgaaaagatctactgccctcctgaggcttctgtgctcctggcttcttacgccgtccaggccaagtatggtgactacgaccccagtgttcacaagcggggatttttggcccaagaggaattgcttccaaaaagggtaataaatctgtatcagatgactccggaaatgtgggaggagagaattactgcttggtacgcagagcaccgaggccgagccagggatgaagctgaaatggaatatctgaagatagctcaggacctggagatgtacggtgtgaactactttgcaatccggaataaaaagggcacagagctgctgcttggagtggatgccctggggcttcacatttatgaccctgagaacagactgacccccaagatctccttcccgtggaatgaannccgaaacatctcgtacagtgacaaggagtttactattaaaccactggataagaaaattgatgtcttcaagtttaactcctcaaagcttcgtgttaataagctgattctccagctatgtatcgggaaccatgatctatttatgaggagaaggaaagccgattctttggaagttcagcagatgaaagcccaggccagggaggagaaggctagaaagcagatggagcggcagcgcctcgctcgagagaagcagatgagggaggaggctgaacgcacgagggatgagttggagaggaggctgctgcagatgaaagaagaagcaacaatggccaacgaagcactgatgcggtctgaggagacagctgacctgttggctgaaaaggcccagatcaccgaggaggaggcaaaacttctggcccagaaggccgcagaggctgagcaggaaatgcagcgcatcaaggccacagcgattcgcacggaggaggagaagcgcctgatggagcagaaggtgctggaagccgaggtgctggcactgaagatggctgaggagtcagagaggagggccaaagaggcagatcagctgaagcaggacctgcaggaagcacgcgaggcggagcgaagagccaagcagaagctcctggagattgccaccaagcccacgtacccgcccatgaacccaattccagcaccgttgcctcctgacataccaagcttcaacctcattggtgacagcctgtctttcgacttcaaagatactgacatgaagcggctttccatggagatagagaaagaaaaagtggaatacatggaaaagagcaagcatctgcaggagcagctcaatgaactcaagacagaaatcgaggccttgaaactgaaagagagggagacagctctggatattctgcacaatgagaactccgacaggggtggcagcagcaagcacaataccattaaaaagctcaccttgcagagcgccaagtcccgagtggccttctttgaagagctctagcaggtgacccagccaccccaggacctgccacttctcctgctaccgggaccgcgggatggaccagatatcaagagagccatccatagggagctggctgggggtttccgtgggagctccagaactttccccagctgagtgaagagcccagcccctcttatgtgcaattgccttgaactacgaccctgtagagatttctctcatggcgttctagttctctgacctgagtctttgttttaagaagtatttgtcttcctttgtctaatgtgggattcctgactcccttcgtccaaggcaccggtgtgtgtgtgtcttgcactccagagctgacctccaccgcccagcctgggaagtcactgtagggagtgagacactgaagccctgagaagccagtgccatcatccccaccccgcccagggttccggaacattcattcccccaccggtgaggacctggcatgcagcgaagcagcccagcccggcggatcccaggccagcacgcctgccggcttctcatcgtcagggagcccgcccagagctcgtgacgagcaagtgctgggtccccgccaggcaccccgaggcggcgctctggctggcagctggtggggaataggcagggcagctgtggctggggagagactttaggcagaagctgtgatgcaggctgactgccagccgaggggctgggtagtgccgtgcgggagctgatggtacagggcactcgctgtccccctccggccaccctagaccagggtccgagaggcaggcaggagccactcatgtcttccccattgcccgacgcccatagacgctccttcctgtgtggggctggggtactccctggtcgtactgcagtcagcacccgtaacccggctatgaccagggatctgtaagccctgtggctccacaggtgctgcttctcactggcccagactctgagctccaccggcccagtctgcacggcccatctgcttcaccttccctcccagccacgtgccagtggccacagcccacttcccaacccactgttgtacccaggcctcactttgctgttgcccttgtccctcttcgggccctgaattttctgttccctgggggccagccagggccctttgtgcccctcccagcacaggcctgatgcaggtgtccactcacaggtggcgctcacctaggctgtcacaggacccacctccatgccaggcaacagagggtcacagaaccacccccacggctcactccttggtctggggccaccttcttgccctttctttttttttttttttttttttttccgagatggagtctctctctgtcacccaggtgggagtgtggtggcacaatctcggctcactgcaacctccacctcctgagttcaagcaattctcctgcctcagcctcccaagtagctgggactacaggcatgcaccaccacacttggccaatgttctgtatttttaatagggacggggttttgccatgttagctaggctggtctcaaactcacacctgggattacaggcatgagccactgcacccagccccttcttgccctttcttttctccatggctgatgctgctgtggccagccagggcccttgagatccttccagtttggctgttatgcaaagcaggtgatttgtcttaatcagataaaagatagaggctatgggggcctcaagatttttggagagcagaggtggtctctggcaattccatctggttttgagaaacttagcagctcacagagcacagagatcctgccttcttcctactatcaggctgacctaatggggttgggctgctcggcaactgcttgggtcaccttgccccaaggaaaccagccctgggtgccacccagccacttagggtctacagggtgggactccagacctagagcgtaagtatggatgttgtggccctgtgtcttcctagtgtgacccagccaggagcggaagcttcaggcgtttgtaaagtgaggtctggctctgcctcctccgttttttttttttttttctgtttctgtttctgtttttttttttgagatggagtctcgctctgtcgcccaggctggagtgcagtgtcacgatctcagctcactgcaacctccgcctcccaggtacaagagattctcctgcctcagcctcccgagtagctgggactacaggcgtgtgccaccatgcctggctaatttttgtatttttagtagagatggggtttcgccatgttagccagactggtctcgaactcctgacctcaggtgatcctcccaccccggcttcccaaagttctgggattataggcgtgagccaccatgcccggtctcttctcagtcttgaagcccatccctggatttccaccaggagttactttcctcctgacctgtaaatttgttctttaacaatggctgcaggtgggagcatatggtggtttataaaaacgctgtcgggctttgtttccttctttagctgccgtgtgtacttctgaagtctgggaagtgccaagccacgcggcctcaagggagctggctggtgtttgagctgtggcagaagcacctggggctccagggagcaggctgggaactgcaggaccttgctcagccaggagcacttccccctccttgaggcaggaatactgaggtgcctccccacagatggagaaggtggagaggaggatgggcctcaggagcatctcaagccccagtagcaggagaaagaaagaaagagatgcctggttttcacagactggttcctgtggctgggatgactgcatccttttttttttttttttgagacggagtttttgcctttgtcgcccaggctggagtgcaatggcgtgatctcggctcaccgcaacctccgcctcccggattcaagcaattctcccgcctcagcctcccgagtagctgggattacaggcacgcacctccacgtccggctaattttgtatttttagtggagacggggtttctccatgtcggtcaggctggtctcgaactcccgacctcaggtgatctgcccacctcggcctcccaaagtgctgggattacaggcatgagccaccgcgcttggccagactgcgtcctttttaagcgaacattttagggcctgggagtttgtcaagtaaggaagtctcaagcccaaagagcagcgtcctgaccatggtggtttcattacgagcccttctgctggctctcaggcagaagccccacagcaccgggaccattcatgaggtcactgcccagctcatgatgtccgtgaggctgtccttttggccagtagccgtgtgcagctgtgtggcacagatggcttcgttcatcctgatcaaggccccacctcagccacagcagtccccccaacctgtgttgtccaccctattattcatgtacctgccaggccctgctagatagcaccccgtggcattacataacacttcatgagtggctgtgtcttgtaattttggggacaggtttctctctttccctctctttttttgtcaaaagcccagagactgacaaccagctgcagtgtctaagtgttcctcactgacagggtggggcctcaccacccctggagggagcagcgttggcagggagacagcctggcccagtgaccctgggcccaagccagcccctccagggctttcagggaagcgccatccattttcaaagatgtcaaacgtcacttcttcctgtagggcccgagtcctgcctcctatcagggccagatcatagaaggctattttctattctggggaacgattataacttaaatgattgttttaataaaaattctaagctggaaaataaaaaaaaaaaaaaaaaaaaaaaaaaaaaaaaaaaaaagtataacgaggggaacggccacaatgctcccgaccctattgggcacacggggaagacggcggcccaaagaggacataagaaatcgacagcgactacagcaacaagaaacacgaacgcaacacacccggcaggcccacgccacgccaagccgcacacaccatgccgcaagaccaagtagcgaagacgcacacccgaagagacagagcaccaccccgcgcgcgacacgcagcagacaacgcgacgcgacgaacgggac

SEQ ID NO: 7057 - DNA, 817 bp, Homo sapiens
  misc_feature (41)..(41): n is a, c, g, or t
gccctgtgggcccggaaaagccctgtccagaaaaggtgccnccccagccaaccatatttaaatttaaaccccatccacattttgttgtccattttccttttttttttttttttttcctccttccttgatgtattttttttttttaaggaaacatccctgagtggatacagtgcaacatctgcatcaagcagtgattgtcatttatgaagcacgaagtgagaagcccagattgtggattttttcttccagtgcacacttgatcatgattgttgtgaacatttgttagtcctcatggggaaggaaccaagttctgggattgtaggtacaaaataccttgacatgcagtcataggagatcttcgaagggcagctttttaaggctttttaccattgaaaacatgactggattctctttaaagggaaggttgggcaactgtaacccaaactagaaatctcttctctcaactaagtgggatgagtatgtcctggttgccattgttttgctctggttcagatgctagctctgtttccttcctcccagcttcaaaaggtccatgccgtcccagtgaaatgcttaacgctagtggaaacaacacaaattcaaagcagtacctcccaaggtaaatgtggggaacaatctttttcctatatcacccatgggaaaagggaggaaaaaattctgagccacttcatcaattgagccaatttaaatcctctaaggtaaattggaggaaataaataattccctctgcaactgagcaggaattacaggctgacaatggaaaacactaggccaacagaacaatggtcctcgtgcc

SEQ ID NO: 7058 - DNA, 2058 bp, Homo sapiens
  misc_feature (1952)..(1952): n is a, c, g, or t
  misc_feature (2033)..(2033): n is a, c, g, or t
cccgtatagtttgcagttaatcgctggtgcgagcttctttcgcgagctatgcggttgtgtggccccttaacacctcatgtggtttattttctgctgctggcgtcgtcctccttgggacggtgtttgccccgttttgttgccccgcccccggatgggggggtcttcttcctagtgctcctgcggtcgagcaggtttttttccctctctagtctttgtgttttatacgcctggcggtcgtctctatctgtgttttttagttggcgctcatctaggtcggtggcgcctccttttctttcagaaaaagtcgcggtgtctgcgctattatggtggccgcgcttcccggggattgattactatattaagcgcgctcccgccccctctgtgtttctattgtttcttttagtttttttttttctcgtttctttttttttttttttttttttttttttttttttttttttttgagacacaggaacaattcttttattgtacattggagaaatagccctgtgtgctggttcaaggtgcaacatacagaatattgaattaagaaaagagggaacggggaagggaagggaaacctcttgaggtccaaagttgcaaacaaaaaatggtaaaagatttcctcacgcaagaggcatttttgcaaataccatgcaaaacaggcagctggtgtgccttaagagaatccctataaataacagaaaagacactccaagcattcctgtacgtggactcagagcacagagaaaagaaactaaaatgccttttggcatttcaagatatttggcactcttgtgattacatttttttacagtccattaaagagaataaactgacataatattagagaaataaacaggctgctcacacaacagactgcaaggggaagttagaaaaagctcaagcatttttttctttgtttttcgtgtgtgtgtgtgtgtgtgtgtgtgtgtgtgtgtgtgtgtgtttttctgacataaaaaatgtgtccatttgcattaacttgggcagatagcttgcagcaacaaagaaacacaagctttacaactcattttaaaataaaatcttttctatgtatcattccttagaaaagttctcttcttgttttaaacacattcctgataacttctaaagatgaccaaaataaaacagaatatctacagagatcattttctgaattttttgtacatccaaggataacaacataaaaaaaataaaactggacagcatttcacatccaagtgcacagaaccatttttgcaagattaaataatgtaaacattgggaacagccaaatcagcgaagaatgccaacacctcaaaacacctggtgttgccgcttcattaagtggttcaaaatccagatctataattgcgcaatattcaccgtatataaaaagaaatggatattaattttgacaaatagctgcaactgagacttctttttatttctttatatgtgtatatagtgaatttttattatttttaaaattttatttatttttttatttttatttttgcagaggagcccagagccttctcctcctcctcctcctcctctcgcctcatctgtctcccggcctgataccagatacaggttgttgatttcatcgtgggtagcaagctagtaataaatttcaaagtgctttctcttttcatgctttttgccaataactgttaccgccgttcttattctctcccttaactcattgtctttgggggagttagacaccaggaggtgccttgtcggtcatatttttcagcacgtcatcaatcctatcatcttcaataacaacccgcttgctccggccgatctggcccagcttggtccctcggcgcgacggccggcagccgatcgaggtttctgtctctccctgtctaaggtgtcggtcgcccttattgtttcggcggcttctgcgtcctccccaaacgcgcgtcctcggctctgtntctccccgcttcagctcccctctcgggagctttgtctcggtctctgccaccctcggtctcccgcgtaccccctcccctccntccctgcgtctcagtctctctctgc

SEQ ID NO: 7059 - DNA, 4605 bp, Homo sapiens
gaagttctagaaaatgttaattgggggagctgtggctggcagagaaggaaaaaggaagctgaagggcacttgggctcataatggtctctccaaccctgatcctgtcctttatggacatttggcagcgctgctgccttgaggtgccttgcaatgctttatctttttgttaaagccacctctgttgcttcagccagcttgagcggttttctgttacttgctagtggttgggaaggcttagccgacgaagggaaaatgagtcaggtcctgaaggatgagcaagttacgggagtgggccgcatggtgagggagtggacttcctgatggggttaagggcgcctgaacacctgggaggcaagttgaggccaagacctggggtgatggagaggcagggtaggctacccagtgagtaggaggccgaaggaaccacagcagggctccagatctcctggcccagaggggctggtacgggaagcccagaagacactcatccctaaggggagcctgagactgaggaactctcatgccctgcgtcgggctcgtgggcgaagggccttcccagggactgcaccatggcctgtccccagccttacccaggggcctccctctcaggttctgaaggacccaggggtcacagctgtgtggggtgctccactgaacacttccttcaaactccttcaggctggagtgcagtggcgcgatctcagctccatgggagagagtttgaaaggatgaagagtttacatcctctggaaagaagcaaatagaaggcattccaggcaaaaggaactgcatcgagtaaaagcatggaggcaagaaagggcttggtgtgtttgagaaacagtgagtagggcatggtggtggcagaagcttaaagtgtatggcccgtggacagtgacagccggacaagaagctgaagtgacagaacaagttgaaccaaaggaattccagacctgggaaagtggagaaagaattttggggtcagagccgtttaagactttgcctagggcctgggtcttctttctcctaaaggcctcaacccacagcacgccacacaaatatgtcacataacacacaaacaaacatcatatttcacagtccaggaaatgaaatgaagacaaaagcgccccctgtgggtgaagtcacagtcactgcagcagacatcatggctgtggatgtggcagaataccatctgagcgtcatcaagagcccccctggctgggaggtgggtgtctatgctgcaggggccctggccctgctgggaatcgcagctgtgagcctgtggaagctctggacgtcggggagcttccccagcccctctccgttccccaattacgactacaggtaccttcagcagaagtacggcgagagctgcgcagaggccagggagaagagagtgcctgcctggaatgcccagcgggccagcacgcggggaccacccagccgcaaaggcagtctcagcattgaggacacctttgagagcatcagtgaactggggcctctggagctgatgggccgggagttggacctggccccctatgggaccctccggaagtcccagtcggccgactccctgaactccatctcctccgtgagcaacacctttgggcaggacttcacactgggccaggtggaggtgagcatggagtacgacactgcctcccacacgctgaacgtggcggtgatgcagggcaaggacctcctggagcgggaggaggccagcttcgagtcctgcttcatgcgcgtcagcctgctgccggacgagcagatcgtgggcatttctcggatccagagaaatgcctactccatcttctttgatgagaagttctccatccccctggatcccacagccctggaggagaagagcctgcggttttctgtatttggcatcgatgaggatgagcgcaacgtcagcacgggggtggtggagctgaagctttctgtgcttgacctcccgctgcagcccttcagtggctggctctatttacaggaccagaacaaggccgccgatgctgtgggggagatcctgctctccctcagctacctccccacagccgagcgcctcaccgtggtcgtggttaaggccaagaacctcatctggaccaacgacaagaccacagcggaccccttcgtcaaggtgtacctgctgcaggatgggaggaagatgagcaaaaagaagacagccgtgaagagggatgaccccaacccggtgttcaacgaagccatgatcttctcggtgccagccattgtgctccaggacctgtctctccgcgtgacggtggctgagagcagcagcgacggccgtggggacaacgtgggccatgtcatcattgggccgtcagccagtggcatgggaaccacacattggaaccagatgttggccacgctgcgcaggcccgtgtccatgtggcacgctgtccggcgaaactagcaaccagggcgggccagttgggcaatggagctgctggagcccggtacccactcagctctgtctgatgccctctccatagcccagctggagccgtgaacactggggtcccctggcagagtcctcatgacccatcctggtctctctgtccagattgcagcagaggagtgggcgtggctctgtgtccagggccccagggtctgctcctgctgaggaccagctgtggctgggccaggacagaggactcaaccctgctcctcccggtaggccagctgccgagctgggctatgttctggaacccagtgaatcttgggggccaggcactgtgctaggcaccagcaggggtaacacgaagaagacccggcccttagggcatcaggaagactagctcccctgccccggaggatctgctcagtgctgatggcagcccagctgtgtggactcagggggctctgagggctagggaaacaggaagggcctctttgacaaggtaggagctgtgcttggaggggcaggaaaagaactgagcatgtcgcaggcagcgggcccagcctgagcaatggcaggatgtgaacttccccatcgcaaatgcagttctcagcccactgcagtggatacaaggaagggcctttctcggggccggagaagagaccaagagaccaggcccgggcagcagcctaccggccacgtggaacactggctccggagttattctctgtcaaatctactccccggacctcaaccatggcaagaaccagaggtccaaagaggcccagacccaggtccttgtgctcagtcctgcgcaaaccaggcccagaccctgcaagcatttgttgatgcccttgcaggcccactgggagaaagatgcctcaggcaggtctcagcctgggggtggcaggggtggggcagagagaatactgacagcagaggtcttggtgggctgcacgtgcctgcgaagatgtggtggacaaggaggctctcgggctgggccttggaggggtggcagcggaaggacagcccaggtggctgaggcctgatgggaagccggggaaggccagggtggaagggcggcttgagggacgccaggagaagactgaatgccaggctaggaaggaggcggctctcgatcacggggtgggtgcccccgacaccgggtctcctagcttgagttccctagaagcgaaatctgagagggggattctggggcaagtagtttcttgcgggtgagtgttctcagagaaacttaccagatcaagaaagggagctcaggctggatggaggaagccacgcaagtgtggcttcaagatccatcgccttggcctgatcgctgtgggggcaggggcctggagtacgaggggcaccctgggggctcccacccagaagcagaggggctgggctgttgcacctctactggcatcagtctttggttaccccccagccccagtaggaggagagcaggcagagcttgtcatccccagcctggtgtcccgcagtcccaggaagccgcttcttgccttcatggctgagtgctgggaagggctgagctcacccaggccagcaggtggggtatcatctgctcggtggggccacccacaggtgacagcatggaccctcaggctggctgcccctgttccttggtccataactggtgagctatggagacccaggccaacaaattatccccagtgatatggggggaggaggggctagaacaagggcccaggggactggaggcaggatggtggctttccctacctgacacagccatggcccagccccaaggccaggctgtctaccctatggccacagcaggaggtcagcccagggccaggagacacatggctggacaaggctttgcagcctgggagaccccgactttctctaacccagtggctgtgcggtgcaggccactgactccccccctgccctctcccctctctccctccccctaactgcatgacatgttaactgtgtgcccaggacagccgtggtggggaccgggtatgccaactggaatgattctagaaccaaaataaagttggggcaggaagagggggcttccagggagccctgctcggccctgaatcaccttcgtctcttctctaggaaaaaaaaaaaaaaaaaaaaaaaaaaaaaaaaaaaaaaaaaaaaaaaaaaaaaaaaaaaaaaaaaaaaaaaaa

SEQ ID NO: 7060 - DNA, 2011 bp, Homo sapiens
acctcctgtacctcttagcttgtttaattttttttacagcatttatcagtttccagttgtacccctacaataatgtacgttccaagtgcctgaaatagtgcctagcacataatgtgtgaaacacacacacacacacacacatacccataacccactgaatgaatgaagagaaaccgaaaaaataaaagtataatatcccatccctgatcactctccagaaatgtatacttccaaggaacttgcatatttctataggtagaataattgatgatgataataacagtaatagctatatttgaatgtccattatttacactaatattcacagcaactctgcaaagtagttattatgaagagactgaggtgcagagaagaaagttcacataactgctaggtgctgaagctgagatttgtaactattggatatctgaatccaggggtcatgctcttcccattaactgcattgttatattatttcacaaatgtaacaaatatcaaaagaaaatcttggcattttcattttaagaggaattaggaaggaaaacaaataggtatataaaggtcagcctaagttgtcagcaattcttttccttaatctgtaagaatcttgctcatcgatcagggtgctgttaatcacactaggtcccaatctcttaataagggagttgggaggggtgtttcatcctaggacaggagtcatcagactcggttagagtaatgaaaaggattataatactaatttctgaagagaatgtgggactgaagctaaaaatactcactataaagtaactcttttggctatagtctattatatcacaaaaatattataaaaatcctcaggttcctttctatcttccacacctaattttcaaaaccgatcaatttttttaagccacttaacctgtgtgtaattactactgtggtctcctagcacagacaacagctgctgactgctgtggtattggcacggatcatgtagtctatagagaatttgataaaaagactccaaacaatttcatgccctgtgctgttacagaggagaacaaaatgctttcagcaaggatttgaaaactcttccgtccctgcaggaaaggattgatgctgatagaagagcctggacagatgtaatgagaactaaagaaaacagatggctggagatgacatttatccagggtcactttgtcaggccctaggacttaaatcgaagttgaactttttttttttaaccaaatagataggggaagggaggagggagagggaggacagggagagaaaataccatgcataaattgtttactgaatttttatatctgagtgttcaaaatatttccaagcctgagtattgtctattggtatagatttttagaaatcaataattgattatttatttgcacttattacaatgcctgaaaaagtgcaccacatggatgttaagtagaaattcaagaaagtaagatgtcttcagcaactcagtaaaaccttacgccaccttttggtttgtaaaaggttttttatacatttcaaacaggttgcacaaaagttaaaataatggggtcttttataaatccaaagtactgtgaaaacattttacatattttttaaatcttctgactaatgctaaaacgtaatctaattaaatttcatacagttactgcagtaagcattaggaagtgaatatgatatacaaaatagtttataaagactctatagtttctataatttattttactggcaaatgtcatgcaacaataataaattattgtaaactttgaaaaaaaaaaaaaaaaaaaaaaaaaaaaaaaaaaaccactgtttgggccgcctgggacccaaaaaaagttctcaacccactctccgcggggggggcggggcggcccaagtgggctagtcacactgggcccataagcgtggtcccaaagaaaaagccgggggtcatgacatagggggcgggtcttcctccccaataaaaaaggcccggggggcaaccgcagctcgtctggaacattccgag

SEQ ID NO: 7061 - DNA, 3644 bp, Homo sapiens
  misc_feature (23)..(23): n is a, c, g, or t
ggagaaggcgccagaaccccgcnggcacgagggagcagcccagcgtgcccattccagcgcccgcgtccccgcagcatgccgcgcccccgcctgctggccgcgctgtgcggcgcgctgctctgcgcccccagcctcctcgtcgccctggatatctgttccaaaaacccctgccacaacggtggtttatgcgaggagatttcccaagaagtgcgaggagatgtcttcccctcgtacacctgcacgtgccttaagggctacgcgggcaaccactgtgagacgaaatgtgtcgagccactgggcatggagaatgggaacattgccaactcacagatcgccgcctcatctgtgcgtgtgaccttcttgggtttgcagcattgggtcccggagctggcccgcctgaaccgcgcaggcatggtcaatgcctggacacccagcagcaatgacgataacccctggatccaggtgaacctgctgcggaggatgtgggtaacaggtgtggtgacgcagggtgccagccgcttggccagtcatgagtacctgaaggccttcaaggtggcctacagccttaatggacacgaattcgatttcatccatgatgttaataaaaaacacaaggagtttgtgggtaactggaacaaaaacgcggtgcatgtcaacctgtttgagacccctgtggaggctcagtacgtgagattgtaccccacgagctgccacacggcctgcactctgcgctttgagctactgggctgtgagctgaacggatgcgccaatcccctgggcctgaagaataacagcatccctgacaagcagatcacggcctccagcagctacaagacctggggcttgcatctcttcagctggaacccctcctatgcacggctggacaagcagggcaacttcaacgcctgggttgcggggagctacggtaacgatcagtggctgcagatcttccctggcaactgggacaaccactcccacaagaagaacttgtttgagacgcccatcctggctcgctatgtgcgcatcctgcctgtagcctggcacaaccgcatcgccctgcgcctggagctgctgggctgttagtggccacctgccacccccaggtcttcctgctttccatgggcccgctgcctcttggcttctcagcccctttaaatcaccatagggctggggactggggaaggggagggtgttcagaggcagcaccaccacacagtcacccctccctccctctttcccaccgtccacctctcacgggccctgccccagcccctaagccccgtcccctaacccccagtcctcactgtcctgttttcttaggcactgagggatctgagtaggtctgggatggacaggaaagggcaaagtagggcgtgtggtttccctgcccctgtccggaccgccgatcccaggtgcgtgtgtctctgtctctcctagcccctctctcacacatcacattcccatggtggcctcaagaaaggcccggaagcgccaggctggagataacagcctcttgcccgtcggccctgcgtcggccctggggtaccatgtggccacaactgctgtggccccctgtccccaagacacttccccttgtctccctggttgcctctcttgccccttgtcctgaagcccagcgacacagaagggggtggggcgggtctatggggagaaagggagcgaggtcagaggagggcatgggttggcagggtgggcgtttggggccctctatgctggcttttcaccccagaggacacaggcagcttccaaaatatatttatcttcttcacgggaaaaaaaaaaaaaaaaaaaaaaaaaaaaaaaaaaaaaaaaaaaaaaaaaaaaaaaaaaaaaaaaaaagaagaaccactccccgagaggggcgcccaccctaatgacgcacgcaccacacggagatctgatcgagggacaaaaggggggccaccaaaagaggagcggctgcagatattaatacactaggacagcggagcagggacgcgcagtttatcaagaacacgcactgcaccgcgcattgagagcgaggcaaaacacgcgcgcggcgacacccacgcgcggagaccacctgcgtggagagagagaagagagacacccctgatcctcgggcggggggggagggggagccacccacacgagggggggcgaacaagcaaagcccaagaaggagaacagatagatattatagaccgcccccacagagacggggcgggccaccaaaccatcaaacagacgaccatcttctcgcgaagaggcgaggcgaggaccaagcgcagcgggcgggcgcggcccagacaccacagccacacgagccgcccgagccaaaatccaccatgccccgcggcgccgcatcacccccgaccagcatgcagacagaaaataccaattctagccgctcgacgcgcccacacaacgcagcaagcgaacccgcacccacaagtcgagacctaatcactgccaacacaaccaacacacaaatacttctgatgttacatacgcacaccacgacgggggggggagggaccaacagaagagagtggcacatataactaacaaacccccaagcgcgccagacactcaccaacgacatacgatgaggatgacagcgaccgcaagacacacaggagcgacacgcggaacgaacaagccacctgaccaccaacactgcatgaacagtgctaacactcagagcgacatcacacgcagtcacaccagcaacagagccaacacacacccagcaaccagacaagcaggaaccaccacagcgacaaccacacgcatagccacgtcgagatcgaaccaacgagccgctgactcacccaccacctcgcctgacgacagatccagacgaacgacacaacgcgatgagcgcacgaacacagacgcaacccagacgcaccgaagagcgaatactgacacagccagagaatcacacgacctccacaagccggacgcgaggcgactaagccacacacgaacgacaaccgtaaaccagcgaccgccgccgccgaccgatacacaccgaacctgcgacacacgaaagataacacgtcaccacgcgcaacgagcacagacggctcgcaacacaacgagacagcgcgacagccgacggcgcaacagcgcccgcgacacaggcccgcacgacgcgaccgacgccacacgccagcgcagcccgagcacgcggaccgtccacgctccacacaccacaccaccggccccgcgcacccagcagtacaccacgacgaggccagccgcagccacacaccaccgctcgattcgcctcgcgccactcggacagcgtacgggatgtacctcctcgcaccacccgccaccgacgcgcccgcaacccgcgccacaaccacacaccacccgcacccgcgagacagagtgcccccaacacacgcgcacgtgcacgccaactgcgcgacgtaggcgggaggggccccggcactgcggcgcgccggcagcgcgcaggaccgcgagggcacgcctgcacggcgcagaaggaggcgaaggcatgacaccagcgacgcggccgaccggggcggccaagagagcgtcgggggcgagggcagcgaggtcgacgacgagacggcggggtcagacgaggtccgaggcgcgaagcacgc

SEQ ID NO: 7062 - DNA, 3991 bp, Homo sapiens
  misc_feature (1784)..(1815): n is a, c, g, or t
ccgagccccgcctgcgcgcggcctcctcggcgcagccatcctcttggctgccgcgggcggcaaagcccacggcatctgccatttgtcattcagcccgtcggtaccgccccgagccttgatttagacacggctggggcgtgctctggcctcactctccgggcgggtgctggacggacggacggacggggcagccgtgctcacagctcagcagcgcggggccttggcgcgcggggcgcttccccgggtcgccgtcatggccgcggaggtggcacgcccgagcggcctcgcctgagctccgggggtcgtcgccccgcaggattgttcctgcctgattcataaacatcgtgattggcttttgattgctgtcacgtctaatgtggctgctgcctcgtgtcacatctgaaactcatctgtacctcacttagaaagtttctttctataacacaagcctgaacatattgctctcctgattaacaactttcagtggttctgattagacaagacttttcgttgcagtcgacagaaacctaatgggaccattgaagaattccaaacagggtctttataagcttcttctgaaggtctcagacattcagccacggaactcaagtggaatttgtttggataacgtgactgatttcaaagcccggaccccttagacgtgcccatttggtgctgcaagtatttgcataggaatcagaggagttaatcttcttcattccctgacgatgtacaaggtctcttctcacaggtttgaatcttcagacaaacttctgggaggactcggtccctgcctcgcagcagatgttccctgtcactcagtagccaatccgggggacccaggacatgccccagctatagtgatgcagattacctttctgctcctgaatcgcacctgtgcctcagactttctcccctcagcttgagactgcatgtaaactgggatgtgtgaaagcaggaagcaaagctagtgacagctgagaggtccatgtctgggtagaaccaggcccacgatgctgcctctcccgtggtctggagttcagctgcagggactctgctgatgtgcccagcaccatcgttctgtttgtgcttaaatggcacagcatttggtcagcacatctgaaaaggaaggtgtgagaagcaaagcccatggccacgttcccctgccagttatgtggcaagacgttcctcaccctggagaagttcacgattcacaattattcccactccagggagcggccgtacaagtgtgtgcagcctgactgtggcaaagcctttgtttccagatataaattgatgaggcatatggctacccattctccccagaaatctcaccagtgtgctcactgtgagaagacgttcaaccggaaagaccacctgaaaaaccacctccagacccacgaccccaacaaaatggcctttgggtgtgaggagtgtgggaagaagtacaacaccatgctgggctataagaggcacctggccctccatgcggccagcagtggggacctcacctgtggggtctgtgccctggagctagggagcaccgaggtgctactggaccacctcaaagcccatgcggaagagaagccccctagcggaaccaaggaaaagaagcaccagtgcgaccactgtgaaagatgcttctacacccggaaggatgtgcgacgccacctggtggtccacacaggatgcaaggacttcctgtgccagttctgtgcccagagatttgggcgcaaggatcacctcacccggcataccaagaagacccactcacaggagctgannnnnnnnnnnnnnnnnnnnnnnnnnnnnnnnagcaccttccacaccatctcgccttcattccaactgaaggctgctgccttgcctcctttccctttaggagcttctgcccagaacgggcttgcaagtagcttgccagctgaggtccatagcctcaccctcagtcccccagaacaagccgcccagcctatgcagccgctgccagagtccctggcctccctccacccctcggtatcccctggctctcctccgccaccccttcccaatcacaagtacaacaccacttctacctcatactccccacttgcaagcctgcccctcaaagcagatactaaaggtttttgcaatatcagtttgtttgaggacttgcctctgcaagagcctcagtcacctcaaaagctcaacccaggttttgatctggctaagggaaatgctggtaaagtaaacctgcccaaggagctgcctgcagatgctgtgaacctaacaatacctgcctctctggacctgtcccccctgttgggcttctggcagctgccccctcctgctacccaaaatacctttgggaatagcactcttgccctggggcctggggaatctttgccccacaggttaagctgtctggggcagcagcagcaagaacccccacttgccatgggcactgtgagcctgggccagctccccctgccccccatccctcatgtgttctcagctggcactggctctgccatcctgcctcatttccatcatgcattcagataattgatttttaaagtgtatttttcgtattctggaagatgttttaagaagcattttaaatgtcagttacaatatgagaaagatttggaaaacgagactgggactatggcttattcagtgatgactggcttgagatgataagagaattctcgaactgcatgtattgtgccaatctgtcctgagtgttcatgctttgtaccaaatttaatgaacgcgtgttctgtaatcaaactgcaaatattgtcataaccaacatccaaaatgacggctgctatatataagtgtttgtcatatggaatttaatcgtaagccatgatcataatgttaactaaataactttatgtggcactgcctagtaagggaactatggaaaggtttggatttctccaaatctgggagaattttcaaaataagaaaataacctttatatgatatactatgactaggctgtgtatttcttttcagggatttttctaccttcagggttggatgtagtttagttactattaccatagccaacctgtagttttacatatacattttcttgtggagcaatagagttctccattttacagaagcattttaaatgtagtttgaatattttccacaagatgctgcaatgtgagttatcacttcatttatcttaaagaaagactaaactggttgtcagttacatctgacagaaaaaaaaaaaaaatcactgtgtaaccaggttaagtggtaaaataatccaggcgtcagtcaaaggcattttgctgactttaatattgattatatttttaacaggaatttaagaaaatattactggaattaaaaatatatatatattaaacaagaattttctttgctctgtctagcttaaactactactcaagctgcttaagttcttaagtattgtttgtaatcaccaataaataagtgcatttgtaattcatcagtcattattagcttttattaaaagaagattacgttttacaatgtaactataatctcttgaatttggtatcttattaatgagttttaaagatgtaaaacctaaccttttttaaagctccattgtcttatgtttttagaggcttttccgtaaacatatatcttacatataataaacttttcaaatcttgcaaattggcttgattaatttttcatacagctccacctgtgtcaacaacatgaactacatacactcagatcaagacagaaaacacttccggctccacctggctccctcatgccccctcctggtcattacttcccccacagaaaccactgttttgacctctactgagcatctattagaaacttcactttttttgagtaaaataattatgactactcatggaagcttgtatgcgtccattaaattcacagcactaagagcttattatttctaaaaatgcaatatttaaatcattctataatgtgacataatttatttctaatgtatagatca

SEQ ID NO: 7063 - DNA, 2059 bp, Homo sapiens; identical to SEQ ID NO: 6308

SEQ ID NO: 7064 - DNA, 868 bp, Homo sapiens
  misc_feature (163)..(225): n is a, c, g, or t
  misc_feature (669)..(669): n is a, c, g, or t
gtttgatgctgcattgagacaggagtgttgctactgatccagcctgggtaacagccagaccctgtctcttaataaacaaataagcaagcaggtatggaacattctcagctgggttctttaagctgtctgacaaggtttcgggttgtaatacatgcttctaatnnnnnnnnnnnnnnnnnnnnnnnnnnnnnnnnnnnnnnnnnnnnnnnnnnnnnnnnnnnnnnntgcatttagactattattgtattttattttccatgagattatgaggagattgatgatgttaaaaggtgagaagaaatagagaaccatttcgatttagtctgtagaaaatgtattttcacttttttgctactatctttgtaaatgaaattgcagaaaaattacttagactcccattggtttttttcaatttgaaaatgagtatcttcgaaccaggaatatcttggggtccactgggggctagctgtctagggcactttgctgggaagacttctgagaccacatctgggctctgcaggaaggagtgctgtaaccacctttctgggtctacctgtgatcaacccgggtgtgctgtggacatcagactgaggaggagtgctacatttgctgataccttagtatgcagtattggtagtgtagaagcttagatcctctggaatggcaganattcccagatttatattgatagggactagatttctggaaaaccatatcactgggaatatagacacccttttttatggagagggaattatggatttttaattttaaaagtctagtgtaatatatagtgtatattgagacatgaatctttccacttatcatcattcactaatttctgttaaaaaaaaaaaaaactcgtgcc

SEQ ID NO: 7065 - DNA, 626 bp, Homo sapiens
gagaatggctttgttggattcccctccctggcccacactcactgctacatctctcttccaaatcataaatgcaaaagatggccaaaggtgcatgctctgtgacacgtttcatagtcagacaaaaccggctgactgcttttacttttttttttttttcatttagaagaatttccttggcaactccgtctctccttagtcaacatcagctaacttcatcctccccctttatcaagacattgtttagagtaaataattcattaactggtacagcaatttcagaaccctttcacatagattcttaaggggaccgtttcccttgaagaatggggtacaccagaggacttaggaagagaagcgcccactggggcttggtcagactctgccaggagacaggcagctgtctgttaactgaccctacccagtaccttctgggattggattaacaaaaggggagttggttaggctggagcattgcaactcatttcttccctgcagtctctctcctgaggtggcccaggtatgtgtttgaggcctgggacttgctgccagcatgagacaagctccagtggggtccatccccctgattcctcagtgccccagcaccacctctttcatttgaaaacgtg

SEQ ID NO: 7066 - DNA, 3924 bp, Homo sapiens
  misc_feature (116)..(125): n is a, c, g, or t
  misc_feature (336)..(337): n is a, c, g, or t
  misc_feature (369)..(369): n is a, c, g, or t
  misc_feature (425)..(426): n is a, c, g, or t
  misc_feature (567)..(567): n is a, c, g, or t
ccgctatttaattctcgtggtggtcggcttctactctctagccgctgaccggccgccccgggggtctgggcgacacgcgcgtgattcggtgtgtggaggcacgccaatgcgttgcnnnnnnnnnnatcacttcctgcggcgcggaatgtggagtgtggggcgttgtagtgggggcatggagcacgtggtagaggggcttgttgtctgcgcaccggtactcgtctactatgttgtcgggtgcacagctttgcgagtgacgcgcacctcgtgtggtcgtgtagagtggaagggtagtctgcgcggggtgtgggtcactgtagagtacgtagtggcggnncccgcgggtgcgcgctgtctcgactgggtacntcgagctccctcggtggtgccttttgtgcattggagatattatttagttgttggcnntgctctctctccggttctagactaacagcggttggacagcagcgatggcagctttggtagtaggtagggctatcgtgtggtctgcgtcgggtggctcaggggcggctgcgtccccatcgtacgagctcacacacatgtctngtttgtcggtgtggtgtgcggccgcgtgctgcgcttgtgctctggggtgttggggtggtggcgtgggtgggggtaggtggctatatgtgacgtagggggggggtggtcagttgcctagcctgtagaggtgccgcgccgcttccgcccaccaatctggaggggggcgggggggcgggcgggcgccgcgcggatggggggtttagcattatcatttggatcacccttctccgccacgtggggggtgggggcccggctccggcctgcacccccaaccttcttatcttgttttcttatatttgttggtcaccggggtgcaagtcggagggaggctgacagggattcgctatattttttttatatttttattttttttttttttttttttttttttttttttttttttttttttttttttttttttttttttttttttttttttttttccactcagacacttatttaataactgtagaaatccaaaagaattagcatcaaatcttgaagtcgtgagtgaagctgcgggttggcttgactgggctcagccactgagctgcctcaaccggccaaggaacgggattatgatgactatgcggacttctatattgtcttcatctcattgtgtgtattatgtatttagtttcaataaagcatttgtaccaatggctctggagcttggaggaagactaaaggaatgtgtagtgattctgagtaagatgtagacctacgcagcagagctatgggggagaagattaacaaagtcctttcttccaatatcaggatagtcatgagttgcagtcccatccaaaaggtcattagggctaaaaggccctctgtgtctctgaactatgagattcttgctccctccgggggagccaaggagcttgcaactgggagtttgcagtgaatgagcaccatgacacagtcatttctgatccctctatccagctgttgtgaaaagatgaagcaaaggaggcaagaaaatgcttaatttagcagacaagagaatggacagtgtgatccttgtttgtgctagccattgggtgatgcaccacttttcagctccatgatgctacttgtttcccttcatatcctgtttccatttatgcccttcagttatggtctagaatcaaacaattctaaacctcagtgtcttatgaagctgacacttcaaaacctgcagaagcaggttgcctttgaggtatttagtcacaccaagtacaactagagctgtcatagacagtgtaggtttgcagagatccacctccttgcttactggcaattagggagttaatgctctaaaattaggcaaggagcctggactgttgccattttatggaagccacataagttgggcaggactccacaggagctgcccgtgacctgatgatagcaagagatttctatctctgagtcgtgaaatctgtctaccatgaaagagtctatgcttcacctgaggaataatcgattctggtgtgagttctggtctctcaggacattataaaggagggaaaatgatgtaaagggaagaaagaataccagagtgggaatccagttttgcctcaaactagctgggagactaggcaagtcatggaagacctcagtttctctgtctgcaagtgttatattggactggatggtcatgaagtccctttcatagccagagattttgtgtggctgctaaaatgcttacatctctgaggtcctaaagaaaacaggaatacccctacctcccagtttagactggatttactgagcgtggtgttctagtcccccccagttcctcctgatctaccctgattcccagggaggaatgaaagggtttgtggcatacaaaagtataaatgtagtgacagctgaccatttagtagaaacgagccttgcctttacacagctttatataacaactagaaaaggctatgttttctctctccccacccccaagcctactcctttaggcatgcaggtaactgccccccacgcccccccgccacctcccatttctcctcattccttcagggaaccctgactaaggaatgaagaagtcctacaaagaggaggtctcatgtaccaatctgcagccatttgatgatggcaggtaggtctgatgctaaaaagaggttgtgtccagcagaacccaattccataggaatccaaactccaaggctgggaggcagcaggtgctggggacaagctcactgctgagagtcggtctggaggacccactggaggatctcatggcggcgtagaccctggaccgcattgtcatagatggtgttcacgctggtgcagaggggctgctgctgcagctctgtcacccgacaagcaaccagccctcccgccacaccaaattagcaggcagcagcagcagcagttttcagccacaggcccaggaacgagtgtgcttccggggtggtggcttgcggggacgggagccagacttagatttcggggcctgatttgcttccttcttaggtttcttctcctgctcccgcttggctgctttgagggcatcatactcctttctccggcgctccttctcttccgccttctcccgcttccgcagttcccgctcctgagcttccttagctcgctgcttagcctcacgcttcttctctgcctcacgttctacttccagccgccgctgcctctcccgctcctgatctgcctgcacggccttcatgtgctgtaacaccttgtttgcacactgcttacactgcttctcatccaagcagtcacctgccaccttggccaggacaggatccagggggttatccttcaggtccaaccacttcaggttcttgagctgagcaaagctgacaggcaaggtgaccagcttgttgttgaggagatccaggtgctggaggttgaccagacggccaaagtctgctggcagctgctgcagcttgttcttactcaggtctagcttcaccaggtgtgtgaggccacagaaatccgacggtagagtagtcagtttattacaagacagatccaggatggtggcctttggaagggcagccagctccttcaccgggacctcattcaggtcgctgaggctcaggtccagttcgttgccgtccagcttgtcgcggaggttcccgcccttgctaccggccttggtcatggtaacgccggctgagcgggccccggctccggggttccggcgggtgaaaggagctgaaatgtcgcttgtcagttcagcggccccccacccaaacgacgacgcctgagccctccgtcgccgccgatgcgagaccgcctccgcccgctggccgcactccgagcctcgcgcctagctcccaccggtgccgcgacgacgaccacttccgtgtccacgtcaccttccgcgaccactgagat

SEQ ID NO: 7067 - DNA, 1855 bp, Homo sapiens
  misc_feature (1554)..(1597): n is a, c, g, or t
gaaactgagatatggttcccatacaccaggaacataaaccatgaagacagtcataaaatattaaaagcttaatataaacatataagctttgtcacggtttaagtacaggaagcttcggagttacaaatgcctactgaatacctgtttttgagaaacaaccacaatcattgaatttcacacgtgatatttcttttggctttggtgatgcccagggatgctcttcttgtcattcctgagagtgacaatgtctccttgtgagtcagagaggagagaaggggacatgccaagtcacatggcacccccagaggcttgagctccagagaaagatctcttcccagcttcccaaagtccagcttggaagtcaggacacgttttccttgaaaacaatgaggaacgacgacaggactaataatacattgtaggttaaagaggcttccatgggccagctggaaatccaaccaccatttattccaagttctaaacaatgaaagtacaagtaaacttttcaatgacaagcctgccataatttggggtctgcttgtacataattaattccaaagaagtgatacagacggtaattgctatgaattcagaaaagggaacattttcccaaagttatgtgggtctcagagccttcttgagaacattgagatggtctagaattgagggcatgtacgtaatgaaaagatgtcatttgggaaagaccaactagtctctatccaaaatttgctatacttttaccatcatggtacctataaaaatgacatctcgatatgatgttttgccagtctcagaaatcaagtgctgaccaactgaattgttatttcgttcacaggagtggaatttcatggttaagtcatatttgctagttattccttagactcctgagttcaggcatcagatacttgataaacatactagaccaactaacagatttatgcagctagctctattcttacaccagggatactctgtcagaaatgccaatggaatagcagccacaaggtctgtgtgctactttaaacaaatcaatatctcaaaaggaaaaggcgtcgtctgtcactaattagatcaaattaaaatgtgctgctgtatctcctttgaatattcatgaggtgctctcaatcagaagccctaagtctgagaccagaaacttaagccagaaaaaactaaatactgtgagattcagataactcggtcctttgccaactagaacttcaaagagaagaggaatagcttaggtgcagagtaagcctcctgaaaagatgacaaaatcagcttaatgcagaatcgtggggttcccacccaacctaaagatggatcgtcaaaatagcccaggagctgataatcctagactctgttgacacacaggacacatagtttagcctctcttgtgatttacttgtccttctgtctggcggaaaccatggagattacacttgtccttatttgaattctggacttcatttttcatgaatgaagtgattcaaaaaatacagctgggtctaagcatgaattctaactttcaaaaatcacagatcttaaaaagtctgnnnnnnnnnnnnnnnnnnnnnnnnnnnnnnnnnnnnnnnnnnnntgggaggctgaggcgggagggccacttgagccctggagttcaagaccagcctgggcaacagagtgagatcccatctctacaaaagactttttgaaaaattaggtgtggtggcacatgcttgtagccctaggtgctcaggaggctaaggtggaaggatcacttgagcccaggagttggaggctgcagtgagctatgattgcactactgcactccagcctgggcaacagagcgagatcctgtctcaaaaaaaaaaaaaaa

SEQ ID NO: 7068 - DNA, 459 bp, Homo sapiens
  misc_feature (162)..(182): n is a, c, g, or t
aggggctcgttggctttacggagacgcgcggagcaccctcaaggtgccacacgctcgcctgctccctgttcctacatcctgggcgtcttcccaggctgtcatataactcctgagaatagtggttcttaactctgtaagtatatataccctcgtacgccttannnnnnnnnnnnnnnnnnnnntttccatgtagatgtctgtgcatacgttcacacgcaaaactctccgcagttttggagatctccgtgttcagtcgtacctcacgtgatcttgcactgccaacattgagaaccctggccttagactatgcatctcccaaacttaattatctgtctccttcctattttcccaagacttggcaggcgtctaggtcagagttgttcaaactgagggttatgaactagtgtgtcacgaaatcaatttaataggttgcaaccaacatttttttgaaaaaaaaaa

SEQ ID NO: 7069 - DNA, 3657 bp, Homo sapiens; identical to SEQ ID NO: 5670
  misc_feature (1963)..(1989): n is a, c, g, or t

SEQ ID NO: 7070 - DNA, 5604 bp, Homo sapiens
  misc_feature (4008)..(4035): n is a, c, g, or t
  misc_feature (5495)..(5507): n is a, c, g, or t
tgagggctttgctatgacctcagtcccctcacggagccacgactgccccttgctgccacagcctttccaagaccctgcccggccctgccccatcctcagccccgagtcaccatgggcagcgtcagtagcctcatctccggccacagcttccacagcaagcactgccgggcttcgcagtacaagctgcgcaagtcctcccacctcaagaagctcaaccggtattccgacgggctgctgaggtttggcttctcccaggactccggtcacggcaagtccagctccaaaatgggcaagagcgaagacttcttctacatcaaggtcagccagaaagcccggggctcccatcacccagattacacggcactgtccagcggggatttagggggccaggctggggtggactttgacccgtccacaccccccaagctcatgcccttctccaatcagctagaaatgggctccgagaagggtgcagtgaggcccacagccttcaagcctgtgctgccacggtcaggagccatcctgcactcctccccggagagtgccagccaccagctgcaccccgcccctccagacaagcccaaggagcaggagctgaagcctggcctgtgctctggggcgctgtcagactccggccggaactccatgtccagcctgcccacacacagcaccagcagcagctaccagctggacccgctggtcacacccgtgggacccacaagccgttttgggggctccgcccacaacatcacccagggcatcgtcctccaggacagcaacatgatgagcctgaaggctctgtccttctccgacggaggtagcaagctgggccactcgaacaaggcagacaagggcccctcgtgtgtccgctcccccatctccacggacgagtgcagcatccaggagctggagcagaagctgttggagagggagggcgccctccagaagctgcagcgcagctttgaggagaaggagcttgcctccagcctggcctacgaggagcggccgcggcgctgcagggacgagctggagggcccggagcccaaaggcggcaacaagctcaagcaggcctcgcagaagagccagcgcgcgcagcaggtcctgcacctgcaggtactgcagcttcagcaggagaagcggcagctccggcaggagctcgagagcctcatgaaggagcaggacctgctggagaccaagctcaggtcctacgagagggagaagaccagcttcggccccgcgctggaggagacccagtgggaggtgtgccagaagtcaggcgagatctccctcctgaagcagcagctgaaggagtcccagacggaggtgaacgccaaggctagcgagatcctgggtctcaaggcacagctgaaggacacgcggggcaagctggagggcctggagctgaggacccaggacctggagggcgccctgcgcaccaagggcctggagctggaggtctgtgagaatgagctgcagcgcaagaagaacgaggcggagctgctgcgggagaaggtgaacctgctggagcaggagctgcaggagctgcgggcccaggccgccctggcccgcgacatggggccgcccaccttccccgaggacgtccctgccctgcagcgggagctggagcggctgcgggccgagctgcgggaggagcggcaaggccatgaccagatgtcctcgggcttccagcatgagcggctcgtgtggaaggaggagaaggagaaggtgattcagtaccagaaacagctgcagcagagctacgtggccatgtaccagcggaaccagcgcctggagaaggccctgcagcagctggcacgtggggacagcgccggggagcccttggaggttgacctggaaggggctgacatcccctacgaggacatcatagccactgagatctgaggggctgcctgggaaggcgagtctggggacctggcactgggaggcagggctctcccgtgcatcccccctgctcagcaattcagacccctctgagagacgccactccctgggacacagacccaggacccccgaggggagggcaggatggcctttccttccctctctgatgtcccagtgctcaccagccctgcagcccaccagacgtcaggccctgactcctctggctttcccaggagatgggtccaggggtctgtctgctttggttaagggctccctaaactttggcctttgttcgaaatagatatcctctccccctcctccagggaaggtggccacagcaagaacagcggctcccctccgcttctcatcccaacctctttttcctcctggacacattggaatgccttggaaatagaaagaagccatatatgaccagaagccttggaaccagccccatcagaacctgagctattttcctctggccgcagaggtgtaggggtggaatgagccgcggggaagctggctttgaaacctcagggctgtcccagccccggcaagccacaggaaggaggggagagacaggcagcccagcagtgtggagaccctgccacagccagaggagggcagagggagaatccaagggttgagagccagtggcgggtgatggccagcccctggggcccagcccctgtttactggttcttgcaaatgggagctgagcagcctctggacagccagtgacctttgacctcggtgaccactcttctttaagccatagaccctgaggccctgggctgggtgctgggaagggagggttgaaaccaccgtgaaccagagggtgtggctttccaggcaccctcagggagcctccccatctgtccagctggggccagaggctgggagtccctacctgcttcacgttggccggcggctactctggaatgtttttccctccccagaatcaagcttttgcttgatccagaagagcccatatcactaagatggcatatatgtgatctgggcattttcctcctctgcctacagccaggtttagcggcaaacctttcccccttagcaccttcagggctgagttctgggtttctagaggtcaggacggctcctcagagcgccaggaagccagagccccaagcaggacgaaaaagaggcatacacacagcagtgtgaatagcctggccaccagccatcctccctccacctcaagacccccatttgtcccagactaaaggatccagagagcagctccctttctcaggagcttgggcagtgccccagggagtccagggtttctctgcagatgtgcggagcgggaggcggtggtagagagagataaaaggtggagtttctctgttgtttggttcagggattttatttttaattttatgagacagggtcttgctctgtcccccaggctggagtgcagtggcatgatcatagctcactgcagcctcatactcctgggctcaagcaatcctcctgcctcagccttccaactagctgggactacaggtgcgcgccaccgtgcctggctaacttttcattttttttgtagggacggggtctcgttttgttgccaaagctggtctcaaacttgtggcctcaagcaatccacctgccttggcctcccaaagtgctgagattgcagatgtgagccaccgtgcctggccagatttttcttttattcttctttctttttcttttttgctttcttgtcttttcagaagcaagccagacctagcaggctgttccatgttctatttttgactgtagccacagctgctgttctcaggacagcatcccttcccacatgcctgcgcctgctgcctgctgagatgaggaggggagcgtctgggaacttgcgagtccaaggccagtccccatttctgcctcgctcaccgctggcccttagagaccccgaggtaggggtggggagatgcttctctccttgccccccgccctcatgggtcctagcccttccctgagtgcgggctgaggccagagtcaccttttctgtggctggctctaccttcctgtccctgaggttaaacggtgcccatcctgccatcctcaaacgacagaggagctttnnnnnnnnnnnnnnnnnnnnnnnnnnnngtcccaagctaggcttaaacctggaatctacaagccaaaagtccctccctgcctgagggcagtaccctccattgggcacagtccagacccaagtcaaagatgccccattccttgcgcctcagccctcagttccttcatttccaccaggccgtgccttgtttgagtttttcctcccagtgagactgccccacggagacagaggaaagggctggctccccctccccaggctggagaccccccccaactccaggaaagagcagtcagagtccagtgctctgcctcagacgttgcctgagaagaagtggctgccacacccaggggaaggccctgaggcggaggctgtgctccgccatggtgtcccggtaccttccatacacagaggagtgcagccttctccatatctccatggccctgtcccaggccggcccagatgtgtcccccccaggccttgtcctacgtccaaggtggcagatgtcttccctgggctgccaccagcccccgccccagagtggcccaccgtggcactagaatgcaagtatcctgcgaccttgcaacctcaccttcctgtgggtgttctttcctgccctgtccaaaagcgccctcactattcttggaccatgccagattctgcctctctggaaagaggctctggacagcagaagcctccaagcacagagcctggccccaggccccagacagggtgggcttcctgcccttccctctgggcacgcctgctggccgacccactgacccactcggatggaccaacctgctctgtccccaaaggacgcctgcaggagagagcagcactccgcatcacctcaccaaggatcggactctgcccctggacctgggaacgactggactgtcacggggttccctcctagctctcccagtgaactcctgccaggcacacacagcccctatagcactgagctcacatgggactgggatatgggggcatctcttccccagagaggcactcagtgagcctcctgtgcctggccccagtctgggccatctcttaggtgagacagttgcccgaaactaagccaggcctggctggaggagcagcagcttggggagagggatttccctgcagacctcaagccatcatgcggtgggtgctgccatgacagaggctgcacccctgggccagcggggctgctcacccacctcttgtgcaaggtggcctttgtgctgcgcctgcaggcagagctggagcccccagcagaggcaggctgggacggaccagcatctggaagatgtacatagttatttttctctttgtggtttcttgtttggtttggtttgcttttgacagcttcattttatttttgacgtcactttttggccatgtaaactatttgtggcaattttatgtttttatttatgaataaagaatgccatttctcacgccctctaaaaaaaaaaaaaaaaaaaaaaaaaaaaaaaaaaannnnnnnnnnnnnttggaaggcgaaaggggaataagaaggggcgtaagggaggaaggactggttgagaacttggtgcatgacaccaagatcgaaatttgcgttcggtaaa

SEQ ID NO: 7071 - DNA, 7744 bp, Homo sapiens
  misc_feature (549)..(565): n is a, c, g, or t
  misc_feature (1924)..(1940): n is a, c, g, or t
  misc_feature (4799)..(4821): n is a, c, g, or t
  misc_feature (4850)..(4864): n is a, c, g, or t
  misc_feature (6882)..(6916): n is a, c, g, or t
agaggctgcggtgagtccgccagccccagctgctcctcctcaagcccccaaggcccttcggcgggcccctgctgaaagaccggcatgccctattctgtgggcttccgcgaagccgatgctgctaccagctttctgagagcagcaagatcaggtaacttggacaaagctttggatcacctgcggaatggggtagatattaacacctgtaaccagaatgggttgaatggcttgcatctggcttctaaggaaggccatgtgaaaatggtggttgaacttctgcacaaagaaatcattctagaaacgacaaccaagaaggggaacacggccctgcacatcgctgctctagccgggcaggatgaggtggtccgggagcttgtcaactatggagccaacgtcaatgcccagtcacagaaaggttttacacccctgtacatggcagcacaagagaaccacttggaagtggttaagtttttactggaaaatggagctaaccagaatgtagccacagaagacggcttcacgcctctggcggtagccctgcagcagggnnnnnnnnnnnnnnnnncgcacctcatcaactacggcaccaaggggaaggtgcgcctcccggccctgcacatcgcggcccgcaacgacgacacgcgcacggctgcggtgctgctgcagaacgaccccaacccggacgtgctttccaagacgggattcacgcccctgcacattgcggctcactacgagaacctcaacgtggcccagttgctcctcaacagaggagccagcgtcaatttcacaccacagaacggcatcacgccactgcacatcgcctcccgcaggggcaacgtgatcatggtgcggctgctgctggatcggggagcccagatagaaaccaagaccaaggacgaattgacacctctccactgtgcagctcgaaatgggcacgtgcgaatctcagagatcctgctggaccacggggcaccaatccaagccaaaaccaagaacggcctgtccccaattcacatggcggctcagggagaccacctcgactgtgtccggctcctgttgcaatacgacgcagagatagacgacatcaccctggaccacctgaccccactccacgtggctgcccactgtggacaccacagggtggctaaggtccttctggataaaggggccaaacccaactccagagccctgaatggctttacccccttacacatcgcctgcaaaaagaaccacgtccgtgtcatggagctgctgctgaagacgggagcctcgatcgacgcggtcaccgagtctggcctgacacctctccacgtggcctccttcatggggcaccttcccatcgtgaagaacctcctgcagcggggggcgtcgcccaacgtctccaacgtgaaagtggagaccccgctacacatggcagccagagccgggcacacggaagtggccaaatatttactccagaacaaagccaaagtcaatgccaaggccaaggatgaccagaccccacttcactgtgcagctcgcatcggccacacaaacatggtgaagctcctgctggaaaataacgccaaccccaacctggccaccaccgccgggcacacccccctgcacattgcagcccgtgagggccatgtggaaacagtcctggcccttctggaaaaggaagcatcccaggcctgcatgaccaagaaaggatttacccctctgcacgtggcggccaagtacgggaaggtgcgggtggcagagctgctgctggagcgggacgcacacccgaatgctgccggaaaaaatggcctgacccccctgcacgtggccgtccatcacaacaacctggacatcgtcaagctgctgcttccccggggcggctccccgcacagccctgcctggaatggctacacccctttgcacatcgctgccaagcagaacnnnnnnnnnnnnnnnnntagtctgctgcagtatgggggctcagcaaacgccgagtcggtgcaaggtgtgacgccccttcacctggccgcccaggagggccacgcagagatggtggctctgctgctctcgaaacaagccaatggcaacctggggaacaagagcggactcactcccctccatctggtagcacaagaaggccacgttccagtggcagatgtgctgatcaaacacggtgtcatggtggacgccaccacccggatgggctacactcccctccatgtggccagtcactatggaaacatcaagctggtgaagtttctgctgcagcaccaggcagatgtcaatgccaagaccaagctaggatacagccccctgcaccaggcagcccagcagggacacacagacatcgtgactctgcttctgaaaaacggtgcttccccaaacgaggtcagctcggatggaaccacacctctggccatagccaagcgcttgggctacatttctgtcaccgacgtgctcaaggtcgtcacggatgaaaccagtttcgtgttagtcagtgataagcatcgaatgagtttccctgagacagttgatgagatcctggatgtctcggaagatgaaggggaagaactcatcagcttcaaggctgagaggcgggattccagggatgttgatgaagagaaggagctgctggattttgtgccgaagctagaccaagtggtggaatctccagccatccccaggattccctgtgccatgcctgagacagtggtgatcaggtcagaagagcaggagcaggcatctaaagagtatgatgaggactccctcatccccagcagcccggccaccgagacctcagacaacatcagcccggtggccagcccggtgcatacagggtttctggtgagcttcatggttgacgcccggggtggttccatgagaggaagtcgccacaacggcctgcgagtggtgatcccgccacggacgtgcgcagcgcccacccgcatcacctgccgcctggtcaagccccagaagctcagcacgccgcccccactggccgaggaggagggcctggccagcaggatcatagcactggggcccacgggggcacagttcctgagccctgtaatcgtggagatcccgcactttgcctcccatggccgtggagaccgcgagctcgtggttctgaggagcgaaaacggctccgtgtggaaggagcacaggagccgctatggagagagctacctggatcagatcctcaacgggatggacgaagagctggggagcctggaggagctagagaagaagagggtgtgccgaatcatcaccaccgacttcccgctgtacttcgtgatcatgtcacggctctgccaggactacgacatcatcggtcccgaagggggctccctgaagagcaagctggtgcccctggtacaggcaacgttcccggagaatgccgtcaccaagagagtgaagctggctctgcaggcccagcctgtcccggatgagcttgtcactaagctcctgggcaaccaggccacattcagccccattgtcaccgtggagccccggcgccggaagttccaccgccccattgggcttcggatcccactacctccttcctggaccgacaacccgagggacagtggggagggagacaccaccagcctgcgcctgctttgcagcgtcattggaggaacagaccaagcccagtgggaagacataacaggaaccaccaaacttgtatatgccaacgagtgcgccaacttcaccaccaatgtctctgccaggttttggctgtcggactgtcctcggactgctgaggctgtgaactttgccaccctgctgtacaaagagctcactgcagtgccctacatggccaaattcgtcatctttgccaagatgaatgacccccgagaggggcgcctgcgctgctactgcatgacagatgataaagtggacaagaccctggagcagcatgagaacttcgtggaggtggcccggagcagggacatagaggtgttggaaggaatgtccctgtttgcagaactctctgggaacctggtgcctgtgaagaaagctgcccagcagcggagcttccacttccagtcatttcgggagaaccgtctggccatgcctgtaaaggtgagggacagcagtcgagagccgggagggtccctgtcgtttctgcgcaaggcgatgaagtacgaggacacccagcacattctctgccacctgaacatcaccatgcccccctgcgctaagggaagtggagccgaagataggagaaggaccccgacgcccctggccctgcgatacagcattctcagtgagtccacaccaggttctctcagtgggacagagcaggcagagatgaagatggctgttatctcagagcacctcggtctcagctgggcagagttggcccgggagctgcagttcagtgtggaagacatcaacaggatccgagtggaaaatcccaactccctgttggagcagagtgtggccttgctgaacctctgggtcatccgtgaaggccaaaacgcaaacatggagaatctgtacacagccctgcagagcattgaccgtggcgagatcgtgaacatgctggagggttccggccgacagagccgcaacttgaagccagacaggcggcacaccgaccgcgactactcgctgtcaccctcccagatgaatggccatcagagggggcaagcccgaatcacacattcccccaccgtgagtcaggtgacggagaggagtcaggacagactgcaggactgggatgcagacggctcgattgtctcatacctgcaagatgctgcacaaggttcctggcaagaggaggtcacgcaaggtccacactcattccaggnnnnnnnnnnnnnnnnnnnnnnnggctagagcccggtggatctcaggagtannnnnnnnnnnnnnngtctgtaagtgagcacacgtggacagaacagcccgaggctgagagctcccaggccgacagggaccggaggcagcaaggccaagaagagcaggtgcaggaggccaagaacaccttcacccaagtggtgcaggggaatgagtttcagaatattccaggggagcaggtgacagaggagcaattcacggatgagcagggcaacattgtcaccaagaagatcattcgcaaggtggttcgacagatagacttgtccagcgccgatgccgcccaggagcacgaggaggtgactgtagaggggcccctggaggatcccagtgagctggaggtcgatattgattactttatgaaacactccaaggatcacacctcgacacccaacccctgaaccccacacactctgccatgcacacaggaggagagctggacctgagggccaccgcagcggtgcacacattcctctgggctgacggcatgacctctgtaagggactcctgctagtcccctcttggcatgaatgactgactgtagacgcatgacctccaggcttcaatcctgcctcttgcaatgacagctgatctgtcggaaccaggacacaaaagcagcaagaagcggggagagagagggatagaaaacaagcgcaggagagcctgcgaacgcaaaagtgaatgagggctttttgtggctggggatgggttttggttttggggttttttttttaaattgttttgacttcgtacagggtactttttcccaacctcatctgtcagaaatccatgtgggcttcctggaaagaaaaaaaaaaaaaagaaaactaggcatgaaatcagtttaacaccttaatcttaagccatgtcctcatctgcccaccctccccaacccacatacctccattccacttgtgacaccccctcgactccctggtgacgctcctcccagatcgctctacatgacattcaggacacacacacacacacacacacacacaccactcgcctccactgaatctacacacagattttactgtgacttctgaagctgtggataaattggaattttttatgttgtctctctctctgccaatttcaatacgaatcatcttccaatggaaaatcattaccttgaagagtgcattcggggttccttgtgttagggacttaagaatctgaggcgaggacccccaggcttacctgtaggactcaaagggagccaggaccccatctgaaagggtctcctctctcagttgggggacaggccggtggctgacccaggattgcaccagcatgtccatagagaagaggttttctatgtcttcaagcactatatcatagtccgtgttcaaagtgtaaactgtacagtaatcagccttgtgtatatgaaaaacaataaatactatgcaaaccaatagaaacatttagcagtacgtacagagcctgacagcgcagctcctgaggacttctgcggctgcaggagaaggagctgtggcctgtctttcagtgaaagaggaaggaaaggagtagggctagtgaatgtatctgccaggtcttagaagtcaggaccacccagggtctcccagagtgaacttggtgctctaagtccaggcagcctgcaggctggggaccctgggtgcaggtgccaggctcgaggctgttccctgtcctgcctcagtgcctcccctctgcccagcccctgtggcctcttggagaggcgagccagggggctccccggaccgcatggccggtgagagtagagtcggaggcggagagcctggacgcccagaggccggggccaggctctgggtcaaggcaggaaggagacagacagctggcagttcctcgcctcggtgccatcagggaggagccttaagttccactagagcctccggcccagggaggccagaatcagcacaatcccggccccgccctcgcggcgggcgcccccagggccaggagagagagacagggctggctcctctcgcccctggagccgcggtgtggacggcccggccccgtccgccccgccgnnnnnnnnnnnnnnnnnnnnnnnnnnnnnnnnnnnccttccaagtagcacagaagccccctccacgtcagagccccctggccgcggggcctgtgagcggagaggggccctgcttcccacacaaatccgccccggtgcacccccggccaggcaggccccggggcggcctaggcgccttgtcggccgggggtggggctgcttttgcttcctttagaggggcgggcagggagaggaagctctagctccgggcctgagtttccccgaggctgcgtcggaggagctgcagggcgagcccggacggctgccgtctccgccagaggccaccccggcccggcctccaggcagaggcgcccccctccatcctcccccatcccgggggccacggcaggggggccgcacagcgcggctgggaccgattcggtgacggcccaaggaagctgggcgcagggctcgcctctcccgcctcgatcctgcaccttcctctcccaggtcgctgctgcagccaacccagtagcccccttagcgcccccgcggaccccgcagctccagactccgctttggcacctctgctccggctggcatggctgcacgctccggctgctagtaggagccgttaggggaggagtttggggtctccacacgatgcctagagaatgctgcagtctgcacattagacgctttttagaagttttgaaattaccttgatttttttaattgttatgaaaatggatcttttcttgactctcccacatgctctgttatgggagagaatcccctaccctactctgatgtatagaccattctcccttcaccagccgaaccaatgtcaaaattaataaagaaatggactaaggcaaaaaaaaa

SEQ ID NO: 7072 - DNA, 1513 bp, Homo sapiens
ggcacgaggcaagagcaaaggggccagcacccccgctgcctccacgctgcccaccgccaacggggcccgaccggcgcgctccgggactgcgctttccggccccgacgcgccgcccaacgggccttgcagcccggccggccctcgcttggcggcggtgtcgacttctacgacgtcgccttcaaggtcatgctggtgggggactcgggtgtggggaagacctgtctgctggtgcgattcaaggatggtgctttcctggcggggaccttcatctccaccgtaggcattgacttccggaacaaagttctggacgtggatggtgtgaaggtgaagctgcagatgtgggacacagctggtcaggagcggttccgcagtgttacccatgcctactaccgggatgctcatgctctgctgctgctctacgatgtcaccaacaaggcctcctttgacaacatccaggcctggctgaccgagatccacgagtacgcccagcacgacgtggcgctcatgctgctggggaacaaggtggactctgcccatgagcgtgtggtgaagagggaggacggggagaagctggccaaggagtatggactgcccttcatggagaccagcgccaagacgggcctcaacgtggacttggccttcacagccatagcaaaggagttgaagcagcgctccatgaaggctcccagcgagccgcgcttccggctgcatgattacgttaagagggagggtcgaggggcctcctgctgccgcccttgaacctggctgagctcagtcctctggaggaagccgcccagtccctagaaggctggacagagggtctccaggcccttctgactttgttgcccagtggccaacgcccgagtgtctgttttcaggagccccaggtcaagccttgtcccttcctcctcccagcaacagtcccaacaagcaggcttctgagagcccgtggccgcacactggccgccacggaaaagcagtcttctgcacgggacggggagcggcaagtggacagactttgccacggtgctctgctgccccctcctgggcacgtccaggtgagggagggctggggctggcaccacgcacagtgcctaaccctagaaaagccatgtcttcagccgcacatgctcaggcagctaagggaggacgcctgcccacgcctgggacagaaggcttcactgctaatcacatcgtgcatctgtgtgtcctgggagctgcctgctcccggcccaccctctaggaggctctggctcaaacagcaatagggtcttcctcactgaccttggaggatgcctgtggccttgtgataaaatgtgggaaatcacagaaaacaccagaaacaacaactgccagcccggcctggccacaggtgaggtctgtgatttccgagcacgctccaccttgcactcaacttggccttttgattgcacaagcctttgttttcagtcctagtgaataaagttgtgttttctggaaaaaaaaaaaaaaaaaaaaaaaaaaaaaaaaaaaa

SEQ ID NO: 7073 - DNA, 3044 bp, Homo sapiens
ggcataggagacaaaggaagctctcccctcccccgcgctctggcggcgacgggggtagcctgacccggaggacctggacgaaacagggcggagaagaagctccgtctacagcctcctcaactcctgattccacagaaggagggaacgacgactccgattttcgagagctgcacacagcccgggaattctcagaggaggacgaggaggagaccacgtcgcaggactggggcaccccccgggagctgaccttctcctacatcgcctttgatggtgtagtgggctccgggggccgcagggattcaactgcccgccgcccccgcccccaggccgctcagtctcggaaccacgagaccagcaccctcagcccagcctgggcgacagcttggagagcatccccagcctgagccaatccccggagcctggacgacggggtgatcctgacaccgcgcctccatccgagcgccctctggaagacctgaggcttcggttggaccatctgggctgggtggcccggggaacgggatccggggaggactcttccaccagcagctccaccccgctggaagacgaagaaccccaagaacccaacagattggagacaggagaagctggggaagaactggacctacgactccgacttgctcagccctcatcgcccgaggtcttgactccccagctcagtccgggctctgggacaccccaggccggtactccgtccccatcccgatcgcgagattcgaactctgggcccgaagagccattgctggaagaggaagaaaagcagtgggggccactggagcgagagccagtaaggggacagtgcctcgatagcacggaccaattagaattcacggtggagccacgccttctagtggcggacctgctgtactggaaggacacgaggacgtcaggagtggtcttcacaggcctgatggtctccctcctctgcctcctgcactttagcatcgtgtccgtggccgcgcacttggctctgttgctgctctgcggcaccatctctctcagggtttaccgcaaagtgctgcaggccgtgcaccggggggatggagccaaccctttccaggcctacctggatgtggacctcaccctgactcgggagcagacggaacgtttgtcccaccagatcacctcccgcgtggtctcggcggccacgcagctgcggcacttcttcctggtagaagacctcgtggattccctcaagctggccctcctcttctacatcttgaccttcgtgggtgccatcttcaatggtttgactcttctcattctgggagtgattggtctattcaccatccccctgctgtaccggcagcaccaggctcagatcgaccaatatgtggggttggtgaccaatcagttgagccacatcaaagctaagatccgagctaaaatcccagggaccggagccctggcctctgcagcagccgcagtctccggatccaaagccaaagccgaatgagaacggtgtctctgcccgcaggacgcctgcccccagcccccgcagccctctggccccctccatctcttgtccgttcccacccacccccctcctcggcccgagccttttcccggtgggtgtcaggatcactcccactagggactctgcgctaattacctgagcgaccaggactacatttcccaagaggctctgctccaggagtccaggaaagacgaggcaccttggccgcggggcctgctgggacttgtagttgcctagacagggcaccaccctgcacttccggacccgccgctggaggcgccgtgaggcgttggtgtctcctggatgctactagccccaacgccggggctttgcatggggcccaggggaggcctgagcttggatttacactgtaataaagactcctgtggaaaaaaaaaaaaaaaaagtgcttccagaaccctccagttgttcacctttctgcactgaaaggcacttaagtgacactccaggagaaccttccccatctctggagaaggagctccctctgccatctgtgtaggttatgaaatgattgaggggaggccgggcgcagtggctcacgcctgtaatcccagcactttgggaggccgaggagggcggatcacttgagaccagaagttcaagaccagcctggccaacatggtgaaacctcatctctactaaaaatacaaaatttagccgggtgtggtggtgcatgcctgtaatcacagctactcgggaggctgaggcatgagagtcgcttgaatctgggagatggaggttgtagtgagccaagattgcgccactgcactccagcctcggcgacagagcgagattctgtctcaaaaaaaaaaaaaagaaagaaatgattgaggggaagatgctgacagaccacccattccagggttagccaagccttggcagccacttcccatgcctgtgctccaggcccacatcactaatggatcccacaccctgcctactgcgcagtcacctcaactgaggccaaacccacgtgtctcacggccctctgcatgccccttccaccctaaatctaaccaacccaattcccaatcgggcatgggttacggcccgggatcagacggtcccggacaaaaaggggggggggggaaaaaacgggggggggggacgaacaaaaaacaggggggaaaaagacaaaaaggggggcgaggggggggggggggccccaaaacccccaaataaaccccccctggcttctgcacaccccccgcggctgctcctcggggcgggggaaaaacgggggcagaaaaaaacgggcccgggggggcaacacacacctggacaacatcaccggggaaaagaaaaaacaaaacagggggggggcaaaaagggggggacaacgggggaaacgggggaccacaaccggccccctagcgacccccacaacgggcccaaacaccaacaaagggtgaaagcggcaagagtaaccgcccaccgcgaccaccggggggaaaaaaggagaaaaaccggggcgaaccacaaggcataacggtaaacgcggggggggcaaaacagcgggggggaa

SEQ ID NO: 7074 - DNA, 10820 bp, Homo sapiens
  misc_feature (2012)..(2021): n is a, c, g, or t
  misc_feature (2027)..(2041): n is a, c, g, or t
  misc_feature (10123)..(10172): n is a, c, g, or t
gcggcgtcggggcttcacaacaacagtggtggccgtagcagcggccgggccgggctgaggcgcaggcggggagcgggcccggcgccgcggcgctggtggatgctggggctccgaggcgacggccggggggcgggggccgaggcaggtataacggtaccggcggcggcagcgccgctgctcttcccttctcctcaggaggggggccaatggctagcgagaagccgggcccgggcccggggctcgagcctcagcccgtggggctcattgccgtcggggccgctggcggaggcggcgggggcagcggtggtggcggcaccgggggcagcgggatgggggagctaaggggggcgtccggctccggctcggtgatgctccccgcggggatgattaacccttcggtgccgatccgcaacatccggatgaaattcgcagtgttgattggactcatacaggtcggagaggtcagcaacagggacatcgtggagacggtgctcaacctgctggttggtggagaatttgacttggagatgaactttattatccaggatgctgagagtataacatgtatgacagagcttttggagcactgtgatgtaacatgtcaagcagaaatatggagcatgtttacagccattctacgaaaaagtgttcggaatttacagactagcacagaagttgggctaattgaacaagtattgctgaaaatgagtgctgtagatgacatgatagcagatcttctagttgatatgttgggggttcttgccagctacagcatcactgtcaaggagttgaagcttttgttcagcatgcttcgaggagaaagtggaatctggccaagacatgcagtaaaattattatcagttcttaatcagatgccacagagacacggtcctgatacttttttcaatttccctggttgtagcgctgcggcaattgccttgcctcctattgcaaagtggccttatcagaatggcttcaccttaaacacttggtttcgtatggatccattaaataatattaatgttgataaggataaaccttatctttattgttttcgtactagcaaaggagttggttactctgctcattttgttggcaactgtttaatagtcacatcattgaagtccaaaggaaaaggttttcagcattgtgtgaaatatgattttcaaccacgcaagtggtacatgatcagcattgtccacatttacaatcgatggaggaacagtgaaattcggtgttatgttaatggacaactggtatcttatggtgatatggcttggcatgttaacacaaatgatagctatgacaagtgctttcttggatcatcagaaactgctgatgcaaatagggtattctgtggtcaacttggtgccgtgtatgtgttcagtgaagcactcaacccagcacagatatttgcaattcatcagttaggacctggatataagagtaccttcaagtttaaatctgagagtgatattcatttggcagaacatcataaacaggtgttatatgatgggaaacttgcaagtagcattgcctttacatataatgctaaggccactgatgctcagctctgcctggaatcatcaccaaaagagaatgcatcaatttttgtgcattccccacatgctctaatgcttcaggatgtgaaagcgatagtaacacattcaattcatagtgcaattcattcaattggagggattcaagtgctttttccactttttgcccaattggataataggcagctcaatgacagtcaagtggaaacaactgtctgtgctactctgttggcattcctggttgaactacttaaaagttcagtagccatgcaagaacagatgctgggtggaaaaggctttttagtcattggctacttacttgaaaagtcatcaagagttcatataactagagctgtcctggagcaatttttatcttttgcaaaataccttgatggtttatctcatggagcacctttgctgaagcagctttgtgatcacattttatttaacccnnnnnnnnnngatacnnnnnnnnnnnnnnnttcagctttccctatacacatatttgtctgctgaatttattggaactgctaccatctacaccaccatacgcagagtaggaacagtattacagctaatgcacaccttaaaatattattactgggttattaatcctgctgacagtagtggcattacacctaaaggattagatggtccccggccatcacaaaaagaaattatatcactgagggcatttatgctactttttctgaaacagctgatactaaaggatcgaggggtcaaggaagatgaacttcagagtatattaaattacctacttacgatgcatgaggatgaaaatattcatgatgtgctacagttactggtggctttaatgtcggaacacccagcctcaatgataccagcatttgatcaaagaaatggaataagggtgatctacaaattattggcttctaaaagtgaaagtatttgggttcaagctttgaaggttctgggatactttctgaagcatttaggtcacaagagaaaagttgaaattatgcacacccatagtcttttcactcttcttggagaaaggctgatgttgcatacaaacactgtgactgtcaccacatacaacacactttatgagatcttgacagaacaagtatgtactcaggtcgtacacaaaccacatccagagccagattctacagtgaaaattcagaatccaatgattcttaaagtggtggcaactttgttaaaaaactctacaccaagtgcagagctgatggaagttcgtcgtttatttttatctgatatgataaaacttttcagtaacagccgtgaaaatagaagatgcttattgcagtgttcagtgtggcaggattggatgttttctcttggctatatcaatcctaaaaattctgaggaacagaagattaccgaaatggtctacaatatcttccggattcttttgtatcatgcaataaaatatgaatggggaggctggagagtctgggtggataccctctcaatagcccattccaaggtcacttatgaagctcataaggaatacctagccaaaatgtatgaggaatatcaaagacaagaggaggaaaacattaaaaagggaaagaaagggaatgtgagcaccatctctggtctttcatcacagacaacaggagcaaaaggtggaatggaaattcgagagatagaagatctttcacaaagccagagcccagaaagtgagaccgattaccctgtcagcacagatactcgagacttactcatgtcaacaaaagtgtcagatgatattcttggaaattcagatagaccaggaagtggtgtacatgtggaagtacatgatcttttagtagatataaaagcagagaaagtggaagcaacagaagtaaagctcgatgatatggatttatcaccggagactttagtaggtggagagaatggtgcccttgtggaggttgaatctctgttggataatgtatatagtgctgctgttgagaaactccagaacaatgtacatggaagtgttggtatcattaaaaaaaatgaagaaaaggataatggtccattgataacattagcagatgagaaagaagaccttcccaatagtagtacatcatttctctttgataaaatacccaaacaggaggaaaaactacttcctgaactttctagcaatcacattattccaaatattcaggacacacaagtacatcttggtgttagtgatgatcttggattgcttgctcacatgaccggtagcgtagacttaacttgtacatccagtataatagaagaaaaagaattcaaaatccatacaacttcagatggaatgagcagtatttctgaaagagacttagcgtcatcaactaaggggctggagtatgctgaaatgactgctacaactctggaaactgagtcttctagtagcaaaattgtaccaaatattgatgcaggaagtataatttcagatactgaaaggtctgacgatggcaaagaatcaggaaaagaaatccgaaaaatccaaacaactactacgacacaagctgtgcagggtcggtctatcacccaacaagaccgagatctccgagttgatttaggatttcgaggaatgccaatgactgaggaacagcgacgccagtttagcccaggtccacggactacaatgtttcgtattcctgagtttaaatggtctccaatgcaccagcggcttctcactgatttactatttgcattagaaactgatgtacatgtttggaggagccattctacaaagtctgtaatggattttgtcaatagcaatgaaaatattatttttgtacataacacaattcacctcatttcccaaatggtagacaacatcatcattgcttgtggaggaattttacctttgctctctgctgctacatcaccaactggttctaagacggaattggaaaatattgaagtgacacaaggcatgtcagctgagacagcagtaactttcctcagccggctgatggctatggttgatgtacttgtgtttgcaagctctctaaattttagtgagattgaagctgagaaaaacatgtcttctggaggtttaatgcgacagtgcctaagattagtttgttgtgttgctgtgagaaactgtttagaatgtcggcaaagacagagagacaggggaaataaatcttcccatggaagcagtaaacctcaggaagttcctcaaagtgtgactgctacagcagcttcgaagactccattggaaaatgttccaggtaacctttctcctattaaggatccggatagacttcttcaggatgttgatatcaatcgccttcgtgctgttgtctttcgggatgtggatgatagcaaacaagcacagttcttagctctggctgttgtttacttcatttcggttctgatggtttccaagtatcgtgacatattagaaccccagagagagactacaagaactggaagccaaccaggtagaaacatcaggcaagaaataaattcaccaacaagtacagttgtggtcataccatctatccctcatccaagtttgaaccatggattccttgccaagttaattcctgagcagagctttggccactcattttacaaagaaacacctgctgcatttccagacaccataaaagaaaaagaaacatcaactcctggtgaagatattcaggtagaaagttcaattccccatacagattcaggaattggagaggagcaagtggctagcatcctgaatggggcagaattagaaacaagtacaggccctgatgccatgagtgaactcttatccactttgtcatccgaagtgaagaaatcacaagagagcttaactgaaaatcctagtgaaacgttgaagcctgcaacatccatatctagcattagtcaaaccaaaggcatcaatgtgaaggaaatactgaaaagtcttgtggctgctccagttgaaatagcagaatgtggccctgaacctatcccatacccagatccagcattgaagagagaaacacaagctattcttcctatgcagtttcattcctttgacaggagtgttgtggtgcctgtaaagaaaccacctccaggtagtttagctgtaaccactgtgggagccactactgctggaagtgggctgccaacaggcagtacctctaatatatttgctgctactggagctacaccaaaaagtatgattaatacaacaggtgccgtggattcagggtcctcctcctcttcctcctcttctagttttgtgaatggtgctactagcaaaaaccttccagctgtacaaactgttgctccaatgccagaagattcagctgaaaatatgagcatcactgcaaaacttgaaagagcgttagaaaaagttgctcctcttcttcgtgaaatttttgtagactttgccccattcctatctcgtacacttcttggcagtcatggacaagagctattgatagaaggccttgtttgtatgaagtccagcacatctgtggttgagcttgttatgctgctttgttctcaggaatggcaaaactctattcagaagaatgcaggacttgcatttattgagctcatcaatgaaggaagattactgtgccatgctatgaaggaccatatagtccgtgttgcaaatgaagctgagtttattttgaacagacaaagagccgaggatgtacataaacatgcagagtttgagtcacagtgtgcccaatatgctgctgatagaagagaggaagaaaagatgtgtgaccatcttatcagtgctgctaaacatcgagatcatgtaacagcaaatcagctgaaacagaagattctcaatattctcacaaataaacatggtgcttggggagcagtttctcatagccaattgcatgatttctggcgtttggattactgggaagatgatcttcgtcgaaggagacgatttgttcgcaatgcatttggctccactcatgctgaagcattgctgaaagctgcaatagaatatggcacggaagaagatgtagtaaagtcaaagaaaacattcagaagtcaagcaatagtgaaccaaaatgcagagacagaacttatgctggaaggagacgatgatgcagtcagtctgctacaggagaaagaaattgacaaccttgcaggcccagtggttctcagcacccctgcccagctcatcgctcccgtggtggtggccaaggggactctctccatcaccacgacagaaatctacttcgaggtagatgaggatgattctgccttcaagaagatcgacacgaaagttcttgcatacactgagggacttcacggaaaatggatgttcagcgagatacgagctgtattttcaagacgttaccttctacaaaacactgctttggaagtatttatggcaaaccgaacctcagttatgtttaatttccctgatcaagcaacagtaaaaaaagttgtctatagcttgcctcgggttggagtagggaccagctatggtctgccacaagccaggaggatatcattggccactcctcgacagctttataaatcttccaatatgactcagcgctggcaaagaagggaaatttcaaacttcgaatatttgatgttccttaatactattgcaggacggacatataatgatctgaaccaatatccagtgtttccgtgggtgttaaccaactatgaatcagaagagttggacctgactcttccaggaaacttcagggatctatcaaagccaattggtgctttgaaccccaagagagctgtgttttatgcagagcgttatgagacatgggaagatgatcaaagcccaccctaccattataatacccattattcaacagcaacatctactttatcctggcttgttcgaattgaacctttcacaaccttcttcctcaatgcaaatgatggaaaatttgatcatccagatcgaaccttctcatccgttgcaaggtcttggagaactagtcagagagatacttctgatgtaaaggaactaattccagagttctactacctaccagagatgtttgtcaacagtaatggatataatcttggagtcagagaagatgaagtagtggtaaatgatgttgatcttcccccttgggcaaaaaaacctgaagactttgtgcggatcaacaggatggccctagaaagtgaatttgtttcttgccaacttcatcagtggatcgaccttatatttggctataagcagcgaggaccagaagcagttcgtgctctgaatgtttttcactacttgacttatgaaggctctgtgaacctggatagtatcactgatcctgtgctcagggaggccatggaggcacagatacagaactttggacagacgccatctcagttgcttattgagccacatccgcctcggagctctgccatgcacctgtgtttccttccacagagtccgctcatgtttaaagatcagatgcaacaggatgtgataatggtgctgaagtttccttcaaattctccagtaacccatgtggcagccaacactctgccccacttgaccatccccgcagtggtgacagtgacttgcagccgactctttgcagtgaatagatggcacaacacagtaggcctcagaggagctccaggatactccttggatcaagcccaccatcttcccattgaaatggatccattaatagccaataattcaggtgtaaacaaacggcagatcacagacctcgttgaccagagtatacaaatcaatgcacattgttttgtggtaacagcagataatcgctatattcttatctgtggattctgggataagagcttcagagtttattctacagaaacagggaaattgactcagattgtatttggccattgggatgtggtcacttgcttggccaggtccgagtcatacattggtggggactgctacatcgtgtccggatctcgagatgccaccctgctgctctggtactggagtgggcggcaccatatcataggagacaaccctaacagcagtgactatccggcaccaagagccgtcctcacaggccatgaccatgaagttgtctgtgtttctgtctgtgcagaacttgggcttgttatcagtggtgctaaagagggcccttgccttgtccacaccatcactggagatttgctgagagcccttgaaggaccagaaaactgcttattcccacgcttgatatctgtctccagcgaaggccactgtatcatatactatgaacgagggcgattcagtaatttcagcattaatgggaaacttttggctcaaatggagatcaatgattcaacacgggccattctcctgagcagtgacggccagaacctggtcaccggaggggacaatggggtagtagaggtctggcaggcctgtgacttcaagcaactgtacatttaccctggatgtgatgctggcattagagcaatggacttgtcccatgaccagaggactctgatcactggcatggcttctggtagcattgtagcttttaatatagattttaatcggtggcattatgagcatcagaacagatactgaagataaaggaagaaccaaaagccaagttaaagctgagagcacaagtgctgcatggaaaggcaatatctctggtggaaaaaactcgtctacatcgacctccgtttgtacattccatcacacccagcaatagctgtacattgtagtcagcaaccattttactttgtgtgttttttcacgactgaacaccagctgctatcaagcaagcttatatcatgtaaattatatgaattaggagatgttttggtaattatttcatatattgttgtttattgagaaaaggttgtaggatgtgtcacaagagacttttgacaattctgaggaaccttgtgtccagttgttacaaagtttaagctttgaacctaacctgcatcccatttccagcctcttttcaagctgagaaaaaaaaaaaaaaacacgtttgatactttgtacatcagatgcatcttatttaaaagggatacttttgtaaaagtaaaaccttgtataaagaacaaaatgtttcttaattttattgtggagttacaacttgcatgttccttactcctgttggcttgatggaacaggtgcattcacactatgaaacagaaagatctgtccaaggacacagcttgtatgaaagggttgaatttgggctccatcagtaatttttgacattttcaccaaaatatagtttgcactttttaatctaaagtcatcccttctgagtgaaatttgctcataaagcatttggatactaagccattatttgccattttgggtactttatacaaagaaaattcagccctaccctgcataatttgaagacacagcagaaagggggcttagggatgaggtcctggtttttcttgtataaataggagtcatgggcgttagttctgtagtaataacttcccagcacctggacatctcttccagagttatcccactggcttggtgtgtatacattaggggaggataatctgatgctaactttttttttctctttggttcttgaatagcttagtttctttaataacaagtcaaactttattacaacaataactgaagttattcttttaggttctcgtgaaattcnnnnnnnnnnnnnnnnnnnnnnnnnnnnnnnnnnnnnnnnnnnnnnnnnntgatataaaatgatggctatcaaatgattttccatacattgtactgatcaagttatacacccaggggtatatacactttcttcatgtttcttctttgtatatttggtgactgtatcgtcatagatgtacatattgtgtcggtagggctatgaggcatgttacaggaatgtaattttctcagaatttacactcactcgcagtcatttatttaaaaagataaaacaagataatgggttctttgtattggcactttgcaccagaaacatatcattatttattgatgtgattacttatttgttatccaccttgtactagtaagttttagcactgaattccttcttcactgttgtttgtatttatgaaattctgaaattatggggaatcagcgtaatgattaagttattcatcaccaggctgtaagcaatatcttgagtttgtagcttagaattgggaggatacttaacatctggaagacaagttcatttcatcttgagatcatggtgaaatattttggatatataaattccttaagctattgtaaccatgttttattgcaaagatgtaaaatatgccagatgtgtgtgagttggaaatcaaaaaaagaaaaataaaatatgcaaagaattcaaaaaaaaaaaaaaaaaaaaa

SEQ ID NO: 7075 - DNA, 927 bp, Homo sapiens
ggttctcaataccgggagaggcacagagctatttcagccacatgaaaagcatcggaattgagatcgcagctcagaggacaccgggcgccccttccaccttccaaggagctttgtattcttgcatctggctgcctgggacttcccttaggcagtaaacaaatacataaagcagggataagactgcatgaatatgtcgaaacagccagtttccaatgttagagccatccaggcaaatatcaatattccaatgggagcctttcggccaggagcaggtcaaccccccagaagaaaagaatgtactcctgaagtggaggagggtgttcctcccacctcggatgaggagaagaagccaattccaggagcgaagaaacttccaggacctgcagtcaatctatcggaaatccagaatattaaaagtgaactaaaatatgtccccaaagctgaacagtagtaggaagaaaaaaggattgatgtgaagaaataaagaggcagaagatggattcaatagctcactaaaattttatatatttgtatgatgattgtgaacctcctgaatgcctgagactctagcagaaatggcctgtttgtacatttatatctcttccttctagttggctgtatttcttactttatcttcatttttggcacctcacagaacaaattagcccataaattcaacacctggagggtgtggttttgaggagggatatgattttatggagaatgatatggcaatgtgcctaacgattttgatgaaaagtttcccaagctacttcctacagtattttggtcaatatttggaatgcgttttagttcttcaccttttaaattatgtcactaaactttgtatgagttcaaataaatatttgactaaatgtaaaatgtgaaaaaaaaaaaaaaaaaaaaaggccgcaagcccattccctt

SEQ ID NO: 7076 - DNA, 405 bp, Homo sapiens
gactttttttttttttttttttgtgttccattatacaggtgcagagtgtggaggtttgttacataagtagatgtgtgccatggtcgtttgttgcacctatcaacccattatctaggttttaagccccatatatgttagctatttgtcctaatgctttctctcccctcacccaccaaccgccctcaagtcagttttctaagagtattaatcaagaaaccatctcataatcacaccaaagcatatttctacacaagatataaaatactaggatatttgctaaagataaatgcatgccatacactgtaacaatgggaaatgacttcctacaggataacaatgctaaaattaaactctttgtaattaggtaaaggtggaacatggtggggtaatatattgtatatattt

SEQ ID NO: 7077 - DNA, 1270 bp, Homo sapiens
  misc_feature (189)..(189): n is a, c, g, or t
  misc_feature (803)..(809): n is a, c, g, or t
ccacaggcctgtcgttgtaggtgccaggggtgggaacccaccggccaggcagcctcagaccttgatctcacaggcagcgaggggcctccgtgctggcagagatcagggctgagcggtgttggctgaaataaataccaccccggagaagatgggcaaatgcagacataagcaggtgccaggggtcacaanaggggaatcaaagtctgctggtactggtggcaggcagctggtagggccccccaaggcaggcaggttctgggcctgggggccctgggagtgggctggtcctctgggcacgaggacatcaggaactcacggtgaggaagcaccggggtcacccagccccggcagccggaagctgaaagtgcatttgctgagagccatctgcttccccgcagggccttgtgatgtgagcccgaggtccccggggggcgaaggcagagggtgcgagagctgggacagtcttagggcaatttggggtcctgggtgccccaaagggaggccggggctttgtgtttcagagaaacgcagcctgttccgttttgaagttgcccaccggctggatgttttgctaatttagtccacatcgtgtttgctcagaaagaggcttttggccacacgagtgctttctgggaatgtttcttctcccgggaacagaatgtcaggctgtgggagctgccgtggccccaggaaaatgatgcccagctccaaggctggggggttggggtgcttggagctccagctgtagctaggaaggtgggggatctcccaagggacctccagctgtcccccctgcaccacannnnnnnttgttgagcccacacctgggtcccaagagtctcatcctagggacgggcagatctctgtcattctgttccttgggttcatttagaggcaggtgtcacctgggctgaggtctgcccacccaccatacagagtcacaggctgatagggacaggatgcagccagatggtgtcgtcctgctctcagcagggcagccgttaggaagagaagccgctctgactgtcctccgcctccccttcaggctcagggtctgagtcctccacctcaaggccggctccattcagcttcacgtcctgctgtaaaggccccggggccacagaagccaggtcatccccgtaggtggaggacgacgaggccggcagccgctgctaaaaacagaaacagacttttaaaaagcggttgtaggagagaaaggagacagggcgtcctgtctggccgccctgcaacaacagccccgtccctgccg

SEQ ID NO: 7078 - DNA, 1742 bp, Homo sapiens
  misc_feature (183)..(211): n is a, c, g, or t
  misc_feature (379)..(419): n is a, c, g, or t
tgaaataaatgtcctattccggtaaattttaaaggactgttttgacatgataatttgtctcctaaaataatgtcccaggacccacactaacaaaagtcaaaattgaaggagaaacctgaattcagactgattaaagaaggtgaaacaataactgaagtgatccatggaggtgcgttccttatnnnnnnnnnnnnnnnnnnnnnnnnnnnnntgattattttgaaatagtgttggtttagaaatattgaacatctgatattttctcttagttcttattttataaaaattgtgggaattatttcctcagctatgagttcttattagctggtcagaaataaaacatagttagcttttaatggatctagttggaattaatttnnnnnnnnnnnnnnnnnnnnnnnnnnnnnnnnnnnnnnnnntttgcatatacaagtgaggattgtggaataaaattgtaacattaatgtcagtataaaaggaaatattagaaacagtaggaaaaaatgaccattgtataagtctctgtctaataagccactccactactaggatttatgatagggctcccattccaatgatatagaactccctggattctcactaagtatttattccacatccagaaaacaagtatggcatggagagttaggatgtcaaatggccctctctctcaaccaagattcaggacatagctattaccttttagatccctattgatatgatttttgggggatatgttctaaaaatgtttatgattgaatcttaaatggtaatatttgtagaaatatagttaatcattacaatgtctagcttatggatgtatagtcacaatatgagggtaaatcaaatgcatttgtattcccctgcttttagagccaattattaaaaaatacaccaaaatcattgatggagtgcctgtggaaataactgaaaaagagacacgagaagaacgaatcattacaggtcctgaaataaaatacactaggatttctactggaggtggagaaacagaagaaactctgaagaaattgttacaagaagaggtcaccaaggtcaccaaattcattgaaggtggtgatggtcatttatttgaagatgaagaaattaaaagactgcttcagggaggttagtaaaaggacaacaactaacccccttaacaggttctagtgactgagttcaactttttaaagaccgagcaagcagattttttcttttaattgggttaaaaaaaaaaagacaacatccactgttgtcttaatagatggattggttcaatggtagttaatagttatgaagaaatgattactagtttaaacagtctttaaaaagttctatggtataaagtttggggagcaatgaatattttttttgctttgattcagataattttaagggccttttaagtatgcaaaagggaaataattgttaaattgctagctgttaaacaagcccaaatttgatatactttttatattttaaaaattatattcactgcccccataagagcaatcaaggcatgtctttaaattctatacatagatatagccaaaaatagtgcatttagtaacattcttttccaaaactatattcttgggaatgaatatctgtttcttctaacagtttgagtgataatctatacctgtagatataagttattttgcatataaaattaatcttaatcttttatggaatgttctctgtctgtggcattaaatgaaccttaagaacaaaaaaaaaaaaaa

SEQ ID NO: 7079 - DNA, 3960 bp, Homo sapiens
  misc_feature (1424)..(1424): n is a, c, g, or t
  misc_feature (3832)..(3847): n is a, c, g, or t
agcggagcggattccggaacattccacaagatggcgcccttgctttccaatcttcgggctacgggcggaggacgccttgccaggacgtcgacctcgctctgcaaggttcaggggccgacctcagacagaggctcgctctaggggcatgggcgggggccagacgggcctcgagtgggatcctggcacggttggccgatcggcccgggatcccggctgcgggcccgtgtctgccctagcgcgatgggctcgaatgcccggctccacgaatcccggcctttcacccccacggcctctcggcactgccccagctagacaccagcgagctcgtcacagcgcgggcaggcactgcggggcagctgcagacgagccttgtcatacggccggaggaggcctcgcctgcccgtgcggcgggctccgggcaccctgataccttgacacaggaggccccgggcggccgggaagggctgtgcgggggagggactgcgtctacacccgcgcccgactcgctcgggtcacggcactgccctgccaccaggcggctggggcgggggtgaggccaggcgtccgccctcgcgattctgttttctacgctgaggctcggagccttcgaagaacgggacagcggggcccacggacggctctgaaggccttcccgcgggcgcaagagctctcggcggccggcgtttgaggcgcgcggctccgatgggaagcatgacccgggtggcgggacaagacttgcttcccggccacgcgcgctcggccggccgtggggcggggcataggcgtgacgtggtgtcgcgtatcgagtctccgcccccttcccgcctccccgtatataagacttcgccgagcactctcactcgcacaagtggaccggggtgttgggtgctagtcggcaccagaggcaagggtgcgaggaccacggccggctcggacgtgtgaccgcgcctagggggtggcagcgggcagtgcggggcggcaaggcgaccatggagcttttgcggactatcacctaccagccagccgccagcaccaaaatgtgcgagcaggcgctgggcaagggttgcggagcggactcgaagaagaagcggccgccgcagccccccgaggaatcgcagccacctcagtcccaggcgcaagtgcccccggcggcccctcaccaccatcaccaccattcgcactcggggccggagatctcgcggattatcgtcgaccccacgactgggaagcgctactgccggggcaaagtgctgggaaagggtggctttgcaaaatgttacgagatgacagatttgacaaataacaaagtctacgccgcaaaaattattcctcacagcagagtagctaaacctcatcaaagggaaaagattgacaaagaaatagagcttcacagaattcttcatcataagcatgtagtgcagttntaccactacttcgaggacaaagaaaacatttacattctcttggaatactgcagtagaaggtcaatggctcatattttgaaagcaagaaaggtgttgacagagccagaagttcgatactacctcaggcagattgtgtctggactgaaataccttcatgaacaagaaatcttgcacagagatctcaaactagggaacttttttattaatgaagccatggaactaaaagttggggacttcggtctggcagccaggctagaacccttggaacacagaaggagaacgatatgtggtaccccaaattatctctctcctgaagtcctcaacaaacaaggacatggctgtgaatcagacatttgggccctgggctgtgtaatgtatacaatgttactagggaggcccccatttgaaactacaaatctcaaagaaacttataggtgcataagggaagcaaggtatacaatgccgtcctcattgctggctcctgccaagcacttaattgctagtatgttgtccaaaaacccagaggatcgtcccagtttggatgacatcattcgacatgacttttttttgcagggcttcactccggacagactgtcttctagctgttgtcatacagttccagatttccacttatcaagcccagctaagaatttctttaagaaagcagctgctgctctttttggtggcaaaaaagacaaagcaagatatattgacacacataatagagtgtctaaagaagatgaagacatctacaagcttaggcatgatttgaaaaagacttcaataactcagcaacccagcaaacacaggacagatgaggagctccagccacctaccaccacagttgccaggtctggaacacccgcagtagaaaacaagcagcagattggggatgctattcggatgatagtcagagggactcttggcagctgtagcagcagcagtgaatgccttgaagacagtaccatgggaagtgttgcagacacagtggcaagggttcttcggggatgtctggaaaacatgccggaagctgattgcattcccaaagagcagctgagcacatcatttcagtgggtcaccaaatgggttgattactctaacaaatatggctttgggtaccagctctcagaccacaccgtcggtgtccttttcaacaatggtgctcacatgagcctccttccagacaaaaaaacagttcactattacgcagagcttggccaatgctcagttttcccagcaacagatgctcctgagcaatttattagtcaagtgacggtgctgaaatacttttctcattacatggaggagaacctcatggatggtggagatctgcctagtgttactgatattcgaagacctcggctctacctccttcagtggctaaaatctgataaggccctaatgatgctctttaatgatggcacctttcaggtgaatttctaccatgatcatacaaaaatcatcatctgtagccaaaatgaagaataccttctcacctacatcaatgaggataggatatctacaactttcaggctgacaactctgctgatgtctggctgttcatcagaattaaaaaatcgaatggaatatgccctgaacatgctcttacaaagatgtaactgaaagacttttcgaatggaccctatgggactcctcttttccactgtgagatctacagggaagccaaaagaatgatctagagtatgttgaagaagatggacatgtggtggtacgaaaacaattcccctgtggcctgctggactgggtggaaccagaacaggctaaggcatacagttcttgactttggacaatccaagagtgaaccaggatgcagttttccttgagatacctgttttaaaaggtttttcagacaattttgcagaaaggtgcattgattcttaaattctctctgttgagagcatttcagccagaggactttggaactgtgaatatacttcctgaaggggagggagaagggaggaagctcccatgttgtttaaaggctgtaattggagcagcttttggctgcgtaactgtgaactatggccatatataattttttttcattaatttttgaagatacttgtggctggaaaagtgcattccttgttaataaactttttatttattacagcccaaagagcagtatttattatcaaaatgtctttttttttatgttgaccattttaaaccgttggcaataaagagtatgaaaacgcaaaaaaaaaaaaaaaaaactacctggatatgtttgctgcttagaattttgctaaaagggcgggccgttttaaaatatccttcgagggggcccaggtttacccgaaccccgtttttttggaaaaagggggtccctaaaggtggagtccaatttaaaacctaggcacttggcccgtgctttttaaacacgnnnnnnnnnnnnnnnnaaatggtaaacttggggaaactttgtgtggagggaacccttccttttcgggggggggggaacaaaatttgggacaaaaactttcctaacccgagaaattttagaggcctctaa

SEQ ID NO: 7080 - DNA, 469 bp, Homo sapiens
gcgtggactttttttttttttcagcctggggaatcccaaactatatctctagtaacaaggaaaccattttaccggaatttttattaacatggaaaagttctgtcaattaatcagacttcactgtccatatcactttcaaccttttgggaaggtagaaagatggaattctgaaactaaagttggtaaagttcacagagatcgtcaaacttgcatggtctaaggtatttcttctttctgtggttcatgagttagtaacagctaaaccaagtgtctaggaatattagctctgattctagaaatctacacttatttaactaaatgctgtaaggactcaggaaatccattctttcaacaaaagttactgaagactttccccattagtatcctaaacaatgtctgcaaaattggttttcatacctggataccttgtcttctaagtagacacggcagggaaagatcataggaaaaa

SEQ ID NO: 7081 - DNA, 2361 bp, Homo sapiens
gctctgtcagtaacacatgtgtaagagccgcggagggagcgagcgagccggctagaggccagcgccgccgccgccgccgcctccgagccgggcagcaacagccccggcagcggcgcaggctccagcgcgccgggcccggccggccgcagcccccgacgcctgggtgcgcctgcctgccggcctccgcaccgtccgccgccgctcccggggctgttgtgtctgcgactgctcccggccggaggtgcagggagctcagccgagccgccgctgccatcccggagcgagcaagcgagcgagcgcgcgggagggaggaaggcggcggcggaggaggaggaggagcgggaggagcgcgggcgggggcgggggccgccgggcgggggaatatacaaagtgaagccacattgccaaacttgcagcagcgattgcagcagttgctgccgctgcgccgcgcctgaagccgcgccgcgcgggccgagggctcctgcagctgctcgcgcgcagtcggaggcggagaaggacgaagactgagactgacacttctgctcccggccgcccggcacttacgcgggggccccccaacccgccccagagcaacgcgatttaaaaaaaaaaaaaaagccgcccttagccccctcctcccctttcctgcttctgcgagaactccctccctccctccagctccgccagcccaggcgccccttccctggaagccgagcggcttcgctcgcatttcaccgccgccgcctctcgcaatattgcaatataggggaaaagcagaccatggtgaatccgggcagcagctcgcagccgcccccggtgacggccggctccctctcctggaagcggtgcgcaggctgcgggggcaagattgcggaccgctttctgctctatgccatggacagctattggcacagccggtgcctcaagtgctcctgctgccaggcgcagctgggcgacatcggcacgtcctgttacaccaaaagtggcatgatcctttgcagaaatgactacattaggttatttggaaatagcggtgcttgcagcgcttgcggacagtcgattcctgcgagtgaactcgtcatgagggcgcaaggcaatgtgtatcatcttaagtgttttacatgctctacctgccggaatcgcctggtcccgggagatcggtttcactacatcaatggcagtttattttgtgaacatgatagacctacagctctcatcaatggccatttgaattcacttcagagcaatccactactgccagaccagaaggtctgctaaaaggtcagagtaatgcagaatgcgtgccttcatctcagatttgttcatcacaggtggatcccatgtgtcttcagtagacaagtcacctttgtagctagcaccagtgccagctccatgccattgcaccttctttagtcttgattgcccttcccgcatttattggtgtattaaaatgactgaatatgaacattaaggactccatgaacctgggctaatgggagactgtagagaaaatgaaaaaagatccaccagaggacatcttggggagggggagggagctgggggggagggaaatgactaatgaagctaattaaaagaagcattcaaatctgctttctaccctcattaacaattagcagggcactggccagagtttgtaccctgtgttttaccttaacaacattctatttgctctttgtatatttaagtgttgtaaggaaacgtgtttcaatcaaaactgaccatgagataaaggaaagagatgtggcttttgtgatattctatcacaaacacttattgtatctctgtaaaatacaatgtatgtatgcatgtaagtgtttttgtcctaatgttgctactcccatggcaaagaaaaaaaaaagaatgaaaaaaagaaaaaaaatttggaaaaaaaaatcaggctcatagcagctactgtgtagaaaattccccctacttctaatttgctgaatgaagaaaaaaaaaaatcttttatttgtgatattttcagagacatttgctctagtatggtgtatttaaataataaaaacttaaaagaaaaaataaaaaaaaaaaaaaaaaaaaaaaaaaaaaaaaaaaaaaaaaaaaaaaaaaaaaaaaaaaaaaaaaaagaaaaacagagacaagcacagagacaccgaaacagacgaacatacgagagatagaacagcgcggcatagagaaggacaagatgacgcgccccagactagaaaaccgagccaaagagagcagacacataatgaaaagagagcaaagcgaagggagaagaagaaacacaaaaagagcgcggtgaaaaagcacagagaaacgcagagcaggagagagcgacacaaaggcaaccag

SEQ ID NO: 7082 - DNA, 553 bp, Homo sapiens
  misc_feature (469)..(486): n is a, c, g, or t
atgtttatttacttttattttggctgcagagatacactggaattatagagggaggaaaggaaatggaacaagaaactattaatattatttttatctcaattgtttaatagatattgaattttaataaatattaataattgaccttttttcacagactctcatagtccccatccttgagggatttgaagtacaggaaagaaaaaaaataaaaatactttttgtaatatgggtagtcttcagtataatatacttttttggaggtcatggggaatttcaatcaagtgcttaaaaacagtgcttctaatttaatatttaccttcacaccaggagcaccgggctgtcccttcaatccatccagaccattgtgtccctgaaaggaaagccttattataaaatgctgttccatgatagtgtttggtcaaataaaaattgtattgtatatctttgccattaatctctcttgggtaannnnnnnnnnnnnnnnnngaaagaagtccagtgttccaggtcccagcaaactcagtctattgccctagataggtcacttaacttt

SEQ ID NO: 7083 - DNA, 2745 bp, Homo sapiens
gtagtgcctccctcagactctaacacactcagcctggccccctcctcctattgcaaccccctcccccgctcctcccggccaggccagctcagtcttcccagcccccattccacgtggaccagccagggcggggggcctgtccccgggaagtgcagatgggggattttgtgcgctaccactacaacggcacttttgaagatggcaagaagtttgattcaagctatgatcgcaacaccttggtggccatcgtggtgggtgtggggcgcctcatcactggcatggaccgaggcctcatgggcatgtgtgtcaacgagcggcgacgcctcattgtgcctccccacctgggctatgggagcatcggcctggcggggctcattccaccggatgccaccctctacttcgatgtggttctgctggatgtgtggaacaaggaagacaccgtgcaggtgagcacattgctgcgcccgccccactgcccccgctatggtccaggacggcgactttgtccgctaccactacaatggcaccctgctggacggcacctccttcgacaccagctacagtaagggcggcacttatgacacctacgtcggctctggttggctgatcaagggcatggaccaggggctgctgggcatgtgtcctggagagagaaggaagattatcatccctccattcctggcctatggcgagaaaggctatgggacagtgatcccctccacaggcctcgctggtctttcacgtcctcctgattgacgtgcacaagccgaaggacgctgtccagctagagacgctggagctcccccccggctgtgtccgcagagccggggccggggacttcatgcgctaccactacaatggctccttgatggacggcaccctcttcgattccagctactcccgcaaccacacctacaatacctatatcgggcagggttacatcatccccgggatggaccaggggctgcagggtgcctgcatgggggaacgccggagaattaccatccccccgcacctcgcctatggggagaatggaactgactccatcggtttcctccagggcagcgccccacttcgccccttccgcagtggagaagggcagccaagtttggggagggagggtggttatggaaaaacagaaccagcatacccccaggacccagctgtgctgggagcctcagtgtcctcacctgtcaagtgggcaagccatgctgatccgcagggagacaagatccctggctctgccgtgctaatcttcaacgtccatgtcattgacttccacaaccctgcggatgtggtggaaatcaggacactgtcccggccatctgagacctgcaatgagaccaccaagcttggggactttgttcgataccattacaactgttctttgctggacggcacccagctgttcacctcgcatgactacggggccccccaggaggcgactctcggggccaacaaggtgatcgaaggcctggacacgggcctgcagggcatgtgtgtgggagagaggcggcagctcatcgtgcccccgcacctggcccacggggagagtggagcccggggagtcccaggcagtgctgtgctgctgtttgaggtggagctggtgtcccgggaggatgggctgcccacaggctacctgtttgtgtggcacaaggaccctcctgccaacctgtttgaagacatggacctcaacaaggatggcgaggtccctccggaggagttctccaccttcatcaaggctcaagtgagtgagggcaaaggacgcctcatgcctgggcaggaccctgagaaaaccataggagacatgttccagaaccaggaccgcaaccaggacggcaagatcacagtcgacgagctcaagctgaagtcagatgaggacgaggagcgggtccacgaggagctctgaggggcagggagcctggccaggcctgagacacagaggcccactgcgagggggacagtggcggtgggactgacctgctgacagtcaccctccctctgctgggatgaggtccaggagccaactaaaacaatggcagaggagacatctctggtgttcccaccaccctagatgaaaatccacagcacagacctctaccgtgtttctcttccatccctaaaccacttccttaaaatgtttggatttgcaaagccaatttggggcctgtggagcctggggttggatagggccatggctggtcccccaccatacctcccctccacatcactgacacagctgagcttgttatccatctccccaaactttctctttctttgtacttcttgtcatccccactcccagcccctattcctctatgtgacagctggctaggacccctctgccttcctccccaatcctgactggctcctagggaaggggaaggctcctggagggcagccctacctctcccatgccctttgccctcctccctcgcctccagtggaggctgagctgaccctgggctgctggaggccagactgggctgtagttagcttttcatccctaaagaaggctttccctaaggaaccatagaagagaggaagaaaacaaagggcatgtgtgagggaagctgcttgggtgggtgttagggctatgaaatcttggatttggggctgaggggtgggagggagggcagagctctgcacactcaaaggctaaactggtgtcagtccttttttcctttgttccaaataaaagattaaaccaaaaaaaaaaaaaaaaaaaaaaaaaaaaaaaaaggt

SEQ ID NO: 7084 - DNA, 2305 bp, Homo sapiens
  misc_feature (712)..(742): n is a, c, g, or t
  misc_feature (1924)..(1935): n is a, c, g, or t
ttttttttttttttttttcaaaacctgtgaactaatcagctttattttaaaatatacaagtattttgaaatgtagagtttaaggctgttctatttcttaaactccacacaaaactgacaaatccataccaaattaatcacccacagactgccaatttcatccactaatttaacactacagcattcaggataaattaaaggatttaatagtatagacagttaaaaaaaaaaagcagtcatttgtaacatgctgctataaatagaacaaccagtttatggattactggtacaaaaagtttcaatggcaaacttagagcttccttaaaacaaacaaaaaaaatctagactgagttgaagcgttctccatctgggaaaaaaatgctcatcttgtgaattttaacactcagccaaatataaaatcatgttttagagggggaccatcactgatactgggacttaagccaggctttcaaggtttggattaggccgactgatgtggggaagggtggaggctgccagcaaaggaagaaatgagattcgaagttgggataacttgtcaaatgccaaggacaatgaggagacctgtttgttgggagcagagttacatattagaataacaggatttaaagggaacattttttaaaaggtatgttccaaaggaaggtatagttgaaagtactctatccagtccaagaaattcatataaatcagannnnnnnnnnnnnnnnnnnnnnnnnnnnnnntttccagtgtatacctttgcattttgttaaaggtcacaatcataccataggggctttagaaataatggtaactttttttaaaaaaaggtataatcacctcttatttataatgaacagctttagttaaaatatttggccagatgaaagctcttgagcatcaccatggactctcaggctttacatctctggagtattcctgagaaaatagtaagaaaaaaaagcaactttcatcactttttaaaagctctttttcagaggttgttcaggcttttcgagatgaaatatacagacaatactgcaggtaaaggaaaaactgagagactgcttcccacttaagctaagtaggaagaaaacaaaatgatctgctataaactgcaaggtacaacacaagtcaaaagtgaacagtgcatagtatccttcgttaagtgaaggaaaaagtgtgattacccacttgaagttcccattacatcatgagtgcaattcaatctggggaaaatagtttaatgtatcgctcagaaaaaaatagtttatatttttccatctgaaacagtgctttacgaggtccaacgccaccaagcgactttcattctgtcccatactgccgaaagtgaatctaaggcaggacggacgtccaggatggtgaactggtagtccttgttgacttcaccaccatcataataatcaatcacatatctaacttctgtcccgcaacggtttatgatccaatcgtgcctatcaaaaggcaactcataccccatccaggaacgaattcgtgcccttggtgaatactcttttgctttccctccaaaccggatcaatgatggaccacaaggacactctgcagcatgaagggcttcccacttcaaaatctccttccaagcctgctcgttattctgattgtgaattctaatgatattatacatatccttctgactgatatcctcatccttccacttccaccctttctttaacattgcattccagaacatctgctcagaagggtaaacccactttttctctgaatctgctctcggaatggatgactcttctctgacagtagacaatgcaaatggctgatctggagctggtgtttgatttggtggtggcatcagatttgaaggatctaggttctccttattctcagccgcagtgcccctaatgggacactccacgtactcatannnnnnnnnnnntgggcaggcacagaattatgttttcttctcacaggttgggccagatggctctgtattcactggacagcctttcattttcccttcatgcatcgggcatcctgaaggtggggacgctgaagcatttgaggcctgaactgcaacagcaggagcagatggagacaaacccatggctggaaacagtgttgactgtaaacaattttaaatttccacctaagccctcccccgggctgttccgggaggccggtaccgccttcagtcgccaacccgaacccagagcagcagtgacttcacgccgccgccgccgccgccgccgccttcctctcactcggtcaccgctgtggctgcggtcaccgccggcgttctcacgcac

SEQ ID NO: 7085 - DNA, 976 bp, Homo sapiens
gtcctcaagactagaaagcatgaagcaggggaggcgttttgaaagcttaaggacaaaagaccatgggcctggatggctgattccgggatcggcatcgtaatttgttgagaaggaggccgtgctgtgctgccagttattaatgggtttaatcggttgatacacagccctactggcctaaccagtagcccagggcccgagaggatttgcaggtcgtgtcagaatttgattgaagttccttccacttggcataaggagacaccatcagcctgattgagagggtcatggtgagatggagcccgccaaggtggcagcgctgagctgaccacgccacggaccatagagtgggagcctttcctgcccccttaaccgcagctaacatcaaaagcactggtatgggctgtctaactggaacctgagttggtctttgtaattacgattcttttgggtttattttgccagttcattatccacccccctgaaatcaggcctcccaaatttagcaggtgctggggaggaccccagggagtggcttgtgggggctagctggtgaaactaccctttcctttctgttctatgagtgtgatggtgtttgagaaatatggggctatggttcaggcgcacttcacatgtgcaaagatggagaaagcactcacctgcacatttaggctcagaatattgattgaaacattttgaaatatcaaaaataaaatgttatttttaaagtttctctgagatttcgcttaagttttggtagatattcttaaattttagtgacctcagtttgggaattcagtaagccaaatattgtatccttattattagttatatagaactatgccttagactttgttagaaacttctgccccaccttgactgactccttttccatttctggttgtacaaaatgaactgacactttaatgctgtggccacctttaaataaagtacaatgtgacaaaaaaaaaaaaaaaaaaaa

SEQ ID NO: 7086 - DNA, 2991 bp, Homo sapiens
  misc_feature (946)..(1001): n is a, c, g, or t
  misc_feature (1519)..(1537): n is a, c, g, or t
acattgcgcctgcgccggaaggaggctgttagcgtgctggactctgcggacatagaggtcacagacagtcgcctgcctcatgccactattgtggatcaccggccccaggtaccatctcatccttctatcggaggcctcctgcctcagggcaaactatgtacacctgtgtcctttattccagcaccgttggttagagacatgtaacgcacctccccaattgatccagggtaaggcacgtagtgctccgaagccatcccaggcctctggtcatttctctgtggagctggttcgcggttacgcaggctttggcctcaccttaggtgggggccgggatgtagctggggacactccgctggccgtgcgcgggctgctgaaggatggcccagcacagcgctgtggtcgtttggaggtcggggacctcgtgctccacatcaacggagagtcaacgcagggcctcacccatgcccaggccgtggagcggatccgagctggaggcccccagctccacctggttattcgtcggcctctggagacccaccctggcaagcctcgaggggtgggagagccccgaaaaggagttgtcccgtcatggccagatcgcagcccagatcctggagggccggaggtaacggggtctcgcagcagcagcacttccctagttcagcaccctccatcccggacgacgctcaagaagacccggggcagcccggagcctagtccagaggcggccgccgatggccccacggtttctcctcctgagcgccgcgctgaggatcccaacgaccagatcccgggttccccggggccctggctagtgcccagcgaggaacggctctcgcgggccctaggggtccggggggcagcgcagctcgctcaggagatggcagccggaaggcggagacactgagcctacctctgacagcgcggggctcactagttaccgccnnnnnnnnnnnnnnnnnnnnnnnnnnnnnnnnnnnnnnnnnnnnnnnnnnnnnnnncacttggtttggtccccccacccgctgctcagtggctctgaccacactcccctcgcagcgtcagtggtacgacccttccagccggctagcctgcgcttctggttctgggagggggaggtaataaaatggttcgatccggtcttgacttgccaggcgctcgaggcggggtggggctgcccgggccactctgtaaaggagcaggtgggtcgatcctgcttgagtaatcgctgacgagcttcgtgctgctgctttcctgcttgcacatgttatctttgcttctgccggtcctcagtctggcgtgctttctttttctcttcgccgtctcctgctcctctccttattcattaatttcacctttttggaggtgtacagggtctcacacataaattattgtgcatggcatggagaatgcagaggtgagcctgtcgtggcaggactgcaccagtgtatccacagtcctgtctcggaatcatacagaccctcagctgacgtcgggatagcaaggctagaagcctagnnnnnnnnnnnnnnnnnnngccagaggcctgcggtctcccacttccggcctagtctgccagcttttgctggcacgtaggctaccactctccgggcaccggctggggccctggagccccctttggggcggagtggggaaggtgtgagtcagcgcccctggacgggccgggctaaaaaaggctgttagaacctttgggccgtgcccccattttccgtacatggtgaagaactgcagccgggcttgtgtgcacacgccacacactgggcgttcccggcacgggagaggcccagagtttccttcaccctgggaacagagccctacagccagggcttatatggccagcgggactccaaccggggtagccgcgaggaaggcgctggcagaggacagaaatgtccagtcacctccgctgtcaccacatcctgagcactcggccccatccccccacaggagggaagctgtggtctgacggaatgggcaactttcgcccctgtggggaggggacggggaaggaagaaagaatttaaaggaccggaatgcgagagtccaggtggccttggagaggaaagaggaacggtgaagacaagctgcgagagctgggagctggagggtgaagaggtgaacacttgagtggttagagctgtagatagacattgtggggaagtgtgccagggtggcttccagctacccctgacttagagcctggtggaggtgtggttcttcagaagtcagcaaagggctcaagagccccagtctataaatacagtcacacccaggagactaataatagtaaccccagccaccatgtacttagttttatccctgctactggctttattgcaatatttattttcatctacaatagttgcacatctactcaactatccgaatatgtccatttcgcagaggaggaaagtgaggcccagggagtgcagatagctacagagaggagggtcaaagcacgatttaatcaaggcctgattcccaagtctgtcctctcaatttcacctgcattgacaagtattaattgaaccccaactgtatatgttgcactgtgctaggtactgtggagatgctggaggaacaagacataaaatttctttgtgtagctgatgtatgtaatgagagtagacagatgtcagacaaaaaagacgagaaaatgaataaataaaaaaccaggccaggcgtggtggctcacgcctgtaatcccagcactttgggaggccgaggctggtggatcacgaggtcaagagttcaagagcagcctggccaagatggtgaaaccccgtctctactgaaaatacaaaaattagccaggtgtggtagcaggtgcctgtaatcacagctactcgggaggctgaggcagagaattgcttgaatccaggaggtggaggttgcagcgagccaagatcgcaccactgcactccagcctgggtgacagagcgagaatcagtctcaaaaaaaaaaaaaaaa

SEQ ID NO: 7087 - DNA, 2843 bp, Homo sapiens; identical to SEQ ID NO: 6029

SEQ ID NO: 7088 - DNA, 2075 bp, Homo sapiens
catcgaaatacctgcagttcccaaatacatctggcctcacagggttgttggggcttaaatgtgcaaatacgagtaaagaggtgagagcggagcctgacagcgcacctgctgggcagggtctccaacactgcagcattttgggggaagctctcctactgggtggggtctttgtacagcagcagcatttcaaggtgggctgatccttctcatctggggaagccagggctgggcaggtgcctgagcctcatgagggtctcagtctagatgttgggccctattctccctgctgccttgggcttggagatgctcacaggtgagttctcatttgtgaagaggtctgtcttcctgaggaagcaggggaccctcacctgtgaaccaagtgtgccatgggagctgctccatgtccaggtccaggtctcctggtctgcagggaacggcacaagagggctggcctaggccaggaggatgtgatctgtcctagaagggggctgacctgcttgctgaccccgcttgctgctgcctggctgacctgactcagccacggctgttccgagggcccttctgagtacgaacttccagttggaggatctgggtgaagacccagctgcttgagatagcagcctctggctaggcccttggcgtggccaagccaatcaggcaggtttagagcctggtgcccctagacaggtcctgcaaccaagaacaggggtagccttcaaaggccagccctgccttccaaccaccgctccacagcgagggaaaccaaggctcttagggcaggaggcttgtccgagattagcacctgcgtgctccaggctctgagttctgtcccctcagctgtccggcccctgggtgctcactttaatctcaagtcattcatcttactattaaacgtgagcccagaaatattgttgtaatggagaacgatgcctgcgagtctccaaagccttccctcggagcggttccattaaatctctcctgctcagaaccacccaatccaattcatggagcgccacgtggtctacagcacagctggttagggccagcggaggtttatttatagctgggctcctggctgcctggtaaccggccattgccacctttaaagagtcttgggatattatctacctctattcagcttgaaatcgggcatgcagtgccttgggctggggctggcgataattaaatttctatcatgcacaattatggatgcaaggaatgaatgacatcccactggcatgtgaggattcgggcagcttctggactgaaatacagacttcataattgctccatccagactgggacaaagactgtggttgggagaacatgcctgaacaaagaaaaatgactctgcaggaccaaagttcttgacactaattgatctgccaaaaggggaagaatgagtccagctagaatccaggactaaccagcgggtgagcttcaaggaacaaagggcttccgctgggtcagcccacgagagggagctgcctgcaggtacctgggagggcacagccaccgtgtctgttccttgggagcagggctccttggaaggcagcgccagctccagaaaggccactgttccccctcccacccaccccaggtggcaactgcccctgcaggtcacggtcccagggcctcgctcggccggcctagagagagaaaagggaagatgcccaattagctggacgcccatggccccagggctgggggaccttgggttatcctgaaagaaggacaatgaccacctgcaaaggacgatttcaagtggagcctggaggaggcggcaaatagctcagtccgcactcaactcccttcccagccgtctggtggaaggtgaggagcaaaagctcatgctgctgaggcctggggccacccaggcaccggcctccccgtgctgagcagagacagcagccccctagctgcaggagtgtgccccgatgcgcacctgccgactttccttctgatgcagacatggtccccactggggcaaggctgcagttttcttttaaaaaacagatctttcaaaataaaaggggccttgaagaaaaaaaaaaaaaaaaaaaaataggtaaaaa

SEQ ID NO: 7089 - DNA, 3901 bp, Homo sapiens
  misc_feature (1469)..(1504): n is a, c, g, or t
ttttttttttttttttttgcctacttgtaaaaatgttttttttttttttttttttttttttttttttttttttttttttttttgctttcattgccattttaataaaaaaatagaaactcctatattacaaaatatattgcgtattgatgtcacaatggaaattttacaaacacaaactttataaaagggtgttaagccaattccagatgaagcaaagacatgaaaacaggaaagttctagaaaaagtctaaataaatgtattcatattctatgagtgaaaaagataattcaaaaggatgtccgtaaggctgggcacagtagctcacgcctgtaattccagcacttggggagggtgagatggggggactgactgagcccaggagtttgacaccagcctgggcaacatggtgggacctcgtctctacaaaaaatacaaaaattagtacggtgtggcagtgcccacctaaagccccagctactgaggagactgagacagaaggattgcttgaactcagaaggctgaacctgcagtgagctgtgatcatggcactgcactccagcctgggcggtaaaagtgagatcctgtctcaaaaaaaaataaattacaaaggactcatatatattaattttgtataattcctctaaaggaattattcaaagatctcaaaatatttcactgatatttaagtcctgtaagtttccatttcatacggtgatataagaccatgggtagaaaatatcagtgaataaaggaagacatgccaaatgtctcatctgaatattttgaccactccatgatcttttgtcctcgcactgctgcatagttaggtttcagaggctggtcttcgaattaggtcaccaaaatatgcagtgattgtcttcaatttgttgttaaggaagttctgttctatttccacttgccctccaggcccagctaaggatgccacctggtcaatatcagcatttcttggaagaaaataaacaatattattagtgatcttcttagaaagtctgaaaatttcaaagccatcaggagacatcattgttctaatgtcaaaggtctctgcagtggcatagtctggccctccccaaggtgggctgaggaacacaacatcagcctttaaaaaagaagccagcagcaagaaatctccacagatgaactctatcttatctgctatcccataaacttctgcattattgcgagcaagggcaatcttaacaggatcgatatcaatggcaatcactctcattcctgttaaggcaaactgaatggtatttcctccaactccacagaatgcgtctactacaacgtcacacttgaaggactgactaacacggccagcaatgtgttcagcaatcttctcgggtgtaactgaaaaccagccctctctgtccaacttaatcccatcatcaaaacgggagaagagcctgtacctctgggcccagtattttgccagctcaggaacagnnnnnnnnnnnnnnnnnnnnnnnnnnnnnnnnnnnngttcttcttcttgttcttcttctttttcacttcagcttcagtttctgcctggcgggagtctggcacttcttgagtaacacaatcctgctcatctggaacagttgctagcaagctgtctctttcatagttttctgtttcaagttcaccagctgaagatacgctctgacacttttcaggttctggattattagtctccagtaggtcatcaccttttttaacagacatgtcttgttcctctgaatcactacttgtggaagcgtcgtgcacattgtcatgagaagatgattcctgtgatgcttctgaatccatcggtttattaacccatgtgaggaatttttctaccttactcagaattttgcttttcttgaaaaatggtttttctgactctttggtaaagaagatgtgtttgtttttcatctttatttgtctgcgcatgtctaggtacttagacttaagcttcacattcttctctaaatacctgacctgccgatgactgaaatttgggattccaccatatttttgtcctgagccatacttgaatcctagaagggaaccactgtcatcaaagtctgaagctgggttttcatcaatgtccagttcatggctcctcttcagtttgcttggcttatgctcaggtgggtcttcctcactttcatctccatcagtaccactggcatgtggtctgtctttgcttgtgtttgctcctgaagacttctgtgaatcctcagctggtgggtctgtgtttgtattccccgatgagttgctttcctcattggttcctccattacgtggttcactttggccggaagcagggcactctcttttgctactaacttcacttagctgttgatgaccatcatgacttgtacaggaatctaattggctctgtgttacttcctctgaattcagttttatgttactaattccatcaagtatttcactatgatccttatcacttgtaccagagctatcattatcaaccataataggtgaagatggaaaagatactaagtcaactttcatgcatttttcatcgttcttgtcatcagcttctgttttagatgtgtaagtatctgtatcacagctttgcgaggcatcaaaagtccaaccctgagcttcccaatactgaaattgttccaaataataccaataaagttgactataatgttgctcccattcttcctttgtatcaggaaagttccaaggttcagaagatagtgcttgacccggatgtttttcttgccaactttgccacaatagtcctcctccatattcattccaatacttttcccatttctctgtaatttctagctttggagataatgtgttttcaactggaggattttctgtctcagtatcttttttgctttgaagttcatatgttctggtgttctcatactgttcaattgaagatggatcatctgaagccaaaatgtcgtcttcttcatattcttttctccaagattcttgcacaatttcatctaagtatttcttttgatgttttttcttttttattttaactttatttctagtattcatagatacctcaaaatccttatgtgcagttatcctaccaaattgaagtggcaatcccatacttctcatgagttcagcctcagaatcaagttcactttcatccaggcctatgcctttgctgtcatgtgattctgcagtaccacaggaataaccaccttcctcttcttctgtcgcctggtctcctgaattgttgccactgtctctgatgtaatagccttttaatcccaaattgtacaattttcgatcctccacaaatgccctggagcaaaggcacagtatcttacaatcctcccgctcctcagtgaagagaaacatttccgccacgcggctccacttctcgcagcacattttaccacttcggaggcagctctgacgtacgcagcccgggtcgcgcctgccgggcctccgctcggttactggagacttaaaacaggcctcgcccgcaagccctggatgaggagatagaaactggcccgcggccgctcgcgccaggaactagcccggacgctgccgccggaagtggctccgaggggccacgggaaggggcgggaccacgggcggtgtcacccccatcgcggcccgggctgcagcctccgcttggcttctttcacacgggttgcttcggaggaatccgccgtgcaaatctgtccgcccccttggccactgatcccccgaagagcttctgtcgccgctctagggtaaaggagagctgcccctgcccctgcccccgcctatccgaggtgcgtcggcccccgcgcttctccagcccggcatcgggtctggcgggactgggagcggcggaggccgcgcgcgtccggtctcccaggagccgcctcggaatccccagtctcttcgcgggca

SEQ ID NO: 7090 - DNA, 1273 bp, Homo sapiens
  misc_feature (114)..(115): n is a, c, g, or t
  misc_feature (122)..(122): n is a, c, g, or t
ccctttctctctcctcgtccctccgcccccacttccacctttcccttcctaccttcatcacagctttcctcataccagcgcactgcctccatcttccctcttccccccgtctcnnccgcccntgttttgggttttagtcatggacaacgctgaaacccctcaaatgcagacacaatgccatgctgggaaaaagccagtgttttcagagttctttgatataatgatatttcacatttaattgccagcaatgatgcaccaattattgacacattctcgtcagctaccattaggagcctataagcatgaaacagaatttccagagcttgaagtgaaaaccagagaaaaattagaagctgctaagaaaaaaacaagctttgagattgcagagcttaaggagagattaaaagcaagtcgtgaaactataaattgtttaaaaaatgaaatcagaaaacttgaagaagatgaccaagcaaaagacatataaacagttctcatgagaacttggtagtaagctaaactgaaaataaggtgggcttcactggagaaatggacttactgcaaatgctgtgatgtttcttagaggaacttcatatacagctgttgaccatgaatttcttagcaataggaatttgtactatttaagcaatctttaatggaaaatatgtgtgtaagaatggatgctatataggtattttaccaacccattttaagaaaattctatgatattaagcacagtttttaaaaatgtttattgtagtatatgtatagcttattacccttttgacaggcatcaaaatttcattataaagtattacttgtacaaattttgtacttctttagtggctagaattagtgaagaaacttaatgtgtatatttaatttcttcaagttcttacctgcccccatccttttttgtatatgatgtgtccagtaagtattcaataaatgtagtttacagatcctaaaaaaaaaaaaaaaaaaaaaaaacaacaaaaaaaacgagaaacaaaaacagggggggcacgcctcaaaaagaacaccccaagagggccacacaaagtacggcgcgaacaccacgcacttgctggtgcacaacggtgtggccccccatataaagagaccgtatatcaaaaacagagcgcgacaggggcggcggcgtaaaacaaacgcgcggacgacatcggggaaacacgagcgacagcaggcagactggtggaaagggaccacaaaaatgcgtgggcgagggaacacacacgggagcgcgaaatgacca

SEQ ID NO: 7091 - DNA, 2599 bp, Homo sapiens
taagtatatgaaaagatgctcatatgtcatcagggaattacaaatttaaaacaatgacataccactacacacctattagatgggcccaaacccaaaagattgacaacattaaatactggcataaatatggagcaacaggaactctcattcattgatggtgggaatgcaaaatagtatagccactttggaagacagtttggcagtttcctaccaaagcaaacatacttttaccatgtgatccagccatcatgctccttggcatttacgtaaatgaaatgaaatcttatgtctacacaaaaacctgtacatagatatttacagcagatttattcataactgccaaaatttggaagcaaccaagatgctcttcagtaggtgaatggataaactgtgggtcatccagacaatggatattattcatcactaaaaagaaatgagctatcaaggcataaaaagacctaccagaaacttaaattgcatattattaagtgcaagaagcctatatgaaaagataacatactatatgatttcaactagataacattttagaaaaggcaaaactatggagacagtaaaaagatcactggttgccaggggtcagtgtggagggaaggatgaataggtagagcacaggggatattttgggcagtgaaactattccttatgatactacaatcatagatgcatgtcattatacatttgcccaaacccacagaatgcacaacacaaagaatgaaccataatgtgaactatggaatttgggttctaataatgtgtcagtgtaggttcttcgattgtaacaaaggtaacactctggtgggggatgttgacaatgggggaggctgtgcatgtgcggggacaggggtatatggaaactgtatactttctgctcaatttcattgtgaatctaaaactgctttgaaaaacaaagtctattaagtcagtcagttaatccttcactatttcaccatctccttcaccttacggtgaaatcaaagtaacaaacagggctgcaaggccctatgcaatctggcctccttccccattcctgcctccctccctcctgcttactttgctccagccatgctggcctccttgccagccagaatgccaggcacactgcacctctgggcctttgcacttgctgtgctctctcccaggaacattcttccctgagagagcctccctggttccctgccatcttccttcaggtctttattcaaatgtcaccttcttcgtgaggtcttccccatcactctaattaaaaatgcagctttagctgtgcacagtggctcacacctgtaatcccaaagtgctgggattacaggcgtgagccaccgtgcccagcccaaaagcccatttctaatcgtccaccttcccagatgcttcccaggtgcaccgtgacccctgtgtgctgtgtggtcttttgtagggagaaaggatcaatcaagaaagggaaacccctgctcccatggagcttgccttctggtggaataagaaaattagtaaacattaattaataaataggtacttctctatgcaagtttacagaaaaataaacaaatatgtacataagaaagaagatggttttggatagcgataagtgctggatgaaaatgaaaccaggtgataagccagcgatgactccactgagggaggttgtgagcgttacacaacatggtcagaaaagaccccgttggacccaagtcccagctggtaagaaagtgccagcttcatgacggtggggagaagcattccagtatcaccgttttaaaatatgagcatcctaaatattacacaaaccatacttacgctaaatatttgggatctacactaaaaatgtagtgtagtgtaaggatggggtttcaccatgtgggccaggctggtctcgagctcccgacctcaggctatccacccacctcagcctcccaaagtgctgggattataggcgtgagccactgcatccagcctgggtgacagaatgagaccccttttgagacggagtcttgctctgtcacccaggctggagtgcagtggcgcgatctccgctcactgcaagctccacctcccgggttcacgccattctcctgccacaggctcctgagtaaccccttttgcttggttctcattctctctcttggctgccaccatgcaagacctgcctttcgccttctgccatgattgggaggcctccccagccacatggaactgtgagtccattcaacttctttttctttgtaaattacccagtctcgggtatggctttatcagcagcatgaaaacagacaaatatactgttgtttcttattaaatgttattggcttattttgaaaacaaaagcttaccaaatacatgtgattatgggaaggggccagaaagttacactgcaagtaaaaatatcagtaactatgtttactgggtggcgatggcaaaaacaatagtttttcctttttttttttttggagacaggatcttgctctgtcgcccaggctacagtgcagtggtgcaatcacagcccactgcagcctcgacctccggagctcaattgatcctcccacctcagcctcctgagtagctgcatctacagatgtgagccacc

SEQ ID NO: 7092 - DNA, 3364 bp, Homo sapiens
  misc_feature (2007)..(2007): n is a, c, g, or t
  misc_feature (2013)..(2013): n is a, c, g, or t
  misc_feature (2026)..(2026): n is a, c, g, or t
  misc_feature (2028)..(2028): n is a, c, g, or t
  misc_feature (2046)..(2046): n is a, c, g, or t
  misc_feature (2048)..(2048): n is a, c, g, or t
  misc_feature (2050)..(2051): n is a, c, g, or t
  misc_feature (2053)..(2055): n is a, c, g, or t
agcggagcgctggagccccgagtcacgtggctgcgggcggagatgaaggggggcgtgggacgtgctgcggcgtcctagctggcttacagggcggcggcggggtgtgtgtcctctgttaagagtgctactcgcccggggttgatctgtgcatgccactcctgggtcagacggtgaggtcggcgtctgcgaggacgcggcggtggagtagaagggcagccggagacaggcccggcgcctcttccgaggctagacggccccagcttcgcggggatcatggcattgtggtggaccgagtgcggggccactggcgaatcgccgcgggttcctgttcaacctgctggtgtccatctgcattgtgttcctcaacaaatggatttatgtgtaccacgggcttccccaacatgagcctgaccctggtgcacttcgtggtcacctggctgggcttgtatatctgccagaagctggacatctttgcccccaaaagtctaccgccctccaggctcctcctcctggccctcagcttctgtggctttgtggtcttcactaacctttctctgcagaacaacaccataggcacctatcagctggccaaggccatgaccacgccggtgatcatagccatccagaccttctgctaccagaaaaccttctccaccagaatccagctcacgctgattcctataactttaggtgtaatcctaaattcttattacgatgtgaagtttaatttccttggaatggtgtttgctgctcttggtgttttagttacatccctttatcaagtgtgggtaggagccaaacagcatgaattacaagtgaactcaatgcagctgctgtactaccaggctccgatgtcatctgccatgttgctggttgctgtgcccttctttgagccagtgtttggagaaggaggaatatttggtccctggtcagtttctgctttgcttatggtgctgctatctggagtaatagctttcatggtgaacttatcaatttattggatcattgggaacacttcacctgtcacctataacatgttcggacacttcaagttctgcattgctttattcggaggatatgttttatttaaggatccactgtccattaatcaggcccttgacattttatgtacattatttggcattctcgcctatacccactttaagctcagtgaacaggaaggaagtaggagtaaactggcacaacgtccctaattgggttttttgtggagaaaaaaatgttgtcccaagaagataaaaaatattgttaagtgtgccagttatttaaaaaaagaaaattgggccaggcacggtggctcacgcctgtaatcccagcactttgggaggccaaggccagcggatcacttgaggtcaggagttcgagaccagcctgaccaacatggagaaaccctgtctcaactaataatacaaaattagccaggcgtggtggggcatgcctgtaatcccagctactcgccaggctgaggcaggagaatcacttgaacccgggaggaggaggttgcactgagccgagatcgtaccattgcactccagcctgggcaacaagagcgaaactccatttcaaaaaaaaaaaattggtgacagactcaatgatggaatgatttgtcggaattaacacaaagcagattttattcatataatgactttttttaagagtctctttttttaaaaaacttaattctctaaaccgaaatggttcatgcttcttttaaaaatgattgtataaaatgtatgaatggttagcctggtgtggtggtgcacacctgtaatcccagctacttgggagactgagacatgagaatcgcttgagcctgggagcgcaggttgcaatgagccaagatcgtaccactgcactccagcctgggcgacagagcaagacactgtctctctctctctctccatatatatgtgtgtgtgtgtgtgtatatatatatgtatgtgtgtgggtgtgtgtataccatgtatccacatatatacacacaatcanacatanacacgggcacacncncccccccccacccccccncngnncnnnacacatatatatatatggatatggttatatatatgggatggtttggttggtcccagcaaagtatatgaaaattaaagttctgtgataatgacaaaggaattgctgttactgtactgcaaatatgctgtgggttctcggtgttcaaactcttctaaggaaggacacacagtagctctctgcttgctgatagatggtttcccagtgtgagatttgttattttgatcagagtattcaaatcagaatttaaatctagtgtttctattttagtttagcttcctgatttatataaatgaaatctcgatttataaagtataataaagatgactgtaagacaaaaaaaaaaaaaaaaagtatgatttttttctagtagaaaattgatgtaagaaatcatacattattcatacatttataggtcatctctttgagttttcagtgaactatagaaactatatggagttaaaaaacaaaacggcagccaatctcagtggctcacacctgtaatcccagcactttggaaggttgaggcaggcagatcacctgaggttgggagttcaagaccagtctgaccaacatggaggaatcccgtctctgctgaaaatacagaattagccaggcatggtggcacatgcctgtagtcccagctgctcgggaggctgaggcaggagaatcgcttgaacccaggaggcagaggttgtggtgagccgagaatcatgccattgctctccagccctgggccaaacccagaagctgaaaaacgtcccatcaccaaaacatataagacaaagcaatagaaaagcaccaaggattgaaaagtgcgacacaacaaacaagggaaagactgaacagaacatacaccacaccgcgcgaaaaacacgacggagaccatcacgatcggggaacaaaaggcaacaaagaaggagaaagcaggagggagacaaagacaaacacacaaaaaagaaacaacaaccagacaacaaagaaaacgacacccaaaacaaggagcaaccagcacaccacagaaaccaccccaaccacacacgcaccaccagcaccaggaaaacgccagacaacatacaatgcacggacgaacaagaacaccgacaccagacagacaaaacgagagccaaccaaaacacaaaccaccacacccagaacaccgcagaagacccacacaaaacaacatcaaaaccaagacacacaaagcagcacgcagccatacacaacacaacgacacacagcaacaacaccaccaaagcaccaccacgacacaaaagaacaacacacggagcaaccccccaacacggccacc

SEQ ID NO: 7093 - DNA, 1979 bp, Homo sapiens
gcaatgccgcatttttttttttttttttttttgcggccgcaggaattttttttttttttttttttttcctttcattttctttttcttaaaaaaacaaaatgaaaccaaaaaaaagcctgaatcaaaacctttttaggagtagttacagatattatagggatgggggcggggggcactaaaacaaaagagaaaagcaccagtgagatgtctttcccattttcttctctccgccacggaacacgcacaccaacagagcccaggccactttttgccctcttcccttggaaaaaggaggaacagaagatttaagaattttgaaaggatttttttcttgtgtgaatgtgtgtaaaagtcaatgctataaatctaaaacgaggtctgtttttttaaaaaagttctaaaacaacaggaggaaaacacatggaaagaaacccctcgcggagacctgcttccttacagatggaggctcttttggaggagagtgtgaagggcagagggctccctgcgccggcaggacctgcccggccaccctccactcccctgccatcacccctcctctctccttttaaaaagcaaaaccccactcttgggactcgggtcgtcctccgatccctgctggaaagtgcggcggctacttggcgtcgagcttggccatctcctgcacgtagatgccgatgctctcgctgtcgaagagcaggaagtacacgttcttcagcgaggacgcgctcgagtcatcaaagtgggctgagatggctttgagggtcacctgggccgcagtctgtttgggaaagcagtttctgccgctggggaaaggcgggaacgcgacggactttagcttcttgtcctccgccgctgacaggcagtttttgatggtctcttcaagctgttcttcacatttgtcggagccccactgagggatgtgacagtggatgacaaatttggctgcgagtccactggattggctgacggcggcttcggcgacttccaaagggccttgggatttgcgaagctcctttaccgtttccaagaactcttttcccccagccttttccaaggctttacctatatcttctttgaggtcaatttcggctgtggttgggtggacaatgccctccactctcatggagccaatatggctgatgtcactctgggttaaggacagcttctgtcccagaacaaggctcttagaagacagaatggtgaatccatcccctggcccatcttcagaggtggaatttgaagttccttctttatcgctgtcctttggtttggactttttggacgtccgtggtttggcagccttggatttcttcccccccttcttgcctgacgtggccttcctgcctcttttctctgggggtggggagaggatcgtttccgacttgcctttggtccctcgctttttggccagcagttcggggtgaattctgggcaggacgcctccactggcgatggtcactccttttagcagctggttgagctcctcgtcattggcaactgccagcaagatgtgtctcggggctatccgggccttcttgttgtccctcgcggcattgccggccaattctagaatttccgctgccaggtactcaatgactgccgccatgtagacaggggcgcccacgctgatccggtacttgaacgtccctttcttcagataacgcatcagcctccccactggaaagatgacacctgccctagctgaacgggacagcttggacattttcttcttcccactccggcccgacatcttgcttcagtttccctctcagcttgctgacacagtggcctcccggcactaacacaatgctggtgctgcgccgcctgctcccggcgcccggtgccctctgcgcgcccctccacgggcgcaggtttggcccacgcggcgccggtgccgggcaggactctttgcctttctttgggttctatctgtgcgtgtcaatggcggccaagcggcaagttctctgcggacgcgtggg

SEQ ID NO: 7094 - DNA, 599 bp, Homo sapiens
cgtgatccccgttggaaaataatcaatgtcacaaatgactgaagacttcataataaacacagaattatagagggaaaatatttccttttttttttaacatacatagactttagttcctttattatttttcagaaattgcttatactttactacaactatgtattgagcatcttattgtatgcaaactttgttatatatttctatataaatacctatgtaaatatgtgactgtttcctgagtgcatttgaatatacaagggtatatatgtgtgtgttgccttttgttcaagaggaaataagtgaatgcaaagaaaatgccttaaatttctaaacactagtttgtctgcagatttaatctttctctctacttctttgaattatagaatctcaggactgaagagggaggtctttaaaattccttttcaattcaagaaagtcatctaccaaatctgaccaaagaaactatctgaatcatgcttaacctcctccagtcatggagagctcactacctaccaggatcccttccccgattagaaagatttttctgacaatatgtccgagtgtgctctttgcaacgaccaccatgacttttaattctg

SEQ ID NO: 7095 - DNA, 812 bp, Homo sapiens
cagtaaggtttatattctaaatgtatttttagcaattaaatatcaaatctaaaccaattagtctaatagaggagacttgttcaatcacatgtttatgtttttctctctataaaaagaatctaaattggctttttttcactatgcagccattactgtatttctggactgctcccagtttgtcagctgaacagttctgggtgcagcttgtccgatgacggatagcacagcccctcaatctgagtgctcagcagagtgcttgtgaaggcagcaccacagcaacagttgctcagagggaacggattcaggagccttgatttagcaatagagtccagggttttcagctcagtgtctttagcctgtctctgctggtcatgtcagttacgtactattccatccaggaggtgctgtttacattgtagtacatacacagtcattgcctaatgagtcatacagagagaaaagtaagttataaattatgtcccccatttgctgcaactctcagtggtaagaatgattcagtgcagctataggagactacttccattggcatgccacctgcctaaaatacacaattttgttaagatatacaataaaattattatgctaatagcaaatattttatgtagctcactatgttccacatactcttgtaagtgcttcatgttagtccccagtaaacacctggttgggggaggtggctcatgcaagtaatcctagcattttggaaggctgaggcaggaggatctcttgagcccaggatttttagatcagccacagcaatttaatgagaacctgtctttaaaaaaaaaaaa

SEQ ID NO: 7096 - DNA, 752 bp, Homo sapiens
  misc_feature (138)..(162): n is a, c, g, or t
gagtcagggtctttctctgttgcccagactggagtgcagtggcgcaatcatggctcactgcagcctcaacctcccgggttcaagcagttctcccacctcagtctcctgagtagctgggattataggcaagtgccaccnnnnnnnnnnnnnnnnnnnnnnnnntttttttttgtagagacaaaggtctcactatgttgcccaggctgatctcaaactcctggactcaagcaatccttcgccttggcctcccaaagtattgggattacaagcatgagccaccacggttggccagtactttcttaatctctttaggggcagctaaaggaaattctgaatatgtgactcttagatccaaccaccatctctcaagaagaaatactactaccaccatttctgccctcaaaactcactaccgtgactatgggaggagggtagcacaggtctaacggtggctcttccagaagttaacaaattgctcatgaaattacataagaagccaagattcagggccacttctgcatctggaagtacagaagaagacaggtcattctgttaggcccttattgctaatataaggtgccacatgccagcagggttttcacccatttcagaattggaaaggggcactgtcaccaaccccaaatattcctgaagagtaaaaaggggtatctccctgttggggtctcctgcctggggtggggagaagtcagtcagtatgaagcaacaaggggaaagcttgatgtaagaaagac

SEQ ID NO: 7097 - DNA, 586 bp, Homo sapiens
taaacacagagaatttttttttagcctgacaaatttcaaagaggctttgcaagtgcaaacagacttcagctttttcacattcctatgcccagaaactgggacgtgaaaatgccaggaaccctttcaataactagactatgtgatagatgcaggagaaactctccaaccaccaagattactcctatggagctgccaaagaaccagatgcttccttcaaaagcatatcaatttggcggtgaaaaaccctgtggcctcagctccagtcgggaagggcaggtgggatggcatggtgcgggatgcctgttcccacttgcctcagcaaccatcttcttctgacagcaaaactgtgttactcccaggcttgaaggcatgagcaaaatacatggctttgctatatataaggacgggacttggaaatatttggtctgaggccatgcaaaatgaattccatacatggggagactgttatatcgaaaaagatgaaaatagtttcacttggcttgaaatttttatcttcaaagaaattaccttgattaaaggaaaaattgctgcttttaaaaaaaaagtttattatgcccgacgtttg

SEQ ID NO: 7098 - DNA, 508 bp, Homo sapiens
ttttttttttgagacaggcaatcaaaaagcatgctgatgccaaaataccagaggacgattctgcagaggcattaagataacgctgtccagatacatactctcccgtgtgcatctgggatcctgggtcctgaggcctttcaggagtcccacagaactaccttcccgagcgtcctaagccgccaccagccttgctcactctcattctcacagagtgcacagcagaggcctccgtgggctgcaaggcctgtgatatcacaggaatgaacgcgagattcgagagcctatcttttatcaagccagacattaagatatttgcaaaaatgtaatgggtttttattgctaattaactatagaaatattttaatactattttaatttctaatatggtcaatattgatgactattacccacacaaacaagaactctcatttaagaatgactggggttccaatcattcttaaaaacatataggaaatgtgctacatatataccatggcatactacatag

SEQ ID NO: 7099 - DNA, 518 bp, Homo sapiens
  misc_feature (513)..(513): n is a, c, g, or t
tttttttttttttttttgcataaagtaacttatctaggtctttaaatggctaggaagttaggaagttcaaatggctaagttctatttgaagttggggtaataaaataagcatcgaaattcagaacattctcaacaatcacttaggacagcagttactgaagcaattcttaatagtgctgtgaaaaggcagcaagaagtctcagataaggaatcatgctagatcataaatatttcagcaaattatgatgacatctaaaacacaaactagtcaagagaggcaaagcaggctttttgattagtaagtgaaaaatgaaacaagatgcatatcacaatacagtcactagtagacagctgaaattgatcacagtaacgtgcactttgtcactagatacaagtgggataaaagtcgatcccaaagcatgcggtacaaaatgtgcaacatccagctttgtgcagggggtcctctataaaccctatgagcccaaattatagtcacaatcgctggaaggattntacag

SEQ ID NO: 7100 - DNA, 2215 bp, Homo sapiens
cagcggtaactcatcagatcatagctacactaatgtacagaaattcacataccgatctataactaaatgttaccagaattataactccggtcatgtctacagctttgattttataacatcctgctaatttttgttcttacagaaatacactttcgggaaatggcctctaaatcctggctgaattttttaaccttcctctgtggatcagcaataggatttcttttatgttctcagctatttagtattttgttgggagaaaaggttgacacccagcctaatgttcttcataatgatcctcatgcaaggcattcagatgataatggacagaatcatctagaaggacaaatgaacttcaatgcagattctagccaacataaagatgagaacacagacattgctgaaaacctctatcagaaagttagaattctttgctgggttatgaccggccctcaaaacctagagaaaaaggccaaacacgtcaaagctacttgggcccagcgttgtaacaaagtgttgtttatgagttcagaagaaaataaagacttccctgctgtgggactgaaaaccaaagaaggcagagatcaactatactggaaaacaattaaagcttttcagtatgttcatgaacattatttagaagatgctgattggtttttgaaagcagatgatgacacgtatgtcatactagacaatttgaggtggcttctttcaaaatacgaccctgaagaacccatttactttgggagaagatttaagccttatgtaaagcagggctacatgagtggaggagcaggatatgtactaagcaaagaagccttgaaaagatttgttgatgcatttaaaacagacaagtgtacacatagttcctccattgaagacttagcactggggagatgcatggaaattatgaatgtagaagcaggagattccagagataccattggaaaagaaacttttcatccctttgtgccagaacaccatttaattaaaggttatctacctagaacgttttggtactggaattacaactattatcctcctgtagagggtcctggttgctgctctgatcttgcagtttcttttcactatgttgattctacaaccatgtatgagttagaatacctcgtttatcatcttcgtccatatggttatttatacagatatcaacctaccttacctgaacgtatactaaaggaaattagtcaagcaaacaaaaatgaagatacaaaagtgaagttaggaaatccttgaaagaaaatcatgaatgaacaaaggtaatatgtctagcactgcactgaaaaaggacttctgcatttctgacatagaacactggaatcccagtgaggaattctaagtgaacattccttatagaaacctttcacatgaatgactataaactgaagctttaaatgagctgtgaagtgtgttaaaatgtgttttgatacagtaatatataaatatgtctatatatatgaggaacttgtgttttttaaatggtggccaggtagaggaactagaaaagagattttgttgcctgttttctgaccatctgtgttattgtcactgagaaactaaaatagtaaatttactaaaactacactgcaccatgttagtaataaacagatctgccttaaagaaaagaaaattttagaaagaaatattgttgctcagtgttgttaatatagctcaagaattgagtttatatttgcagtatgctataaatgatacccccctaccacacccacacacacagtttttgtctaatgaaaatgttgctgtgattatttataattggtagtatttcttccagaagaagctaaaataagactggcacttaccctgaagtgcattaataaaaccacactttaaaattaaaaaaaaaaaaaaaaaacacacactacaaacacaaacacacaaccaacagcacccccacgaaacccacaaaagccaataatagtccagtcacacagattatcaacaaaatgaggcaatatgagccacacctaaaaaaggctcacgacacagaccgccacaaagaaaaggctcgtgcaaacgcgccaatccgcccacctgccgcactcctgagcagcgtccccaacaccctgcttcgcgacctccgccacaacgccgcaacgaactagggctcgcaccatgcaactaagatcgcgcaacaccgccaaatcacgcagaaaccacaacgctcagcaaaaaacac

SEQ ID NO: 7101 - DNA, 4476 bp, Homo sapiens
agcggactcgtcactgcgcagccaatcggcaggcgggaagcactccggcccgaacgtgcgggcggggcagggtggcggccccgcacggtaggggagcagagtgggcaggccgggggtgagggctcgcgctccgggagctgcacggggctgcgtggaaagagcgccgagcggtggcgtcgttgtcgccccctcctcgtcgggaagaatcgtttggtctcctgccgtgcccggaatcccagtcagaagttccagcctgccactgttctctgatgccatgccagcaccaactcaactgttttttcctctcatccgtaactgtgaactgagcaggatctatggcactgcatgttactgccaccacaaacatctctgttgttcctcatcgtacattcctcagagtcgactgagatacacacctcatccagcatatgctaccttttgcaggccaaaggagaactggtggcagtacacccaaggaaggagatatgcttccacaccacagaaattttacctcacacctccacaagtcaatagcatccttaaagctaatgaatacagtttcaaagtgccagaatttgacggcaaaaatgtcagttctatccttggatttgacagcaatcagctgcctgcaaatgcacccattgaggaccggagaagtgcagcaacctgcttgcagaccagagggatgcttttgggggtttttgatggccatgcaggttgtgcttgttcccaggcagtcagtgaaagactcttttattatattgctgtctctttgttaccccatgagactttgctagagattgaaaatgcagtggagagcggccgggcactgctacccattctccagtggcacaagcaccccaatgattactttagtaaggaggcatccaaattgtactttaacagcttgaggacttactggcaagagcttatagacctcaacactggtgagtcgactgatattgatgttaaggaggctctaattaatgccttcaagaggcttgataatgacatctccttggaggcgcaagttggtgatcctaattcttttctcaactacctggtgcttcgagtggcattttctggagccactgcttgtgtggcccatgtggatggtgttgaccttcatgtggccaatactggcgatagcagagccatgctgggtgtgcaggaagaggacggctcatggtcagcagtcacgctgtctaatgaccacaatgctcaaaatgaaagagaactagaacggctgaaattggaacatccaaagagtgaggccaagagtgtcgtgaaacaggatcggctgcttggcttgctgatgccatttagggcatttggagatgtaaagttcaaatggagcattgaccttcaaaagagagtgatagaatctggcccagaccagttgaatgacaatgaatataccaagtttattcctcctaattatcacacacctccttatctcactgctgagccagaggtaacttaccaccgattaaggccacaggataagtttctggtgttggctactgatgggttgtgggagactatgcataggcaggatgtggttaggattgtgggtgagtacctaactggcatgcatcaccaacagccaatagctgttggtggctacaaggtgactctgggacagatgcatggccttttaacagaaaggagaaccaaaatgtcctcggtatttgaggatcagaacgcagcaacccatctcattcgccacgctgtgggcaacaacgagtttgggactgttgatcatgagcgcctctctaaaatgcttagtcttcctgaagagcttgctcgaatgtacagagatgacattacaatcattgtagttcagttcaattctcatgttgtaggggcgtatcaaaaccaagaatagtgagtggctctttcactggcaattctcaaatgatatacatttaaagggcagattttttaaaaagatactactataataaacatttccagttggtcattctaagcatttacccttttgatactctagctagtcaggtactccaaattgactttgcagcagggtggcagggtcaggagagtctggtcctgcctagctcagatttcatggcgcctgcacttgaagcaagtcacttctttatcacaggtgtcttgaaacattagcttcttttaccaacctgagaaaattaggatgacctggcaaataagatcttgaataggccaaaagcaagtatcttgctgtgtgtagtctcttggttaaagtgaagaaacagtactgttcacacctttcttcactgagattccagtgtacatgagaacatatatttattgcatgattttctagatacacagtctatgcattattcatatacatttattttagcctaaagtggttttcaaatccagttcttcaagccataaatgaccaagatccaagcaatctgaatttgtttttgtgattatttgactggaatgcttcttaagtggaataactatactccgttatccacccgatttcctaatgtaattgaaagattttctattttgccacacacttggagacaataagggtttttagttttatctactcttctattgaagttaaagaaagaaaaaaagatttttttatttgtattaatgaaaagctttagtttaaaataaggagatccagaataaaaagaagagactgatctcttcaattattgtcatctgtagccaccagcacatcactcttatgtaatccccaaaggcttggcatgccgtaagtgtgtggtgggtagactgctgccggggaatcgtacttcttatttagtaatgataagacttttcattatttttggaattttaaagatgacataaataagtttaaatatcaatttggggagtaaggtttaatattgccatcgggtattgagacaggaggaagtttctgtttttctccatttagacataggtcaattaaaatatttgggtttaaaatgactaaatgctttaaacatattgtagcttaagatatatgtgttaagatatatacatgagaaactttaaaaggtaactactgtgcatgcctgatgcttaatagaatacttagtggcatcaaatgtttgcagcagtctccataattatattcagtcccttctaatactgtatcaatgtaaatgaaataaatatattcaaattggctttttgatatgcatcaagtggcattttgttcctgtgtttaatagtgatctgtatacagctgtgcacatattgtcatcacttattctagcatcactgttaaggctgtgattatgtttgacattcactctggattttaatacaagccaatatcagcttcccattgtgtaataacttgggtgtttaggagtcttttcacattttttggggatatgaactagatgttcaagaactccttctggactgtggatactgaatcagtgtactattggctgcagaatttgtttcaattgaaaatagactcaggaagattgctgctcagaatatcatataatgtttattttttgaggtgtttttgtttttatttgtgtgttttttttttttaagtcagcttggaacttttttcctgggtagtatttgggagagggaaaggctgtactatatatttatttctaaatgttttgactgggcatttttcttttaatgaaatatgtggactgctctagcaaaccctattttcagctactatttgaatattcttgaacaccaccactgaagagtttcatatacaccaaataatgtctcatctctatagtacagggaatataaaattggtttcctgtggtcatgatcaagatagtagtattattacacaagaaacttggtctgcagtctggaagcttgtctgctctatagaaatgaaaatgcagcatgcagttgacattgtggaaatgaaagtaattgggtattagaaatctgaaagtactgtcatctaaaagcaattgtgattttattgtaattggttgtcactgttgtacggtgtctagaattaaagaatacatgtaaactttcatggtatttagcctttcttaaatttttttaaaatttaaactttctaacctatgtattcaacttctgtatttatattttaatcagtggttcatgttcatataatacacccttaactagttaaatggaaactgttggtatggtacagagtacccatattgcttagaaaaactgtcttaataaaaagatgtatatgttgtgaagacatgaacagtttactgtacagaatggttggagaaatgcctatggtgaattaaagcttcatatctggtttctggaataaaaaaaaaaacacaacaaaaaaacttttgggcgggctcgcctccaaaagttttaacaccttgtggggcgccgcccgaggtaggacattggccacggttccaaaaaccggctaacggtggtgtccccaaaaacccggggccgcgttccacacaaggttcgcctggtccagcagctcacggg

SEQ ID NO: 7102 - DNA, 5585 bp, Homo sapiens
  misc_feature (3613)..(3629): n is a, c, g, or t
  misc_feature (4043)..(4073): n is a, c, g, or t
aagtgacatcttaagaaagctgtttttttttttaaaaaaaacaaggcacaaaaatatcaccccccttgtctagttatcaggtgccctgtggccccaacctgggataagaaaatcaccccgttctggtgggcaggcgaatgccgctgcttccctggcagagttgggtgccacctctctgggcattgcctgtgctgctgaccgtcatggtgctcacctccttgtctcctccaccatctgatcgctctcactgcttgagagtaggagtgcttggcacacacgttgattgttcttcagttgcttgatgatgtgacttcccctgagagcccccatggcttctcttggctgatgtccaacagcagagtcacgcgacaagtgacgcttcggaccaggcttgttaatgggctgcagggggccgaggacagagcagaggcacctgaactgcccagggaaggggttgggggttctccttccaaaatggcctagtgtgtggactattattaaaagtgcctctgagaggccaagaaagcctatgattcagtacaccctgaatgaaaaagaagaaaagtatgagatactttagacttttctatctcaagttgttaaaggaaaatattcagcatttaagtagtataagtttcaattataaggaagctcattttccagaaaactcgactccttagagaactgggacattactaggctagttcatgggacacaaactgggcctcactgtgacccacacccatttttgtgtggcgtgcatgctatcggccacgtgcagcttttacaatagctgaggcagctgtccaccatacaaccttggcaattccctgtggctgcctggttcagctctgctccctgcaggcagcttctgccctggcccctcctcacggccaggacctgcccttagacgggccagcgggcatcctggtgccacagctccttgttccccccaggtcctggctcagctcagctcccagccgcttgagcacgcctgctgacctgggttcctgggtccctcccttgtgttcagcagctccttgcggctgagccccagtccctgagcgggagctccgtgacatgagacacccagggaagagccaccgcgttctttcgcagtgcatttatgtggggccgtgagtcccctgttctcacccagggactgcaaggagcgccatgaggctctggagtaactgccctgcaagctgctcggtgacacacacaccctgtgggtggatgtggatgagtacatggttcccactaaggatctgcttagtggaaggacatgagcctgtttgtttacctttcacacggtctaacaatcacttagaagagtcaccctggacacccagtcctgagtgtgctgtcacctctgagagccacacccagcagccctccagccctttgtcattcatgatgccttgaatcacggccctcagagccctccagtggcaaacagggtggtaggtgcgggtgggctgcccgaggtgaactggctgtggaggccgggaaggcggggcatgtgccgggctgggcgagctcctcctgactgcgggccaggtctccaccgagtgtcccctgcgggcagcttcggcgcagcatccactccattctcccgccgacctatcgtggaaggcactgctgccccattagacagactggggcctgggctcagggatgcaggtgcctgcccacagagggtggatcctagcccaggctggcctggcgccagggttcatgctccacgccctgcactcagtgacagctgcagcggccccaccactcccagtgtccctgtgggaggggcggccagatgcagctttgagaagacagcagctgcctacaaagtgctttctggaaggagctgcagaccccagttctgccgagccccggtggcacctgtgtatctctgcgattcccttggaagcagggcctcgggagggacctgccaccgagccccgtgtggcgtctgagggtcctctttcctgtcccccaggatgcctttcaggaggagtactacaggacgggcaccttcccagagacgcccatggtgcccccccggcggccctggaccctcgtgaactggctgttttgggcctcgctggtgctctaccctttcttccagttcctggtcagcatgatcaggagcgggtcttccctgacgctggccagcttcatcctcgtcttctttgtgggtgagtggagggcaaggggctggtgggtgctgacagcaccaccctgggagaggtggcatcagggctgggacgaaggccatctgtataggcagttgtgccgtggatgaggagcaggctcagcttgcaatcacagggaaagattagacttcaggatgagtgcgaggccctcgaataccaggcctgggaccccctccgcagcctggacggtccagcctcccacctggggctggattccacacgttccctgttgggtggtgatgcagctgccacttcactccccgacagctgggagtgctccctccctgtcctccgcagacagctctgctcattggcatcatttcctgcttctgaagaaagccctgtgctggagcctggcggggacggatgggcagctccctgccttcctctgggggcgcctgtggcttctcctttgctgcaggtggatgacactgagtggagacactcggcgacagagcttttcatgggtctgcgctggctccaggtgaccggtattctcgggctactgctgcttcttggtggcaagcccctgtgcaccctgctccttgcctctggcggggcagcctgtcgtgcctgcttcctgccctgtgaacagtaggtccgtgcttcctggagccaaggaagactttggggtttccctgtgaaaggccctgtctccccaagcctggcgtcctctgaggctttggagagcccgggagagacggcacattgtccaagcacacagagatcacgtgcttcttccaaatggacaggactcagttattttctgtcaaacacaaagatgcagtatgctcactataaaaggcccaagcaatagacaagcgcagaaaatggaaagtgtgtcaggagaccattcccattgagcccacttcccagataatcgttaatgacaatttgatgcacgtggtggttccagtctcaagcatatgtgcatctataaacccgtatcagtggagtttcttcagctcgccttttcacctaatgaatcataaccaccaaaacaggtcacagcacataaacctagctcattcattctgactgagccaaccaatgctgcagcatatgggtgcagtagacaagctggctcctgttcctcaaatagaccctactatacagtcttttgaaagattaagatgtattttagtgttaaaaattaaaatattaaaacaacacccacaccgtgtaagggaaaaaaataagaggttggagaagaaagcacctcatctccttaaggcaggtccaggggcacccccatgccccgccatgctgaggctggccaagggtccggggcagctgcaggtgccagggcccctggtagggcgggggcaagctcaacccttctgcttcaatagcaggcaacagcaaggcacacacacacccacgccgtcttggagaggggnnnnnnnnnnnnnnnnnctgcagacagggccacccagctgtgtagcgagtaccaaaaaaagaagcctgagcactgcccagggtgcagtgtggacacagggcgtctccaggagcatctgaggggtgcagtatggacacagggagtcttcaggagcatctgaggggtgcagtgtggacacagggagtcttcaggagcatctgaggggtgcagtgtggacacagggagtcttcaggagcatctgaggggtgcagtgtggacacggcgtctccaggagcatctgaggagctgactgccgtgccccattactctgagcctgcgcctgactgcattcttccctgaaggactttgtgtttgtgttctttactcctcttccaaggccacacggtccacgttttactcacttctttctgctctacaataactccactctnnnnnnnnnnnnnnnnnnnnnnnnnnnnnnnccctccagtttgtaaatgacccatgggagatgcgtgcctcctgctggctgggctggattcgcccatcccaggctcttgcatccatgtcccagttagtttatcgaccgcgatgctaatgctagataatcctgtgcatcatgatttgggggatttcattcacttattcgtctatccattcttaagcatgtattataaatggactgttttccaagccccatgcccagtgctgagcacatcaaatgattaagtcttgggccctgcacccaaggacctcaccacatctgcccgctccagagggtgtagttgaaattgcaacttctgagcattaggccctgctttccagcttcctatattaaactgggctcccacgagggtcctgcccattctctggtgtaggcaaatcctgccgtcagaggagagggcggggattttctcactgctctaacgcttgcaccaaaagcagtgctgaaacgtgttggtcactcgatactcgagctcttgcgtcttccaggctcctggtctgttctttataaaacttcgccgaacatgccctgttaacttcctgtccctcattcacaaaagaatcctctttacctgggggtcagcagaggaagccagggatttctctgagtccctgcgaacggctgtgcatggcttgccaaatcattcaccttcagggtccaaggaggaaaacccccaccagagcagccttgctttgtcttaatgtcacatggatgtccacactcaaggatgattgtaaagccggcaggatgatggcacctcaaactcgccagccagctctcagctggcgcttgtgatttgcggccacgggccttctcacttgctctgtgggaaaacggccctgtagtctgttcgggctactcctaactctgctctccttgtctctgcagcctctgtgggagttcgatggatgattggtgtgacggaaattgacaagggctctgcctacggcaactctgacagcaagcagaaactgaatgactgactcagggaggtgtcaccatccgaagggaaccttggggaactggtggcctctgcatatcctccttagtgggacacggtgacaaaggctgggtgagcccctgctgggcacggcggaagtcacgacctctccagccagggagtctggtctcaaggccggatggggaggaagatgttttgtaatctttttttccccatgtgctttagtgggctttggttttctttttgtgcgagtgtgtgtgagaatggctgtgtggtgagtgtgaactttgttctgtgatcatagaaagggtattttaggctgcaggggagggcagggctggggaccgaaggggacaagttcccctttcatcctttggtgctgagttttctgtaacccttggttgccagagataaagtgaaaagtgctttaggtgagatgactaaattatgcctccaagaaaaaaaaattaaagtgcttttctgggtcaaaaaaaaaaaaaaaaaaaaagaaaaaaaaaaaaaaaaaaa

SEQ ID NO: 7103 - DNA, 996 bp, Homo sapiens
ttttttttttttttttcaaattaggttatttattcttaaatatgaacaggaaactcagagttatctggtattcaaggaaagcccgccttatgaatggcaaagactcaaattcaaaacacaaaagtaattctgaaggaagagataatttaaagaaaccacacaaacacagactaatgagagttttcaaaaagtttcaagaaatcccacagttcacaaaataagaatatgattatttttaaaataacacttaaagaaatcctgaaaatgaatatatctgtggtatatgtgtgtgggtatgcacaatttgtgtgtattaaatttgaaaatgattttttttttttttttttaaagtaatatacatttattgctttcacacaatagtccaaaagatatgacaataaataatatgagtgaaatatatatgatacattgaagatgtgtaaggtctaacattaaacaattgaattctaggttaagaacacgaaaaaccaaggacaggaaataatcgtggaaataatctttgataaaaatttctgagtgctgaaggaaaatagttttcgaattgagaaaattttctaagtgtccaacctcaaataggaaacataaacacacataaactcgcacctggaggcaatgttcaaaacacaaacccaaataaacacatactcggagacagtgttctaaataattagactacattcataaaaataagattataaacactagagaaagagaagatgaaaataaaaagggaaaaaagaggctctttaccaacaaagaaaatataatcagacggataccaagtccactcttggtttctagaagataatgaatacaatttcagatgcaaatgtataaattccttaaaatgtatgaaaagaaatgatttctaatctggaaatatatgcccagatgaaaattaattatatatgagggtaaaataaaagcataccgtgatatgaaaagatcaagtaaaatgtctacatacactcatta

SEQ ID NO: 7104 - DNA, 959 bp, Homo sapiens
  misc_feature (16)..(16): n is a, c, g, or t
ccctgtgcagtgcaanaccatctctatccctgtcagccctcaactgggtcatgggccttgggcagaatgtcaaagagcccagcagcagcggtggtggccagctgggcagagcatccttgcttgggctaggaaagctttaccttctctgagtgcctccgcctgagagatgtgtgacccgtggcacccagggaaccacgtcttggagtggtccactgtaggccatgcgcttcatccacccccagtccctacataggccctacccttgcccgggagcttctagatagaaatcagaaagagattcaaggagccaaatgagcggtcagcccccaccatgcactccttgccccgtgcagagctccagccagcttcgtcaccagccccactggctcctggttggaacgaaagggtctctggttgcactgaatgcagctctcaaactggtcttgtacttgctgaataaatactgttgttcttgccttagctgctctctaggtttgtggggttaagttgccagaaaattgtgctactgtgtgtgcgtgtgcgtgcgtgtgtgtagtgctaggagtccacagtaggtctctgtcaagccgatgtcgtgatgagggcttttctgatactgacccagaagccacagaaccacaaggaaacccaaaccccctccagctgctgaggcgcaggcacagcctggggtcggatggagcctccagcaccccagcacccaggtgacttccccactcccctgtaaatgtcatggtgctaagactgtgtcaaccccaagacgacacatggtcctgtgctttggccaccgtttgaggcaaaaactaaacagcccgacacgttgtgttctggtgcaggtttgtattaaactgtagctacttctcaaaaaaaaaaaaacaaaaaaagaaaaacggcgtttgggggcaaaggtataaagcatgttaagttgaacctttgcaggg

SEQ ID NO: 7105 - DNA, 528 bp, Homo sapiens
  misc_feature (521)..(521): n is a, c, g, or t
gctcgacttttttttttttttttagtaacaaagatgttgtcaaaaatgacaattttttgtgtcccctgatgatgccttgctagcatttggttataagccataaagcaggaataatttcagcctgtcaggagtctcgctaatgcccagtttccccctagagagaattcctgtcaaatctaatgagagctccaaaggccctctctacaatataatgagcacttaggccatgctggtgatcaggcggcaaaaagcatcaatttgagcttggctactccctgggggccagacgtcaccagttttaataagaattatgattactagctgcaccaaatgcctcctcagaacttattattaatgtgtgacattcagaaggatgtttttcaaatgtaagtccactttaaactgaattatagcactactttgcacagcactctagttaagggtctgtcagcatttccaatatcaactaaatttcaggaggctcagtaccctactatgaagaacatggtgtctctcagctnttcacgt

SEQ ID NO: 7106 - DNA, 4522 bp, Homo sapiens
  misc_feature (4321)..(4321): n is a, c, g, or t
  misc_feature (4371)..(4371): n is a, c, g, or t
  misc_feature (4435)..(4435): n is a, c, g, or t
gcgcccgcgcctcgggccgtcgggagcggagcctcctcgggaccaggacttcagggccacaggtgctgccaagatgctccagggcacctgctccgtgctcctgctctggggaatcctgggggccatccaggcccagcagcaggaggtcatctcgccggacactaccgagagaaacaacaactgcccagagaagaccgactgccccatccacgtgtacttcgtgctggacacctcggagagcgtcaccatgcagtcccccacggacatcctgctcttccacatgaagcagttcgtgccgcagttcatcagccagctgcagaacgagttctacctggaccaggtggcgctgagctggcgctacggcggcctgcacttctctgaccaggtggaggtgttcagcccaccgggcagcgaccgggcctccttcatcaagaacctgcagggcatcagctccttccgccgcggcaccttcaccgactgcgcgctggccaacatgacggagcagatccggcaggaccgcagcaagggcaccgtccacttcgccgtggtcatcaccgacggccacgtcaccggcagcccctgcgggggcatcaagctgcaggccgagcgggcccgcgaggagggcatccggctcttcgccgtggcccccaaccagaacctgaaggagcagggcctgcgggacatcgccagcacgccgcacgagctctaccgcaacgactacgccaccatgctgcccgactccaccgagatcaaccaggacaccatcaaccgcatcatcaaggtcatgaaacacgaagcctacggagagtgctacaaggtgagctgcctggaaatccctgggccctctgggcccaagggctaccgtggacagaagggtgccaagggcaacatgggtgagccgggagagcctggccagaagggaagacagggagacccgggcatcgaaggccccattggattcccaggacccaagggcgttcctggcttcaaaggagagaagggtgaatttggagccgacggtcgcaagggggcccctggcctggctggcaagaacgggaccgatggacagaagggcaagctggggcgcatcggacctcctggctgcaagggagaccctggaaaccggggccccgacggttacccgggggaagcagggagtccaggggagcgaggagaccaaggcggcaagggggaccctggccgcccaggacgcagagggcccccgggagaaatcggggccaagggaagcaaggggtatcaaggcaacaatggagccccaggaagtcctggtgtgaaaggagccaagggcgggcctgggccccgcggacccaaaggcgagccggggcgcaggggagaccccggcaccaagggcagcccaggcagcgatggccccaagggggagaagggggaccctggccctgagggcccccgcggcctggctggagaggttggcaacaaaggagccaagggagaccgaggcttgcctggacccagaggcccccagggagctcttggggagcccggaaagcagggatctcggggagaccccggtgatgcaggaccccgtggagactcaggacagccaggccccaagggagaccccggcaggcctggattcagctacccaggaccccgaggagcacccggagaaaaaggcgagcccggcccacgcggccccgagggaggccgaggcgactttggcttgaaaggagaacctgggaggaaaggagagaaaggagagcctgcggatcctggtccccctggtgagccaggccctcgggggccaagaggagtcccaggacccgagggtgagcccggcccccctggagaccccggtctcacggagtgtgacgtcatgacctacgtgagggagacctgcgggtgctgcgactgtgagaagcgctgtggcgccctggacgtggtcttcgtcatcgacagctccgagagcattgggtacaccaacttcacactggagaagaacttcgtcatcaacgtggtcaacaggctgggtgccatcgctaaggaccccaagtccgagacagggacgcgtgtgggcgtggtgcagtacagccacgagggcacctttgaggccatccagctggacgacgaacatatcgactccctgtcgagcttcaaggaggctgtcaagaacctcgagtggattgcgggcggcacctggacaccctcagccctcaagtttgcctacgaccgcctcatcaaggagagccggcgccagaagacacgtgtgtttgcggtggtcatcacggacgggcgccacgaccctcgggacgatgacctcaacttgcgggcgctgtgcgatcgcgacgtcacagtgacggccatcggcatcggggacatgttccacgagaagcacgagagtgaaaacctctactccatcgcctgcgacaagccacagcaggtgcgcaacatgacgctgttctccgacctggtcgctgagaagttcatcgatgacatggaggacgtcctctgcccggaccctcagatcgtgtgcccagaccttccctgccaaacagagctgtccgtggcacagtgcacgcagcggcccgtggacatcgtcttcctgctggacggctccgagcggctgggtgagcagaacttccacaaggcccggcgcttcgtggagcaggtggcgcggcggctgacgctggcccggagggacgacgaccctctcaacgcacgcgtggcgctgctgcagtttggtggccccggcgagcagcaggtggccttcccgctgagccacaacctcacggccatccacgaggcgctggagaccacacaatacctgaactccttctcgcacgtgggcgcaggcgtggtgcacgccatcaatgccatcgtgcgcagcccgcgtggcggggcccggaggcacgcagagctgtccttcgtgttcctcacggacggcgtcacgggcaacgacagtctgcacgagtcggcgcactccatgcgcaagcagaacgtggtacccaccgtgctggccttgggcagcgacgtggacatggacgtgctcaccacgctcagcctgggtgaccgcgccgccgtgttccacgagaaggactatgacagcctggcgcaacccggcttcttcgaccgcttcatccgctggatctgctagcgccgccgcccgggccccgcagtcgagggtcgtgagcccaccccgtccatggtgctaagcgggcccgggtcccacacggccagcaccgctgctcactcggacgacgccctgggcctgcacctctccagctcctcccacggggtccccgtagccccggcccccgcccagccccaggtctccccaggccctccgcaggctgcccggcctccctccccctgcagccatcccaaggctcctgacctacctggcccctgagctctggagcaagccctgacccaataaaggctttgaacccaaaaaaaaaaaaaaaaaaaaaaaaaaaaaaaaaaaaaaaaaaaaaaaaaaaaaaaaaaaaaaaaaaaaaaaaaaaaaaaaaaaaaaggggggggccctttaaaaaaatcccccgaggggcccaagtttacgggaacccatttttttggaaaaaaggggccccaaaagggggccgtattaaaacttagggcggggccgcgttttaaaacccccgggacgggaaaaattgctacttggggacttttgggaggaaaccttatttcggggggggggaaattggggaaaactcccctcccgaaaatttaaagctccgagggaaaaaaaaaaattcttaaggggggaaaagggggggaaaaacaacccgcaaaatcgcttggcccctttgaaaaattttcgcctaccggcgagaagggatttgtttaaaaaaagtttttcaccccccggggggcctccgggggctccaaaacgggccgaggcgcgggatgtcggaaaattcgcccgccaccacccgggtcgcccccatttatcaaggcggatccccgcgagagggatctccaagagagagagccggcggcccagagaggcaatccatgcaatagacgtgcatctctcagcacacctacgtctatggtcgtgcgacaaaggggcgcatgagcacatagtatgttaatcacaataagagacaatgagcgtcctgcgcactagcggtgtcactagatacagacaaatatcgtgatatggccgcaccagtcagactaccgctgctgctgtcacgtcttgtacagtcactgcgctacgagaacgactggtataacgcactcggaccgagggaggggcggaacgagcgggcaggcagagggtacgagggacgcaccgatcgaccgcgcccgccancggttacgccgcaccgaggagacggacgacgtgatacctgtcttggaatnaatcgcacctctccccatttccctcgaaacgatgactatcccgagaagcccgaactgcggggangatttctgagctacacagccttgctattctgaaacagccgacgaacgcaggactgcgctgcagaggggcggcgcacacggacgcaga

SEQ ID NO: 7107 - DNA, 1956 bp, Homo sapiens
tagagctcggacaataaggcgcgtcatgggtgccagggattaacccacctggacgtgatgtgtggccctgttatgcacgtgggccctgattcgctgatgcctgcctgagggtttgcgcttatcggcgacatcagcctgcacttttcttttctcgtgatctctctggttctggcctcagggtgacgtgggcctcgtagggtcccgtggtggctcctccccagacggtgacatggagtgagcccattctccctcctgggagtgggtcactcaggccaccagagcaccacagggaaagcagccagggaggacacggaggcccttgaagctctggcctcttctgaggcctccaggacctgacagtgagtgggagcagccctggcagaacccctcccctcctctcggccgccctgacacctcatccccgacactcagagctcatcctccttcccagctgtttccaatttcaaagtgaactcgaccttgtggctccaggagatgcagcagggacagtgttaaatcggctttcaccagcccacacagccaggcatcctcctcggccctcctgggcactgggtggacacctctggctactggtgacacactgctgtgcctgccctggccttctccagacagccctgtccacccaaagcccagccaccctggcctgcagcaggcctgtggagttctcagttgcgtggggaccagagggtgctggagaaacaaaccagacgcagctgaaggcagtcagggcagggcgcaatcagcgataagagctgcataggggccacagcgtaacctgagctccagtcggtggaaagaaaaggcagagacgttgcagaggccaggtctgctcaggggaagacagttctgggtgtagaggactcacatcccagagaggctgaggaagggtttaccacgcaagcttctcattcgggactcttgaggggtggctggggtcttcctggcgacgggctgcggcactgaagccctactggagtttggcctgatcttccctggcaaacaggtttggacggagctgttttgtgctgaaaggttttctcggggtccgtggtgtcccccaaaggtgccaccgtgcgggtctcctagctccctgccagcttcctgtccctgtgctcactgcccccacgcctcctgccaaggccgagccacacacccgctccacctgcatttcctctaccgactcgccagcccaaatgccgctcttcactctggcctcgctgagcggctgcccgaggaggagctctaggccgacgcccaccgcaggccttacagtcgtctctggacgctcccttgcagatgcaccgtggcctggcggcgagcccccggtcaccttcctccgcacggaagaggggccggacgccaccttccccaggaccattcccctgatccaacagttgctaaacgccacggagctcacgcaggacccggccgcctactcccagctggtggccgtgctggtctacaccgccgagcgggccaagttcgccaccggggtagagcggcaggactggatggagctgttcattgacacctttaagctggtgcacagggacatcgtgggggaccccgagaccgcgctggccctctgctaaagcccgggcacccgcccagccgggctgggccctccctgccacactagcttcccagggctgcccccgacaggctggctctcagtggaggcccagagatctggaatcggggtcagcggggctacagtccttccaggggctctggggcagctcccagcctcttcccatgctggtggccaccgtgtcccttgctgcggctgcatcttccagtctctcctccgtcttccagtggccgctctctttataagaaccctggtcattgaatttaaggcccaccccaagtccagaatgacctcgcaagacccttaactcactcccgtctgcagaaaaaaaaaaaaaaaaaagg

SEQ ID NO: 7108 - DNA, 2977 bp, Homo sapiens
gctggaagcaacagatggggactgcagaggaggtggtggtattgggatagtgctgcagccaagaacttaacgactgaaagtaactgggatatcttcataattatctgaaggtcacagtgggagaacaaaattaaaagaactgagaagacttacaagagaacctcctaagagtcacccaaacaatcggctgagaatgagaagaggttcaagtgattcttgtgcctcaggctcccaagtagctgggactacagtagctgggccagcacacccagaaagcctcacattgtgcagtggagaagctgagagaagaggaaaagaggagtggccagactcccaccactacccaggaccaactcctgctcctgaatcttctgatgggccccacaaggtgacagtgctggctacaatgctatccagccggtggtggccaagttcctgggggatcctagggctgggcccccgaagccctcctcggggatcccagctctgtgccctctatgcctttacttatactggggcagatggccagcaggtgtctctggctgaaggggataggttcctactgcttcgaaagaccaactccgactggtggttggcaagacgcctagaagctccctccacctctcgacccatcttcgtcccagcagcctatatgatagaggaatccatcccttcccagagtccaactaccgtcatccccggccaattgctctggactcctgggccgaagttgtttcatggttccctggaggagttgtctcaggccctcccaagcagggctcaggctagctcggagcagcctcctccacttccccgcaaaatgtgtaggagcgtcagcactgacaatctgagccccagctttctgaagcctttccaggaaggaccaagcggaagatccctctcccaggaagacttgccgtcagaagccagtgccagcacagcaggcccccagcccctcatgtcagagccccctgtgtactgtaacctggtggaccttcgccgctgtcctcggtccccacccccaggccctgcatgccccctgctgcagaggctggatgcctgggagcagcacctggaccccaactctggacgctgcttctacataaattcactgactggctgcaagtcctggaagcccccgcgccgcagtcgcagcgagacgaaccctggctccatggaggggacacagaccctgaagaggaacaatgatgtcctgcaacctcaggcaaagggcttcagatctgacacagggaccccagaaccgcttgacccacagggttcactcagcctcagccaacgcacctcgcagcttgaccctccagccttgcaggcccctcgacctctgccgcagctcctggacgacccccatgaggtggaaaagtcgggtctgctcaacatgaccaagattgcccaaggggggcgcaagctcaggaagaactggggcccgtcttgggtggtgttaacgggtaacagcctggtgttctaccgagagccaccgccgacagcgccctcctcaggctggggaccagcgggtagccggcccgaaagtagcgtggacctgcgcggggcggccctggcgcacggccgccacctgtccagccgccgcaacgtcctgcacatccgcacgatccctggccacgagttcctgctgcagtcggaccacgagacagagctgcgagcctggcaccgcgcgctgcggactgtcatcgagcggctggttagatgggtggaggcccggagggaggctccgaccggccgggaccaagggagtggggatcgggagaaccccctggagctgcgtctgtcgggctctggacccgcggagctgagcgccggggaggacgaagaagaggagtcggagctggtgtccaagccgctgctgcgcctcagcagccgccggagctccattcgggggcccgaaggcaccgagcagaaccgcgtgcgcaacaaactaaagcggctcatcgcgaagagaccgcccttacaaagcctgcaggagcggggtctgctccgagaccaggtgttcggctgccagttggaatcactctgccagcgggaaggagacacggtgcccagctttttgcggctctgcattgctgctgtggataaaagaggtctagatgtggatggcatttatcgggtgagcgggaacttggcagtggtccagaagcttcgctttctggtggacagagagcgtgcggtcacctccgatgggaggtatgtgttcccagaacagccaggacaagaaggtcggttagatttggacagtactgagtgggatgacattcatgtggtcaccggagccctgaagctttttctccgggagctgccccagcctctggtgccaccactgctgctgccccatttccgtgctgcccttgcactctccgaatcagagcagtgcctctctcagatacaagaattaataggctcaatgccaaagcccaaccatgacactctacggtacctcctggagcatttatgcagggtgatagcacactcagataagaatcgcatgacaccccacaacctgggaattgtgtttggaccaaccctgtttcggccagagcaggagacatctgacccagcagcccatgctctctacccagggcagctggtccagctgatgctcaccaacttcaccagcctcttcccctgatgcagggaaggaagaagagaaaacatatttccggtcatctctggtggtgagaggctggtgttctgttttgaggatatccctttaaatctcccaaatgactgtctctatcttcatgagtgtgacttgaggtgttgggatgggtgagggagcttctctaaagaggaaagtgagtggattaacccctgcttctcttcttgttccctgttatcattcctccccaacataataatacataaagtggcatggtatttttaaaaaaaaaaaaaaaaaaaaaaaaaaaaaaaagcatctagacactattcaccagcaaaaatactg

SEQ ID NO: 7109 - DNA, 1420 bp, Homo sapiens
ttttttttttttttttttttttttttttttttggtgttgagcagcaatctttccttttattaaaattcatatatttaccaaatgttttcagagtgttataatagactgttccaggcactgtttatatctactggattaggagtcaaatgactgatgttatagtgacatttcagtcagagaaaccctgaataataagtcatctactactatgtgtagcttaagtatttcttcttatagaaggacaacaacacctggttggatggaccaaagaaactgatacagtgaaagggtaatatattgctctcctagatagaaacaagtcataacaaataagtactggaatgtgtacacctctggctcccgtacactgggggtaccagtattttgatgtaatgaacatatttaggcttcactccttaacttggaacattttgaagagaacaaaggacaacatgagaatgaatccgcaccaattttactgtacaattaacataaacagaatcatctgtgaccctaaggaatatataataggattctaatgtaccattcctatgtatgaagaattggtgaaagtccttggccaactgtggtcgggttcagtccagacaccttttttctgggatgtccaagttctgctcatcctcttctgagaattccatcttgttcttgtttttcacctgtgctgtgatacagatacactgccttgtgctggagcctttagaactctttgcaaaatactttttttttcctggttgcaaaagtaagcttttttttttttttttttttttttttgagacggacaaacaaaaaagtacatacctctgctgagacgtcaccttcgctcactctctcccctcctgaaatctgagtgccctatatcctgcctcattatggcaaatgaatgttaaatgtggctttttttgggtgaggatgcttccagaattgatttgccctgaaaatgcatcgccactgcacacgtttggacaaaatactattagaaatcctccctgattacagtaactcaaggttttattaactatttcatacctactgttgcatgggacaaaaatgcttttgaaaagtttaatttctacaatgaaatgagtttttttgggggggttttattgtttttgttttttaaagtccttaaatcatttcagctttgactcagggcctacaaaatctagtcctttctcggggagaataaatcagggaagtcttgagccaggctcaagttagaagaaagatgagaaagcaagtgggctgcactcctaccttaaccttatgttttcttcagccatgcctgagaagacagaggaaacctgaaaaccaagaaactgaagtgtccctatgcttgcagctattcctggtttatgaccgtttacattttgaatgctttaaactcgtgccgattcttggc

SEQ ID NO: 7110 - DNA, 1742 bp, Homo sapiens
gggaagcggggcacgaggcctcgggcacgagggccagctgatgccgggagctaactaccgcgccggggccggggccggggccggggcccgacgtccccgcggggcccgggaccgcgaggaggacggcgggggcctggagcccgcggccgtggcccgcgacctattgaggggcacatctaacatgtcatttgaggagctgttggaattgcagagccaagtggggactaagacgtacaaacaattggtagctggaaatagtcctaagaaacaagcttctagaccacctatccaaaatgcatgtgttgcagataagcacaggcctctggaaatgtcagccaagatccgagtaccatttttacgtcaggttgttcccattagtaaaaaggtagcccgggaccctcgctttgatgatctgtcaggggaatataatcctgaggtgtttgacaaaacataccaattcttgaatgacatccgagcgaaagagaaagagcttgtgaaaaaacagttgaagaagcacctttcaggagaggagcatgagaaactgcagcaactgcttcagcgaatggagcagcaagaaatggcacagcaggaacgaaagcaacagcaggagctgcacctggccctgaagcaagaacgtcgggctcaggcccagcagggccatcggccatacttcctgaaaaaatctgagcagcgccagttggcactagctgagaagttcaaggagctgaaacgcagcaagaaattggagaacttcttgagtcgaaagaggcgacgaaatgcaggcaaggacaggagacatctccctttgagcaaagagtaataaggaactatcctctgctctgccactgccccagggagacatggatctgtgaggacagatttggccacggctggtttccgttcaagggcaaggatcacagctgcccttgaatctcattgcctcagagaagactagagggctcttggactatccctagggctacacaagaatagttcagccttctgccatgccacacagcctcagcttgaatctggttcattgcgtcctcgtgttcttctctcatccttgccttaaaccagggattctgataccgaagaagaggggccaatgaaaaccatggagtctgttcgtgactcccagggctgggacattatgtaggagccacttcataaacattctctttactcatcaaaaaaaaaaaaaaaaaaaaaaattctttgtgtgtttcccccccgaaacagagtctcgctctgtcacccaaggtagagaacaggggcgtgcaaactcggcttcatggaactccacttcccaggttcacagtgaatcatttggctcaagcttccgagtagatgaaatcgcgcacaaggccagcaaattcgctcgcagtttcaggagacaccacaaggttgcgcagtggcgcacttgacatcgaaaccactgggcccacaaacgaaacaggagtagcacaaaaccccaacaggtgcgacatacaaggcatatggcacccagcctcagcccacaaccaccgaattaactggcaacatgtcgggcggcaacataacactagtccgcgcgcacagtgagatcagacagaaacccagagctataatggagtgcgcaaacaagacccacgtagcctcgctagcacacctaagaggctatacccacacatgtcgttagtaaggaagcatggaaacggacgaagacctagatacaagaaaggattcgattagcgcgagag

SEQ ID NO: 7111 - DNA, 834 bp, Homo sapiens
  misc_feature (672)..(832): n is a, c, g, or t
ggcgcacatagcgacttggtgggcgcgtccagtgatgactgggggatcccggcaagtaacatgactaaaaagaagcgggagaatctgggcgtcgctctagagatcgatgggctagaggagaagctgtcccagtgtcggagagacctggaggccgtgaactccagactccacagccgggagctgagcccagaggccaggaggtccctggagaaggagaaaaacagcctaatgaacaaagcctccaactacgagaaggaactgaagtttcttcggcaagagaaccggaagaacatgctgctctctgtggccatctttatcctcctgacgctcgtctatgcctactggaccatgtgagcctggcacttccccacaaccagcacaggcttccacttggccccttggtcaggatcaagcaggcacttcaagcctcaataggaccaaggtgctggggtgttcccctcccaacctagtgttcaagcatggcttcctggcggcccaggccttgcctccctggcctgctggggggttccgggtctccagaaggacatggtgctggtccctcccttagcccaagggagaggcaataaagaacacaaagctgtaaaagaaaaaaaaaaaaaaaaaaaaaaaaaaaaagcggccgcaatttgagcttacttggccaattcccgnnnnnnnnnnnnnnnnnnnnnnnnnnnnnnnnnnnnnnnnnnnnnnnnnnnnnnnnnnnnnnnnnnnnnnnnnnnnnnnnnnnnnnnnnnnnnnnnnnnnnnnnnnnnnnnnnnnnnnnnnnnnnnnnnnnnnnnnnnnnnnnnnnnnnnnnnnnnnnnnngt

SEQ ID NO: 7112 - DNA, 1852 bp, Homo sapiens
  misc_feature (26)..(26): n is a, c, g, or t
  misc_feature (28)..(28): n is a, c, g, or t
aattcgcggccgcgtcgaccgcgccntncgacacggctgcgagaagacgacagaagggggggggagcagaggggtctaggaaagggaaaacaactacggctgcggtgtggttggtggtgagatgacgaccttagtgctggataatggagcttacaacgccaaaatcggttacagccatgaaaatgtgtcggttattcctaattgtcagttccggtcaaaaacagcacgtcttaaaacttttactgccaaccagatagatgaaataaaagacccttctggactcttttacatcctcccttttcaaaagggctacttggtgaattgggatgttcagagacaagtttgggattacctttttggaaaagaaatgtatcaggttgattttttagatactaatattattatcactgaaccatactttaacttcacttcaattcaagaatcaatgaatgaaattctatttgaagaataccagtttcaagcagtattaagagtaaatgctggggctctcagtgcacataggtatttccgagataatccttccgaattatgctgtatcattgttgatagtggatattcctttacacatatagttccttattgtagaagtaaaaagaaaaaagaagcaattattcggataaatgtgggaggaaaactcttaaccaatcatctaaaggagatcatatcttacaggcagctacatgttatggatgaaacacatgtgattaatcaagtgaaagaagatgtatgctatgtgtctcaggatttttatagagacatggatattgcaaagttgaaaggagaagaaaatacagtaatgatagactatgtcttgcctgacttcagtacaattaaaaagggcttttgtaagccaagggaagagatggtgttgagtggaaaatacaaatctggggaacaaattcttcgtttggccaatgagagatttgctgttccggaaatactctttaatccttctgatataggcattcaagaaatgggaattccagaagctattgtctattcaattcaaaatctacctgaagaaatgcagccgcatttttttaagaacattgtcttgacaggaggaaattcccttttcccaggatttagggatcgggtttactcagaagttcgatgtcttactccaacagattatgatgtttctgttgtgctgcctgaaaaccctattacttatgcctgggaaggtggaaaattgatatcagagaatgatgattttgaagatatggtggtaacaagagaagattacgaagaaaatggacatagcgtctgtgaagagaaatttgatatttaagcaacatttttgaatgaaagttgtgaccataaggtttaatttcaaagttccttttaaaagaggttaaggaactgtgttaccttttgtcctaagaaaaaggcttgaatttatgtaaatactttgatcgattgctaattttcaaaggcttcttaggtaggttactacagtaaactgtaactcagtccacattttcatttaggagctagactaccataacaatgcttatgctgtttccaagggtaggttatttttcattaaaagaagaatgaatgcattttaagtttaattcttcatagctgaaagcacaaatttaacggcttcactggacagttttccttagaaggtagttttgtgtgactgtgactaaactattttattttaaaatgtcattcttatttatacattctaaagttggaaagactgatcttatatgtgtataatgtttattttgtacctagagtacatttaaaagggtggagactaagctaataaagtttttttggccactaaaaaaaaaaaaaaaaaaaaaaaaaaaaaaaa

SEQ ID NO: 7113 - DNA, 3324 bp, Homo sapiens
  misc_feature (81)..(131): n is a, c, g, or t
  misc_feature (594)..(618): n is a, c, g, or t
tgaaaagattgttttgatcatatgcatgtatgtggaatatttttgcagagcagaaagattatgttagaagtgtgatttttnnnnnnnnnnnnnnnnnnnnnnnnnnnnnnnnnnnnnnnnnnnnnnnnnnnacttaagatatatatataaattttaatttcatagcaacttgtaaaaaataaaatacttgttgaaaagcctttttcaacatatccctaagctaagggaagaggaaggaataacaactcagtgaaaagatggtctccagtttctgaatgaaaaagctacagctgagaaataaaataaaatgtcatgctgcagaatatgttatacccttattttgtgttaaggatatattttattatgtgaatggttttgtttttgttttttgtttttgttttttgcttgtattgggaattagctttactggtaacttccttatttagtttttagtggtcaactctaataaaatgaaactagggctgagctagttagccctcactagccaaactgaaactctatgcaacattaaaagaagagatccatcatgtaaaaaaaaaaacttttattttattagtcaccggggaacttttnnnnnnnnnnnnnnnnnnnnnnnnntaataaaccttcacatggcttcaaaaggaaaacaagcaaatcttctctaatctactcttactataatttcctaagtgtacaccaaactctggatttaaaaatctgaagtactatagaacattaagttgaagaatggaaattaagagtacgtattcatggtttatatttcttattctatggagttcgtgaacacatctaggtggaatgcatctgagactaagggctggtttttaatcctcataagaaaccagccttgaagaattaacaattctcttcattggtattctaaacctcctaagatatttaggcttctgtacataaaagtgtttttgctaaatttacagtatatatagatcctttcatattattttactaagaatgtttgaactttgcatatttgatatagttcctggtaggaatagctcagctcaaacattagtttttctacttacctcctctaacacgtggtttgtctggagagtttctaaaaattcagctataaccccagttcatgtatttactggtgattgttcttgctgaggtagtaacagcccaatcttgggctgttaaatcctaggaaatctcgaatcatagtgattaaaatagttggggtaaagttgtagcttatatgcaatactacttggaggaattcttctactaatttgtatttaatgtggaaattgtatagtttcattgatttaatcataaataatggaaatggtctccaagaagttttattttcatttttttgcttatacactctgattcctataatacagtgctataagctatgcacagaaaataaaatgtttgaaatccaagaataatggttcttactgctaagagggagtaatagttattactaatgattttgattgggttgcatttttgttgcaatgtttattccacttgcagttagaatatgaatatgttttatcactagtgtggctaaataaccaaacgatttgtgtaaaaaaaaaaaaaagccaagatttcattgtttgttgaatatttcttaagcatctggcccctaaagagaccgcttcttaccaagcctgtaaactatgcatgatggaaattcttgtattttatttaggaatggctgttggtttactcaccacatctgtggaatcatggctataaatgtttgcttacaaactctttgtgacttgtaatttaacttaatctcatctaatgtaaatattagattatgatgttcagtaacatcttccataggtataaactgctgtcattattgatttcagagtaactctgagtaatcaaataggtaaaagcatgttttgagtaaaatagctagatttatactttacttgtatacagacttaacaacaaccggtattgactggattgacagctaaagtatcagaatgaaagcaaggtttttttgatgttacctgactgtcataaagatgaaaatgatttgtattggtatgaaatgcttatctttattctacttcgtaagggtaagttttatttatactctttggactcccatgaacttttgcacactgctttgtgtttttggtttaccctaaactaccatcctttttatctttgctttttttcttcctattcagaaaagagcaaaatgtgaaaagacacaagactctcaggtatagaatgaactgagcaatttggagaatgtattggactttgtcctctcttattcccccctcctagccctgcaagttgctaggtacttgtgaggcagtgtactggagaggggagagcatggatcctggggtcaaagggcctttgcccccacccttacttggccctctacctgcaggtgaccactggcacattctcctgcttgtctcagcttcaggttcttcacctctaagatggggatgatgaaaacagtacctgtcatgcagaattgttgggaggattgataatttagatgtttatacatgtaatgtacttagatcagtgtctgctcttttcacttgatatccagtactatgtaagatagaaggtgcatgtcttctgtattctgtatttcccatttcttttgcgtgcagtctttgattcgtacaatagaaggaacacgtagaatgtatatttgtacattcatgtcaacatagtatttgaaattgctaccaaactcatttaatttggcataagactaacagatgaagtctctcatttgcttgaagatattttacaaaataccaactgttctatatttctttagaaaaagattatagttattaatattgatacctctgataatattttattcttaaatcttcagtgattccttttactatagattcatgacagctaattagtactaactgatttagaggtttcctttcccatcatatggaatgatgtaaagaaatcagatacaaactactgcaattagaaaataaaatatgaacaactttcaacaatgaaaaaaaaaaaaaaaaaaaaaaaaaaaaaaggggggctggggccctggaaaaacttttttaaccccatttgtgtggggggcgcgggggcccccataggtacgcggaacactggggcaaagagcggtccccaagagaaaacacggggacagaacatgagcgcgcgggatctcccacccatataaaaaaccgcggggggaaccgaacggtttcggaacaccatcccaaagggatcacgagagaccaaacgggggtctatcacaggggtctcacaggacgcgaatga

SEQ ID NO: 7114 - DNA, 2663 bp, Homo sapiens
  misc_feature (2324)..(2353): n is a, c, g, or t
taaaatactttcagttttcacattttgacaactggcaatcttgaatggtcaaaaatgaattatctgtgttataccatttgggccttgtttgcttgtttttgcctctggttcttacatttatcattaaaatctccactgtagaaagcagttgggtgaagcaaggaggaaattgaaagtcaatccatatggatgttgcttagcagcttttgtaaagtacaataacaaatctccctcacaaatgagagaaactaaaaggacttgttaaataaaactccaaacttaagtctgcttctaggaattgtatttatttatcgtttcaagtatatcttttcatactgactatgagtaaagcaaagcaatagattgtttgaaagtctatagtttatgatgagctttgtcttttcttttcttcttacttcaggctttgagttacacaggtagccacatgaaagtccacttacccagcttagtagagaatgaaatcctgaaagaggatggatcaataattaaaaggtttgggttagcatggggtgatgctttgccaactaacaccataaaaatttttccaattttaagaaaagaaggggagaatccctacatctaccctaaagaggatagaaaactgcctactctcctgtattataatactttggtcaagtaatggatctattgaagtatcatccctgaagtatcctcttgatacttcaaacataatactaagtcatagcaagaatgagactcacgcttacacagtctgactccctgggttttagcaagccatcaacttagttgaagccagcctgatggtattacattgtgtcgatagattcagagagcataggaagaagaatctaatcgatggatcacagattaattttgtgaccagctatattcagctcaatcttagtaaatcattactttgaatggtatgtgctttcttttaacagctgctttatgattctgcatgtgagtggccaataacataagcatgagtttgatatccatgaaacaaatatacctagcgatgctgaaacctggggctttaataagttaagcaagtgtcatgaaagcagtaagcagcacatttttacgcttatacaagggggctgactgtgaggcacactggtctgcccaggtctctgttatggatttgatgtataaacttgggcactgttccacagatctactctggcttctcactggtcctctaacagcactgtaagtattgagattaataaaatgtgctcagcttctcggtgaaaagacacaatggaaatccaagttacaattgtgcttctcacttcattgaaaagggagaaagattgtcattcagagtatgctacagaactattttaagcctttagaacataataattagaacagcaaaattaaaggttctgtcacaattccacccaccaatcaaatgggaaaagagcagcagctaggaatttaaaagagtgtaattgctctctcagaacttaaaaaatgctacatgaattaaggataaaatgccttttatactctcaacttttaagtcttttattcaattattcagatgaaaccacataatccacgcatgcactaacatcatgggctcttcaaacaggaatagatttagagatcaattaatccaaagttctcaattacagctggtgaatttgaagccaggaatatagacaactccatagagtttccacagctagttagttatggaagctagttagttacagaactctatttatgatgtacaacatttattttatacattgttaaagatatcatatacatgtgcatattcagaaacacattggcctacatttgcctacacagaatatcacgaaatgtcctataatggaggcttaacccctggcatcaatgctataaaggcttctactagcttttagcagaaatagtcagaaaagtgcctttttgaagaaaaaaaaaatggctgccgcgtatttaggaaaacatcagatttcaatcattggaatcaaatttgaccttttcatcagcaagaacaaatttaagtttgcttccagatgcagaacaattcatatagtattaaaggaaaaaggggagtagaagaacataagggaagaaggaagaaggaaacaaggatgtccaaaaaaaagctgaaagtattttagctgaagtaagttatttttaaaaatcaggatgatcgtaacaaatgcatagaggtattggatgatggcagaacttccaacttctgaacaatgaaaacataaggaaaatgctgggtaaagctacaaaaactgatcatttcctatggcggttttaagtgtagatgcatagtgtatggttannnnnnnnnnnnnnnnnnnnnnnnnnnnnnggtcccactgtgtgctaattctgttattttttgtttggactattgcttaaattctcggagattcaatttctttatttgttatactagtgtctggcccatacaacacattcgtcaaatacttgtggaatgaggacccgcatttggaagtgtatagtgaaaaaggctgctctgcctatggagtagccattttttattcctttgctttcctaataaacttgcttttactttactctaaaaaaaaaaaaaaaaggacgcgggcgcaagcttattcctttagtgaggggtaattttagctggactggcgtcgttt

SEQ ID NO: 7115 - DNA, 2185 bp, Homo sapiens
gtgtatgtgtgaaaatcaggaagagccagcggggagtgtgtgttgccatcgcgtctccgcctgcagctcggcttcgccatccgcatcatctccatccattattgaagaaacagccgcgtccgctccaatcacatcaacacccccgccccctttccgttccgctcgcccagcggccctctgggtgctgaggagaggggaagccaaggcgcggtgggggcgccgggtgggaatgggcttatgacccttgccccaagcccggccaggagccgggacgccggggtccccggcggagagcgctttgcataaacagatggcgcgggcggctttgtctcactcgttcgctcaccgcgcagctcccggctccgcttctgtctggctgacactttatctcattatccgccggagtgaggcggagagcccgggaccccgcagcctaattacagccgcgcttgtcagagtagggggcggcggaagtatcagcgagaaggaaagggaggcggaccctagaaagcgccctctccctccctgtaccccgacgatcccagagacgggtgcatagctcgctcccgcccgcgccctccacagggcgggctctggagggggaggtgctctgcaggatcggctgcgaggagggagggggtggtggaggttatcgtgggagtggggagagatattaggactcggttcctacgtccctaagacccaaattccccagagacgggggctgtgagcctccccaccccagcagcacagcacacacctgagatggttgaggacaggagggaatcgcttgcatttctgtgtctgtgtcttgttctctttcagcatctgtccgatctttcctgtttcccccactccattcccttcctatccatcccatagccagaggaagtggatggcctccttgggcggccccacctttaccctaccccaggtgcagacatctggaggagagagtcggagagcagaaaccacttggctcccagacaattcccctacaggctttgggcctggaattgaggagaaagggcgggaccccaggaggagggagaggacagagccactgcagaggaccagactgggaaaacaacgatatggcaggagccagtcttggggcccgcttctaccggcagatcaaaagacatccggggatcatcccgatgatcggcttaatctgcctgggcatgggcagcgctgcgctttacttgctgcgactcgcccttcgcagccccgacgtctgctgggacagaaagaacaacccggagccctggaaccgcctgagccccaatgaccaatacaagttccttgcagtttccactgactataagaagctgaagaaggaccggccagacttctaagccaggctgggctgccagtgccatgcaagccacagccagccagcccatccacttcttccactcctccccgcaggccccaaggcatcactccggccaccctgtcccgctactgcttacacaggccgggttcccacgcagaggggaggctgctccacccctactctcctcccttgctcccagcagcggaagcgcctctgacccttggcttgagtcccacgtgggggaggaggaggcaggcagcaccagcaggggtccaccaagagcccagaccagcccctctgccctcctacccgggcctcgaagggtgtggcacaggctacgtgttgagcgtggcctacgtgagccaacaagaagcaggggcctctgagtgccaagcgacgtggcgggctccacgttagcccaggctctgagagccagcccaggggcggcgctgctcagcttgggctggtccagggcctgcccaggctggggcacctttgcctcctgaggcgcagcgcactcctcccctgcccaagcctactgcctcccgctgccgccagtaccccctccagccccacacctgggcctccccctgccactcccctcccttgctcccctctgtccccagggatcaaacagaagcagccgtgggcaaaatacaatttcatttaacaaattgaaaaaaaaaaaaaaaaagacaaaaaagggcgggcccgctctagaaataatccctcccgaggggccccaagccttacgcggtaccccagcttttcccttggtacaaggggggcccccctaaaaaggggagccccgaataataaagcctagggccccctggggccgctcca

SEQ ID NO: 7116 - DNA, 6599 bp, Homo sapiens
  misc_feature (220)..(282): n is a, c, g, or t
  misc_feature (824)..(916): n is a, c, g, or t
  misc_feature (2558)..(2638): n is a, c, g, or t
cggtgcgagcgaacaggagtgggggggaaattaaaaaaagctaaacgtggagcagccgatcggggaccgagaaggggaatcgatgcaaggagcacactaaaacaaaagctacttcggaacaaacagcatttaaaaatccacgactcaagataactgaaacctaaaataaaacctgctcatgcaccatggtttttcaaactcggtacccttcatggattannnnnnnnnnnnnnnnnnnnnnnnnnnnnnnnnnnnnnnnnnnnnnnnnnnnnnnnnnnnnnngtactactgctggattctaaagcacaacaaacagagttggagtggatttcctctccacccaatgggtgggaagaaattagtggtttggatgagaactataccccgatacgaacataccaggtgtgccaagtcatggagcccaaccaaaacaactggctgcggactaactggatttccaaaggcaatgcacaaaggatttttgtagaattgaaattcaccctgagggattgtaacagtcttcctggagtactgggaacttgcaaggaaacatttaatttgtactattatgaaacagactatgacactggcaggaatataagagaaaacctctatgtaaaaatagacaccattgctgcagatgaaagttttacccaaggtgaccttggtgaaagaaagatgaagcttaacactgaggtgagagagattggacctttgtccaaaaagggattctatcttgcctttcaggatgtaggggcttgcatagctttggtttctgtcaaagtgtactacaagaagtgctggtccattattgagaacttagnnnnnnnnnnnnnnnnnnnnnnnnnnnnnnnnnnnnnnnnnnnnnnnnnnnnnnnnnnnnnnnnnnnnnnnnnnnnnnnnnnnnnnnnnnnnnacgcccccaggatgcactgcagtgcagaaggagaatggttagtgcccattggaaaatgtatctgcaaagcaggctaccagcaaaaaggagacacttgtgaaccctgtggccgtgggttctacaagtcttcctctcaagatcttcagtgctctcgttgtccaactcacagtttttctgataaagaaggctcctccagatgtgaatgtgaagatgggtattacagggctccatctgacccaccatacgttgcatgcacaaggcctccatctgcaccacagaacctcattttcaacatcaaccaaaccacagtaagtttggaatggagtcctcctgcagacaatgggggaagaaacgatgtgacctacagaatattgtgtaagcggtgcagttgggagcagggcgaatgtgttccctgtgggagtaacattggatacatgccccagcagactggattagaggataactatgtcactgtcatggacctgctagcccacgctaattatacttttgaagttgaagctgtaaatggagtttctgacttaagccgatcccagaggctctttgctgctgtcagtatcaccactggtcaagcagctccctcgcaagtgagcggagtaatgaaggagagagtactgcagcggagtgtcgagctttcctggcaggaaccagagcatcccaatggagtcatcacagaatatgaaatcaagtattacgagaaagatcaaagggaacggacctactcaacagtaaaaaccaagtctacttcagcctccattaataatctgaaaccaggaacagtgtatgttttccagattcgggcttttactgctgctggttatggaaattacagtcccagacttgatgttgctacactagaggaagctacaggtaaaatgtttgaagctacagctgtctccagtgaacagaatcctgttattatcattgctgtggttgctgtagctgggaccatcattttggtgttcatggtctttggcttcatcattgggagaaggcactgtggttatagcaaagctgaccaagaaggcgatgaagagctttactttcattttaaatttccaggcaccaaaacctacattgaccctgaaacctatgaggacccaaatagagctgtccatcaattcgccaaggagctagatgcctcctgtattaaaattgagcgtgtgattggtgcaggagaattcggtgaagtctgcagtggccgtttgaaacttccagggaaaagagatgttgcagtagccataaaaaccctgaaagttggttacacagaaaaacaaaggagagactttttgtgtgaagcaagcatcatggggcagtttgaccacccaaatgttgtccatttggaaggggttgttacaagagggaaaccagtcatgatagtaatagagttcatggaaaatggagccctagatgcatttctcaggaaacatgatgggcaatttacagtcattcagttagtaggaatgctgagaggaattgctgctggaatgagatatttggctgatatgggatatgttcacagggaccttgcagctcgcaatattcttgtcaacagcaatctcgtttgtaaagtgtcagattttggcctgtcccgagttatagaggatgatccagaagctgtctnnnnnnnnnnnnnnnnnnnnnnnnnnnnnnnnnnnnnnnnnnnnnnnnnnnnnnnnnnnnnnnnnnnnnnnnnnnnnnnnnatgtatggagctatggaatagtcatgtgggaagttatgtcttatggagaaagaccttattgggacatgtcaaatcaagatgttataaaagcaatagaagaaggttatcgtttaccagcacccatggactgcccagctggccttcaccagctaatgttggattgttggcaaaaggagcgtgctgaaaggccaaaatttgaacagatagttggaattctagacaaaatgattcgaaacccaaatagtctgaaaactcccctgggaacttgtagtaggccaataagccctcttctggatcaaaacactcctgatttcactaccttttgttcagttggagaatggctacaagctattaagatggaaagatataaagataatttcacggcagctggctacaattcccttgaatcagtagccaggatgactattgaggatgtgatgagtttagggatcacactggttggtcatcaaaagaaaatcatgagcagcattcagactatgagagcacaaatgctacatttacatggaactggcattcaagtgtgatatgcatttctcccttttaagggagattacagactgccagagaacagtactggccttcagtatatgcatagaatgctgctagaagacaagtgatgtcctgggtccttccaacagtgaagagaagatttaagaagcacctatagacttgaactcctaagtgccaccagaatatataaaaagggaatttaggatccaccatcggtggccaggaaaatagcagtgacaataaacaaagtactacctgaaaaacatccaaacaccttgagctctctaacctcctttttgtcttatagactttttaaaatgtacataaagaatttaagaaagaatatatttgtcaaataaaatcatgatcttattgttaaaattaatgaaatattttccttaaatatgtgatttcagactattcctttttaaaatcatttgtgtttattcttcataaggactttgttttagaaagctgtttatagctttggacctttttagtgttaaatctgtaacattactacactgggtacctttgaaagaatctcaaatttcaaaagaaatagcatgattgaagatacatctctgttagaacattggtatcctttttgtgccattttattctgtttaatcagtgctgttttgatattgtttgctaattggcaggtagtcaagaaaatgcaagttgccaagagctctgatattttttaaaaagaatttttttgtaaagatcagacaacacactatcttttcaatgaaaaaagcaataatgatccatacatactataaggcacttttaacagattgtttatagagtgattttactagaaagaatttaataaactcgaagtttaggtttatgagtatataaacaaatgaggcacttcatctgaagaatgttggtgaaggcaagtctctgaaagcagaactatccagtgttatctaaaaattaatctgagcacatcaagattttttcattctcgtgacattaggaaatttaggataaatagttgacatatattttatatcctcttctgttgaatgcagtccaaacatgaaaggaaataattgttttatattataactctgaagcatgataaaggggcagttcacaattttcaccatttaaacacaaatttgctgcacagaatatcaccattgcagttcaaaacaaaacaaaacaaaaagtcttttgtttgtgaacactgatgcaagaaacttgttaaatgaaaggactctttaccctagaaggaagaggtgaaggatctggcttgtttttaaagctttatttattaaaccatattatttgattactgtgttagaatttcataagcaataattaaatgtgtctttatggatattgcaggaatgtatacatattgtgattaatgctttcaaaacttatgaaaatcatgaactaccccagaattgaactgttgtacttccaaagagaattgggctgtttataatgattttaatagagaaagatcccagggatcggtcataattggtcttgtttgataatgtgggcatccacaaacaaacaaacaaataacagaaacaaaatctgtaaatgttcctttgtaaaacttgtaaattttatttatactgtcttgttttgtacacacatttctctgtagtgggctctgaatacattgaaaatgcactatatttttctattttacttgcagagcatcacaaaagaacaggtattttcagtgctacataatgtgttttcccacatttaggaccaaagacggctatagaaaaactcaaatggattgcttcccaaacccctccccaccctttttttttggttttaaatcactgtacagtgttatttgatattttaatttattttttgattgactagaaaaatcattttaatttcactaaaatgttttttgtccctaaggaaaagtaatctgtaaaaataattttaattagcataatacagtcacctagacacttccatttgtaatctttgtaatagactgtaaatatatttttggaactataacacaatgtgcttgagggttatttttcagtgtctgcagtgtgtacaagtgtttatactaagtccagcactttacaattctaatcagtagcattggcctttgtgagaatgagtgaaagagtttgagtgagtgttcttaattccttttggattctagactcactaataatgaagttcttttcttgttcatagcttaaggtgcttattttttctattaaaattaaattaacaaaagccattctagaaatagaagacatagtatggtacatgcaaacggtgtctttcctgcttttttctagcactagatttatagttgagtagtctttcttgagtagaagggcagaataaaagtttttttgagtttttttcaaaaataactttttccttcagcaatatacctcatctgccttaaattttttacagctctttacagggaaaggggagaagggatgggaaagacacacagcacaataggaagtgtatgattacatcactatctcgtttgtaagtttcttttcctaatcaacattatgatttcgaaatacatgtatgtgaaacaaatattaagagaaaaagaattaacattgtaatgctgattgtaatactctcttccagaaagagatgagatggtataacgataagaatgtacaacttgcaccttgaaatctttttttttaaataaattagtgctcaggggaggaaaagtagagaaagtgaacgtcaaaaatagaattccaaaattataaaaatgcaaaaggaaatggcctccttgctttaatagagccaccttttttagaacactgtcctcacacttgacctgtgttttgcattcagtactgaaataaaagtaacttgttctacatttgaatctaacattttctcagcaattgatctggtccttgtttactagaactggtggtttatgcttgtcagagcactattagttgaatcatattgtatacttatgtaatctacattagctagtactgtttaggactatattttaattgctcttcttatccgtgtttttaagacaattaaaatggtgtgattcacctctcttttttatttaggtaatgctgatattctcccttttgtttcttgagtagcctagaactatgctactcactgatgtgcatgttcaaataaattactgatgtgtatttttttgctatatgtggagaaatcatggggaactcggggcgagatgtgcttttcgttggttgaatttgtccctccttgcctaagaaatactacaggggtcatccttttataaggacaaactgcttttgaacagtgtcttcaatgtatcaagcacaaataactctttcttcaacatgaatcataagtctctttttaccagcttaaaataataaacaagtctattagacaatgtaaagaaaaaaaaaaaaaa

SEQ ID NO: 7117 - DNA, 1529 bp, Homo sapiens
  misc_feature (308)..(309): n is a, c, g, or t
  misc_feature (325)..(340): n is a, c, g, or t
  misc_feature (456)..(517): n is a, c, g, or t
ctttctcctctattctaaacgctgatctgcctgtggtaatggcgtcactctctgactgatttcttatgttagttcggttggtgtagcgctcacacgttttataccttttatgggttcttgacttcgtacattcgtcagttgtgtcctctgtgttccttctttgcagaaccttgatattgtttgccgattgtcggcaccgctggttctcttgcccttttctttgcaactttgtgagccccctaaccttgtgttggttctatattattccctcatagtatggactaacccgtgtggcagtgcacagcttnnttacgccttgtttgannnnnnnnnnnnnnnnctgagcctgtacccagccgtttcctatacatggctcccggcttctcccggtgtgtctcatccgtccttaacatgccggcttcggctttctatgctcttggtacttggtctcaaggnnnnnnnnnnnnnnnnnnnnnnnnnnnnnnnnnnnnnnnnnnnnnnnnnnnnnnnnnnnnnncctggccccagtgtaccccttcccccatcacaggtgtggggctggcctcgctcgtggcacctctgctgatctcacaggccatgggactggccctctatgtcctgccagtgctgggccaacacgttgccacccagcacttcccagtggcagaggctgaggctgtggtgctgacactgctggcgatttatgcagctggcctggccctgccccacaatacccaccgggtggtaagcacacaggccccagacaggggctggatggcactgaagctggtagccctgatctacctagcactgcagctgggctgcatcgccctcaccaacttctcactgggcttcctgctggccaccaccatggtgcccactgctgcgcttgccaagcctcatgggccccggaccctctatgctgccctgctggtgctgaccagcccggcagccacgctccttggcagcctgttcctgtggcgggagctgcaggaggcgccactgtcactggccgagggctggcagctcttcctggcagcgctagcccagggtgtgctggagcaccacacctacggcgccctgctcttcccactgctgtccctgggcctctacccctgctggctgcttttctggaatgtgctcttctggaagtgagatctgcctgtccgggctgggacagagactccccaaggaccccattctgcctccttctggggaaataaatgagtgtctgtttcagcagaaaaaaaaaaaaaaaaaaaaaaaaaaaaaaaaaaaaaaaaaaaaaaaaaaaaagttggcggccgccaacttttttttttttttttttaactggtaatagaatttattcaaatgtgccttaatataggcgctggggcttgcccatggtgctcttgatatataaggcccggacattctgccagtttttcttgagcaatgacaccaagaagttgacagccaggtgaatgttatacacaagctcatcgtctggcatcttcacgtgaccaacagctacagccagacataac

SEQ ID NO: 7118 - DNA, 1455 bp, Homo sapiens
  misc_feature (14)..(14): n is a, c, g, or t
  misc_feature (221)..(259): n is a, c, g, or t
cccagggaatttcnccaagggacagaccaacccgccaggagggtttctaaaggttttcacctttctcaaaaattcatccatttctaggaagtttctaggggtgatatcattggaccttggcggggcacccctttctggcacagtcagaccagtactggtagttgagagttgtggggtaaacttggctctcataaaaaagaaaggcattgtatttcaagtcnnnnnnnnnnnnnnnnnnnnnnnnnnnnnnnnnnnnnnnaaggaacctctttgagttggtgagccatcaacaaatctgagtgccatttgtgtgtttcactggccattctgaacaagtagaaaggaaactaggatggaagttaggaaattatgttccatcctggctctttcactaaaacccaatttatgggtatataagatgcaatttcccctatgtgaaagacaattcaaaaattgctccatatcatacgtgtccataccacaaatggaaagcctagtactaaagttacaaaataatgatgtcacctctagtggtgaaataaggaaacaaaatataacagcaaaaataagagtttcccgtcataatggtagtttccttaacaaaaataaccacagggcaactgatcagaaggaaagtattactctaaaattttagatttaaatttgttactactataataatgctgcataccaaaactgattgacatctaaacatttctgtgtagtgctgagattttcatatctatttttttttcagggtaagactgacttttttttgctaatattgcgcccatgatatcttattggattctaatatatataaggatatcatatttacatcaacaagataatatttttctttttatacttccagatcattgtctctatataacaaaaagtatttaatattttaattttcaaaaatgtctctgtaaataagatacatcttacacagactgtatgtcttacagaatagcaattatattcaatatgtttatttctttgtgttacaatttccttgtttgccttatagagatgattcaggaccctaccaaatccactaggctgttgcaaatatcaagatcatctatgcaatagtcatttgagaaaaataaagcattatgcaaaatattgctatgctgataccaactatatgagcaactagggattaagccagatccccgtggggaacagaatattcaacttcctccttgcagtgaggtgataaaacctgtatggaccagctaggtaaccctagggggaaagaaattgtttaaagagacctttctaaggctggtaggaagttgaattttcttaccaatagaagcagctgaactatttgttttttacacattaaatttgaagttggtctctgatttccacccattgcccaagagtttaagaaagagagatgaccacagctactgatgattaacagatcaaatgtttttgtct

SEQ ID NO: 7119 - DNA, 2316 bp, Homo sapiens
  misc_feature (249)..(249): n is a, c, g, or t
  misc_feature (310)..(311): n is a, c, g, or t
  misc_feature (998)..(1014): n is a, c, g, or t
  misc_feature (1056)..(1056): n is a, c, g, or t
  misc_feature (1069)..(1070): n is a, c, g, or t
  misc_feature (1074)..(1074): n is a, c, g, or t
  misc_feature (1105)..(1105): n is a, c, g, or t
  misc_feature (1107)..(1149): n is a, c, g, or t
  misc_feature (2085)..(2088): n is a, c, g, or t
  misc_feature (2090)..(2090): n is a, c, g, or t
  misc_feature (2094)..(2094): n is a, c, g, or t
  misc_feature (2126)..(2126): n is a, c, g, or t
tccataatgtgtgccagagggggaaagcatttgtggggatggtatgaagccagccatggaaactgcagccgaggaaaatactgaacaaagccaagagagaaaagtgaacagcagagctgaaatggaaatgggcaggtaccacgtggatgtacccatggctcacaagaaccaccacgtaccatcccggtgccaacccgtgggggacagggcatagcccacttgagcgagtccaggtctgctttgaatgcntgcatcatagtgtctggggaggagtccccttacgcctcccgtggtggccaccattcctctnngcttctccggtggtggccgttattctggcggctgtgggcatgtggctctcgcaggcaccgtggcgattcttgagcaacacttctccaccaacgccagtgaccatgccttgctgagcgaggtgatacaactgatgcaatatgtcatctatggaattgcgtcctttttcttcttgtatgggatcattctgttggcagaaggcttttacaccacaagtgcagtgaaagaactgcacggtgagtttaaaacaaccgcttgtggccgatgcatcagtggaatgttcgttttcctcacctatgtgcttggagtggcctggctgggtgtgtttggtttctcagcggtgcccgtgtttatgttctacaacatatggtcaacttgtgaagtcatcaagtcaccgcagaccaacgggaccacgggtgtggagcagatctgtgtggatatccgacaatacggtatcattccttggaatgctttccccggatatgtggctctgccctggagaacatctgcaacacaaacgagttctacatgtcctatcacctgttcattgtggcctgtgcaggagctggtgccaccgtcattgccctgctgatctacatgatggctactacatataactatgcggttttgaagtttaagagtcgggaagattgctgcactaaattctaaattgcataaggagttttagnnnnnnnnnnnnnnnnncatgaaatattactggccttcagactaaagcagagtctaggnttctgcattttgnntacncgaatttgttagctttagtcttaccttggtngnnnnnnnnnnnnnnnnnnnnnnnnnnnnnnnnnnnnnnnnnnngaattacacaataatgagatctggtggctatttccacattttgaaaaggattcagttatttactgacagtggtgagcatcctttttaaaataatgttctcatacttaaacattagagagcagtatctttaaatgaattattaacactttggaatactcacattttctgttattttttgattgcctgataaccagtttcaatgatgaaaatgaaaacaagtgctgaagatgaaatggaagagaaccgttttaatctggattttgttttgtcacacctggaaaatactttgcaaatatgttctaaattgaaaacaatttttttatgatcacatggttcactaccaaatgaccctcaaataagccagatgaaaatttgaagaaaaaggtcacccagttctctgggaaaaaaaaaaaaaaaaaaaaaaaaaaaaggatttatatgtgggtagttttttttttggtacaacacaatcattctgttagagcccacaaaattggtaaccttaaattgtgtgttttggtaagtaataactaactgtttcctcatagctagttctcaagctgcatgtaagattttaacgggaagagaaaataggcctggacctgaaggtctcaaatatgttgagaagaaagtatgaactataaggaacttgagatgtagatttattttgcaggaaatacgaggaaaataggaaagaagtgtttgccgcatcaagtgtaaagaatgatactgaggatttttacattttatgaaatgaaataatggcatttacaaaatgaaaaatgtagtttcacaactaagttttgttaacagagactgcatgctttgcttatagttcttaattttggttttgacattcatttaattttttccatgttaaatatgtagtttaattatttactcaaaataaacattgttcatgcttttaggcaaaannnncnaaangacagccggcacacggccaccacccgcccagnagggggcgcgcccatccaaaaaaatcccccaagagggccagaataaacgcgaaaccgacttttctcgggacaagggggcgccccatggagggctcgaagtatgacctttgcccgggggcggcgccgctcaaaagaaccccccggggagagcgccctttttgggggcccattctttttgtgaacaaagggg

SEQ ID NO: 7120 - DNA, 3110 bp, Homo sapiens
  misc_feature (212)..(228): n is a, c, g, or t
  misc_feature (499)..(517): n is a, c, g, or t
tgaacattgaggatggcgcgtgcccgcggctccccgtgccccccgctgccgcccggtaggatgtcctggccccacggggcattgctcttcctctggctcttctccccacccctgggggccggtggaggtggagtggccgtgacgtctgccgccggagggggctccccgccggccacctcctgccccgtggcctgctcctgcagcaaccaggnnnnnnnnnnnnnnnnnacacggagagacctggccgaggtcccagccagcatcccggtcaacacgcggtacctgaacctgcaagagaacggcatccaggtgatccggacggacacgttcaagcacctgcggcacctggagattctgcagctgagcaagaacctggtgcgcaagatcgaggtgggcgccttcaacgggctgcccagcctcaacacgctggagctttttgacaaccggctgaccacggtgcccacgcaggccttcgagtacctgtccaagctgcgggagnnnnnnnnnnnnnnnnnnnccatcgagagcatcccctcctacgccttcaaccgcgtgccctcgctgcggcgcctggacctgggcgagctcaagcggctggaatacatctcggaggcggccttcgaggggctggtcaacctgcgctacctcaacctgggcatgtgcaacctcaaggacatccccaacctgacggccctggtgcgcctggaggagctggagctgtcgggcaaccggctggacctgatccgcccgggctccttccagggtctcaccagcctgcgcaagctgtggctcatgcacgcccaggtagccaccatcgagcgcaacgccttcgacgacctcaagtcgctggaggagctcaacctgtcccacaacaacctgatgtcgctgccccacgacctcttcacgcccctgcaccgcctcgagcgcgtgcacctcaaccacaacccctggcattgcaactgcgacgtgctctggctgagctggtggctcaaggagacggtgcccagcaacacgacgtgctgcgcccgctgtcatgcgcccgccggcctcaaggggcgctacattggggagctggaccagtcgcatttcacctgctatgcgcccgtcatcgtggagccgcccacggacctcaacgtcaccgagggcatggctgccgagctcaaatgccgcacgggcacctccatgacctccgtcaactggctgacgcccaacggcaccctcatgacccacggctcctaccgcgtgcgcatctccgtcctgcatgacggcacgcttaacttcaccaacgtcaccgtgcaggacacgggccagtacacgtgcatggtgacgaactcagccggcaacaccaccgcctcggccacgctcaacgtctcggccgtggaccccgtggcggccgggggcaccggcagcggcgggggcggccctgggggcagtggtggtgttggagggggcagtggcggctacacctacttcaccacggtgaccgtggagaccctggagacgcagcccggagaggaggccctgcagccgcgggggacggagaaggaaccgccagggcccacgacagacggtgtctggggtgggggccggcctggggacgcggccggccctgcctcgtcttctaccacggcacccgccccgcgctcctcgcggcccacggagaaggcgttcacggtgcccatcacggatgtgacggagaacgccctcaaggacctggacgacgtcatgaagaccaccaaaatcatcatcggctgcttcgtggccatcacgttcatggccgcggtgatgctcgtggccttctacaagctgcgcaagcagcaccagctccacaagcaccacgggcccacgcgcaccgtggagatcatcaacgtggaggacgagctgcccgccgcctcggccgtgtccgtggccgccgcggccgccgcggccagtgggggtggtgtgggcggggacagccacctggccctgcccgccctggagcgagaccacctcaaccaccaccactacgtggctgccgccttcaaggcgcactacagcagcaaccccagcggcgggggctgcgggggcaaaggcccgcctggcctcaactccatccacgaacctctgctcttcaagagcggctccaaggagaacgtgcaagagacgcagatctgaggcggcggggccgggcgggcgaggggcgtggagccccccacccaggtcccagcccgggcgcagcctgaccgggacccctccctcccacagcccagcccaccttctgggaccacgcagggaattggggagaggtggcttccagccccatctggggctcggacccccagtaaggacagggtggggctccaggagcggagtctctgggatcctcgcctcacccccgccaatccccggtgacgggaggggacgtgggacccaggagaagtggcctgagttctccgcgtttcctcctcgctctcccaccaagcgttccgggcccgccgccttccaggggagagaggagctttctccaggggtgtcctttcccctcggccccgaacaccttccttttacggttcagtttttgcagtttgacgcccgttgcttcctcccattcgtccggcctcgaaaactggaagagatggacgcgtcggccggaaggtcccggtccccaagggcccgggggttctgctcccggggcggggcgggccccctggcgggtccggcgcccggggggggagcccctccgccccggcccccgagcgcccccccctggcgacccgcagggaccggctctccggccacacccggaagcgggagggttgttccgggccctagccaccttcagccggcgaccgcgagccccggcgtgtcaccgaaatgtggaccgcgtcccgggcaaggaccgggcgccgcccggcgcgccgcccccggcgggcgtccctcggctctcgcgggcccccgtcgtagacctgcgcgcgctgcgggccccgctgacattcctcagggcagccgagccgggcccacaagcggtgtggaaccgggaccgatagacagctgtgcgagggagacccctgatagcgctcgctaccttccctcacgcctcgcccatccatccgtgtgtacaccctcgaaca

SEQ ID NO: 7121 - DNA, 3231 bp, Homo sapiens
ggcacgagggcattgcgcagacgaccagcgggcgcctcggattccgcccccgggatggccccgcctcctcccgccccgcggcaaggcacgcacagggcagtgcgcgggtgggtgggtcctagcagcgcggcctgacgggaccaaggcggcgggagtctgcggtcgttccctcggctgtggaccgggcggcacgcacgcggtgcagggtaacatggcggatgcggaagtaattattttgccaaagaaacataagaagaaaaaggagcggaagtcattgccagaagaagatgtagccgaaatacaacacgctgaagaatttcttatcaaacctgaatccaaagttgctaagttggacacgtctcagtggccccttttgctaaagaattttgataagctgaatgtaaggacaacacactatacacctcttgcatgtggttcaaatcctctgaagagagagattggggactatatcaggacaggtttcattaatcttgacaagccctctaacccctcttcccatgaggtggtagcctggattcgacggatacttcgggtggagaagacagggcacagtggtactctggatcccaaggtgactggttgtttaatcgtgtgcatagaacgagccactcgcttggtgaagtcacaacagagtgcaggcaaagagtatgtggggattgtccggctgcacaatgctattgaaggggggacccagctttctagggccctagaaactctgacaggtgccttattccagcgacccccacttattgctgcagtaaagaggcagctccgagtgaggaccatctacgagagcaaaatgattgaatacgatcctgaaagaagattaggaatcttttgggtgagttgtgaggctggcacctacattcggacattatgtgtgcaccttggtttgttattgggagttggtggtcagatgcaggagcttcggagggttcgttctggagtcatgagtgaaaaggaccacatggtgacaatgcatgatgtgcttgatgctcagtggctgtatgataaccacaaggatgagagttacctgcggcgagttgtttaccctttggaaaagctgttgacatctcataaacggctggttatgaaagacagtgcagtaaatgccatctgctatggggccaagattatgcttccaggtgttcttcgatatgaggacggcattgaggtcaatcaggagattgtggttatcaccaccaaaggagaagcaatctgcatggctattgcattaatgaccacagcggtcatctctacctgcgaccatggtatagtagccaagatcaagagagtgatcatggagagagacacttaccctcggaagtggggtttaggtccaaaggcaagtcagaagaagctgatgatcaagcagggccttctggacaagcatgggaagcccacagacagcacacctgccacctggaagcaggagtatgttgactacagtgagtctgccaaaaaagaggtggttgctgaagtggtaaaagccccgcaggtagttgccgaagcagcaaaaactgcgaagcggaagcgagagagtgagagtgaaagtgacgagactcctccagcagctcctcagttgatcaagaaggaaaagaagaagagtaagaaggacaagaaggccaaagctggtctggagagcggggccgagcctggagatggggacagtgataccaccaagaagaagaagaagaagaagaaagcaaaagaggtagaattggtttctgagtagtgaaggccacttgaagctggaggagaaactaaagccttattgagaaaacatgttatagatccttttgttgctgagagagtggaacataggtcctagacagggtgaagagttctggcacattttagctgctactttgagacctcggtgatgttacctggtgtggtcatcccatcttgtcctgttttaaggatatgggtggtgaaagatgaaagaggcagagtttatcccaatgacttctctgtttgagttgggaagcctcaccttcagacccagtaactgtccgcagctgtctgctagtggttgtcttaacatcgtagtcctagtttgcattttttaaatcccctctgtttaaaaggtttgtaaaacaaaaacaaaaaactaagtctgctcagtgaaatgctgtagaaccctaaataagtggtagaagagtgtcactgaattttgtctctgaattcagtataactgagttttgtccatgctggtgtctgggttataggcctgatgggcctggtagttttccatcttgttctggcctagaggtcagtcctttgcacttcctcaaagcttgtgtacagtgctcacctaaatccatctgactacttgttcctgtgccctcttgttttaggcctcgtttacttttaaaaaatgaaattgttcattgctgggagaagaatgttgtaatttttacttattaaagtcaacttgttaagttttttatgtattcctgttgggttttcttgttgatctcatgctagcagagcaaaaattgtaaaatattttgattaaaaatctagggacctttatgtcctatttgaaaaaaaaaaaaaaaaaaaaaaaacaacaaaaaaaaaaaagggggcggccgcgcccaaaattttccccgggggggccccaaactttagcgcgtgttccccgcgctttttttgtccaaagggggcccctatatggggggggccgttttaaaggccaaggccggggcccggttttaaccaccctcttggtgcccgcggcaagcccgttgccttctcttggggctctttggtcacagggacccttcacttcctgctgcggctctggccctcttttctgggcgcaaaccactccccttcccaggaagtttcaacggcctcctagcgctaaacttttataacacttcttccacgcgtgtccttcgtgcttgttcaaccccacacgtggtcctattgtgccttgcggtgctctgggaaacaactttggctccacgcgggacttttgcattttgtggaacactttcttttttccccgcggacacctcttgcttcaacaaaccggtatccaatgccagccgacaacatacacaccaacgatgatgaccacatcaatcacctgccaacactcaacacatcagatacaacacaccacaatcactgatcatacgtgacaattctacacacacatgaacaaccactagacgactcagcactgcccacactgaa

SEQ ID NO: 7122 - DNA, 2405 bp, Homo sapiens
actataagaatcactggcaatcagacgcccgggtgtgctgagctagcgctcagtgggggcggctactgctcatgtgattgtggagtagacagttggaagaagtacccagtccatttggagagttaaaactgtgcctaacagaggtgtcctctgacttttcttctgcaagctccatgttttcacatcttccctttgactgtgtcctgctgctgctgctgctactacttacaaggtcctcagaagtggaatacagagcggaggtcggtcagaatgcctatctgccctgcttctacaccccagccgccccagggaacctcgtgcccgtctgctggggcaaaggagcctgtcctgtgtttgaatgtggcaacgtggtgctcaggactgatgaaagggatgtgaattattggacatccagatactggctaaatggggatttccgcaaaggagatgtgtccctgaccatagagaatgtgactctagcagacagtgggatctactgctgccggatccaaatcccaggcataatgaatgatgaaaaatttaacctgaagttggtcatcaaaccagccaaggtcacccctgcaccgactctgcagagagacttcactgcagcctttccaaggatgcttaccaccaggggacatggcccagcagagacacagacactggggagcctccctgatataaatctaacacaaatatccacattggccaatgagttacgggactctagattggccaatgacttacgggactctggagcaaccatcagaataggcatctacatcggagcagggatctgtgctgggctggctctggctcttatcttcggcgctttaattttcaaatggtattctcatagcaaagagaagatacagaatttaagcctcatctctttggccaacctccctccctcaggattggcaaatgcagtagcagagggaattcgctcagaagaaaacatctataccattgaagagaacgtatatgaagtggaggagcccaatgagtattattgctatgtcagcagcaggcagcaaccctcacaacctttgggttgtcgctttgcaatgccatagatccaaccaccttatttttgagcttggtgttttgtctttttcagaaactatgagctgtgtcacctgactggttttggaggttctgtccactgctatggagcagagttttcccattttcagaagataatgactcacatgggaattgaactgggacctgcactgaacttaaacaggcatgtcattgcctctgtatttaagccaacagagttacccaacccagagactgttaatcatggatgttagagctcaaacgggcttttatatacactaggaattcttgacgtggggtctctggagctccaggaaattcgggcacatcatatgtccatgaaacttcagataaactagggaaaactgggtgctgaggtgaaagcataacttttttggcacagaaagtctaaaggggccactgattttcaaagagatctgtgatccctttttgttttttgtttttgagatggagtcttgctctgttgcccaggctggagtgcaatggcacaatctcggctcactgcaagctccgcctcctgggttcaagcgattctcctgcctcagcctcctgagtggctgggattacaggcatgcaccaccatgcccagctaatttgttgtatttttagtagagacagggtttcaccatgttggccagtgtggtctcaaactcctgacctcatgatttgcctgcctcggcctcccaaagcactgggattacaggcgtgagccaccacatccagccagtgatccttaaaagattaagagatgactggactaggtctaccttgatcttgaagattcccttggaatgttgagatttaggcttatttgagcactacctgcccaactgtcagtgccagtgcatagcccttcttttgtctcccttatgaagactgccctgcagggctgagatgtggcaggagctcccagggaaaaaggaagtgcatttgattggtgtgtattggccaagttttgcttgttgtgtgcttgaaagaaaatatctctgaccaacttctgtattcgtggaccaaactgaagctatatttttcacagaagaagaagcagtgacggggacacaaattctgttgcctggtggaaagaaggcaaaggccttcagcaatctatattaccagcgctggatcctttgacagagagtggtccctaaacttaaatttcaagacggtataggcttgatctgtcttgcttattgttgccccctgcgcctagcacaattttgacacacaattggaacttactaaaaatttttttttactgttaaaaaaaaaaaaaaaaaaaaagaaaaataaaataaaaaaaaaaaaaaaaaaagagg

SEQ ID NO: 7123 - DNA, 2338 bp, Homo sapiens
  misc_feature (1401)..(1428): n is a, c, g, or t
agtcctgcgatttcgggtgtagagggagcaggggcctgcggggacctggtgtgggtggagtggggacaagcggtggagaagggtacgccagggtcgctgagagactctgttctccctggagggactggttgccatgagagcagccgtctgaggggacgcagcctgcactacgcgccccaagaggctgtgcgtggcgagcaggtcacgtgacgggagcgcgggctttggaaggcggctgaacgtcaggccacccgccgctaagctgagaagggagagcgagcttaggaccgcctgcccggggcaaccccgaaccaagctttagccgccgaggccgcgtgtcccaaaggccagtcatccctcctctgtgttgccatgggaattcaaggcctggccaaactaattgctgatgtggcccccagtgccatccgggagaatgacatcaagagctactttggccgtaaggtggccattgatgcctctatgagcatttatcagttcctgattgctgttcgccagggtggggatgtgctgcagaatgaggagggtgagaccaccagccacctgatgggcatgttctaccgcaccattcgcatgatggagaacggcatcaagcccgtgtatgtctttgatggcaagccgccacagctcaagtcaggcgagctggccaaacgcagtgagcggcgggctgaggcagagaagcagctgcagcaggctcaggctgctggggccgagcaggaggtggaaaaattcactaagcggctggtgaaggtcactaagcagcacaatgatgagtgcaaacatctgctgagcctcatgggcatcccttatcttgatgcacccagtgaggcagaggccagctgtgctgccctggtgaaggctggcaaagtctatgctgcggctaccgaggacatggactgcctcaccttcggcagccctgtgctaatgcgacacctgactgccagtgaagccaaaaagctgccaatccaggaattccacctgagccggattctgcaggagctgggcctgaaccaggaacagtttgtggatctgtgcatcctgctaggcagtgactactgtgagagtatccggggtattgggcccaagcgggctgtggacctcatccagaagcacaagagcatcgaggagatcgtgcggcgacttgaccccaacaagtaccctgtgccagaaaattggctccacaaggaggctcaccagctcttcttggaacctgaggtgctggacccagagtctgtggagctgaagtggagcgagccaaatgaagaagagctgatcaagttcatgtgtggtgaaaagcagttctctgaggagcgaatccgcagtggggtcaagaggctgagtaagagccgccaaggcagcacccagggccgcctggatgatttnnnnnnnnnnnnnnnnnnnnnnnnnnnnagctaagcgcaaggagccagaacccaagggatccactaagaagaaggcaaagactggggcagcagggaagtttaaaaggggaaaataaatgtgtttccccattatacctccttcaccccagaatatttgccgtcttgtacccttaagagctacagctagagaaaccttcacggggtggagagaggattctaaggcttttctagcgtgacccttttcagtagtgctagtcccttttttacttgatcttaatggcaagaaggccacagaggtacttttccttttttagctcaggaaaatatgtcaggctcaaaccacttctcaggcagtttaatggacactaagtccattgttacatgaaagtgatagatagcaacaagttttggagaagagagagggagataaaagggggagacaaaagatgtacagaaatgatttcctggctggccaactggtggccagtgggaggtgatggtggacctagactgtgcttttctgtcttgttcagccttgacccaccttgagagagagccaccaggaaggcgcatcttagcagatgggaggaactgctgagagaagatgggcagaaagctggagcccctggagttggctgtgtctgtgtttgtgactgattactggctgtgtcttgggtgggcagaaactcgaacttgctatgtaatttgtgtctagttattcagaggagtaagatggtgatgttcacctggcaatcagctgagttgagactttggaataagacactggttttcatgcgctgtttttgttttaaagttatgaagaaaaaagtcaataaaattctaaaagtaaaaaaaaaaaaaaaaaagtaactcctaaaaaaagggggcgggccgcctcccaaaaaatattccccttccgaggggggccccaaggcttc

SEQ ID NO: 7124 - DNA, 568 bp, Homo sapiens
  misc_feature (141)..(177): n is a, c, g, or t
tttgctggttatcctggccaagtgtcttcagaactcatccaagttacgagacgaaataaactaaaatcacctcattaatttttttcccttagttacaaccaaatgaatttatgtaatctctgaatgaactacatccctatnnnnnnnnnnnnnnnnnnnnnnnnnnnnnnnnnnnnngcattaaaaggaaatacttttcagtatttcttttcatgccaaaaaacctacagaataattttccaaacagtcctttattcgtaattataagaattaaacaatctaaaatattaaagatttaccctccagcacattcactgggtaaagaccatttaatttgccctctcagggaatttgaaataaattatttgtcctggatattctttaaaaactttttatttattcagcaaattttggcaaaaaaatttctttctttgcttaaaacattctggtactatataaggaacaacaaactaaaatgtatgtagtgttattttgtaatctcatcactatcaataaagctgcattcaataagaaaaaagtaaatgactaaaaaaaaaaaaagtcgacg

SEQ ID NO: 7125 - DNA, 591 bp, Homo sapiens
tttttttttttttttaagggaaacaagaaataaatgtatttaattttaaaacagccataataaaagtagacttgataaataaaacccaaaaccacttctttgaaaagaccgttaaaaaaacctctgagaagtcaagcaaaagagaaagaaaaggcacaaattttaaaatgttagatttagaaaaatggcataataaccaacgtggagaagctgcttcaaatcaaggagacgggaggccagcttcattccatgggaggccagcttcattccagtaggttctgtttcacctggatgaaatggaagattttcttggaatgtataaattggcttagcaggaggcagaaaaccctttcacagctggggagtggagccttgggccttgcgcctctccgcgccagagccggcgccagcgcctctccgcgcctgcgccgccgctgcgcgcctcgccgccgctgtctgcctctccgccgctgtccatctctccgccgcgccgccgctgtccgcctctccgccgctgtccgcctctccgccgctggccgcctctccgccgcgctgccgctgtctgactctctgcagtgtgtcttgtgcttt

SEQ ID NO: 7126 - DNA, 2597 bp, Homo sapiens
taggcggcccggggccacaccgcggccgcccaagccagtgcaaggcccaggggcctgacatcgctcccagcgctcgaggaccgaggcctgctgtggagggcaccgtgctccctcgggacctgctctggattccggcccggacgtccccttggagctctgcatctccaacctggaacccaacccagaagtctcaagtttgacgcatcacgtggcgtgcggatccactgagggtccacagagaggggcgcccatctcctgcgtctcagttatcctggtaattgtgtatctgcccattgttcgttgcctcattaacttggctttctaggtgcacccaccttgccaccagagaagtccaaatcctgacttctctccaaggtgttgggaattctgtgccctaaagaattccgactcagatccgaacggggatctggtggaatcgagggtgaaagaccagagggacaatgttctactatcccaacgtgcttcagcgccacacctggctgctttgccaccatctggcttggcggcgactcgcggcagccggttggttgacagcgcgatacctgagggtgaatgtggtgaaaaacctgcgaggaaatcctcaattacgtgctggtacgagtgcaacccccgcagcccggcctgccgcggccccgcttctccctctatctctcagcccaacttcagatcggtgtgatccgcgtctattctcaacaatgccagtacctcgtggaggacatccagcatatcttggagcgcctccaccgtgcccagctgcagatccgaatagatatggagactgagctacccagcctgctgcttcctaaccacctggccatgatggagaccctagaagatgctccagatcccttttttgggatgatgtctgtggatcccagacttcctagtcctttcgatatccctcagattcgacacctcttagaggctgcaatcccagagagagttgaagagatccctcctgaagttcctacagagcccagggagccagagaggattccggtcactgtgctgccacctgaggccatcacgatcctggaggcagagcccatacggatgctggagattgagggtgaacgggagctcccagaggtcagccgccgagaactggacctgctgatcgcagaggaagaagaagctatcttgttagaaatcccgcggctcccacctccagctcctgcagaggtggaaggaataggagaggcactgggtcctgaggagctgaggctgacaggctgggaacctggggccctactcatggaggtgacccccccggaggagctgcgtctgccagccccacccagcccagagaggaggcccccagtccccccacctcctcgccgccgccgtcgtcgccggttactgttctgggacaaggagactcagatctccccggagaaattccaggaacaactgcaaaccagagcccactgctgggaatgtcctatggtgcagccgcccgagaggaccatcagaggccctgcggagttgttcagaaccccaactctctctggctggctaccccctgaactactgggtctctggacccattgtgcccagccacccccaaaagccctcaggcgagagctgcctgaggaggcagccgctgaggaggaaaggagaaagattgaagttccaagtgagattgaggtcccgagggaggccctggagcccagtgttccccttatggtgtctttagagatctccctagaggcagctgaagaggagaagtcccgcatcagcctcatcccaccagaagaacggtgggcctggcctgaggtggaggcgccagaagctcctgcattgcccgtggtgcctgaactccctgaggtgcccatggagatgcctttggtgctgcccccagagctcgagctgctctcactggaagcagtgcacagggcagtggcactggagctgcaggctaacagggagcccgacttcagcagcctggtgtcacctctcagcccccgcaggatggctgcccgggtcttctacctgctcctggtgctctcagcgcaacagattcttcacgtgaaacaagaaaagccatatggtcgcctcctgatccagccggggcccagattccactgaggttagagtccatttacaaagctgccaggaaaccggccacttctagtaaaccacgtcgtgcctcactgggtcctgcttacctcatttctgaatgtgcatttccagccttcttgctctcagagctattgttcaagcagaaaacaagctgcttttattacaaaaaaaaaaaaaaaaaaaaaaaaaaaaacacagcaacacgacgacacacacgcaacaagcaatcccaccaaaacggcgcgcccgtgaataccaaccacgggggaccaggaaccatcacagagccacgcgtgatgacgacggccccaccagtgagcggacgtagacgacgaccgcgccggtccaacaacccctggcgtgcaacactaccacggatggaggagcacacccaatcgggtggccagacggacaccaccacaaaacggccgcggcaacccacgcgtggaggaccagtatacgccaggaatgcgcgaaccaatacggcggcatag

SEQ ID NO: 7127 - DNA, 937 bp, Homo sapiens
ttttttttttttttttttcggtgtttgtgtctttatttggagaccaggagacagattacagcttaatgagaggaacaacgactcaagtgatctgatgggaagggtgagtttcctggcccttaggaagcaacagatgtgatttctaatcaacaaaaactagtaagtctggaacttttcagacaggaagctgagaggctaccaaaactaaaagtgaaagtgtctgccatcaatgtgtaagtctaaattacaaataaatacattaataaagcccctaacaggggttacaaaatttgtatgactgtaataaagcacagaatataaaatctgaaaagcttaactacgctgggctttttgcaccccattctctgagacaggaaccacacatgaaaggtcactggaacccccacatgcacctctgggaactgtgacttaagagaaaatggagacttcttgaaagataaagcagaaaccacaatttggcaaggacagcattttatctcaattcctttacttttcactcccttggcctacaagggccactgacgtaaaaacccaagcctctgtgtctcagaaggcttaccatcagctctcagcgctgctataaagtcacataacagaactgttccaggaagccagaggtaaagcagaaacaaatgaaagatcggcctgtggggacactcgaggagacactctcatgggaagggctcactcaggaaatcaaccacagataccattcactagcaatgcctcacagactgattcaggaagcatcacaggtcctgtctacatcaactcaccagttaagggccaacatctcttttgggccaacatctcttttagcccagacacatggatttgtgggggactggagtgatgatggggagggaaggaaaccagaaaggagactgctagaatcccagacctcaaaggcctattc

SEQ ID NO: 7128 - DNA, 5672 bp, Homo sapiens
  misc_feature (136)..(151): n is a, c, g, or t
agcgtccttgtttgtgtggtgccgccgccgccggtgcagccgtcgccgccgccgctgcccccgtctgtaccgcagtgtctgctccgcccgcccgccccggtccggcccgcccccctcccctacccccgtccctagnnnnnnnnnnnnnnnntggatcccctgtgccgtcgcctcttcctttttcgacgcctccgccgccgcctgaggaggcgagctagccgggagttacaccgccaccgccaggatggatagaatgacagaagatgctcttcgcttgaatctgttgaagcggagcttggacccagcagatgagcgagatgatgtcctggcaaagcgactcaaaatggaggggcatgaggccatggaacgtctgaaaatgttggcattgctcaaaaggaaggatttggcaaatcttgaggtgccacatgagttacccaccaaacaggatggcagtggtgtcaagggctatgaagaaaaacttaacgggaatctcaggcctcatggagacaacaggactgctggaaggccaggcaaagaaaacatcaatgatgagcctgtggatatgagtgctagacggagtgagccagagcgaggaaggctaactccctcaccagacatcattgttttgtctgacaatgaggcttccagtccccgttccagttccagaatggaagaaagactcaaagcagccaacttagagatgtttaaggggaaaggcattgaggagcggcagcagcttatcaagcagctgagggatgagctacgattggaagaagcccgactggtcctgttaaagaaactgagacagagtcagctacagaaagagaatgtggtccagaagactccagttgtacagaatgcagcatctattgttcagccatctcctgcccatgtgggacagcagggcctatctaagcttccctctcggcctggggcccaaggggttgaacctcaaaatttgagaacattacagggtcacagtgtcatccgttcagctaccaataccacccttccacacatgttgatgtctcaacgtgttattgcaccaaacccagcccagctacagggtcagcggggcccgcctaagcctggccttgtacgcaccacaacacccaacatgaatcccgccatcaattatcaaccgcagtcaagttcttctgttccatgtcagcgtacaacatcctctgccatctatatgaaccttgcttctcatatccagccagggacggtgaacagagtgtcctcgccacttcctagccccagcgccatgactgatgctgccaactcacaggctgcagccaaattggctcttcgcaaacagctggaaaagacactcctggagatcccaccccctaaacctcctgctcccttacttcatttcttgcctagtgcagccaatagcgagttcatctacatggtaggcttggaagaagtcgtacagagtgtcattgacagccaaggcaaaagctgtgcctcacttctgcgggttgaaccctttgtatgtgcccagtgccgcacagatttcacccctcactggaagcaagaaaagaatggtaagattctatgtgagcagtgtatgacctccaaccagaaaaaggctctaaaagctgaacacaccaaccggctgaaaaatgcatttgtgaaagccctacagcaggaacaggaaattgaacagcgattacagcagcaggcagccctctcccccactacggctccagctgtgtccagtgtcagtaaacaagagaccatcatgagacatcatacgcttcggcaggctccacagccccagagcagcctccagcgtggcatacccacatctgcccgctccatgctttcaaactttgcacaggcaccccagttgtctgtgccaggtggcctccttggtatgccaggtgtcaacattgcatacttgaatactggcatcggaggacacaaaggccccagtttggcagaccgacagcgtgaataccttttagacatgatccctccccggtctatatcgcagtccatcagtggacagaaataacgcctgttccacttgtactgccccatccttgaatcctttatccctttcctctttcattcccccaacttctgtcgcatgcagtgcctgtactggtgcctaccatacacggaaagcaaaacagaaaaacagaagacaaaaaatagagatcagcaagaaaacacacgccctgccctgccacctcccctttatttcacactgctgcgatctgttcttctgccgctctgtcttctctcttcagttttctttaacagtgaggtggatctttacctctgatagaggtcagaatgaggtcctggggagaatctaagccctccgatgtgtgtttctaaagttgttttatgctataattattaccatttttaatgatgttgtgtgtcctccctttgttcagtggacggttaaaccttcccccactcaaccaatctttttctttttccttttcttccttttttttttttttttttgtaaacacaaatgacattcagttcaatgatacgagcattgcagattgcagtaggggtcccagctgccaagtaggacatgactaggagtgttaggggcagaagttttgaatgcacttaaccggaggagggcgcagggtggggggtatcaaagaaggacgaatagcaccctacctgtgggtgtttgggggctggacaatttgggtggcagtgtttggtactgaagttgggctctaagaatgaggggaaagagcctggggaggagcttaaaactcaaccactctggaatttacccatagaagacgggaagaaagaggtatgaagatgggctcaattatgagccagggaggattgaaactaggtcctgcctttctgtatcttggggaaataagaccgatctcctgaccccattgggaacacggaagtctattccaggccaaccagcccaaaattatttcatcttgtattctttgtaaaattctccctcaccccaccctgcttttaaaaattctaatctatcccctctaaccatagccccatctataatacagaggaacggctgttccaaggctgtttgctgggtgtcccacaagttgggtggacataaatgagtcaagtgacaacaggaggaaatagacttagacgaaagaaaggatttctcttccaacagttgagattcgcatatttgcctattctttcaccctctgagtgccaggagatgagaggctgggggtacacaatcaggttggagtcctgtccttactctgctgcaccagctgcagaaccaactgctcaaagccaaacagctcatggcaaaaccagcttaggacctctgctgtacaaatagttgcttcccactgccccccgcccgcccccagaatgatattaattttgcctttttttttttttttttttttaagcgctactaatgtagagaatgaattgaattgtgcaatgttgctgttctggggactggggagattagcatcccatttgcccacactgtgggaagacggagtggaccaggctgtttttgaagtaagggaagccccttaaaggtacgggtttctgctcttctcatagtgtacacccacctgcctctctggctccagaagctgccagagtgcactggggggaatgttctcagcagagaagaatgaggagaagtttaatattttgcccttgaaagtcacctgaggaagtttccccacttttattttttaaaattaagtaattttttaaagaaggcacttttaaaattaacacacacatgaactgcacaccttccccataaaatttggaggtggggtgggagaaagagctaaaatcaggctcagttcccctactctggcctctactccccacaccccagtgccactgtgggtgactatactggccctacgggccttcctggcttttttctttcctcccttaccccaaattcattgagcacttaaaggagcagagatgcagccagtgtctgggctcccccagtggtgaaatgatctggaagctagatgctagtaacaggtagtgattgggttttttgagtatttttccggggaatgtggtacccctgactgtaagtggtgggagagggaggggggttaatggaactgggtctgggattattttaaaattatatatatatatataaagatatattcttacatcttttctttgccctctgtgctttgaaagcactggataaattgtttggttttgcttttctctcttccacaaaattggaagctttttttaaaaatgttttccccacaagtcatcttgccttgtggcatgtctgtctagcctcttcctccctccctcatgatgaagtgccatttctgttacgtctccctctccccaagctcagaggtgctcagaggtacgagatgcccaagtttgtcagttgagattaaaagtaaggaacagagaatgtgcaataccgtctggctgggggctgtccctgccctgccctgagctgagtcctttccctgggagccaggccaccttagaatggggtttggaagtaagatgtatagagttggggaatcatggagaaggaaagcctatagtcgagtgcctgcttaggtgctgaggtcacaggggagatggtggaatcttccctgtttttatcccctcagggtcagttacatagaagctgcttcttgactagtatagctcggtgaccctttgttcaaccgctgaggtttgatttcttaccctttcttctccccattttcatactcttcccagggattagtgatggaggtgaggtctccctaatcatggtaaagtgttaaccttccacctcctcccttccctcctccttcctcatccttctgtcttcctcaattctccgtctcttttttttcatcactgattgccttgtgtccctccaagtctacttgttactatccatctccaggctctgggccgtgtagacactaaacctcatgccctaaggacaggaggaaagaccctctgtttggagcattattagtagagtgaggatcccaccagttctgcctggcttcctccatccccagaggcactaaaagcagtattttaaggttggtgtcttactccctggaagcctgaaatgggtggaatagcggtaaggcttgagtaaaactaggggacagaggttcttatttgtcgattttattttataatttgaccacagcatctgaactccctctctccctggaataagtatttttcccacatttttggatatatgtatggtagacaatttttttttaagacacagagataaatgttttcctgctttggttacctttcctttcccctttaaaaggaattagctatagaactgctttgtaaagatgcttcttgatattttacttttgttccttttccctaatcattcccttttctccccactcctccagaaggcataacccttctctccacaccccctacccccacccccgtcctaggctcccatcctttccatcaagaccttcattagcttatgatatttgctgccgagatgttataacaaggactcgttcatgtatataagctatttcttgatccatttaaaaggaattgtacattgtgtagaaaaaaaaaaaaacctgaaaaagagaaaaaaaagccttagccgtgggattttgtgaaatgtgtatgtaatttggtaatgtggccgtggtgtatga

SEQ ID NO: 7129 - DNA, 2451 bp, Homo sapiens
  misc_feature (1048)..(1064): n is a, c, g, or t
ttttaatgttacgattctaaaaattctatgtgcaactaaaacaaaaaacaaaaccctctaacatttggttttgaaagcataaggtctaatttttggttagaaatcaggtatgtgaggccgggcatgatggcccatgcctgtgatcccaacactgggaggccaaggcaggaggatcagaggattgcttgtgaccagcctaggcaacatggtgaaattccatctctacaaaaaatacaaaagttaaccgggcttggaggcgcgtgccggtggtcccagctacttgggaggctgaggcaggaggatcgcttgagcacgggaggtcggggctgcggtgaggggtggtcgtgacattgctccagtcttggtgacagagtgagaccccatctcaaaaaaaaaggaaggaaaggaaggaaggaaaaggaagaaagtaaaggatggaaggaaggaaggaagagagggagagaggaagggaggaataaattaggtatgtggctgaagaggttccctagggtatagttcttcttagcaatgtcacctgtctgtagtcttgtaccaggaagtagcattctgtgactaaagcctcctacctctccaggcttctcactttagacttgtctgaagccaaatggcctccacaacctgttcatgctgtctttttgttctggaatactctttatctttgctgctcattctcctctgttcaagatccagttgaaaagtcacggcctcagctgctttacactcctgcagaagcagctcccctgccccaccttatccacacttctcttgcagcacctcttccattgcatcttaacaatttgtgtagatctcagttccctctatgcccgggccctgcccacccccaaccaccagcacaccaaatgtgagcaggcaacctaatgattggcccaggacctagacttttatccagcttcatcactgagtgggcttccaatatcactttgcatgaggaacggagaaatggaagagaaatcgtctgcatgtctaataagatgttctctacaagtggagaaaattccccttcagnnnnnnnnnnnnnnnnntttctgatttttcaattctagctcagcttttaagcagtccacagggtgggattcctaaatctaaaccccaactcccccatcacttccaccaactttttcaaaggacaaacatcctttgctgccacctatgctaaatccattagaaaacactcttgggagtgtggtctgcctttggaagttcttagtcatctgattgctagggtcagtatcaattaccctccatccgttttgaggactgaatttgtatattgtttttgttttctttctattttaagttcgggtacgtgtgcaggatgtgcaggtttgttacataggtaaacgtgtgccacagtggtttacccgcacagatcatcccatcacctacgtattaagcccagcgtctctattagctcttcttcctgatgctttccctctgccaacgccccccaccagccccagtatgtgttgttcccttgcatgtgtccataagttctcatcaatcagctcccacgtatgagaacatgcggtgtttgggtattctgtctctgcgttactttgctgagaataatgtcttccaactctatccatgtccctgcaaaggacatgatctcgttcctttttatggctgcataatattctatggcgtatatatacgacattttctttatccagtctatcactgatgggcatttaggttgatttcatgtctttgctattgtgaatagtgctgcagtgaacatacgcgtgcatgtatctttatgacagaatgatttatattcctttggatctatgggatcgctgggtcaaattcctatacgttttagttcaggtctagaaaagtaaaatcattaattaagggaagttagcagagttattttggccctgagaggctgtgatttaaaatattcagaaaatgtagttgaagtagttgatttggcttcaacttgaattccctatgtaattgcagggaattcaagggactctgaattcaattcagggaattcaaacagacctctttgcctttgagctagttttccccctaggcttttcttagcctgcaaaaatcctggttatctttgaggacccagttgagttggtcttgctcctaaatcattgacaagcccctaccctcaggcagagcagtttgtcctttgtgctccaaatactttttgttgtcactgtagttagggtttgcggtttaatcatctattgctgctgccagaaagcagaatcttggagggtagggagctttatatctttgcgagcctcaaccaacacaaagcttggcgtcagattgaattcaaattcaccttacgttgctagtatgaaaccaattgtgttgttgctttcatacaaatccagcagttttctgctaatgagacctgcaatgtaaaatttaaaaaaaaaa

SEQ ID NO: 7130 - DNA, 5640 bp, Homo sapiens
  misc_feature (5430)..(5445): n is a, c, g, or t
gtcaaagaaacccaccttccaaaggtggtacttgtggatctggtgcccggtgatagtgattatgaagtaatttcagatgatattccccttcagttagtgactgacccacctcagttgactgtcaaagatatcagctgtataaatacagaatgtattgatatagaagataagagctgtgacttttttggttctgaagtcagatgtaattgtaaagcctctactccctcaatgacaaaccaatgcaaagagactttcaaaataataaaccggaagaaggactatattattctgggagagccaagttgtcaatcttgtggttctgaaatgaattttaatgttgatgcctctgatcagtccatgacttacgagtcacaaggacctgatgagaaaatggtgaaatatattgattcagaagataagagctgtggatataatggttctaaaggaaaatttaatttggaagacacttctcatcgaacgactcaccgactgcagaaagctcacaaagaagccagtcttcggaaggatccaagaaatgctggcctaaaaggtaagagctgtcagtctagtgcttctgcagtggattttggtgcctcttccaagtcagcgctccatcgaagggctgataaaaaaaaacgttcgaagctaaaacatagagatctagaagtgagctgtgaaccggatggttttgagatgaattttcagtgtgctccccctcttccatctgatactgatcagcctcaagaaactgttaagaaaagacacccttgtaagaaggtatcttctgacttgaaagaaaagaaccatgattcccagtcaagctctgttctcaaggttgattctgtaaggaacctgaaaaaagcaaaggatgtcatagaggataatcctgatgaaccagttcttgaagccttgcctcatgtacctccttcatttgtggggaaaacatggtctcagataatgagagaagatgacataaaaattaatgctctggtgaaggagtttagggaaggtcgtttccactgttactttgatgatgactgtgagaccaaaaaagtttcttcgaaggggaaaaaaaaggttacctgggctgacttgcaaggtaaggaggacactgcaccaactcaagctgtgtcagagagtgatgatattgtctgtggtatttcagatattgatgacttgtcagtggccttagataaaccatgccatcgtcatcctccagcagagaggcctcctaagcaaaaggggcgtgtggcttctcaatgccagacagcgaaaatcagccatagtactcagaccagttgtaagaattacccagtgatgaaaagaaaaataattagacaagaggaagacccaccaaaaagtaagtgttcacgtttacaggatgacagaaaaaccaaaaagaaagtcaaaattgggacagttgaatttcctgcatcatgtactaaagttttgaagcctatgcaacccaaagccttagtctgtgttctttcttctttaaatattaaactgaaagagggtgaaggccttcctttccctaaaatgaggcaccatagttgggataatgatattcggtttatatgcaaatataaacggaatatctttgattattatgagcccttgattaagcaaattgtaattagtcctcccctgagtgtaatagtaccagagtttgagaggcgtaactgggttaaaattcattttaataggagcaaccaaaactccagtgcaggagataatgatgctgatggacaaggctctgcttcagcgcctttaatggcagtgccggcaagatatggatttaattcacatcagggaaccagtgactcttctctgtttctggaagaatcaaaggttctgcatgctcgtgagcttccaaagaaaagaaatttccagctaacatttttaaatcatgatgttgtcaaaatctctccaaaatcagttagaaataagcttttggaaagtcaaagtaaaaagaaaattcatggaaagagggtgacaactagtagtaataagctaggttttcccaaaaaggtttataaaccaattattctccagcaaaaacccagaaaagcttcagagaaacagtcaatttggattcggaccaaaccaagtgatatcattagaaagtatatttcgaaatactctgtctttttacgtcatagatatcagtccaggagcgcttttcttggaaggtatctgaagaagaaaaaatctgttgtcagtaggctaaagaaggcgaagagaacagctaaagtgcttttgaactcttcagttccaccagctggtgccgaagagctgtcaagcgctatggcaaatcctcctccaaagcgacctgtgcgggcttcttgccgcgttgcaagaaggaggaagaagactgatgaaagctaccatggccgacagaaaggtccttctacacctgtgagagcatatgatctgagaagctcatcttgtttacaacaacgtgagagaatgatgactcggctagcaaacaaactgagaggtaatgaggtaaaatagaagttggttttgtgttcaggctagttgaggattcagtacttcagttgaaatatatttggtactttgtgcacacagctttcccagctttggtgagaaaactaatcttgaactattttgctataaatattatttttcagaatttttatattcatttaaaattagtgtttagagtcctttcattttaagattcagaaacagcctttgtccaacattttctgtagaagaacttcatcttaatttatgtcacaaaataatttagcaccgtatatagaattttgttcctcaaatcatatccctcttattttttatgattatctctctcatgccagcaaatttaacattgtgagaatgaatatagcaaacttattaaaaagaaggaattataatgaattatgtcaacttttgaatggggttgacttaaatgaatacaaacaaaatataagttttctttctttttaaagcattccagaaaatgagattccataatctttaatacagtttttaaaaactggtgattttttttatgcatagcacaaactcctcctgcttcatttaaattggatctgcaagtctctaacttttatcatttggacacatgcacacatacagtctctaggttttttgggttagccttattagatcttaaaggggaaaataattttgcccatgtgtttaggcattcccccccttttttttaaccacctttactctcttctacatgaagagttggtggcttaatatgaaaatccaggttattttgtggccttatcccctaaaatattttaggcattaccatatcagtttttatttttatgtttatttattattattattttttgagacagagtctcactgtcttgcccaggctggagtgcagtggcctgaacttagctcaccgcaacctccacctcccgggttcaagcaattctcctgcctaagcctctcgagtagctgggactacaggcgtgcgccaccatgcccggctaatttttgtatttttagtagagtcgggggtttcactatgttggccaggctggtctcaaactcctgaccttgtggtccacccgcctcagcctcccaaagtgctgggattacagtcatgagccaccatgcccagcctaccatatcagtttttaataacttgaactgaaattattggcttggtaatatttgggcaggccattaattctcattagaaaattacttaatatttcaaaaaattgaataaaactggtaatctttgtggaggcccattttgcaagtggaaacctgtatttatacattagtttgtctttaactatttgttaacagattttaacagttcaaatgaaagatgttaacgagatgcagtttgagtctgggatactcagaatagatccagaacctttattcagggacactggttgagttggtacagatgcattcagttgtcattcattcgtgttaagccaagatcctggatcttctatcattaatgttaagaggaaacatgaattacaactatattgtatgactgccatattttattgaaactaaggtcaatgttgaaccatatcttgatttcagaatttaaaatgtgttaccttagaaataatgaaatatagtgtaacagttggtttctaaatgtggttttatttcaggggccattatttaacctgtgtgtatgctatgatggagttcttttgtgatttctttacttctaaatttaaatagtaattatgtttaaaaacaaatgtttttgtctttagttgcaaagcagcatatatctcatttccttcaaccttgcctcctcatacacaaatatattttcatttcttaaaagatcactgggccagtagttcaaaataatcctccaattttaatttaggaacaaagctttgtcctactgactaggaagtaaacaaacagctgatatataagatatttgtgggtattggtgtcttttttccctatggaatagacacatagttcccttaaatattattaatagacattctacagtctttcagtgtaagtttaaaagcaagagatcaaatgaaaatgtgtactatgtacctatgatgtgtcatatcgtgattacatcatgcagagagaacagttcctgtaattcaagtaattaaaatttcaagttgtaaaaatgttaccattttcacattggaagcccttctaagtaccattttcattgggggcagggagaaggtttatatttaaattttatattaccagacataaaagtacagtgcagtactgatgattttgtttaaagtttttgaaatgttttgtttactaagttcttgtaatcattattttagacaagcttgaaaacttgaaattgttgaaacttataatttaaattaaattggaaattactttcagaatttggtagtatacaagatgtgcccctttgtctaaataaatgttggcttaatttgcagaatagataaaacaattgatgtttttgtgtgttcaagaatgcattaaattcttttaatagtaaaaagtcaaattacgaccataatgagtattttaatcttgttcttgttcagtattttgcgtagatttttattgtaattgtcctgagttctacagtatgtgaacaatatcgtgtgaagtgtgtttttgcatttgtgcatttaaattatttatgtaactagggctgtgagtaacactttttttttttttttttggttaaagaaaagctatatttaaatattcaaataattatatatttccatgtaaaactaatgtgaagactaatgtattttttatattgcagtgtaaaagctaaacttgtttttgatgttatcaagataaaatttattaaaccttgaaaaaaaaaaaaaaaaaaaaaaaaaacaacaaaaaattgtgtgcggggcggccgctggggcccgagaaaaagttctgcaaacnnnnnnnnnnnnnnnngccggcggcgaccccatagtggatagagacaaccggcgcccatcacgggtctccagaggaaacgcggggcagcgaaaatcgggcgttgtgttcccccaaaaaaaaaagcgcggggggaccacgggcgttggtcaccaactccgaggtggcccgcagacacacgggccaacaaaaggcgccaggaacgaaataaag

SEQ ID NO: 7131 - DNA, 517 bp, Homo sapiens
taccgtgcagaagatcaatcaccttattttttttttttttttttccttggttactgctttattgctgtttggttcgagtatagaaaatggaagcggctctggaagagcctgtgtacaaggtaggaaatatacaaacgaagaggagggagctaaagagaccgcgttccagcccagcccagcctgggctcgggatggggggccgccggggcgcatgcaataaatatggtccggggccgcagggaagggaagggagggcaccgcgggagtgggagacctggtggtaggctcttcgccttccgactccagaactccccgcccttggtgactgaggaaggaagggttggccctggggctagtgccacttgtgcaaaatgaggaacttcacattatcagtcccggggtgggtgggagcgggggtgcggggggccctccggtcggctcagtcccctccccactccccaactctgcccgacgctccgaccccagcggggagattcacagtgagaatgggtgtggc

SEQ ID NO: 7132 - DNA, 3191 bp, Homo sapiens
  misc_feature (1424)..(1424): n is a, c, g, or t
  misc_feature (1432)..(1432): n is a, c, g, or t
  misc_feature (1439)..(1439): n is a, c, g, or t
  misc_feature (1441)..(1441): n is a, c, g, or t
aacacagaagtaaccagactgccatggtagacatgggagagacgaggaagctgagaaaggactatttcgcagtttccagtccttgattaattaaggcttcagagttcgttcttacatatgccatgtcttaagttttcataaaattcagtctacacaagacttgctttttgtgagcactgtgcttagtggcagtccggatttttccctccacccccgcggccacccctgcccaccgcgccgtcgggcatggatctggcaggtgcgaggccgaggcccagggctcagcgaaggacgccgagtttacagagcgcgcgcgccctagaggaggcagcagcagccgcaggcctggccgcccgaactttgcgagcctggcgggggagcacagaggcgggccgacctgccccgctagcgctgaggaacgactccctttatgccagctcgctgtccgccttcccgcagcgtacgctgcggagcctcaaagaccctgcggccctccacaaccgtcttaaataacaaacccctgtcctcgcccccgtaggaattggggcagctgggggttcgcgtcacagactcaagcccgccagcagaagggcaggccggacttcgcggggccgaaccccgctccagctggggacaggccgcctagccggcaggagggagccggcgcgagagacttgacgggaggaggtggagagcgggaggcgggaatgagggcgcgggaccgggcgggcggagcgtgcgagactgcgagcgcgagcgccagcagggcggagggcggggcgtgggcggcgcccggccttcccgctcccgcggcgctgcaactctgccgagcctccttaaaactctgccgttaaaatgggggcgggtttttcaactcaaaaagcgctcaatttttttcttttcaaaaaaagctgatgaggtcggaaaaaagggagaagaaaccggcaccctctctgagaggcaacagaagcagcaattgtttcagcgaaaaaagcagcaagggagggagtgaaggaaaaaagcaaaaaagggggcgacacgcaagtgcctgtaggggtgaaaggagcagggaccggcgatctagggggggatcagctacaaaagaaactgtcactgggagcggtgcggccaaggaggaagcagtgctgccaggctctgctccagggcacagctggctggcggctgccctgtccgcagcaaaggggcacaggccggggaccgcgagaggtggcaaagtggcaccgggcgccgaggctgctgagcgctcgccgagacggcgaccggactggctgccccggaactgcggcgactctccctactcagaacttggcctacgtttcccaggactctccccatctccagaggcccccacaaaaccgggaaaggaaggaaaggacagcggcggcagcagctcaatgatgctnacagcagnaaagctngnaacgagctcggtcgtaggcgggaagttcccgggggggctgcccagtgcagccgcaatgctgccgcgagctgccccagcagtccgggctccgtagacgctttccgcatcactctccttcctcgggctgccgggagtcccgggacctggcggggccggcatgacgggcttctcgggggcccgccgcacgcccggcagcctccggagacgcgcgccgagcccggctcccacggcctctgaggctcggcggggctgcggctgcctggcgggcgggctccggagctttcctgagcggcattagcccacggcttggcccggacgcgaccaaaggctcttctggagaagcccagagcactgggcaatcgttacgacctgtaacttgagggccaccgaactgctactcccgttcgcctttggcgatcatcttttaaccctccggagcacgtcagcatccagccaccgcggcgctctcccagcagcggaggacccaggactatcccttcggcgagacggatggaaaccgagccccctggaggacctgcccctgcagttctgcctcacacggctcaagtcaccaccgtgaacaagggaccctaaagaatggccgagccttgggggaacgagttggcgtccgcagctgccaggggggacctagagcaacttactagtttgttgcaaaataatgtaaacgtcaatgcacaaaatggatttggaaggactgcgctgcaggttatgaaacttggaaatcccgagattgccaggagactgctacttagaggtgctaatcccgatttgaaagaccgaactggtttcgctgtcattcatgatgcggccagagcaggtttcctggacactttacagactttgctggagtttcaagctgatgttaacatcgaggataatgaagggaacctgcccttgcacttggctgccaaagaaggccacctccgggtggtggagttcctggtgaagcacacggccagcaatgtggggcatcggaaccataagggggacaccgcctgtgatttggccaggctctatgggaggaatgaggttgttagcctgatgcaggcaaacggggctgggggagccacaaatcttcaataaacgtggggagggctcccccacgttgcctctactttatcaattaactgagtagctctcctgacttttaatgtcatttgttaaaatacagttctgtcatatgttaagcagctaaattttctgaaactgcataagtgaaaatcttacaacaggcttatgaatatatttaagcaacatctttttaacctgcaaaatctgttctaacatgtaattgcagataactttgactttcttctgaatattttatctttccttggcttttcccttgcttccccttttgccaatctcaacacccaagttgaagactttgtttttaaaatggtttgtcctgatgcttttgtctaattaaaacactttcaaaacaggaaaaaaaaaaaaaaaaaagaaacaaaggaaggaggagaggagcaagagatgacccagaacagcgaccaagaaggggggcgggcgccaaaaacacacccggggggggcgcagtagagcgccccaccagtaggtggcaagggggcccagagagcggatatacaagaagagcggcgccctaaacagcccagaggacacgaccggcacgcaggaccacccgcgggggatagggacccaggagtggcgcgaaacgggtggccagctgcggcaggcgcctacatcggga

SEQ ID NO: 7133 - DNA, 1090 bp, Homo sapiens
  misc_feature (2)..(11): n is a, c, g, or t
  misc_feature (13)..(22): n is a, c, g, or t
tnnnnnnnnnntnnnnnnnnnnaaagggcgaggctgcaccagcgcctggcaccatgaggacgcctgggcctctgcccgtgctgctgctgctcctggcgggagcccccgccgcgcggcccactcccccgacctgctactcccgcatgcgggccctgagccaggagatcacccgcgacttcaacctcctgcaggtctcggagccctcggagccatgtgtgagatacctgcccaggctgtacctggacatacacaattactgtgtgctggacaagctgcgggactttgtggcctcgcccccgtgttggaaagtggcccaggtagattccttgaaggacaaagcacggaagctgtacaccatcatgaactcgttctgcaggagagatttggtattcctgttggatgactgcaatgccttggaatacccaatcccagtgactacggtcctgccagatcgtcagcgctaagggaactgagaccagagaaagaacccaagagaactaaagttatgtcagctacccagacttaatgggccagagccatgaccctcacaggtcttgtgttagttgtatctgaaactgttatgtatctctctaccttctggaaaacagggctggtattcctacccaggaacctcctttgagcatagagttagcaaccatgcttctcattcccttgactcatgtcttgccaggatggttagatacacagcatgttgatttggtcactaaaaagaagaaaaggactaacaagcttcacttttatgaacaactattttgagaacatgcacaatagtatgtttttattactggtttaatggagtaatggtacttttattctttcttgatagaaacctgcttacatttaaccaagcttctattatgcctttttctaacacagactttcttcactgtctttcatttaaaaagaaattaatgctcttaagatatatattttacgtagtgctgacaggacccactctttcattgaaaggtgatgaaaatcaaataaagaatctcttcacatgagaaaaaaaaaaaaaaaaaaaaaaaaaaaaaaaaaaaaaaaaaaaaaaaaaaaaaaaaaaaaaaaa

SEQ ID NO: 7134 - DNA, 1864 bp, Homo sapiens
  misc_feature (65)..(79): n is a, c, g, or t
  misc_feature (1722)..(1744): n is a, c, g, or t
aaaataatttctaggttaagttggaaacatgtgataacattaaaaaatttaaaatgtctttgggnnnnnnnnnnnnnnnctttacattcaacatgaaatccatggatggagtttatataaataaccatgtaggcttaccaatccttaaccctcttgtattagtccatactcacatggatatttccatatccacttttactcttgtgtcaaaagacaaaattaaaactcatttagttatgtatctaattggcttttattctcgattcatgaatcggtgcagcctccattctaatagaatcacagcttctactgggcaatggcagactattgggttttgtgaggtgggaatgaggaaacataacaatggggaaaataagctgattagttaacaatagattacttcagtttactttttttttataagggttaaagcagaggggactttcttgttctgactcaggtaggctagaatctcctgtttttaggaaaaactcgtctgttttgggatctatctgctttcttacagttgcagtttgattatatgacatttggcatgagtgactccactttgttaacacttgaaaggttattattcccatatggagtattcacatggatgtagccattgtcagttatacaagatcgtgtttcttttctttgcccccctgcccccgtcacctaagaacttgttagatattccatttctttttttaaaaaaagatacagtgagtaaaggtgatagagagcatatggataaatagtgaagaagcttgatgaggggagtggttaggttagaaacacaagggaatttactcaggttaaaacactgtcattttatattcaagccaatatatatttgttttgttagcgttgacgtaatttttttctgggaaggctttcctgacctctggtttgagtaagcagctcctcctatgtgttttagtcagcactcttggcttaatccatagtaacttttgcttgtttgcattgtagttggttatatctgtctcctatagcttgtgggctcactttgacggggagaggccttgttctattcatcattaatcctcagggtctagcacctagtaaatactcagtaaatatttattaaatgtaattgctttatctgatttcttattgatattttttggagcagcagtgttgcgggaggtcatgttaatttaatcaaagtaaaaagaatttgggggttagtactggaaggtggttgggaagtgtatgtatatatatttccaaactctttagattttcaaactttgttctcctgaggactttgccacttccagaactgtttcaggagctgctgtgggagaaggaggtcagtgcacgtccactgatgtggtttgaatgtgttctccaaagtttgtgtgttagaaacttaatccctggtgcaatagtgtcgggagttggggcctattaggtgattcggtcatgacgggtctgcccctgtgaatggattactgtctttatttgggagtgggttagttataaaggagtgtgcaccgtctcttgctcttctgccctctgacctgggatgatgtaaaatgaagtcccttatcagatgcagacctcatggtcttgtacttctcagccagaactataagaaatacgtttattttcttcataaattaccgagtctcagatattctgttatagcagcataaaataaattaagacatctactttgcccatttatactggagnnnnnnnnnnnnnnnnnnnnnnnaaagtttgcaccatggcacggtggctcacgcctataatctcagcacattgggaggctgaggcaggaggatcacttgaacccaggggtttgagaccctgtctctacaaaaaaaaaaaaaaa

SEQ ID NO: 7135 - DNA, 2662 bp, Homo sapiens
atttttgttgttgacaactgtcagcttcgacctccttctcctcacaaccccgtctaaatggggtttgtaatcctccttcccacccactctcttcactccctggggcaagaatgttgactcctgctctccgtcacctgtcaggatccatcctcctgtcactggcttatatggacacgtcagcccaccgtcacgtgaccgcaggctgctaaaaacagctccagcacccactccaaaccagggcctgaaacaatgtcctccaccgagagaaacgtaaaggacacttgatcacacaatccctggaataatatccaggaaacacttgctggagccactcgcagcacccttccctggcagcacacttggggacagcgaggagatgagcgcatctctgaattacaaatctttttccaaagagcagcagaccatggataacttagagaagcaactcatctgtcccatctgcttagagatgttcacgaaacctgtggtgattctcccttgtcagcacaacctgtgtaggaaatgtgccagtgatattttccaggcctctaacccgtatttgcccacaagaggaggtaccaccatggcatcagggggccgattccgctgcccatcctgtagacatgaagtggttttggatagacatggggtatatggacttcagaggaacctgctggtggaaaatatcattgacatctacaagcaggagtccaccaggccagaaaagaaatccgaccagcccatgtgcgaggaacatgaagaggagcgcatcaacatctactgtctgaactgcgaagtacccacctgctctctgtgcaaggtgtttggtgcacacaaagactgccaggtggctcccctcactcatgtgttccagagacagaagtctgagctcagtgatggcatcgccatcctcgtgggcagcaacgatcgagtccagggagtgatcagccagctggaagacacctgcaaaactatcgaggaatgttgcagaaaacagaaacaagagctttgtgagaagtttgattacctgtatggcattttggaggagaggaagaatgaaatgacccaagtcattacccgaacccaagaggagaaactggaacatgtccgtgctctgatcaaaaagtattctgatcatttggagaacgtctcaaagttggttgagtcaggaattcagtttatggatgagccagaaatggcagtgtttctgcagaatgccaaaaccctgctaaaaaaaatctcggaagcatcaaaggcatttcagatggagaaaatagaacatggctatgagaacatgaaccacttcacagtcaacctcaatagagaagaaaagataatacgtgaaattgacttttacagagaagatgaagatgaagaagaagaagaaggcggagaaggagaaaaagaaggagaaggagaagtgggaggagaagcagtagaagtggaagaggtagaaaatgttcaaacagagtttccaggagaagatgaaaacccagaaaaagcttcagagctctctcaggtggagctgcaggctgcccctggggcacttccagtttcctctccagagccacctccagccctgccacctgctgcggatgcccctgtgacacagattggatttgaggctcctcccctccagggacaggctgcagctccagcgagtggcagtggagctgattctgagccagctcgccatatcttctccttttcctggttgaactccctaaatgaatgatattcattccaactgctgcccctctgtctgcctggctgagatgcatgtgggcagcaggaagcccaagtgaaattaatattatgcagatgatgaaagggacctctgaacaggatttctgcaaaaatagccccaaactgcaattccatatgacttatctaacatcttggggggaaagaatattttgagaaaatagttgcagaaagcactggaaataataaacttgatcttatacaaatcttctattgtgtggaaaatgttgtgaagggtgtgtaggtgtggtacatgtgtatgtcactaacaagtggcaaatggtgaaaaaagtggtcactatgcttttgtctctcataggcactgactttttgttattatattatggtagctttcatttcctttactctttaacagtgcaggtggtcagtgaaaatcagtgtcaactcagaagtgactgatttatcaatacatggacaaaaagtaaatcattgaccaaagctatgaaatgtttcacaaagttttcctcttttgcataacagatgtcactggatgtacattcagaaatgttctttgaatttggtgacactttcatggtccagaaagctgaaggcctgggcatctcttgtgacatttttctaatattagttttagattttcacgtattaggcactttagttgaatcttccagcaaaagctgtctactttctcttttattcactgtggcaccaatctggtaaattgtagaacaattgcatgtgtttaaatatatatacaaacatatcacacattaaatatatatatatttaaatcatgctttgttaatatttgtcccaccataatgcctccttcagaacataagtgtaactttatatgaactcttaaataaatgatgtttttaaaaaaaaaacaaaaaagcctcgtggccacagcggtgag

SEQ ID NO: 7136 - DNA, 475 bp, Homo sapiens
ggtaggcaaatcaagaaagagcattggtttataactcagagaggcagtactgtggccatgtcagtagtggatgctacgtgtgccccatccagatccctttattaaataaatgctagccaagtgagtaaaaggtacaacttccacaaataaaatcagtagctaaattaaagagagagggggtcagaattatgaaagaagggggaatattatgaataaaaaatacagtggacaatagttgagatgaggaccaagaggcttcacataaatgctggctccacatttcaactgcaaatgacatactgtggacttactgccctagaagccaattgtttccattatagattccacactgaatttctgggcatttctttatcaaaaggctgttgtcttcttcttacagctgtgcactggaatctacccttgaacaatgtcagtgggcctgggaaatcagaatttggaaacccattgctgtgct

SEQ ID NO: 7137 - DNA, 911 bp, Homo sapiens
  misc_feature (93)..(109): n is a, c, g, or t
aatttttttttttttttttttggatgcattcatagatactttatttaaaaagtacactaattgaagttttacaccattttatgattcatcaannnnnnnnnnnnnnnnntggcgtatagcaacattacagatgatgttagtctaagataaaactcataacacattttaaaaagggtgaaaggaaggaaaggaaaaaggatacaaggctgtagaaagattttaaaaacaaacgtcgtatgtctgaacctttgcctggagtttcatattttgtgaaaagcagtttgtaagtagaggactcgtaagtgcacctagtacactgcaatggcacagacacggcagatagtcaataaaatgatctttaacttctgatctaggttatttttgttgttgttcatgtattaacctagtgaaactcagccaatagatggagtggcattgacctgtacaacttccaaaatcccatccaaccttagtgtcctctgaagttctccataacttattgtctgttcctaccaacatttagcataagctacagcttatattgttaataattcttctatgtttatgtgctgatttgcaaataaatgggcctatatagtctttatctagtgttggattgggatcaaaagcttcatgaaatcattgtttttagtatacgtacagatggataattgtataaataagtacagatgtgtataaatgtgtgagtatacatacatacattttctagctcttctaacaaaagggcctaaaaacaacatcatcccagtaacaatgagaacaccattctccaattgaaggaaccaaggctccttggggacatatttgatatcaggattgggcagggaaaatacaagattagtttgaaatattttgtcatgttagaaagtaaggaaatgctcaaaaaaaaa

SEQ ID NO: 7138 - DNA, 468 bp, Homo sapiens
atagagtcggagttttacgaggtttcccaggctggtgttaaactcctgagctcaagtgatccgcccggccttggcctcccaaagtgtaggattatagggatgagccaccacacccggccagacatttaaggttttaaaaaaatctttgctcatttgtggtttttaaaaaatgtactacaatgagcacatactatttgtggaacaataaaaaagttatttccaaaggaaagtggctggtaaggaggctgacatgacagccggcaataataattagtgatcattacaagttggaaaaagggaccttctccttggatggtgcacctactatgagccacataatttatggcaccagagaagggggaattagcccacagatgattaaacagaaagtcaagagagagagaatgactggcctgtcctgcatgtcgcaatctgaattccaaagttggtgggcttggggaaaagttg

SEQ ID NO: 7139 - DNA, 538 bp, Homo sapiens
  misc_feature (501)..(501): n is a, c, g, or t
tttttttttttttttttttttttttttttttaaaaaaagagggtgcactataatgcccaagctggattgaactcctgggctcaagcaatcctccaccatagctgggactacaggggcatgtcaccacacctgccttcaaattttttattgggggaaactcttccttaatgtattgacatttttttctgcttgatttattctccgacagcttcaggggtatcaattattggcatactaaattgactgtattccctatctggcactctctctctagtctttcttcatttttatttgttccattttgggttgctcaaatttctcaagcttgcttccattacccccagctatagttgatatttgcactttgaatgtttctgcaatgttacttttctcttattttgtaccctgattccatcagctcactcttacaatacttctgttgtcttcttttatttctcgaggcttttatatctcatctttgaactctaggtttcagcgggngggtatgtctcacccccaccttccaccataggggact

SEQ ID NO: 7140 - DNA, 2382 bp, Homo sapiens
  misc_feature (8)..(8): n is a, c, g, or t
  misc_feature (20)..(20): n is a, c, g, or t
  misc_feature (30)..(30): n is a, c, g, or t
  misc_feature (40)..(40): n is a, c, g, or t
  misc_feature (45)..(45): n is a, c, g, or t
  misc_feature (51)..(51): n is a, c, g, or t
  misc_feature (1350)..(1377): n is a, c, g, or t
ttgacccntcattgtcacangggccacctnaataagcctnatgcntgtccncagggctaccctggtgcccaaaaagggtcagccactctgccagtttaggggagaaaacttctcacctgtccaaagcatagccttgctcctgcccggcctacccagctatgacactgtccctgagcagagatgagcacaggactttgggccctggatgccggagagtgggtgtttgtgtgattcccctgcagtctggaacaggccccaaaggcaacagcatgaaggctgtccagaggttctccatcaccctcagccgagtggggtgctgagcagtgagggaggggacctgggaggggggcccagcctggatcctgcaggggagaagagaagacagccagaagccagcagctgtggctcagatctgagcccgagcagcctctcgaggtggaggcagacaccccccaccccaccccgtgcagaaagaagccttgccagcctgccctgaggctggtacagagtccaggcaggctcagtggccatcatgcccctacgatgactgtcactccctctccgtgcgcctggcctctgctggctctggccaggggtggtcacagcactagggtggcagggtggcctctgactctgcgccagcctgcactggcctgtgctgccctggcctctgctggctctggctctggcaccggtcccgtgttggctccttcagccttcacatacctgctgcggccaccacaggcccaggacccccacagggtggccaccccacctccaccccaggagccccaggtatccagctgtcaccccctccctccctcctggcctccccctgtccttctccagttgccttcttttcctgcgggcgcaccacccacctgcctgcctcacctgttccgcctcagcccccagggtccccgacatcctgagctcagtgaggaggggctcgggagccccagaagccgaggggcccctgccctgcccatctccggctccctttagccccctgccagccccatgtaagtagcctgggtcctgctgctgtgggggtcatgttggagggctggcaaccccctagaggggccactccagagccgagggcaggctgagcgtggaccctggctccagcctcatcaccccacaatccctcactggggctttccagggtggccccagcccatcgagccccacctctttgtgaggagggccctggaccactttcctgctcaaggccactgggcaggatgggaggccctggaggctcgggcctcaattccagtcttcagggtcggtgcaggcctcactccacctcagcttgcgggcgggggggctccctgctattgaggnnnnnnnnnnnnnnnnnnnnnnnnnnnnagggcccaaggggtctagaacacgggacccctcccactggcctcctccgccttgccgccgcctcgtgtgtctgtctgcctcatgttcacgtctcatctgttccaccccagcccccaggatctctgacatcctgaactctgtgagaaggggttcaggaaccccagaagccgagggccccctctcagcggggcccccgccctgcctgtctccggctctcctaggccccctgtcctccccgtcccccaggatctctgacatcctgaactctgtgaggaggggctcagggaccccagaagccgagggcccctcgccagtggggcccccgccctgcccatctccgactatccctggccccctgcccaccccatcccggaagcaggagatcattaagaccacggagcagctcatcgaggccgtcaacaacggtgactttgaggcctacgcgaaaatctgtgacccagggctgacctcgtttgagcctgaagcactgggcaacctggttgaagggatggacttccacagattctacttcgagaacctgctggccaagaacagcaagccgatccacacgaccatcctgaacccacacgtgcacgtcattggagaggatgccgcctgcatcgcttacatccggctcacgcagtacattgacgggcagggccggccccgcaccagccagtctgaggagacccgcgtgtggcaccgccgcgacggcaagtggcagaacgtgcacttccactgctcgggcgcgcctgtggccccgctgcagtgaagagctgcgccctggtttcgccggacagagttggtgtttggagcccgactgccctcgggcacacggcctgcctgtcgcatgtttgtgtctgcctcgttccctcccctggtgcctgtgtctgcagaaaaacaagaccagatgtgagttgttaaaaaaaaacaaaaaaaaaaaaaaaaaaaacaagatgacgacgacaaccacaaaaaaaattgacatcagatgaaatgaaaaaa

SEQ ID NO: 7141 - DNA, 1100 bp, Homo sapiens
  misc_feature (9)..(9): n is a, c, g, or t
ttccccacntcagtgctgggggccctgagcctccccctgtgccagcggcccaactccctcaggtccagccatgccccaccctggactgaagttctgcaaagtcctccgaggaccggaacacgtttctgcgacccggggctctggccagcactgtgttctgcgtttgttctcatacctgcgtctaccttccatctgtgtccagcggccccggctccagcccagccagcactctgcaggttaacacgcaccgtgtccccacccaggacagcagacacccgccagagtgtgcgcgcccagtgactgcaccccggccctcatcacccaccggcactgattggggcaccgcctggcccagcctccaccagggacccctcctcatgaactctggagccctgagaggagaggggcagccccccaccttgtcaccctcagggcttccccttctgtcctcattcttagagactgcttctcccaaacataacgcgtaagccatgaaggagtcggagccctgggtccgaatggaccgcctgcggtctgcatcagcctctgggaaaccacagcagtgatgccagctgggcacgtcaggacctccccacacacccacacgatgccacaggtcagggggctgtgcctgactagggagccctcccattgccttcctggcccgggatagaagaggggaggtaagtctgggggctacgaagccgggcccccacaccctggctgaagtcagcttgacctaggtcttgaccctcatccagcaagggactcgacagacccaagggtccctggaacgtagggaggggctgggggtcactccagcccgggcctcccagaacaccaggcccgtgtgggtggcaccctgaggtcaggggatcctaagggtgtccttccagagacggtgtttccagggggaggaccgcccccgcttccagatccccggccccggctgtgactgccctgtttcacccctgctgtgtcccatcccccgtctgtccactaactgtaccgcaccggccattaaaagatgaaggcagaccgctgcaaaaaaaaaaaaaaaaaaaaaaaaaagaaaaaaaaaaaaaaaaaaaaaagggcgg

SEQ ID NO: 7142 - DNA, 679 bp, Homo sapiens
  misc_feature (227)..(241): n is a, c, g, or t
ttttttttttttttttttgctagtgaccacagtttgcaatattattcttgtcattcttgcaattgtagaattgtaacatacatttaaagtatataactgcttcaccctgtgtttaactaaaagacagaccctcacactttcaccagggctgattctcagctccctcagggtcttcgctgagcccctgcttttctctcacctaggtgtggggctaacagtcaacaatnnnnnnnnnnnnnnncttccctgtcagacgacaatatccaaacacaggacgagaataaagctggcatatgaatctagtcatacaaaccttctgagacacatggtaattattacttctagtcatttttcaaatacggttttgtgtattttggaatggggatttttttaggtgtggatgtgtgtgtgagtgcaggtgtgcagagaataagattaattcgggtttgagactcagatcagtccacagctctctaagctctctaatacagagcatacaagaagtacttgctttaaagtcgaaatcactcccccatgatttacactgacagattaatataagaaattcagtgaatttcccacaggtctcctaacccacttggtaaatgcatccttataaagtgcaaacaaataatggcataattggctttgtgagccacgtggattagacgacctcttc

SEQ ID NO: 7143 - DNA, 542 bp, Homo sapiens
  misc_feature (458)..(484): n is a, c, g, or t
tttttttttttcaaataaggcgggaattttcaaatcagtagatatttcttaaagaaactgtcatgagatttgagaacaacatgtattgagccacagctgaaggactgagaatatgatttctgcaaagcgcagagaagaggcagggcccaggctatggcaggccagctggtaggcaggtgaagccagatgggaatcccagagtgcccatctaaagccagaatttggaggcccgacaggccccaacaacgcccaaagccctcccagagaggcagatgctcagcaggtgtggagggaaccccctggccctgcttccaaggcccctcactcacctccagtggggtattcgtctccaggacatgagtctcatctccttcctggtgatgacctgcaagatgggtctgcctccatttccttccattggggatcgagcaccgtgcctggcccagaaaaagaatcannnnnnnnnnnnnnnnnnnnnnnnnnnttatgggcagagggacgtggttaaacaaaaaaaagaaaagaaacatttggggacaata

SEQ ID NO: 7144 - DNA, 1879 bp, Homo sapiens
cttgcgcacgcgcagcccgcccctgcggcagagtggcgcccgcgcgtgactcccccctgccggctgcggaggtgggggggggacggcgcccccgccgtgtgcgtggggcggggatggagcacgcgccctggagccccggggccagctctagggcccgtgcaggccacaccatgaacacctccccaggcacggtgggcagtgacccggtcatcctggccactgcaggctacgaccacaccgtgcgcttctggcaggcccacagcggcatctgcacccggacggtgcagcaccaggactcccaggtgaatgccttggaggtcacaccggaccgcagcgtgattgctgctgcaggttaccagcacatccgcatgtatgatctcaactccaataaccctaaccccatcatcagctacgacggcgtcaacaagaacatcgcgtctgtgggcttccacgaagacggccgctggatgtacacgggcggcgaggactgcacagccaggatctgggacctcaggtcccggaacctgcagtgccagcggatcttccaggtgaacgcacccattaactgcgtgtgcctgcaccccaaccaggcagagctcatcgtgggtgaccagagcggggctatccacatctgggacttgaaaacagaccacaacgagcagctgatccctgagcccgaggtctccatcacgtccgcccacatcgatcccgacgccagctacatggcagctgtcaatagcaccgctcctcgccacctgctcggctgatcagacgtgcaagatctggaggacgtccaacttctccctgatgacggagctgagcatcaagagcggcaaccccggggagtcctcccgcggctggatgtggggctgcgccttctcgggggactcccagtacatcgtcactgcttcctcggacaacctggcccggctctggtgtgtggagactggagagatcaagagagagtatggcggccaccagaaggctgttgtctgcctggccttcaatgacagtgtgctgggctagcctgtgacccctcgggactgcctggtgcaggtggtggcagctggagggacccatgcagcacccaggtcagagcagaccctcccctgccggcctgcgccagctggacctgatggccccctgtggcgccttgacctgctgggccaggctgccctgggactctcagcccccagttgcttatccagatgtgacagagctcgacccaagccaggctgcacactcctggactgggctagcctgcactgcctgggaaagtcggccgagggcccaaagctgctgaggggtctgaggctggtgcccacccccaagctagtgcgttctctgcccctccctgcccgcgtttcagggcctcggtccatagagaacaccaccaccatggccaggtggaagggtttattagtccctgccagcagctgtcctccctggtgcaggtggcctggccagcccactggattggggacgggccaggctgggccaggtcgggggctcagtctgggaggtaataaaagcagaccgacacgcagatgttgctcgggaagcagaaaaaaaaaaaaaaataaatcagccgctgtctccggggcccctctgctcgccgggcccagtagatgggggtcctcatgcacaggcgctgcaccaaagcccccgcctgggcggtagccacttacgaggctcccctgcactgccagcagctcctgggtgtggtgggtgtcctggctggggacccaagcctcttggaccttggaggtatccaccagcagccgcaggtctcccgatcactgtcctccatcaggcggaggaagcagacctggtgctcctcagggcggtaacagatgcagccgctctgcccgtcgaacag

SEQ ID NO: 7145 - DNA, 950 bp, Homo sapiens
attgtggtgccttgtagctagtactggtagatctcagcggcagttggacgctggtgcacaggaaggatgaggaagaccaggctctgggggctgctgtggatgctctttgtctcagaactccgagctgcaactaaattaactgaggaaaagtatgaactgaaagaggggcagaccctggatgtgaaatgtgactacacgctagagaagtttgccagcagccagaaagcttggcagataataagggacggagagatgcccaagaccctggcatgcacagagaggccttcaaagaattcccatccagtccaagtggggaggatcatactagaagactaccatgatcatggtttactgcgcgtccgaatggtcaaccttcaagtggaagattctggactgtatcagtgtgtgatctaccagcctcccaaggagcctcacatgctgttcgatcgcatccgcttggtggtgaccaagggtttttcagggacccctggctccaatgagaattctacccagaatgtgtataagattcctcctaccaccactaaggccttgtgcccactctataccagccccagaactgtgacccaagctccacccaagtcaactgccgatgtctccactcctgactctgaaatcaaccttacaaatgtgacagatatcatcagggttccggtgttcaacattgtcattctcctggctggtggattcctgagtaagagcctggtcttctctgtcctgtttgctgtcacgctgaggtcatttgtaccctaggcccacgaacccacgagaatgtcctctgacttccagccacatccatctggcagttgtgccaagggaggagggaggaggtaaaaggcagggagttaataacatgaattaaatctgtaatcaccagctatttctaaaaaaaaaaaaaaaaattaaaaaaaaaaaaaaaaaaaaaaaaaaaa

SEQ ID NO: 7146 - DNA, 1970 bp, Homo sapiens
aaagctaaccctcgggcttgaggggaagaggctgactgtacgttccttctactctggcaccactctccaggctgccatggggcccagcacccctctcctcatcttgttccttttgtcatggtcgggacccctccaaggacagcagcaccaccttgtggagtacatggaacgccgactagctgctttagaggttgagatccgtagcattttagtgtccgagaggataattgctaagggagcagagacctcttcacaccttcatgcgcttagacctgcctagaggctcagatggctcagtggcactgctcacagagaacacaggctggaggacatggagtcggggaacggctggcccagtgccaggaccagagtagtcggcatgctgctgagctgcgggacttcaagaacaagatgctgccactgctggaggtggcagagaaggagcgggaggcactcagaactgaggccgacaccatctccgggagagtggatcgtctggagcgggaggtagactatctggagacccagaacccagctctgccctgtgtagagtttgatgagaaggtgactggaggccctgggaccaaaggcaagggaagaaggaatgagaagtacgatatggtgacagactgtggctacacaatctctcaagtgagatcaatgaagattctgaagcgatttggtggcccagctggtctatggaccaaggatccactggggcaaacagagaagatctacgtgttagatgggacacagaatgacacagcctttgtcttcccaaggctgcgtgacttcacccttgccatggctgcccggaaagcttcccgagtccgggtgcccttcccctgggtaggcacagggcagccggtatatggtggctttctttattttgctcggaggcctcctggaagacctggtggaggtggtgagatggagaacactttgcagctaatcaaattccacctggcaaaccgaacagtggtggacagctcagtattcccagcagaggggctgatccccccctacggcttgacagcagacacctacatcgacctggcagctgatgaggaaggtctttgggctgtctatgccacccgggaggatgacaggcacttgtgtctggccaagttagatccacagacactggacacagagcagcagtgggacacaccatgtcccagagagaatgctgaggctgcctttgtcatctgtgggaccctctatgtcgtctataacacccgtcctgccagtcgggcccgcatccagtgctcctttgatgccagcggcaccctgacccctgaacgggcagcactcccttattttccccgcagatatggtgcccatgccagcctccgctataacccccgagaacgccagctctatgcctgggatgatggctaccagattgtctataagctggagatgaggaagaaagaggaggaggtttgaggagctagccttgttttttgcatctttctcactcccatacatttatattatatccccactaaatttcttgttcctcattcttcaaatgtgggccagttgtggctcaaatcctctatatttttagccaatggcaatcaaattctttcagctcctttgtttcatacggaactccagatcctgagtaatccttttagagcccgaagagtcaaaaccctcaatgttccctcctgctctcctgccccatgtcaacaaatttcaggctaaggatgccccagacccagggctctaaccttgtatgcgggcaggcccagggagcaggcagcagtgttcttcccctcagagtgacttggggagggagaaataggaggagacgtccagctctgtcctctcttcctcactcctcccttcagtgtcctgaggaacaggactttctccacattgttttgtattgcaacattttgcattaaaaggaaaatccactgctaaaaaaaaaaaaaaaaaaaaaaaaaaaaaaaaaaaaa

SEQ ID NO: 7147 - DNA, 3406 bp, Homo sapiens
  misc_feature (311)..(325): n is a, c, g, or t
  misc_feature (2835)..(2852): n is a, c, g, or t
  misc_feature (3320)..(3320): n is a, c, g, or t
  misc_feature (3382)..(3382): n is a, c, g, or t
aagggacaggaagtctcagaggctggagagcagagcaccaagatcgttctggcaggaacagccagtgggaggttccagctgagcgctccccagaggtgagctgatccccagccacagcacacaggaccaggctgcgagaacagcatcatcagcatcatgctattacaatcccaaaccatgggggtttctcacagctttacaccaaagggcatcactatccctcaaagagagaaacctggacacatgtaccaaaacgaagattacctgcagaacgggctgccaacagaaaccaccgttcttgggactgtccnnnnnnnnnnnnnnntgttgatttcaagtctgggggccatcttggtttttgctccctacccctcccacttcaatccagcaatttccaccactttgatgtctgggtacccatttttaggagctctgtgttttggcattactggatccctctcaattatctctggaaaacaatcaactaagccctttgacctgagcagcttgacctcaaatgcagtgagttctgttactgcaggagcaggcctcttcctccttgctgacagcatggtagccctgaggactgcctctcaacattgtggctcagaaatggattatctatcctcattgccttattcggagtactattatccaatatatgaaatcaaagattgtctcctgaccagtgtcagtttaacaggtgtcctagtggtgatgctcatcttcactgtgctggagctcttattagctgcatacagttctgtcttttggtggaaacagctctactccaacaaccctgggagttcattttcctcgacccagtcacaagatcatatccaacaggtcaaaaagagttcttcacggtcttggatataagtaactcttggcctcagaggaaggaaaagcaactcaacactcatggtcaagtgtgattagactttcctgaaatctctgccattttagatactgtgaaacaaactaaaaaaaaaaaagcttttgttttgtaaaaaaaaaaaaagagtcgttatttaatttctcttgaaaataatttcctcaaagcccaagtcaataaatgttatcagccagtcttccaaaatggtcataaactttataaactgctttgggtaaactgagcagaaggtgatacacagaagggaaaatgtgcactcatgctagtgtgaatttggtaagtcgcgtgactctgcaggctgtttctgtattattttcacactcatattgcttaaatattacatattagggattgtaagaaaactttaattaaaaattaaagactatatataattaaactactctgccctggacactctctgagaaacagatctactgggccctttttcatgagccattaggtggaagacagcaaagagatcttctcaagtgcttaggattacctctcaacacacagcaagcatgtccctgcctcccatgaatcttaccatgtaaatccaaatctctgcaatcctgtggcaccaaccagtggtgctcattctattgtttaaaaatggccttcttggctgggcgcggtggctcactcctgtaatcccagcactttggtaggccgaggtggacggatcacccgaggtcaggagtttgagaccagcctggccaacaaggtgaaaccctgtctctactaaaaatacaaaaaattagccaggcatggtggtgcgcacctgtagttccagctacttgggaggctgaggcagaagaatcacttgaacccgggaaggggaggttgcagtgagcggagactgcaccactgcattccagcctggctacaagaacaaaatccatctcaaaataaataaaaaaataaataaaaataaaaatagactatatatagtctttgaattcatttattttaaataaatgaataaaataaaataaaaaagaatattcagtcgtcggcacataaactatgttctcttctgtcatttcagggtaggagtcaatgaagacatcttagtcttaacaagttacagataatctctgactggcgatgttttctgttctagctttggagctaaaatgctgcttcatgctgaaaagaataatgtctatttctttgtttgggtattagctctattttgatctataagcacagttttgtaattcagatcattacccctgcactttgtagcacatgggcgtattctttcttcccagtcattactgcaattatcttgtctgttctttgtgtaaatatggttctgtgtgagcctctgcattaaactcgatttcttgggcaattatggaaattccagtgtggctgcagtttaactttgcactctctatgcatatgaggtttcctaaataaatgaggagtagcatagtttaaaatatatatatcttataactttctacaacaaagatattattgagtccaaatgtcatcagtgctcattttgagataccctgctatcgatggtcgctacaaaccaggaaatactcaagttattatgtgtatacattggttttagttttatgaaacaatttaccttcatgatctcatagttaaaattgtaataaatttaggaatataaaggatcaatatgggaagcaaaatttctaaaggcagtttctgttgttttaattagtatttgtgtagttcaaaccaggaaggatttgactatcattagattttgcttaactttatgaaagctaaaatattctctgttataaaggggcaactccatctggtcctatagcatctttactactgatttttttttgtttaatttgaaaatgcaaagaattgttaaatgttcttaaatgttctcactacaaaaaaaaaaaaaaaaaaaaaaaaaaaannnnnnnnnnnnnnnnnntctcctcgtgccgaattcggcacgagacccactccaccttactaccagacaaccttagccaaaccatttacccaaataaagtataggcgatagaaattgaaacctggcgcaatagatatagtaccgcaagggaaagatgaaaaattataaccaagcataatatagcaaggactaacccctataccttctgcataatgaattaactagaaataactttgcaaggagagccaaagctaagacccccgaaaccagacgagctacctaagaacagctaaaagagcacacccgtctatgtagcaaaatagtgggaagatttataggtagaggcgacaaacctaccgagcctggtgatagcttggttgtccaagatagattcttagttcaactttaaatttgcccacagaaccctctaaatccccttggtatttaactggttagtccaaagaggaacagctctttggacactangaaaaaaccttgtgaggagagtaatttaacacccatagtaggcctatagcagccaccattanggcggtaagctaacacccactcct

SEQ ID NO: 7148 - DNA, 3160 bp, Homo sapiens
tcattattagtaagtcaccagaacagtccacactcaaggggaggggattcttaagggcatgagtaccaggaagtgggagtcactgggatcatcttagaggctgcctaccagactcagtttacagctttcccaggtatcatccccttaaagatctcgactaatttctcatcaccttccctcctaaagacacaaaaaatccaagttcactgatcctggaatggggaacctcacctacagcaacccctcctaccgaacatccacacaggaagtgaagattgaagcaatccccaaaccagccatgtacaaccagctgtgctataagaaagagggagggcctgaccataactacaccaaggagaagatcaagatcgtagagggaatctgcctcctgtctggggatgatgctgagtgggatgacctcaagcaactgcgaagctcacgggggggcctcctccgggatcatgtatgcatgaagacagacacggtgtccatccaggccagctctggctccctggatgacacagagacggagcagctgttacaggaagagcagtctgagtgtagcagcgtccatactgcagccactccagaaagacgaggctctctgccagacacgggctggaaacatgaacgcaagctctcctcagagagccaggtctaaatgcccacattctcttccctgcctgcctgttccttctcctttatggacgtctagtccttgtgctcgcttacaccgcaggccccgcttctgtgtgcttgtcctcctcctcctcccaccccataactgttcctaagccttcaccggagctgtttaccacgtgagtccataactacctgtgcacaagaaatgatggcacatcacgagaatttagacctggattttaccatgaacctcacatcttgtactccatcctgggccccctgaaactgcttattcgtgattcctcaccagcgtagagctccacctcccctttccccagtaccctcagtgcctgcttctcagtgctgatgcagctgatgacccaggactgcgctctgccccatcacagccagcatgactgcttctctgagagaacttgcccatcaggggctgggacatgggggtgtgggtaaagacagggatgaaggatagaggctgagagaagaaggaagaatcagcccagcaggtatgggcatctgggaaacctccagcctcaagtgtgttggtaacatgaaaaagctctggggggtagttggatctgggtgtctggtccattgctggcagtggacattattcttgccctaagagacactgccttttcagcagcagatactggtgagatgggggtggctcaggctgttcttcctcctcctagaatgtctggagctgtttctacattcagataactgggtcccctatcacaaggctactggctaataggaattccctcctggtgccaccactggccagtacctttcctaagtctttgctcaaattaaccaggttgtgagccagtggcttgagtgaatgttaggccttgggggctgagtctctgaaaagtctaagaagctctgcctagaccaaatatggtatacctcctgacccctctctccctcatgtcctgggattctggggaagagacctagaaacaagctttcaaagaaaaaccagaagttgtcataaatggtcagaaagaacgatcaggttggagacttgggaaacccagggcctaaagagaagtatccatgagggtcaaacttcctgttgaacttcctatgttctttctcaagtgctcagggatctaagttagtggacagcaagcctgtggctacggggtggtgatgttcctcttccagctgtcccctcagctaaggggcttagtttccatgtgggatgccatcacttggttcatgctcattcacacaaagggcacgtgtctcagcctggtatcagggaaattgagacttatttttgccctaaaacgtctccctagctgttcttcgtggggtttttttgtttgtttttttgcctaatttgctttttctgaccaagccttgtggcaccagcaatctccaaagtcctgtggtgggagggctgaataaataaaaatacaaagaggtgggtaaggagtaggaaggtagagagcaccactgatgaggccctcctagcccatggcagacccagacctcttctcccccaggaattagaagtggcaggagagaacaacaggggctgggaatggaggggagaatttctaggggaagtttcctgagttgaaacttctcctgtggttactggtattgagaaatcagctaccaaagtgaaaaaggacaagatcaattcttttctagtcagttctaagactgctagagagagataccaggcccttagccttgctctcagtagcgtcagccccagttctgagcctccccacattacacttaacaagcagtaaaggagtgagcactttgggtccttagactcatgtctggggaggaagagcaagtagaaaagtggcattttcttgattggaaagggggaaggatcttattgcacttgggctgttcagaatgtagaaaggacatatttgaggaagtatctatttgagcactgatttactctgtaaaaagcaaaatctctctgtcctaaactaatggaagcgattctcccatgctcatgtgtaatggttttaacgttactcactggagagattggactttctggagttatttaaccactatgttcagtattttaggactttatgataatttaatataaatttagcttttcttaaaaaaaaaaaaaaaaaaaggagtcatgactaatcctgcacctgctctgtctggcagacccatgctgtggaaaacctgcttacagacatcacttttaagtcctttgtggatgtgggcacagtgaagagcaataaagagtgtgaggttcctgctggagttttcagctcatctggagaagacaggtcgaaggccagagttccttgactgatgaaacctttatttcctctggaagaaggaatgggtagatggggtttcctctttgagttgctggactctgactgggtttggtaagtggctgcctgaagggcctaatttcgcacccaatgggaagaatgtcatatgggctagtgacatctcttctggtgcactggaaggaaatgtcatggca

SEQ ID NO: 7149 - DNA, 3670 bp, Homo sapiens
  misc_feature (1351)..(1372): n is a, c, g, or t
tccaagatggcggaactgcagctggacccggcgatggcggggctgggagggggcggcgggagtggggtgggcgacgggggtggcccagtccgcgggccccccagcccacgcccggctggccccacgccccgcgggcacggccgcccggctgccgccgtcgcgcagcgattggagccgggtcccggaccacccgagcgggcagggggcggcggcgcggcccgctgggtcaggctgaacgtgggaggcacctacttcgtgaccaccagacagaccttaggccgggagcccaagtcatttctctgccgcctctgctgccaggaggacccggagctggactcagacaaggatgagacaggagcctatctgattgacagggaccccacctactttggtcctatcctcaactacctccgccacgggaaactcatcatcactaaggagttggcagaagaaggtgtgctggaggaagcggagttttacaacatcgcgtcccttgtgcggctggttaaggaaaggatacgggacaatgagaacagaacttcacaaggccccgtgaagcacgtgtacagagtcctgcagtgtcaggaagaagagctcacgcagatggtgtccacgatgtccgacggctggaaattcgaacagctcatcagcatcggatcttcctataactacggcaatgaggatcaggcagaattcctctgtgttgtctccagagaactaaataattctaccaatggcatcgtcatagagccgagcgaaaaggcgaagattcttcaggagagaggatcgcggatgtaaactaagaccccgaaaactccagaccttcaggagagcagtcagcagagcccctctgtgaagtgaaaccttactcctgtccagtgaccgagccactgcaaagcacagctgatcctggccccctgtgaagaagtgttctggtcaaaactaaaggaactccctccccacctgcaggactccgaagacagtgcgacttctggctgcagaataccttttcagaaacctgctttcatttgcttagccagtattagaacagatctttacaacagcagctgggctgggttcccagtcggagcctttcggggatctgggggatgagggcggaaggcctagctccttggaaatggcctgtactttaaggacgctggagccaagaggattgttcccgtgccgtgccatggtttcaccctatgtgtgccacaatggacgttagcagctgcttcggaacaccgtccctcctatgcaccctccaagacctgcagcagatgcaaagggttctagctgcagtttgtcgaattgaggttttaggtaaagcatagagttgccagagtacccnnnnnnnnnnnnnnnnnnnnnntccaaggaaagggaggatggggtgtcctttgttgtggttggaggttggtgatcattgctctggatttggggctcccggctgccaccacatgcagctttgcctcagctttctccagcagccgggaccctctggagagcttgttttccctccaagaagaggtttgagacaggcggcatcctgcactgagtcagacaagtgggagctgtaggaactgcacctgcagcctcttcttactccccattgaccctgtcttccttccctggctttttcaactggaccaaagatgaaggcacttatggaccctttgatggcttggagtggggaaggctgtttctttgaaagttgccaaatgtgttacgttgtgtctcagagagagttatttctgtgactctcttggaaatgccttgactgaatgtgcaatatttgtgtctcttggtttctaaccttggcggacctgctcccctctgtactgtccccagtggtatgtatgtatgtgctaggcagtctggggaccccctgtgtctctgaccacccccctgacccccgccattactttcttttctggagtgccatgctggcgaggatccggatgcggcagcaccctctttcgggctgcatccacagagtttgtgtccacactttctctccgagcatgtgggtctcgctgagcagtcatggaatgcggtagagccaggggaccctgtctgccccgaataactttcagtagtatggcagatggcacagagaaagggaaggggctctggggacttctccttctatgaaagcctcctcgagccaggtgctcctgggcaccttcagaagtgatgtcctgtgtgctccacagctcacctgcttgccaaggtacgtctgggtagtagtttctggaaatgactgcagactgtgccaaatgtcttttgagcttctgacctgaccatgcccagatggcataacttttccctaggaccctcagtctccttgtttctctgtatctgtagcatagcatagaacccggtatacaggggtttctgctgacacatcaacgtctacacacctatgcgccacattttacagctgtaaagtgttagatgaactgccgtcctcagtaaaagcagccaccccttcaagagtcacaggcatccatccagtcgttttttgcgaagaccacaaaagttagatgtagccaaggaaagtagtgatcacgggaaggactgctctgagccgggtaggatggaggactttggaagaggcgctccttggccaggtccaatgagtaacatcagactgacagaggaaaagcagcttggtttgcggccttgtgcccagtctcgttgaggcgcttgtccctgtctgctttcctggggcatgcctgatcagcgtgggctggagctcctagaccaaccccagctttctcaccaggttcagcaaggaggcctgggggtcagacaccaatgttgagcacctcctgagggcgccgtttccttcattcctcttagattccatagttgccgccatgaaaagactgctcttgagccccaaggcacaggcacgtgctctgggaaatagacaggagtggtatttccgccctctcggagggctggtgttcaccaagtttccctcctcgctgcaacccaatgacacctgtattgttccagcgctccaggactctgggttcttaagatttctgggagcgttgttcacccaccccctttaggaaccaggctggtgttcttgcttgaaagcgttgtgccctctgagtgtctggctgatcacatcagagaggtctgcgtggcagtttggggctgtcacgtgaccagtgacccacactctctgctgcccagtactgccaagtggggagggtcctgcctttttctctgccccaggtctgggacgcaggtgatgccagccaggcccaggagtgcccagcatcccccaactgatgacacagtagcactgattctgtcttttcctcagaatctggcctttttccatggcaatgaggtggggcccagcctcctctaaagtgactttgtttctgcacagttgtaactgctcttggggatgtcagtgaggctgggagcagggagccacgggatgctgagagaggaggcccgagaggacaccccaccctccagcgtggcctttgatccagacttagggacgaggctgtcactggtgggcaccctctgttcctgtttgtgtgtttgaatagtctgaaatgctgtgactttttttgtgtgaataaagatatgaaacttctgaatctcaaaaaaaaaaaaaaaaaaaaaaaaaaaaaaagaa

SEQ ID NO: 7150 - DNA, 3419 bp, Homo sapiens
  misc_feature (49)..(49): n is a, c, g, or t
  misc_feature (52)..(52): n is a, c, g, or t
  misc_feature (64)..(64): n is a, c, g, or t
  misc_feature (168)..(168): n is a, c, g, or t
  misc_feature (182)..(182): n is a, c, g, or t
  misc_feature (199)..(200): n is a, c, g, or t
  misc_feature (204)..(205): n is a, c, g, or t
  misc_feature (212)..(213): n is a, c, g, or t
  misc_feature (220)..(221): n is a, c, g, or t
  misc_feature (224)..(224): n is a, c, g, or t
  misc_feature (230)..(230): n is a, c, g, or t
  misc_feature (233)..(234): n is a, c, g, or t
  misc_feature (237)..(237): n is a, c, g, or t
  misc_feature (241)..(241): n is a, c, g, or t
  misc_feature (243)..(243): n is a, c, g, or t
  misc_feature (257)..(257): n is a, c, g, or t
  misc_feature (265)..(265): n is a, c, g, or t
  misc_feature (271)..(271): n is a, c, g, or t
  misc_feature (277)..(277): n is a, c, g, or t
  misc_feature (306)..(306): n is a, c, g, or t
  misc_feature (310)..(310): n is a, c, g, or t
  misc_feature (327)..(327): n is a, c, g, or t
  misc_feature (335)..(335): n is a, c, g, or t
  misc_feature (389)..(389): n is a, c, g, or t
  misc_feature (395)..(395): n is a, c, g, or t
  misc_feature (397)..(397): n is a, c, g, or t
  misc_feature (408)..(408): n is a, c, g, or t
  misc_feature (572)..(572): n is a, c, g, or t
  misc_feature (576)..(576): n is a, c, g, or t
  misc_feature (590)..(590): n is a, c, g, or t
  misc_feature (933)..(963): n is a, c, g, or t
  misc_feature (2423)..(2445): n is a, c, g, or t
  misc_feature (2865)..(2887): n is a, c, g, or t
ggctcactttgaaaagcagccgcctctccaatctgcggaaatccaactnctnccacttcgtccnggccctctaccacacaaacggccaccccgtggacatcgagaggacagcggttttggggttcggggagaaggaaaaagaagccaacagcgaaaagaccaataacncaatttactacttnttttaacttctctacannaatnnccataanncatccanncancagttntanncgncgcntnattgaatccatganaaaacaanccagantgtatnaaggccaagacaagaatccagaaatgtcnccanttttgctcacacatganatcatgtncagccgctcttgttaaaagaaaatctgctggcaaccgaaatgagactcccgcanagccantnataatggatangggcttctggaaagtgggccgcaaagggaaccaaaattgcctaaagaatgcgggcaaacccaccggacaggcggagattccagggcggggtggcgacgagagggaaggtggatggccaggggctggcagtctcggagaacaggggtggccagaagaattccaancagncccccagggcctcncaccctggacccctcgcaagcgactcccgcgatcaaacccatcagccccagtgaaggatggacgacgggaggtgcgactgtgatcatcataggggacaatttctttgatgggttacaggtcatattcggtaccatgctggtctggagtgagttgatcactcctcatgccatccgtgtgcagacccctcctcggcacatccctggtgttgtggaagtcacactgtcctacaaatctaagcagttctgcaaaggaacaccaggcagattcatttacacagcgctcaacgaacccaccatcgattatggtttccagaggttacagaaggtcattcctcggcacccnnnnnnnnnnnnnnnnnnnnnnnnnnnnnnnatactcaaaagggctgcggatctggtagaagcactgtatgggatgccacacaacaaccaggaaatcattctgaagagagcggccgacattgccgaggccctgtacagtgttccccgcaaccacaaccaactcccggcccttgctaacacctcggtccacgcagggatgatgggcgtgaattcgttcagtggacaactggccgtgaatgtctccgaggcatcacaagccaccaatcagggtttcacccgcaactcaagcagcgtatcaccacacgggtacgtgccgagcaccactccccagcagaccaactataactccgtcaccacgagcatgaacggatacggctctgccgcaatgtccaatttgggcggctcccccaccttcctcaacggctcagctgccaactccccctatgccatagtgccatccagccccaccatggcctcctccacaagcctcccctccaactgcagcagctcctcgggcatcttctccttctcaccagccaacatggtctcagccgtgaaacagaagagtgctttcgcaccagtcgtcagaccccagacctccccacctcccacctgcaccagcaccaacgggaacagcctgcaagcgatatctggcatgattgttcctcctatgtgaaagaattgccttgaagaattgtattaatgaagaggttggattctgctacagagagtaatctgatacaagtcccagagtggaacttttaactcaggcctttttaagaggaatcacaataactgcagatttttaaagaaacaaaatcaccgaccttgcaaatactgaaattggaagagggatctgcaagtgcagggtgttggttaaagttgtacctcccaagtatttgggggatatatttattctgtattgacaaaagcaaatccactttttctttttcttttttttttttaagcttaattctgcaatcatttgtcttttataaaccgtaaagctctatacaagggacactataaataagagtccatgttttaatttatgatgtttttaaagctgtgtaaaggaagaatgaagtggtgatatttacaaaaaagtaaaaaaaaaaaaaaagaaaaaaagtaaaaaaaaaagcttgtatgggacagaataggaatgccagttagattttttagaaaaactaagggtcggcttttgcgccttaaagcatatcaaatggtagttagctcagacagtgcattttcaatatctaacttaacatgccaccccttagcagtgcaagcttatttatctcttttgtattgttgtcttaagcaactgtgtaaataaatgcagcctggaaagttaaaacgcgaaaaaaaaaaaaaaatttttccctctactcgaaaatccagtgcctctagacagattgttaaaactgcatatttaaatctgatctcattctctccttttacttaagtcagtttcttctgaagccgatnnnnnnnnnnnnnnnnnnnnnnncacatactgtgtgagaatctcctttgagacttcatggaacagggtccaggcacagaattccacactctgccctccagttaacaagccaaaacctcacgtacgctcccccatttgcaagtttaaagtttactcgtcctaaatgcagacttcatacctatcttccaaaagttgataaaagcaacgtggcaggtattttcgattttcccattccagatactgcctctatcagtcgacccttaccatttgtaacataatagattgaaacaacaggttaagtgctttggaattaagagttaaagggaaccgggggtggagaaaggaaaagaaggttgagacctccaaaacatagttttctgttctatgggaatttttgctctcattatctgggaagtgttcttaaaaataagaattaatagcaannnnnnnnnnnnnnnnnnnnnnntgatttgcctgatatttttttctttgctcttgtgtttttgtatgtagttataaatactgtagatttttttttggtgatttttggccaaagtggttgttctatttatacattttaatgtcttaagacattttttcaatatcacaaaaagattttactggcgtatttggcaaagaaaaaaaagctcactacctttagctgtgcacatactttgcaaaggttaattaaaaggcttttggttttaaaggggatttgttaaatatccatataaataaggtatttatctttcgaattgtgtacatggtttttccattcttcctctttctttcacccccaatttatttatcggtatgttggctacgtgataagtgcgtattggttgggcctaacgttttaggtaagggattttaagatatattatgtatttatgtggttaacaactcgtctaattaccaagatgttttggtatgagctacattcatgccaaaaagctttgtgtatgcaacaattttacacgcttcagtctgtacatcaa

SEQ ID NO: 7151 - DNA, 815 bp, Homo sapiens
ttttttttttttttttttttttctttttttttttttttttttttttttttttttttttttaatttggaacacaaatgctttatttaagggtgcatcacaattcccgtgtggtgagcaaaaaataaaataaaggagcagatcgtagcacaccattcccactggccaagtggttgaaccctgcatccaagacccagtgagcagccaagtgaggtgcaacctctgggcctctcactcatgactccaacagaattagcacattgcccttgtgcatggggccttttacattgcagattttggagcagcaagacaatgtatatctgttcgtaactcttgttcttccctcctgatttttaaaactgcgtaattataaaactatgttgatggacatataattattataaagatgtagtttgtgacaataacagcatgggcagaatgaaggcatatagagcaaatttttcattactgaaattaagttgagattaatctgaaacagataaaacagactagttttacaacctcctgtaataaaaacgctgtcttttaaaacaaattatctattgcacttttttgtttttggtgtcacagctatgaaagctttgtctagagaattatcacaaatacttacattttttgtaagttttacagtttttgcttgtatttaggtctatgatccattttgagttaatttttgtgtacatagtgtgaagaacactttttcttcaaactttttgtttcagattgcatatcctctatcaatctgcaggtttgctgattctttcttctgccatctcaaatctagtattgagcctttc

SEQ ID NO: 7152 - DNA, 1131 bp, Homo sapiens
  misc_feature (12)..(32): n is a, c, g, or t
tgacatgcctgnnnnnnnnnnnnnnnnnnnnnaagggaaagacgagatcttgcacaaggcactctgcttctgcccttggctggggaagggtggcatggagcctctccggctgctcatcttactctttgtcacagagctgtccggagcccacaacaccacagtgttccagggcgtggcgggccagtccctgcaggtgtcttgcccctatgactccatgaagcactgggggaggcgcaaggcctggtgccgccagctgggagagaagggcccatgccagcgtgtggtcagcacgcacaacttgtggctgctgtccttcctgaggaggtggaatgggagcacagccatcacagacgataccctgggtggcactctcaccattacgctgcggaatctacaaccccatgatgcgggtctctaccagtgccagagcctccatggcagtgaggctgacaccctcaggaaggtcctggtggaggtgctggcagaccccctggatcaccgggatgctggagatctctggttccccggggagtctgagagcttcgaggatgcccatgtggagcacagcatctccaggagcctcttggaaggagaaatccccttcccacccacttccatccttctcctcctggcctgcatctttctcatcaagattctagcagccagcgccctctgggctgcagcctggcatggacagaagccagggacacatccacccagtgaactggactgtggccatgacccagggtatcagctccaaactctgccagggctgagagacacgtgaaggaagatgatgggaggaaaagcccaggagaagtcccaccagggaccagcccagcctgcatacttgccacttggccaccaggactccttgttctgctctggcaagagactactctgcctgaacactgcttctcctggaccctggaagcagggactggttgagggagtggggaggtggtaagaacacctgacaacttctgaatattggacattttaaacacttacaaataaatccaagactgtcatatttaaaaagaaaaaaaaaaaaaaaaaaaaaaaaaaaaaaaaaaaaaaaaaaaaaaaaaaaaaaaaaaaaaaaaaaaaaaaaaaaaaaaaaaaaaaaaa

SEQ ID NO: 7153 - DNA, 2630 bp, Homo sapiens
gtgcggaggccattgagctgtgcggtggtgaatggtgtgcgtgctgtgcagctggaccctcaccatcacatgccatgcccctgctgcgccaagccctgtgtggcatgcctggtgaggacagtcatgcatggcccttgccagatgcttggtgctggtgcatgcctgccagtgtgctccaatggagtgccccggatgtgcccagctggctcctggccccacccctcgggcctttgggctggaccagccacctctgcctgagacctccggtcgccgcaagaagctggagaggatgtacagcgttgaccgtgtgtctgacgacatccctattcgtacctggttccccaaggaaaatcttttcagcttccagacagcaaccacaactatgcaagcggtgttcaggggctacgcggagaggaagcgccggaaacgggagaatgattccgcgtctgtaatccagaggaacttccgcaaacacctgcgcatggtcggcagccggagggtgaaggcccagacgttcgctgagcggcgcgagcggagcttcagccggtcctggagcgaccccacccccatgaaagccgacacttcccacgactcccgagacagcagtgacctgcagagctcccactgcacgctggacgaggccttcgaggacctggactgggacactgagaagggcctggaggctgtggcctgcgacaccgaaggcttcgtgccaccaaaggtcatgctcatttcctccaaggtgcccaaggctgagtacatccccactatcatccgccgggatgacccctccatcatccccatcctctacgaccatgagcacgcaaccttcgaggacatccttgaggagatagagaggaagctgaacgtctaccacaagggagccaagatctggaaaatgctgattttctgccagggaggtcctggacacctctatctcctcaagaacaaggtggccacctttgccaaagtggagaaggaagaggacatgattcacttctggaagcggctgagccgcctgatgagcaaagtgaacccagagccgaacgtcatccacatcatgggctgctacattctggggaaccccaatggagagaagctgttccagaacctcaggaccctcatgactccttatagggtcaccttcgagtcacccctggagctctcagcccaagggaagcagatgatcgagacgtactttgacttccggttgtatcgcctgtggaagagccgccagcactcgaagctgctggactttgacgacgtcctgtgaggggcagaggcctccgcccagtcaccatcaggccactccctctgcaccgggacctggggctgggccgcctcgtgctccccgggactgtgtggctccggtctcgcctggagccacttcagggcacctcagacgttgctcaggttccccctgtgggttccggtcctcgctgcacccgtggccgcagaggctgcagtccctgggggccgggaggatcccgccctgtggcccgtggatgctcagcggccaggcactgacctgccatgcctcgcctggaggctcagctgtgggcatccctccatggggttcatagaaataagtgcaatttctacacccccgaaacaattcaaagggaagcagcatttcttgttaactagttaagcactatgctgctagttacagtgtaggcaccccggcccagcagcccagcagcccacatgtgttcaggaccctccctgcccaccccctccctgccgtatcgatcaccagcaccagggtggcccgtgtgcgtggggccagcgtcgccgggctgcccagcctggctctgtctacactggccgagtctctgggtctgtctacactggccgagtctccgactgtctgtgctttcacttacactcctcttgccaccccccatccctgcttacttagacctcagccggcgccggacccggtaggggcagtctgggcagcaggaaggaagggcgcagcgtcccctccttcagaggaggctctgggtggggcctgctccccatccccccaagcccacccagcactctcattgctgctgttgagttcagcttttaccagcctcagtgtggaggctccatcccagcacacaggcctggggcttggcaggggcccagctggggctgggccctgggttttgagaaactcgctggcaccacagtgggcccctggacccggccgcgcagctggtggactgtaggggctcctgactgggcacaggagctcccagcttttgtccacggccagcaggatgggctgtcgtgtatatagctggggcgagggggcaggccccccttgtgcagagccaggggtctgagggcacctggctgtgttcccagctgagggagggctggggcgggggccgggcttggaacgatgtacgataccctcatagtgaccattaaacctgatcctccaccgcgaaaaaaaaaaaaaaaaaaaaaaaaaaaaaaaagaaaaagaaagaaagaaaaaaaaaaaaaaaaaaaaaaaaaaaaaagaaaacaacatatgacaccaaaacacaataaaaaaccacacgcagggagcacgaacgaaacataggcgaagctacacacagacaagagaaaaaataaaaaataacaaagag

SEQ ID NO: 7154 - DNA, 1152 bp, Homo sapiens
agcggagctgcagagctacgcagccttcggtgcagcggactcgtgtctcgctaccagctccccgctgccctgcgctcggcgggctggcatccggcccgggggaaagcggaccagcccttctgcaggtctgcggggccaagtgtcccggcggcgcacctcgtggcgagaatcgggagaaggaggagactacaaggataggcccaggagtaatggagtccaaagagaaacgagcagtaaacagtctcagcatggaaaatgccaaccaagaaaatgaagaaaaggagcaagttgctaataaaggggagcccttggccctccctttggatgctggtgaatactgtgtgcctagaggaaatcgtaggcggttccgcgttaggcagcccatcctgcagtatagatgggatatgatgcataggcttggagaaccacaggcaaggatgagagaagagaatatggaaaggattggggaggaggtgagacagctgatggaaaagctgagggaaaagcagttgagtcatagtctgcgggcagtcagcactgacccccctcaccatgaccatcatgatgagttttgccttatgccctgaatcctgatggtttccctaaagttattacggaaacagacccctgctttcgaatttacatgttcatgatgtgcccttgttgtaaacctttacctgtcacttgtttacgtgggtctcctattaccagcttctaattgaatattgtgtttttgaaccagtctgtaagatttttgttagcagaagaattttacctattgcatggaaagatgctcattatagtgaagttaataaagcacctttaaaaagcaaaaaaaaaaaaaaaaaaaaaaaaaaaaaaaaaaaaaaaaaaaaacaaaaaaaaaaaaaaaaaaaaaaaaaaaaagaacaaaaaggagggggggggcgcccaaaaagaaaatactcgcccagggagaggccaccacaataatgaccgcaccacaccttgttggcagacaaggaggcgcccccacaagagtgaggtgaataacaacaaccgcgccggcgggcccgttataaaaaacgcagaggggggaaggaaacacagcgcgcggaaccatgggggaaacacccaaatccgcgggcgggcaccacacggcggacaacccaa

SEQ ID NO: 7155 - DNA, 820 bp, Homo sapiens
ttctcaacatggaatccattgttacatttaaatccttgctttatcgggattttgacagagtaattaaatccaatttggtttcccatatatttgtccagttgtccaacactatttatttgagtacatcatcatctctctactaatttcaactgctacctttatcatatttcaaactctcatttaatttgtgtccatttctagactctattctggactgctgatgggcctgttgataggccagagctcagttattttaattatgtaactttatgatgcacttatctgtgtagcaggactccccctcatctccattacttaagagccaataatgggaagctcattttcacaaatgcagtcaaccaggggaattcatggcatggcctaagatctaaacactcttaagatttaaacacaggattagctcttgagttagacaggaagctggggtgtttgggactgaggcttcatcgtggcagctaataatgtcagggagcatgagcacttgtttcttccaaggctcacttcaaggaaggcagaatccaggtcgggggtgcacaggagttgccagctggacccaaggaccatttcgtatacatgtatgatcatactttcagggcatcttggaaaaactgaatttgctaactcaatagagaacaaaagagcaaataggcctaattcaagaatttttaaaaacccgcaataagaaacataatctaaaacttgtagcccagcccctcctccataccaaccaccaaaaaaacccactaacaccataaagtgtcatagctagagctagagtgctgttataagctgtgcaggc

SEQ ID NO: 7156 - DNA, 4745 bp, Homo sapiens
  misc_feature (632)..(654): n is a, c, g, or t
tcccgctcctgtacgtggagctcaatgactccgccaagcagctcattgagatggacaagccatgcccagccgctgcatccagctgcaatgcctccctgccctctgactccggcgctgtggccagcgtggccccaagtcccactttaagcagctcaggggcggtcagtgcctttcagcggcgtgtggatggcaagaagaacaccaagaaacgccactccttcaccgcgctcagtgtgacgcacagatcctcccaggctgccagccacaggcattccatggaaattagtgctccagtgttgatcagctccagcgatccccgagccgcggccaggattggagaccttgctcatctgtcgtgcgctgctcccacccaggatgtctcctcctcggcgggatctacccccacggctgtcccacgggctgcctcggtgtctggagagcagggcacgcctcccaaggtccagctgcccctcaacgtgtacctggcgctctacgcctacaagccccagaagagtgacgagctggagctgcacaagggagagatgtaccgggtcctcgagaagtgtcaggatggctggttcaagggggcgtctctgaggaccggggtctctggggtgttccccggaaactannnnnnnnnnnnnnnnnnnnnnnctgcaggaggggcagggccgccccggaataatgtagtcggagggtctccactggccaaagggataaccacaaccatgcacccaggcagtgggagtctgagcagcctggccactgccaccaggcccgccctgcccatcaccactccccaggcccacgcccagcaccccacagcctcgcccccaacaggcagctgtctacggcactcagcccagccaacggccagccaagcccggagcaccatttcaacagctgcccactctgcagcccaggctcaggaccggccaactgccaccgtgtcacccctgcgcacccagaactctccatcccgcctgcctgccaccagcctcaggccccactcggtggtgtccccgcagcacagccaccagcccccggtgcagatgtgcccacggccggccatccccctcacatcagcagcatcagccatcacacctcccaacgtcagtgccgcaaacctcaacggggaggctggaggggggcccatcggtgttctgtccacatccagccccaccaacacgggatgcaaactagacgagaagaaaagtgaaaagaaagagaagaagagtgggctcctgaagcttctagccggagcatccaccaagaagaagtcacgctccccgccatctgtgtctccaacccacgacccccaggtggccgtggacgccctgctccaaggtgcagtgggccccgaagtgtcctcactgtccatccacggcagggcagggtcctgccccatagagagcgagatgcagggtgccatggggatggagcctctgcacaggaaggcaggctccttggatctaaacttcacatctccttcccggcaagctccgctgtccatggctgccatccgccccgagcccaagctgttgcccagagagaggtaccgcgtggtggtctcgtacccaccccagagtgaggcggagatcgagctgaaggaaggcgacatcgtctttgtgcacaagaagcgtgaggacggctggtacaaggggaccctgcagcggaacggccgcacaggcctcttcccgggcagcttcgtcgagagcttctgagaactggtgctccctgcacccagctcacagagggggaggccgcctgggaagctccacggcacacagagagggagccatggcgccccaagggttccaggtcatctccaaggcacctggcgggggataccctggcccagggtgggggccagggactgtggaggtcgtgccttctcccaaaacccccaaacggagagcacacctgggatgttcttcaaggaaatgcccaccccctctgtggaaactgcaaagaaagcaccttgaggaagagaggcaggtgccggcgcaggcaggcctgtggctgtggtttgcagccatggcagcgttctcatttaccacctaagcagggttggaggttgcaggaggtctgcaggcgaggtgggtggcatgggggccaggagcgctggagatcatctttctgggctgccctgggcttcccgcggggcccaggttgctctgtcaccattctatatacctcagtcacctgccgcccggctgctcagcaggggtgtttgtgaggccctgggggtgccccggaaggggcaccccaccgcccctgttgggaaccagagcagaatctgtgggcttgtcgcctgccagtagtataagcaacactttctgttcaccaccattgtcccttgcattacttctttcttacagcatatttttaacataaagctgttagactttatatatttctaataggtcagacattgcctatttttcatacatctggtgctgcctttttgtaaaactaataatgacttggttgagcttgaaagaaaagatgtctgaggcgacatcaaaggggcagaatttttatatttcccatatggctttgggagagcgccgagaagccgccatcccgcacctcagcgctggccagtactctgggggctggcggggtggatccattgagggggtcggagggagcttggaagcagccggtttctttaaactcttaccaaaaccccgcgctctgtctagacggtgatgattattattcaagacctggaaacatttcgaggaagggccactataattgtccttttgtgtggcggtagaaggagcacgcaggtcaaccccagccgggaaggcaaaatcttccctttattgcctcagagagaactgcaattagcattctcagaagatgatttcttggtatcaaaatgtgcagtttctacaacagtttagatcaccaccaccatttttcttcttttttaaaaataaataactgctcccatttcaggcagtgcaaaccttcatctgctggagaccagaggtacaaggagatcagggggttgcagcaccgctgcaggcttgcaagatcggggagttgggagggcgagagaggaggaggtgcagctttgatgctgggacctccctgagtggggctgatgaatgtatattcattagcaccatggctcacttcccaggaagactgatcaggagcccttcagggacaattttgttctcaagattcacaccttaggaacacatttttatcacctcaaaattttgatccatcacccctctctccacctatatttttacaaataccattcagacttaaattaagctgaagaaactagcctttggtaacatagggtgtcattggttttcagggatgtaaccaattccagaaatacattcttttgcctggcatgaagactttgaaacacgggccgcttattttcagagttcctgttttgggacgtgacttggctacttgttacttccaggtggttaccacacggcgggggtcatgcctttccctcccccaagatgataatagatttaatagactcaaagaagttgttcagaatcaaagaagaaaaagtctggcttaaacatagtaacttctgtgtgccaggttaatgacaaccaaaagctctctatttaccattattgccaaacttcatcagttgcccatcctgcaccaaaatcctgtgcgtgtttaaattcacgttgtcaccaaagaggtgcacagatcaacaacctggatgacgcaggtgttctccagggaaaccagaccaagtcaagtctccaggtaacttttttgaagtcttttttttaaggcgcgcaggtaccaagcaacagaatagagtaacctgaacgttcttactctcccaggcatggcccacgtggtgcttcaggtagaaatgtgcttcaccctcctggtggggggcgaggacacagcccactgcatgcagcatggtagagagctggggcgaatatctccatgtctttggaggatgtcagctggccgctttcagggcagagtcgggtgggcgttggtgccaccttaggaaggagagcgatgcgtgggtctggccagagctctggagccaatgccgggctgcctgagagcagaggaaatgcatggcccatgtgcatttctgagtattttaaactcgttcaggccctgcagccttcatgatgatgtagctcgcagagaagagcaggagcagaattagccctttcttcaggccatcttgcctcaaagggtacacatgtttggcggttaagatgaaactaacccttatgtttcatcctggccccatgatgtacacatcttagccatgtagtggccttggggggccacagagatttcctttgaggagcatggtagagtccacagccatggctgaagtcagtggacaccgaggggacaggactgcaggccaccaggggcctctgcccagagggaggcagagaggatggcggccacgggtgctctcctggcatcctcatggggtgatgccaggccgggcacttcaaaacaggctcagccgactgggagatcctttgtactttgcacagttcacacacacaaacacacacaccctatcccaagtgtttttgttagacacaaatgtcagcgtgtgattttggaagacttgtcagtgatgacaaaccatgatgcctgtgtttctgagtctttaaataaaaatgaacatggaaaaaaaaaaaaaaaaaaaaaaaaaaaaaaaaaaaaaaaaaaaataaaaaaaaaaaaaaaaa

SEQ ID NO: 7157 - DNA, 1823 bp, Homo sapiens
cctcagcttcccagagtgctgagattacaggcatgagccacagagcccagcccaggtaacttctacatggggaaaggtgagcctgggaaggccattgttaagtgcctctccaggggtccatttcagagttagctgtcagttcctaacttgtccattcttcttgcctcccagttcctagtctccagccactcaacagtcctcagaaagccccagtaccaggcttctggggaccagggtgacatctagtggatggcaagcctccctggggtcactgcagcctgttgtgtcctaggagctggggaaaggcaactggctggtgctgaatttggcaagggagcggaatttgacttctctggtgtaatgcagctttgccgtgtgacggtccaggaaaggggattaggtggaagaaaatatttcagtgaacactgatttttacctataaggaattttctgtttggagaggaaaagttgagttttattctgctcctttcctcccactcgcctgacatagaggtccctaagccctttctccaaacctgcatggatgagtttcttttcttgttcaggtggttccttatgtcacgacgatttttggaggcctgcatgcaggcaagatggtcatgctgcaaggagtggtccctctagatgcacacaggtttcaggtggacttccagtgtggctgcagcctgtgtccccggccagatatcgccttccacttcaaccctcgcttccataccaccaagccccatgtcatctgcaacaccctgcatggtggacgctggcaaagggaggcccggtggccccacctggccctgcgaagaggctccagcttcctcatcctctttctcttcgggaatgaggaagtgaaggtgagtgtgaatggacagcactttctccacttccgctaccggctcccactgtctcatgtggacacgctgggtatatttggtgacatcctggtagaggctgttggattcctgaacatcaatccatttgtggagggcagcagagagtacccagctggacatcctttcctgctgatgagccccaggctggaggtgccctgctcacatgctcttccccagggtctctcgcctgggcaggtcatcatagtacggggactggtcttgcaagagccgaagcattttactgtgagcctgagggaccaggctgcccatgctcctgtgacactcagggcctccttcgcagacagaactctggcctggatctcccgctgggggcagaagaaactgatctcagcccccttcctcttttacccccagagattctttgaggtgctgctcctgttccaggagggagggctgaagctggcgctcaatgggcaggggctgggggccaccagcatgaaccagcaggccctggagcagctgcgggagctccggatcagtggaagtgtccagctctactgtgtccactcctgaggatggttccagggaaataccgccagaaaacaagaaggtcagcccactcccagggccccactctcctcccctcattaaaccatccacctgacaccagcacatcaggcctggttcacctctggggtcacgagactgagtctacaggagctttgggcctgagggaaggcacaagagtgcaaaggttcctcgaactctgcaccttcctccaccaggagcctgggatatggctccatctgccttcagggcctggactgcactcacagaggcaagtgttgtagactaacaaagatactccaaaatacaatggcttaaagaatgtggtcatttattctttattatttatttatttgtggtcaaataaataaataaggttatttattt

SEQ ID NO: 7158 - DNA, 3921 bp, Homo sapiens
tccgccgctgctgtctgcggggtctggcgccggggtctgagtctctgctggctaagccgccgcctcagccgcctcagtcgcctcaatctcgccttccgccctcgctctccctccgcgccaccagaccccgtagccccgcgcgcccccagccctttaagccagatgatgaacttcctgcggcgccggctgtcggacagcagcttcatcgccaacctgcccaacggctacatgaccgacctgcagcggcccgagccccagcagccgccgccgccgccgccccccggtccgggcgccgcctcggcctcggcggcgcccccgaccgcctcgccgggcccggagcggaggccgccgcccgcctcggcgcccgcgccgcagcccgcgccgacgccgtcggtgggcagcagcttcttcagctcgctgtcccaagccgtgaagcagacggccgcctcggctggcctggtggacgcgcccgctcccgcgcccgcagccgccaggaaggccaaggtgctgctggtggtcgacgagccgcacgccgactgggccaagtgctttcggggcaaaaaagtccttggagattatgatatcaaggtggaacaggcagaattttcagagctcaacctggtggcccatgcagatggcacctatgctgtggatatgcaggttctccggaatggcacaaaggttgtccggtccttccggccagacttcgtgctcatccggcagcatgcatttggcatggcggagaatgaggacttccgccacctgatcattggtatgcagtatgcaggcctccccagcatcaactcactggaatccatatacaacttctgtgacaagccatgggtgtttgcccagctggtcgctatctataagacactgggaggagaaaagttccctctcattgaacagacatactaccccaaccacaaagagatgctgacactgcccacgttccctgtggtggtgaagattggccacgctcactcaggcatgggcaaggtcaaagtggaaaaccactacgacttccaggacattgccagcgtggtggctctcacccagacctatgccactgcagagcctttcattgactccaagtatgacatccgggtccagaagattggcaacaactacaaggcttacatgaggacatcgatctcagggaactggaagacgaacactggctctgcgatgctggagcagattgccatgtcagacaggtacaaactgtgggtggacacctgctctgagatgtttggcggcctggacatctgtgctgtcaaagctgtacatggcaaagatgggaaagactacatttttgaggtcatggactgtagcatgccactgattggggaacatcaggtggaggacaggcaactcatcaccgaactagtcatcagcaagatgaaccagctgctgtccaggactcctgccctgtctcctcagagacccctaacaacccagcagccacagagcggaacacttaaggatccggactcaagcaagaccccacctcagcggccaccccctcaaggttgtttacagtatattctcgactgtaatggcattgcagtagggccaaaacaagtccaagcttcttaaaatgattggtggttaatttttcaaagcagaaattttaagccaaaaacaaacgaaaggaaagcggggaggggaaaacagaccctcccactggtgccgttgctgcgttctttcaatgctgactggactgtgtttttcctatgcagtgtcagctcctctgtctggttgtttacctgttcctgttcgtgcttgtaatgctcacttatgttttctctgtataacttgtgattccagggctgtttgtcaacagtatacaaaagaattgtgcctctcccaagtccagtgtgactttatcttctgggtggtttgatagtgtttttaaaagtaatatataatgtggggtgaaatgggagtaggggggtggacaggggagaaacgaaaaccacaaaaagaaaacccaactcctctcctccccccaagctcagttaaatcccccacctccaactttccctccaccagtgtgcttgggatcttcaatgaactgtgcttttcgctttctttctgcatgactattgtaactagatagaacattaagagattttcaagatcaaacttccatagcttcatccactgaattgaggcatcacctttttctccatttgctaaaatttggtgcagtttgagtttatgtgaataggctggctgtgcctgtagagctcttgtgtttttagtgatgacatgaaatacaaagaacaagctatttccaggaatgtgttctgtattttacatcccagtgtaccctttattttattattaactaattaactatgagatttttaaaaaatggggccgctgatgtgcaatatcaaagtgaacttgtgagtattttgtgtgtgttgatctcagttgtttcttcattgttgctgtttctggatccagccatgtgtgcgcttgtgtggacctgaggctgctttctgttcccaaagcttgacctgtgtacagagataattccttggcaatgttggacatagaatgcagggagctactgaaggtctgtcagggatttgtccattctgctcttggcctctcctgaggcctcataatgggagaccaaatcaaaaatgtcccatgtcacttgagtgggtacactgcctacagaaccttgaggttgactcctgcttcagttctcagctgtttaccacagccctccagggtccaaagattgaggagctttctctttcctgggaggaactgtctcagatttagcttgtgtgtgttttggacagaggctccacagcggtggctcttgaggaatcctcaccagtttgttctcttccctctgacaagcagcacctgagcagatgctgaggcagttcattaaaccaggcctcagcttcagtgcctcatcttgccatctcccggccagggctggggaacgggcaccaagcagccgcctctaacaaacaccatggtccgtggaagttcatgccagcagcttgcctttgagaagaaatgctgctggctctatttttacattcccttccacctctatactgtcatgtcaccgttctgaactcccagatctgagaaggaactagtgttggtggtatgtaacaagagttacgtatccaggggcttgtgccttggtttctcctttgattgctggtaaattctgaggccacagagaaatgcattgagtgtgaatgttgtcatctgtaatccctccctcagctgataatggtagttgatctgttgtaaatatatacatatatgcatatttgcacttccagatgggttgcataagaatcaggtccttaaatacctcccaatctgatgaaacgatagaataaagtaacatttcccagaatggaggaatacattattttatcgtatatttttgtccaagcgatgagctgacggtggtattgcttctctgcatgttatcagtgtgtacatctggtgcttttcatgtgtcatttgtgagccacaaatgcaaagttgccatttgaattcagtcaggctacagggtggtgtcagtcaaggtctttcaggtgggggagaaattggttagggctcccactgccaaatgcaagcagatagcataacctgactgttatgtgccctcaggcagcatgcttagggacaactctgtggcctgggggacatctgtgtcacagtataggattgccattcaggtgttttgtacctatttctttcctgacgttgtcccctttttttgtactgatccaactgggagaacctcagccaatgctggaagtatgattgaagtacctctcttttgtgactcttgtacagcttaatgtgcaataaaggaaaagttatatctgtaaaaaaaaaaaaaaaaaaaaaaaaaaaaaaaaaaaa

SEQ ID NO: 7159 - DNA, 3147 bp, Homo sapiens
agcgggcgccgcgggcctacccggaacggcgcgtgggcccgggcagaagctgctggcggtaggctcgccttgacggccggcgggattccaggcgccgagcgcccgctgagcagccaccctttgcgcgccgcctgcagcgcagcttccccgggcgctgcctggacaggcctgcctgcgtgctgggacatgtctggcctccaaggaccgtcggtgggcgatggctgcaacggtggaggggccagagctggaggcagctgctgccgcaggagatgcttcagaggattcggacgcagggtccagggcgctgcctttcctgggcggcaaccggctgagcttggacctgtaccccgggggctgccagcagctgctgcacctgtgtgtccagcagcctctgcagctgctgcaggtggaattcttgcgtctgagcactcacgaggaccctcagctgctggaggccaccctggcccagctgcctcagagcctgtcctgcctccgctccctggtcctcaaaggagggcaacgccgggacacactgggtgcctgtctccggggtgccctgaccaacctgcccgctggtctgagtggcctggcccatctggcccacctggacctgagcttcaacagcctggagacactgccggcctgtgtcctgcagatgcgaggtctgggtgcgctcttgctgtctcacaactgcctctctgagctgcctgaggctctgggggccctccccgccctcaccttcctcacagtgacacacaaccgcctgcagacgctgcccccagcactgggggccctatccaccctgcagcgcctcgatctctctcagaatctgctggacacgctacctcctgagattggaggcctgggcagcctcctggagctcaacctggcctccaaccggctgcagagcctcccagcctctctggcgggacttcggtccttgcggctccttgtcctgcacagcaacctcctggcctctgtgccagctgacttggcccgccttccactcctcacccggctcgacctgagggacaaccagctccgggacctgccccctgagctgctagacgccccctttgtgcgcctgcaggggaaccccctgggtgaggcctcgccagacgccccgagttcaccagtggcagccctcattccagaaatgcccagactgttcctgacctcagatttggacagctttcctgtgacccctcgaggctgctcagtgaccctggcctgtggcgtccgcctgcagttcccagcgggagccaccgccacccccatcaccatccgctatcggctgctgctgccggagccaggcctcgtccccctgggtcctcatgacgccctgctcagccatgtgctggagctgcagccccatggggtggccttccagcaggatgtggggctgtggctgctcttcaccccaccgcaggcccggcgctgccgtgaagtggtggtcaggacccggaatgacaacagctggggtgacctggagacctacctggaggaagaggcaccccagcggctctgggctcactgccaggtgccccacttctcctggttccttgtggtttcccgccctgtgtccaatgcctgcctggtgccaccggaggggacactgctgtgctcctcgggtcatcctggggtcaaagtcatcttcccccctggggccactgaggagcctcgtcgagtctccatgcaggtggtgcgcatggctggccgagagctgcaggccctcctgggagaaccagaggctgcagtgagccccctgctgtgcctgtcacagagcggtccccccagcttcctccaaccggtcaccgtgcagctgcctctgccctctggcatcacaggcctcagtctggaccgctcccgcctgcacctgttgtactgggcccctcctgcagccacctgggatgacatcacagctcaggtggtcctggagctcacccacctgtacgcacgcttccaggtcacacacttctcctggtactggctctggtacaccaccaagaactgtgtgggaggcctggctcggaaggcctgggagcggctgcggctgcaccgtgtgaacctcatcgctctgcagcggcgccgggaccctgagcaggtcctgctgcagtgcctgccccgaaacaaggtggacgccacccttcggcggctgctggagcggtaccggggccccgagccctctgacacggtggagatgttcgagggcgaagagttctttgcggccttcgagcgcggcatcgacgtggatgctgaccgccctgactgtgtggagggcagaatctgctttgtcttctactcgcacctgaagaatgtgaaggaggtatacgtgaccaccactctggaccgggaggctcaggctgtgcggggccaggtgtccttctaccgtggcgcggtgcctgtgcgggtgcccgaggaggctgaggctgcccggcagaggaagggcgcagacgccctgtggatggccactctgcccatcaagctgccgagacttcgagggtccgaggggccacggcggggggctggcctctccttggcacccttgaatctgggagatgccgagaccggctttctgacgcagagcaacctgctgagtgtggctgggcgtctgggtctggactggccagccgtggccctgcacctgggggtgtcctaccgggaggtgcagcgcatccggcacgagttccgggatgatctggatgagcagatccgtcacatgctcttctcctgggctgagcgccaggctgggcagccaggggctgtggggctcctggtgcaggccctggagcagagtgaccggcaggacgtggctgaagaggtgcgcgcagtcttggagctcggccgccgcaagtaccaggacagcatccgacgcatgggcttggcccccaaggaccccgctctgcctggctcctcggctccacagcccccagagcctgcccaggcctaggccccacagacttttaggctggcccagatattccccagtggatgggcagagcccccaccttcaagtctctccagtgtgtggggacgggtccctgtgagcaacaaaactgcactgtttctttcacctcaaaaaaaaaaaaaaaaaaaaaaatgacaaaggaaaaggccccccactcaaaaggcagccgatgccaggcc

SEQ ID NO: 7160 - DNA, 4696 bp, Homo sapiens
  misc_feature (210)..(233): n is a, c, g, or t
  misc_feature (1441)..(1456): n is a, c, g, or t
agcgggtcgtgggcagccgcctcacagcgatggcggccgagcagggccggtggcggcggcggctgcggctacggccggagacggcagtgttggcggtagtggtgggtggcaggggcctgtgaccgggagctgcccccggacccgggcaccatgagccaaggcccccccacaggggagagcagcgagcccgaagcaaaagtcctccacacnnnnnnnnnnnnnnnnnnnnnnnnggaggctgtgcatcgacttgacctcatcctttgcaacaaaactgcttatcaagaagtattcaaaccagaaaacattagcctgaggaacaagctgcgtgagctctgcgtcaagcttatgttcctgcacccagtggactatgggagaaaggctgaggagctgctgtggagaaaggtatactatgaagttatccagcttatcaagactaacaaaaagcacatccacagccggagcactttggaatgtgcctacaggacgcacctggttgctggtattggcttctaccagcatctccttctctatatccagtcccactaccagctggaactgcagtgctgcatcgactggacccatgtcactgaccccctcataggatgcaagaagccagtgtctgcctcagggaaggagatggattgggcacagatggcatgtcaccgatgtctggtgtatctgggggatttgtcccgatatcagaatgaattagctggcgtagataccgagctgctagccgagagattttactaccaagccctgtcagtagctcctcagattggaatgcccttcaatcagctgggcaccctggcaggcagcaagtactataatgtggaagccatgtattgctacctgcgctgcatccagtcagaagtgtcctttgagggagcctatgggaacctcaagcggctgtatgacaaggcagccaaaatgtaccaccaactgaagaagtgtgagactcggaaactgtctcctggcaaaaagcgatgtaaaggacattaaaaagggttgctaagtggatatctgcaaagcctcctacagcccaaaagcagctccgtggactcagagctgacctcactttgccagtcagtcctggaggacttcaacctctgcctcttctacctgccctcctcacccaacctcagcctggccagtgaggatgaggaggagtatgagagtggatatgctttcctcccggaccttctcatctttcaaatggtcatcatctgccttatgtgtgtgcacagcttggagagagcaggatccaagcagtacagtgcagccattgccttcaccctggccctcttttcccacctcgtcaatcatgtcaacatacggctgcaggctgagctggaagagggcgagaatcccgtcccggcattccagagtgatggcacagatgaaccagagtccaaggaacctgtggagaaagaggagnnnnnnnnnnnnnnnnctcctcctgtaacaccccaagtgggtgagggcagaaagagccgtaagttctctcgcctctcctgtctccgccgtcgccgccacccacccaaagttggtgatgacagtgacctgagtgaaggctttgaatcggactcaagccatgactcagcccgggccagtgagggctcagacagtggctctgacaagagtcttgaaggtgggggaacggcctttgatgctgaaacagactcggaaatgaatagccaggagtcccgatcagacttggaagatatggaggaagaggaggggacacggtcaccaaccctggagccccctcggggcagatcagaggctcccgattccctcaatggcccactgggccccagtgaggctagcattgccagcaatctacaagccatgtccacccagatgttccagactaagcgctgcttccgactggcccccacctttagcaacctgctcctccagcccaccaccaaccctcatacctcggccagccacaggccttgcgtcaatggggatgtagacaagccttcagagccagcctctgaggagggctctgagtcggaggggagtgagtccagtggacgctcctgtcggaatgagcgcagcatccaggagaagcttcaggtcctgatggccgaaggtctgcttcctgctgtgaaagtcttcctggactggcttcggaccaaccccgacctcatcatcgtgtgtgcgcagagctctcaaagtctgtggaaccgcctgtctgtgttgctgaatctgttgcctgctgctggtgaactccaggagtctggcctggccttgtgtcctgaggtccaagatcttcttgaaggttgtgaactgcctgacctcccctctagccttctgctcccagaggacatggctcttcgtaacctgcccccgctccgagctgcccacagacgctttaactttgacacggatcggcccctgctcagcaccttagaggagtcagtggtgcgcatctgctgcatccgcagctttggtcatttcatcgcccgcctgcaaggcagcatcctgcagttcaacccagaggttggcatcttcgtcagcattgcccagtctgagcaggagagcctgctgcagcaggcccaggcacagttccgaatggcacaggaggaagctcgtcggaacaggctcatgagagacatggctcagctacgacttcagctcgaagtgtctcagctggagggcagcctgcagcagcccaaggcccagtcagccatgtctccctacctcgtccctgacacccaggccctctgccaccatctccctgtcatccgccaactggccaccagtggccgcttcattgtcatcatcccaaggacagtgatcgatggcctggatttgcttgaaaaagggaacacccaggagcccgggatgggattcggtacctggaggcagagtttaaaaaaggaaacaggtacattcgctgccagaaagaggtgggaaagagctttgagcggcataagctgaagaggcaggatgcagatgcctggactctctataagatcctagacagctgcaaacagctgactctggcccagggggcaggtgaggaggatccgagtggcatggtgaccatcatcacaggccttccactggacaaccccagcgtgctttcaggccccatgcaggcagccctgcaggccgctgcccacgccagtgtggacatcaagaatgttctggacttctacaagcagtggaaggaaattggttgatactgacccccaggccctgcagtggggctgactccagatctctcctgccctccctggcagccaggaccagcacctgtagtcaccccaccacacgcagactcatgcacgcacacaggagggaggcctagctgctcagaggctgcagggagggcccaggagccggctgggagggtggggtccctttgttgccaagacgttaggaaagcgaggaaagtgcttggattaggagagtcttgtgggcccctggccagccttcctgcctcagctcccctgctgtctccaggggcaggtggtaggcatgggtacctgcatttcactggagtgggttcttggatctctgaggggaaggaacagcaaaagaggcccttcttcctcacccaagatgcagggtggttggggccaggagtttggaccctctaggtcttgggggaagagctgggtaatacctggtgtctgagtgattctctgcagacccttcccctcctcaaggatcacccatcctcctttcagccccctttatggggaccaggcagctctggagccagccacaggggctgttagagaagcaaggcctggagtggcctgcaccgagtagcagggtcagggttcgtgtgctcctcctcctgctgcaggggctgcacatcccattgccccacttctgctttgtgtctccctctgtctagcttccagggcagggagcaggccccacctagggctgcaggcagtctggcctgtgccagcacggtctcctgtgcccaccagccccacaggtgctgtgctttgtgctcttggctgctgtgctgggacagaatgggatgccaggaagagaagaaagggggtgcagtctgaggccaccaccccccttcctatctaagggagggctgaagacaaggggccggcattcagtgggcagcagaaaggagaggccccttgaagctgctcagtcagaggcccccgtccctccttttgccttccgcaggactgaagacctgaaggggctggcttttggagtgttgaggtgaatatctgggagcagagatcatgaatagctcagggcagtgaatggcgcaccaagagcagggctgtgtgtgggaggctgcagccaggattgcctcagctcctccccctcaggctgggaggatagcacaggctaggggctcggggtggagggtctcagctctgctgcccccaccccagtactagcctagcttcccaagctgtggcttagaggatagttggcttcctgcctctctcctctaaaatagcaagtctgggaaatcctggggtgagtggagtcaccccactcccagttgctggcagagactgagactaaagcatcacttaataaaccccccaagcccaaaaaaaaaaaaaaaaaaaaaaaaaaaaaaaaaaaaaaaaaaaaaaaaaaaaaaaaaaaaaaaaaaaaaaaaaaaaatagaaaaaagagagaaggaaaaaaaaaagaaaaaaaaagggggggccgcgcgcccccc

SEQ ID NO: 7161 - DNA, 461 bp, Homo sapiens
tttttttttaagtaggaaagtatgtagggaaggaaaaagcacaaattctacctgagtactaaaacagttaccttttaaaagacaaatcatgcttatgttcacttaagtaagcggaacagacagaaaccactgctcgacttaaagtgtccagaaaaagtgcttctgtagcaacagaatgcctagaagaactcctgggatttctagaatgtctcagtataaaaccaagtctttctcttactctgttgtacacgctggaactggatgggttcattcgattccaagacatgtgaccacagaatttcagagttaaaacaagacatcatgagaaggaacctcgttcttaaataatatttttagatctctaaagccagagaggggtttaactgctatttctgtgcaaagattagaaagccagtgtccaaggaaggctgccaagggactggggtttaccttcaggctca

SEQ ID NO: 7162 - DNA, 6591 bp, Homo sapiens
  misc_feature (3159)..(3186): n is a, c, g, or t
  misc_feature (5901)..(5901): n is a, c, g, or t
cctactaccaggtcattgtgcaggagaacaacacgcctggcgcctatctgctctctgtgtctgctcgcgaccccgacctgggtctcaacggcagtgtctcctaccagatcgtgccgtcgcaggtgcgggacatgcctgtcttcacctatgtctccatcaatcccaactcaggcgacatctacgcgctgcgatcctttaaccacgagcagaccaaggcgttcgaattcaaggtgctggccaaggacggcggccttccctcactgcaaagcaacgctacggtgcgggtcatcatcctcgacgtcaacgacaacaccccggtcatcacagccccacctctgattaacggcactgccgaggtctacataccccgcaactctggcataggctacctggtgactgttgtcaaggcagaagactacgatgagggcgaaaatggccgagtcacctacgacatgaccgagggcgaccgcggcttctttgaaatagaccaggtcaatggcgaagtcagaaccacccgcaccttcggggagagctccaagtcctcctatgagcttatcgtggtggctcacgaccacggcaagacatctctctctgcctctgctctcgtcctaatctacttgtcccctgctctcgatgcccaagagtcaatgggctctgtgaacttgtccttgattttcattattgccctgggctccattgcgggcatcctctttgtaactatgatcttcgtggcaatcaagtgcaagcgagacaacaaagagatccggacctacaactgcagaattgctgagtactcctatgggcatcaaaagaaatcaagcaagaagaaaaaaatcagtaagaatgacatccgcctggtaccccgggatgtggaggagacagacaagatgaacgttgtcagttgctcttccctgacctcctccctcaactattttgactaccaccagcagacgctgcccctgggctgccgccgctctgagagcactttcctgaatgtggagaaccagaatacccgcaacaccagtgctaaccacatctaccatcactctttcaacagccaggggccccagcagcctgacctgattatcaacggtgtgcctctgcctgagactgaaaactattcttttgactccaactacgtgaatagccgagcccatttaatcaagagcagctccaccttcaaggacttagagggcaacagcctgaaggatagtggacatgaggagagtgaccaaactgacagtgagcatgatgtccagcggagcctgtattgtgatactgctgtcaacgatgtgctgaacaccagtgtgacctccatgggatctcagatgcctgatcatgatcagaatgaaggatttcattgccgggaagaatgccggattcttggccactctgacaggtgctggatgccccggaaccccatgcccatccgttccaagtcccctgagcatgtgaggaacatcatcgcgctgtctattgaagctactgctgctgatgtcgaggcttatgacgactgcggccccaccaaacggactttcgcaacctttgggaaagatgtcagcgaccacccggctgaggagaggcctaccctgaaaggcaagaggactgtcgatgtgaccatctgcagccccaaggtcaacagcgttatccgggaggcaggcaatggctgtgaggcgattagccctgtcacctcccccctccacctcaagagctctctgcccaccaagccttccgtgtcttacaccattgccctggctcccccagcccgtgatctggagcagtatgtcaacaatgtcaacaatggccctactcgtccctctgaagctgagccccgtggagctgatagcgagaaagtcatgcatgaggtcagccccattctgaaggaaggtcgcaacaaagagtcccctggtgtgaagcgtctgaaggatatcgttctctaaaccagtctccaggaagaagagaaagaaaccacactggctagtgaagaagcaggagcttcttgttttaattgctcaccaatggttggttcttgagtggctatatttcagagcttttcctaaatgtattgtttataggtgattatcattctgtgacagtcccttgtttcaacaggcagcaggggtgttcagttggagcaaattagctttggcttgagttgttcatggggccttgatgttggggaaacagagacaaattcagttgtgaaaagtattatgtattaagtgtttgaatttatatatttttctatgtcaaaattataatataaattaccattgtttgtggaggattacatttaaaaaagcaaaaagtgaaaaaaaaaaagctctggacacctttaataagctcgccactgttttttgtagtgtagacaagttaatggtcatttattgtgtactattcattgattcagtgatgtgaaattgagcccccaaaaggttgtttctgaagctcgagtacttcccaatgccgctactttgctgtggacacccctgctttaaaaacccttttgctagctgtgctattgttgtatttgatattgcaaattgctatgtgtgtggtgatggcaaaaggcttttaaaagttggtgttttctttttcttaaaaaaataataaaactacagacaaaaacaaagtgcaaacaactgagacagcaaatgaatgagcaacaccatgcatatagattgagtacttggagaatactcacgttttttaactcatgtagtgattgctcaccactttgcaaagtatttttcctgcctttcagtggtctgcccaggtccatgatagatcattgcagaaagtcatttttggataggctgctatctaatttgcagttgtcagaaatactgtgctgaaagttttatgacatccatcttttaaattttcaggccctgaacaggaaagttgctcctgaagttatgtttccaggcttagaaattccctctctccaatcatctaaaattgaagatgactgaatctattttaagatctaaattagcatctcttcagacacacacttcctgattcagtgtttcccaatcatgattagaattagactgcaaagcacgtcatgggctgggattgagaactccatgttgctctgtatcttaggcttatatacgtagggatagagtaagcagtacaaagtgtatattttgnnnnnnnnnnnnnnnnnnnnnnnnnnnngctaatccaattactgtgccttctaaacggagacactcagacacttgaactcatctttttatgactaatagttttttgattaaaaatgtgaacaagaaaatactaaaataaaaatcctttcgatttagccaactctttttgctgtaggctaggaatacaccctttttaaattaacacactgtagatcctttttttctgttttaacattcctctaactcccccatttatcttttgtctattaatattcactagccaacatagtatttttgcagcctaagagttcattatttaaaaataaactaaagaaatatgtcacctttgttctgccttggtcttaagagagttgtttctagagaaacaagttttatggttctgttttcatttgtttcattttttgaaattcaggaatacacagagagaaggcctagaggttagagcactagaatgcaaaagaggatttattttcttaagtttaggtagataagtcagctcttttgaatgttttacttatttttgcctgagttcctagctttacgcattactaggaatattttcttttacaggagggagaagggttttgagggagggggtgggtaaggcagtagggatggggttaggtaggggagaacatttctgaaaaagaacttataatgaagctacaaatccatccttatttcttattcagtgctgaatactacctcatgcaaaatattggtgtggctgcaaatttccctctgaagctgacacaattaaggatgaattaccataacatcttcatttttcctcatttcattgcctctcatacagttttctccctctgatttatttcattttggtagtggattttgaattaagtatttatttctctttgcaagtgactatttgattaacacattaaaaattttttaaaaatttcccctttaagttatgatggctgcctatagaatttagactgtttctcaccctgatccatcctgatattatgttattagctacgatttcaaggtcactttgaagtcagacttcacagttttctacaggtgtatttcttgctatgctcagtgggaaccagggagcagaaaagattgtggaaagtgggaacattaattgtcacgtggctgttgagccagagaggccactggctgccatgcctcttaccagccaagttttaaatggttagagtggcattggcattgattttgcttttctcttgggttttcttcatttcttttcataattcatcttcaagctatagatccatccttcttccctatccaaatactttgttctcagtgggcagtcagatttttttggcttccaaacctcactgagcatgttcagagaattcctctcattaaggaaatatttttccccacaattgtctgatgtatgagtcctctcagaagcacaagtgcatactaggaaggctttgtaaactggttttgtaggcaggctgtacctgcaaataggcattctgagcaaggatcctaaatttccctttggctcatgtcccccccgccccaccccaccttctcctttttggcatgtctggtgaaaagctacaaggttcacagggccaaatattctcccttttgttctctaaacatgttgcacacataaactcaagggagtgatttcggttcctaagtcctagggagttctattccatttattctgatgtcccttttaaggaggagttggtgttgaagtgtgacatgctttaatgataactgctttggcaattccccagacaggtatacttcttcatccaaaattgcacctaaggtgttcatttagacaaaattgttcgcttagtgatccactgatctctaatcagaaatatttttaaaaaatacaatttagatctctgaaaattggaaccactcaagagtatcatcttgatagtgttacttcagcatatgactgactgattttatgaagggagtttagctgacttttccctgtagccctatcatattaaaaacaaaaagtggtccacttgaagcagcaaggacaaagggcagtttagggagaggcagggtgaaggggatagctcgattgggcatccagagtgaaaaggattattattgtacataatagcagttctggtctgggaattccaatccactttctggggatcattttgatgttgaatgttcccccaaagcattctgacaagtttggtccacttggctctttaccccgggtaataagacccttattgactttgaaaaactggcataaatgagcttaagaaatccattgtatacagtcctagtgtttgccttcttggtaaaattacatttaaggatgtcatttcatgagtcaaattgtatctgctgacactgaagtgtattgagatgttgttctttagtttaagtatgtaacaaagtaatattcaaaggggatgtttgggggtggggctgggaccgggtggctttatattgataatgaaatattccagagcaaaacacattgtcctaatgaagttgttgcagctctcttcgttttcttgtgccgctggaattggcttgtgggtcacttgttgtgcaaaagtgaattaatttcaaataggaatcatattgcttttgtgaaacaaagaaaatttaccaccttgtctgatacatagattggaaggcgctcttggtaaagaataacccacaaacacctgatcttgattggaaagcattgtaggtcattagggaaaacggagangctgactgttgctccagctgtgttggcaattcaagatgaccttgttactaactgaaagttgctgtcaaccttagcaaacaaaccagctaacaccattacagcactggttaagtagatttttactggcactggctggcgttcagctgaggaaggctaggatacagactttaatgaccaagagccagactagctcgagctagaaatcagcaacaaatacctccttgtgctatttgaatgctaaggtattagttgcaataggcttacgccttcgctcctctagtgaggggaatgagcctgatgacactattactgtttacctgtcaaaccagggtggaaatttagagggatgcaagtacagtatgtctcattaagcagtctctgttgctgattatatgaagataaaattgttgtatatgctgatctgtatgttatgtacattttcacagtgattgaatcattgtaaaaagaaaaaagacaaaaaagaatcaccactgtctattttatgaagatgataaagcagctttattaaattattacagttatgtttcaaatggtgttatctgccacattgtttccttttatctggtggttctctgtttccccctttaaatgtgttttctctgcttcaaaaatttaatgcattttagtattaaaggctattatggaaaaagtaaaaaaaaaaaaaaaaaa

SEQ ID NO: 7163 - DNA, 464 bp, Homo sapiens; identical to SEQ ID NO: 3154

SEQ ID NO: 7164 - DNA, 4017 bp, Homo sapiens
tacccaaaaaaaaaaaaaaaaagaaaaaaagaaaaaaaaaatcagatcagaccgagagagagaggagagagggagagagagagggagagagagagggagagagagaggagagggagggagggagagagagaggggggagagcagagagagagcgcgagcgcgagcgagcgagagaagaggaggcacgagggagcagagagcgagcggagagcgaggtgtagagaaaccgagggggagagaacccgagtgtgtgtatgcgtgtgcgtgtgtgagcgcgagcgagcgagcgagagagaggagcgagagagtgtgagcgagaaagaataaaaggaaagaagattttctctatgtatataaagatggccacgttagcaaacggacaggctgacaacgcaagcctcagtaccaacgggctcggcagcagcccgggcagtgccgggcacatgaacggattaagccacagcccggggaacccgtcgaccattcccatgaaggaccacgatgccatcaagctgttcattgggcagatcccccgcaacctggatgagaaggacctcaagcccctcttcgaggagtttggcaaaatctacgagcttacggttctgaaggacaggttcacaggcatgcacaaaggctgcgccttcctcacctactgcgagcgtgagtcagcgctgaaggcccagagcgcgctgcacgagcagaagactctgcccgggatgaaccggccgatccaggtgaagcctgcggacagcgagagccgaggaggtagtagctgcctgcgccagcccccttcacatagaaaactcttcgtgggcatgctcaacaagcaacagtccgaggacgacgtgcgccgccttttcgaggcctttgggaacatcgaggagtgcaccatcctgcgcgggcccgacggcaacagcaaggggtgcgcctttgtgaagtactcctcccacgccgaggcgcaggccgccatcaacgcgctacacggcagccagaccatgccgggagcctcgtccagtctggtggtcaagttcgccgacaccgacaaggagcgcacgatgcggcgaatgcagcagatggctggccagatgggcatgttcaaccccatggccatccctttcggggcctacggcgcctacgctcaggcactgatgcagcagcaagcggccctgatggcatcagtcgcgcagggcggctacctgaaccccatggctgccttcgctgccgcccagatgcagcagatggcggccctcaacatgaatggcctggcggccgcacctatgaccccaacctcaggtggcagcacccctccgggcattactgcaccagccgtgcctagcatcccatcccccattggggtgaatggcttcaccggcctccccccacaggccaatgggcaacctgctgcggaagctgtgttcgccaatggcatccacccctacccagcacagagccccaccgccgcggaccccctgcagcaggcctacgccggagtgcagcagtatgcagcagctgcctaccctgctgcctatggtcagataagccaggcctttcctcagccgcctccaatgatcccccagcagcagagagaagggcccgagggctgtaacctgttcatctaccatctgccccaggagtttggggacgctgagctgatgcagatgttcctccctttcggcttcgtgagcttcgacaacccggccagcgcgcagaccgccatccaggccatgaacggcttccagatcggcatgaagaggctcaaggtgcagctgaagcggcccaaagacgccaatcgcccgtactgagcgccggcgggagcgtcccccgggggagaccaggactcgcacagggcaggatgctgaacgggctacattaaaaaacaaacctctctctatatatatttataaatgagaactgttggatgacacctttgacatatcagccaatatcaatcaagctgaagactccagacactgtctgtgtgactgtaacatttcttcaaggaaagtatagcgtctatggagttcagagggcacgtgtttgggggaaaatatatatgacatgaagaagaagatgaagaaaaatgagaaaaaaacacacaaaaggcaactttaaaacaaaatatcacgagcagacggggaggctgaagggctgggagctgggaggagacgctgcttaccgatcccggggcttttccagcccacgggcgcctgacgcaggctggggcaagtggtgcgtggggcctggtccccaaggggcggctgagaggccgccactgagcatctctatctgtcattcctttagctatttagggaccaaaggaccaaactttttattgcagatgtgtagctctatgtcaaatagagggggaatggaggaccccctccttcctgcctcatggctgttcttgaaacagcttagagcgattctatgaaaaaatgtaataaaaaattaaaaaaaaaaaaaaaaaaaaaaaaaacaacaaaaaaaggaaaaataacgcttcaatgcttttaaaacagcaagataatagttctttgatactttgagaggcgctttgatgaccctcatccaagtctatgacactttcctatggttttctgtattctatgtctggatggagctgttaaaagatgaacaaattggtggatatttggggaaagcaacacaaatcttaaaactcacccgtgaagtgtgagaaaacaaggaggggaacaaatgggacttaccaagcaaggtcattgttgtgaaaagtctgtaaatgcttctaactcttccccctcttaaaatcataatagttgtacagaattttaaaaaggaaaagtttaaaatacctatataatagaagaaaaattagaggaaagcaaaaaataaaaaaaaaaaaataaaaaaggaaaaaaaaaacctatagaagttagcattactgctaaaatcccagatgttgtaggactgtacttttgtagagtttagacagagcatcaatcccttctccccgcgagtgcagtcggatgccgttgtccccaagggccaggccgaactcgccccacacctgcgggcgcctggctgccgacgccggtggaggccacgccgtcggtcgggaacggtcgcgtcgcccgggtcgccgccgccgccgccgccgtcatcctcgcctctcgcttccctctgggagctgcgcgcgcttcactcaccttccgcttcactcgccttccacgcttgctccagagactttccgggcaagggagaactgggaactttcatcttaaaacaactagacaacacacacacacacaaaaccttaaaaaagagagagaaaaataaacaatctttgaagaatttctgaaactgtttacaaggaattttgaaaaacagggatgtttaaatgatgccggctctgtttttctgtaaataaatttgcatattttgtaggacttttaattgtaatgatagagaaaaaaacaaggaaaactatttaatgaaagcacgatatttatctttggtaaatgactttagagcagttaaagacattgcttaaaaaactcagaatcagaaaaaacactgaattatttaagaacacatatattttaaagtataacatatttattataatttatttgcacccttgggaagattgctttggcattctgccttgattccttctcattgatgtccaggtcatctggaggccgggggttctcagacctaccagtttccctttagaagaacaaatttccagttcctctagggcctcctgcctttcctttctttctgtcaattttgttgttgttgttgtttttcattttctttttttctcttgactcctccttttaggatgtccagatgtaaaaaaaaaaaaaaaaaaaaagaaaaaaagaaaaaaaaaagaaaacagctgcagttcagtacaactgctcttttcacactcaactccctaaaactccttgtaaccttctgtaactattggatgacgctttctccagcttagccctaaataaagcacagtttaaaaaaaaaaaaaaaaaa

SEQ ID NO: 7165 - DNA, 1350 bp, Homo sapiens
gtattcattaaaagaaaactaactggaaaacaggttagattaattcagtactattaaaaaagaattcagagctgttaatattttatcacaggataggatacttaaaatatagcattctgtgctgagatctaaggtgaagtctataaagattaaagttcccttttttctgatgttcaagttgattgttgttcagtatggcatatatgacaaaagtatatttgagtcaaatgtggctttctaaaatggatgcaacatgtagatccatacaagttggggtaggatatacccaagcgtgtatatatttgctcagcatgtgaaataataaaaataatacaaaactactcattcttcaaggtagttacagtttcaatgccactcttcctgtccccatattcattaagacagaagcttgatgcttaaacacacactggtatgaaaatgttttgtgttttctgttatattgtcagaagtgacattgatttgaaaggatgagagccttattttcttgcaacccttactgaaaggcatgatttcaggtgaaaatcttcagtgatttttaacatatgtcacatgtttgcagtaaggtcagtctttccaatcacagatagagttatgcatctatattctaccaaatattagcaaaaccaatgcaatacgtgtctgtctttgcaatataaagtaagcttggtgattatatttagtggagttacttgaaataggtcatttagtttacatacagtttaattctcatgccacaattaataaggtatcacatgactgcaaaatacactgcagcaaactttctagcatctgatattggataaggatagcttgtgctagaagttggagattaatctggtctgctgactggcagcattagagactgtatctgatggttggtgtgaggatgttgttgacagttctgaaagttagccatcaattcctgtgcagggtggagtcagacccagtgacttccttttcaatgtcagcaagagttttctcatgcctgctttggtcactttctcttggaaacttcacgcatttgacttgcagcttcttgacccgaggaatcaactgagctcccagtgctggctaccttgggcaaataaaatctgtggttgagagagttctctttgctgtgccacagtccctgtgatgtgccaaatggcaccagcatttgcagcaaagctcgttaaatctttttggaatgggcaaatattttttcaacttgagccctgctgagccaaaccaaatacttgctggcagaataaagttcaaactggcaactgttttggagaccaaagtaatgccatatatcttttttttaaaaaaaaaaaaaaaaaaaaaaaa

SEQ ID NO: 7166 - DNA, 9889 bp, Homo sapiens
  misc_feature (32)..(49): n is a, c, g, or t
  misc_feature (1129)..(1129): n is a, c, g, or t
  misc_feature (3163)..(3185): n is a, c, g, or t
  misc_feature (3686)..(3709): n is a, c, g, or t
  misc_feature (4809)..(4825): n is a, c, g, or t
  misc_feature (5004)..(5048): n is a, c, g, or t
  misc_feature (6571)..(6613): n is a, c, g, or t
  misc_feature (9618)..(9618): n is a, c, g, or t
  misc_feature (9621)..(9621): n is a, c, g, or t
  misc_feature (9663)..(9663): n is a, c, g, or t
  misc_feature (9706)..(9706): n is a, c, g, or t
  misc_feature (9736)..(9736): n is a, c, g, or t
  misc_feature (9738)..(9739): n is a, c, g, or t
  misc_feature (9780)..(9780): n is a, c, g, or t
  misc_feature (9783)..(9783): n is a, c, g, or t
  misc_feature (9786)..(9790): n is a, c, g, or t
  misc_feature (9794)..(9794): n is a, c, g, or t
  misc_feature (9806)..(9825): n is a, c, g, or t
  misc_feature (9835)..(9835): n is a, c, g, or t
  misc_feature (9842)..(9843): n is a, c, g, or t
  misc_feature (9845)..(9848): n is a, c, g, or t
  misc_feature (9851)..(9857): n is a, c, g, or t
  misc_feature (9864)..(9865): n is a, c, g, or t
  misc_feature (9871)..(9871): n is a, c, g, or t
  misc_feature (9880)..(9888): n is a, c, g, or t
gctgattttgggaggtgccaatattaattacnnnnnnnnnnnnnnnnnnaatgctccaattctatgtgttcagtcccatcttggttacacagaaatggtagccctgctgctggagttcggggccaacgtggatgcctcttctgaaagtggcctgactcccctgggatatgctgcagcagcagggtacctgagcattgtggtgctgctgtgcaagaaacgggccaaggtggatcatttggataagaacgggcagtgtgctttggttcatgctgcactccgaggtcatctggaggttgtcaagtttttgattcagtgtgactggacgatggccggccagcagcaaggagtatttaagaagagccatgccatccaacaggccctcattgctgcagccagcatgggttatactgagattgtctcctacctacttgatcttccagaaaaagatgaagaggaagtagagcgagcacagatcaacagctttgacagtctctggggagagacagccctaacagctgcagccggaaggggcaaactggaggtgtgccgtttgctcttggaacaaggggcggcagtggcccagccaaaccgccgaggagcagtgccactattcagcacagtgcgccagggccactggcagattgttgatcttttactcacccatggagctgatgtcaacatggcagacaagcagggccgcactcccctgatgatggctgcttccgaaggccatctaggaaccgtggactttctgcttgcacaaggtgcctccattgctcttatggacaaagaaggattgacagccctcagctgggcttgtttgaagggccatctctcagtagtacgttctctggtggataacggagctgccacagaccatgctgacaagaatggccgtaccccactggatctggcagctttctatggcgatgctgaggtggtccagttcctggtagatcatggggccatgatcgagcacgttgactacagtggaatgcgccctttggatagggcagtggggtgcccgaacacttctgttgttgtcactcttctgaagaaaaggagccaagataggttgtcagacgtttcgagtcgcccgcgaggtccagccacatgggcgatggccccntccaagccagacatcatgatcatcctgttgagcaagttgatgaaagagggggacatgttttataagaaaggtaaagtaaaggaagctgcccagcgctaccagtacgccctgaagaagttccctagagaagggtttggtgaggacttgaaacctttccgggaactaaaggtgtctctcctcctcaacctctctcggtgtcgcaggaaaatgaacgattttggaatggcggaggaatttgctactaaggccctggagctgaaaccgaaatcttatgaagcttactatgcgagagcaagggcaaaacgcagcagcagacagttcgcagcagccttagaggacctgaacgaggccatcaagctgtgtcccaacaaccgtgagatccagagacttctgctgagagtggaagaagagtgtagacagatgcagcagccacagcagccaccgccgccaccgcagcctcagcagcagttgccggaagaagcagaacctgagccacagcatgaagacatatactctgtacaggatatattcgaggaggagtacctggaacaggatgttgaaaatgtttccattggcctccagacagaggcccggcccagccaggggctcccggtcatccagagcccaccctcctctcccccgcatcgggactcagcctacatctccagctcacctcttggctctcatcaggtttttgacttccggtccagtagttctgtaggctctcccactagacagacctatcagtccacctcacctgccctttctccaactcatcagaactcacattacaggcctagcccaccacacacttccccggctcatcagggaggatcttaccgtttcagcccccctcctgtgggaggacagggcaaagaatacccaagccctcccccttcccctctccggagaggccctcagtatcgggccagccctccagctgaaagtatgagtgtctatagatcccagtctggttcacccgtgcgctatcagcaggaaacaagcgtcagtcagcttcctggcagacccaaatctccattatccaaaatggcccagcggccctaccagatgcctcagctccctgtggcagttccccagcaagggctcaggctacagcctgccaaggcccagattgtgagaagtaaccagcccagcccagccgtccattcaagcaccgtcatccccacaggagcctatggccaagtagcccattcaatggccagtaaataccagtcttcacaaggagacataggagtcagccagagccggttggtttatcaagggtcaattgggggaatcgtaggggatggaaggccggtgcagcatgtccaagccagcctgagtgcaggcgccatctgtcagcatggaggattgaccaaagaggatcttccacagcgaccttcctcagcataccgaggtggcgtgagatacagccagacaccacagatcggacgcagccagtcagcatcctattacccagtctgtcactcaaaactagatctggagcgctcctccagccaactaggttcccctgatgtgtcgcatttaatcagaagacctatcagtgtcaaccctaacgaaatcaaaccgcacccgccaactcccaggccgttgctgcattcccaaagtgtaggccttcgcttctctccatctagcaatagtatctcctccacctccaacctaactccgaccttccggccatcttcttccatccagcaaatggagatcccactgaaacctgcatatgagaggtcatgtgacgagctgtcgccagtgtctccaactcaaggaggttaccccagtgagcccacccgatccaggaccacaccattcatggggatcatagataaaacagcacggactcagcagtacccccacctccaccagcagaatcggacctgggcagtgtcatctgtggacaccgtcctcagtcccacgtctccaggcaacctgcctcagcctgagtccttcagtccaccatcatccatcagcaacattgccttttataacaaaaccaacaatgcacagaatggnnnnnnnnnnnnnnnnnnnnnnnttacagcccccatgggatgctggctaacgggtctcgtggagacctcttggagcgagtcagccaggcctcctcctatcccgacgtgaaggtagctcggactctacctgtggctcaggcataccaggacaacctgtacaggcagctgtcccgagactctcggcaagggcagacatcccctatcaaaccaaagagaccgttcgtggagtctaatgtttaaaagacgttttgttggagtgagacccatatgttttcactgcacattttcaggcttggtttccacattcgaggtagttctctggcttaatttctcatgtagtttctgtgtggtgttcagaggtggcagcccacatgctgaaatcctttgcatgcagccgactgggaagcggcctcccgggagccaggacttcagtttctcttgtctgtgcccagccacatgctctctccctctcttcagatgccaacgaggagattttcgtgctgtgtgctttaacccagggagannnnnnnnnnnnnnnnnnnnnnnncaggagacaatcgctttcactgatgttcttgttgtgtaattgtctttttccttttttaaaaaataaggtgttcttgttcgttttcttccaaaaaaaaaaaaaaaagtgcgatgcccctttgcctttgcatccttagccagtgtcacccacacagccagccgcagcgcattctcatgctgtggcccctccccagaccgccagcgccctgcagccaccaggtctgcagtgtgcattaggattattgctggtcttcctagggggtaaaaggatcagagagagaagaattaagtgctaaattggaagaaaaccccaatataattatgtaaaatgtcactacattgattttccaagaggcattgtaggaacatgtcaaaaacagccagccctttaaatattgcagtcagccaaggaaattagatgagaattgtggctattaagagaattcactgagagttattctctagatttttagccgacaattaaccactaaaagctgctgcttttccagggtgggggagggaatgaatacatagaaaaacaaaaaagattgttctggattctcagtgaaaggctataggaagtctgttctggagacatctactttttagatcctgatacatcactgagtgtcatactccactaaaaggaaactctaaccgaaggctggctggtgtgacaatcccgttagttggatcttcacctacagccagattttgttctagtggccctcttcctgtaaacccagatggtgtcatacagaaattgtttctttcagaagcagattggaatctcttgggaccatgagactgagtcccaatatttccacccagggtcatgcccgttgttgtctacttccattttgagatctatagtttgattatctattattacaggaactgtttcttttctttttctaggagtgtttatgagagtgtgatattttaaagtcagacgcagcaaaaactgtttcagggtgaagaaagacccctttcagccctgttttgcagccctgggtgggggcatgagatagacagcaagcttctgatcttgaagcttgtctagaagacacatcttctaggtctcgtggtcatttggtaggnnnnnnnnnnnnnnnnngaggccactattgagtggatagcaagaacattggaaccaaagcctcggcacaggcctggcactggctgtacatcagctcttacaactaaacaactcaactaagcaactgaaacgaaacaaaggagcattcgttctctgttgttaggaatcattctgctctgttagggaagggctgcagnnnnnnnnnnnnnnnnnnnnnnnnnnnnnnnnnnnnnnnnnnnnntgtgtctggtaagtaagtaagtaagtaagtgccctttgaagggatcattaagacacagggagcatgaacctgagatcagaagcatttctttactaatttagattctgcgaaatagacggacctctccacccccaaacctaaaacaggccaggacttgtctctgtgctgaaagcaaatagcaagactaactcaagccccagcctctttccacactccctgatacctaaggactgctttctcagctagaccagggtgggcatcagcgacgccttctcagctagaccagggtaggcatcagcgtcctctctccatctctatacccctctctctcacatcaggaagatgaaatgtgtagctctagcggcaacctctagccaggagcccagtggcctctcagattgctttttggccaggtctcagcactgctggcatctttacatcttactccttaaaaccgcctctcgctgaggagccactgcattttgaagaatttctcagtgtctgtcaggaaagtgctcctgctcatttggaacgccacacaccacccgcactcacctgtccaggcgaatgagcaggtcctgtagctttacaaatatgccgctgatgccgcttctccccagggtctctcagttttccaggacaaaaagatttagggcctataccctatgggcaaaacacctaaaatgtcaacagtcaaaatgccattctttttggccatcataagagggagtaggtatcactgctgcatgccagttgtttttgactagaatatgccaaccagagcttgttggggcaggagacgtttttccttacaagcagactgcctgtgccctgtgccctgtttgctacttcactgccatggaatgatccgagtactgtatttcagagctgccccttccccagcagcaaacactcgctgagtccatgtctggcttcaggtgggaggaaatgtttcagatgaaacttactcaattcataccaccctgaaatggaggacagaggtgacaaacttcagtttaataggtttctcaccaagttgtatgttccattggcccaggattcttgcactaatgggtttctatcacatcatgtctataaatgggtgcactttactgttgaatttgtaactgaagtactggatatttaagtgtgagtaatgtcttcattagaaaatagcagaaccgctcttgtcttttagtgtatttttcaagaaaaaaggaaaggaaagacatcaagcagtggatcacaacatttatagcacaagaaataactgtataataagcatcaacaccgattacgattttttaatatgaaaaatatttgcagtgattttaaagtgcttttccagcaatgttcttagggactcctgagacacggttactttatctactggatcagtaaggcacacaattaacaattaacaattaatgtttatttacaaagtaaagggaaaacctgtgtaacatgagaatttggcatgacaaaatggagaccattttgtatctgctgttgtatcttgtccnnnnnnnnnnnnnnnnnnnnnnnnnnnnnnnnnnnnnnnnnnncaaacccttctcgctcctcccccatgtgcccctctttttagatgtgtataacttaaactcgatggctcaggaaaattccactaattagaatcatgtacagtaccccaggtcgttgtccagatatacaagtttgctaatgtagttaagcctggattattaaacacttttcctaaattattgtaaacagaacagcttagagaaaggtattctcagtccttaatattgtatagtagtttatgagcccctctctaaatattggtatttttatattccagagatgtacccaatagaaaaaattaaaaattaatcagtatctaatttaatatccataagtatttttccttagattttagtcacgtacagtgggctatgtggatgtcacttgtgcttcaccatagtttaccactaggtgtcactgtggctctgcactgcgcttgttttgtagcaaagaacagcggcatcccctcgggagagaggagctgcttccagggcaacaggcaagcgggctcagaggttcaggagaaggcaacagaggcctggaaggggtcttcgtgcatctgtgccagttgtgcaagacgaactctttgaacactacatgctttggacttcagccaggcagaggctggaagaaggttgaccagagctcccttgctctggtagagggatgggtacatggagaagccccttcttccccatgagcctccctcctgtcagttcctctcagcctccagcttttataactccagaagcgtcacagttgggtggtttgattcagagagagttatttttctactgcagaaatgccttggacaaaaccagtgctcactgaatctttgccacaaaatggaataggctatcccagggggcaagaggtgcccgcccctgtgcccagcctcctcttgatgctcccagtgcccagcagcctcgcacaccctgcctgtctgttcctgggctgcccatttctcaagaaaccgacctgcaaaggcagccggctgctgcctccacaccgagggctgtgcggtcctgctgctcgctcactgggaggtgcagctctttctcctcttcctctaggaattccagaccgaccatctaccatgactaacaacaatgaacaaagggcttaggggcaagagctacctgcaaagacgtgtcatggaacccttcaccatgcaatgccttgaactcagctctggctgctcccaagaaaaggtggctggctgggggcctggacacaagcacaatggggctggtggagccactgtgcagagctacttgaataatcactgggttttcatcaactccttttgtcatacagaccactcaagggctgaagtgttggtaaccttcatttcggtgtccaaagcctcacagcaggtgagccaccctgagatgcttgtggccacatggtggccacagtcagagctttgaaagtcagtaccaaatgaacgcataattggacaccaaaaatcaagtgttactttcatgtttcctcaccccatcatctcattgcctcctgctgactctgataccgacgctgagctgacttgccaggctgccgctggacgcgtagagatcaggccagcgccgcgctcatttttccaggtagacctactctgtggaacggaagtgccctagctgctttgtttttgtagcacttgctggctgaatttttcttttgctaatcgctaaccagaaagtctggttagagggggctcaactcaatccctttggtccccagcgccagacaagagttaattctggaaaattcagtacttgaatgtacctgccttattgcataccaatttactggggggaaaaaaaaagttaagagatgccggctccagatctccacttcattcacaggtgattttggaaatcctgtaagttacacttcctgttctggttttgttttgttttttgtttcctttggctgattcctgctgagtgaggccagttcctcatcaggctcagggcaggtgccttttcaggcgtggcctcctttccatctagcacagcatctttgtctctgttctgtctcctccaaatccaagatgattttaattagtacagacatgtacagtctacaattaaagagtgatttgtactaatatgattttgattcttcctcctctttgctgtcctttcaagacacttgctggaaaaagcttttaatggcacttagttttcctttaggttttctatgactcagatgtaaaggactttctctgtacagtatattatccaatgcatgtttgttctctctcctgatatattgaacaccacacagttgtgaagccgtgcagtggggatgccccacaccccacagaggcatctacccctgtgtataaggaaagacattttcctttgctgtacttgcttgagcagttttattgtctgtacatgtgagctgtgtgagatagatgtgaaaagttcaaatgaatgcattttcctgccccatgtatacagattgtcatctgtacaaggaactgtatgtatgaaagcaaatgtacttatttataaatggctaacacttggaaaaaaaaaaaaaaaaaaaaaaaaaaaaaaaaaaaaagaaaagacaaaaaaaaaaaaacagcaaaacaaacccaaacagaaccccaccaaccccccctccacccagcgagccggggggcgccccggagcgaggagccaagtggcggggggccaaggccgggcacatgaacacaagccgttgcccaacccaagctctccccaacacaccgtcatttgcggaagaattgggcattccgtgtcctcggcggccctgagttgggccacgaccgcccgtccaccattaagatttgcgcgcggggttcatgagaagtgtaacgtctcccttttcctgtggatatgtacccaccgtacgacaattctcgcttgataactgtttctgggatctggaaagcgtccgtcgcggtttccctctcattcatttcttatataactacccccaggttctggtccttttttcttcctatccctcnccnccacctcattatctctcccttttttacgtagttaaaaccccncctagagggaggaggggggttgagagggaggcggagggtgctnagagcgggcggtgtgcgcatcactacttcncnnccttcagagggagatttttgaggcgaggagaggcagcgttnctntcnnnnntccnttttgttttttnnnnnnnnnnnnnnnnnnnnggctagtagnatcagtnngnnnnagnnnnnnnttagggnnttcccnattagcaannnnnnnnna

SEQ ID NO: 7167 - DNA, 1470 bp, Homo sapiens
gacctctccaactctcaacccacttctccagccagcgccccagggcacgggccgcccgctcgcaggtcccgaggagcgcagactgtgtccctgacaatgggaacagccgacagtgatgagatggccccggaggccccacagcacacccacatcgatgtgcacatccaccaggagtctgccctggccaagctcctgctcacctgctgctctgcgctgcggccccgggccacccaggccaggggcagcagccggctgctggtggcctcgtgggtgatgcagatcgtgctggggatcttgagtgcagtcctaggaggatttttctacatccgcgactacaccctcctcgtcacctcgggagctgccatctggacaggggctgtggctgtgctggctggagctgctgccttcatttacgagaaacggggtggtacatactgggccctgctgaggactctgctagcgctggcagctttctccacagccatcgctgccctcaaactttggaatgaagatttccgatatggctactcttattacaacagtgcctgccgcatctccagctcgagtgactggaacactccagcccccactcagagtccagaagaagtcagaaggctacacctatgtacctccttcatggacatgctgaaggccttgttcagaacccttcaggccatgctcttgggtgtctggattctgctgcttctggcatctctgacccctctgtggctgtactgctggagaatgttcccaaccaaagggaaaagagaccagaaggaaatgttggaagtgagtggaatctagccatgcctctcctgattattagtgcctggtgcttctgcaccgggcgtccctgcatctgactgctggaagaagaaccagactgaggaaaagaggctcttcaacagccccagttatcctggccccatgaccgtggccacagccctgctccagcagcacttgcccattccttacaccccttccccatcctgctccgcttcatgtcccctcctgagtagtcatgtgataataaactctcatgttattgttcccagcaaaaaaaaaaaaaaaaaaaaaaaaaaaaagcaaaaaaaaaataaatacaaaaaaaaaagaaaaaaacgggggggcgcggacaaaaagatacccccgaggggcgccacagaagtgagagagacaaccaagggtcgtgggacaaaagggggcgccaaatgaggagggccaatatagaagaagagagaacgagaggagatgtaaacaaagagtggagagggagagaaactggaagagaggacttttggaagagagagacactacacagcggagggggacacaaatggggggacaaacaccccacagaacagatgaagagaccaccgagggggaaaaacacaagcagagaaaaaaaagaggtacaacaaccgaggaaaaggccaggcaaagaaaatcccacaaggagactatagggac

SEQ ID NO: 7168 - DNA, 7866 bp, Homo sapiens
  misc_feature (7754)..(7755): n is a, c, g, or t
actggggcacagatctgcgtagaaacgggtggcggggaagagaggggaggagagctctgagtgggaagcggagccgggggcctgggacccgtcgcgtcagagccaggcaagtgaaccggagcaaacgacttccgatccagtctgcgctgttgcggctcccgtttgggatttgatttgcagcatctttgagcctctacgacaaaaaaccgcgaagcacgcccagccctcccccggcaccccgaaaagcacccactccctcccggggacacagctgggcgcgtccacacccccgcagccccacaccatgttgtgcggaaggacttccactccccgcctgtgtcgttgatgtcagaccccaggccagcctccgggcgctgcagttctcccggctaatgctgaggctgcggctccggctctagcacaggcaccagccgccgccgcacccggccccagcgcccaccgtctgcatgtgcccgccgtagccgtctgcccagcccgcagcccgcgctccacggagcgctggagaccaccgttggggggccccttctgccctcgagagaagcggtcttggaggtatcggacgcgtgggttggattttttccgtggatctatcaattcacaattcgaatttggaagaaagaaggaaaacatgacgtctccagccaaattcaaaaaggataaggagatcatagcagagtacgatactcaggtcaaagagatccgtgctcagctcacagagcagatgaaatgcctggaccagcagtgtgagcttcgggtgcaactgttgcaggacctccaggacttcttccgaaagaaggcagagattgagatggactactcccgcaacctggagaagctggcagaacacttcctggccaagacacgcagcaccaaggaccagcaattcaagaaggatcagaatgttctctctccagtcaactgctggaatctcctcttaaaccaggtgaagcgggaaagcagggaccataccaccctgagtgacatctacctgaataatatcattcctcgatttgtacaagtcagcgaggactcaggaagactctttaaaaagagtaaagaagtcggccagcagctccaagatgatttgatgaaggtcctgaacgagctctactcggtgatgaagacatatcacatgtacaatgccgacagcatcagtgctcagagcaaactaaaggaggcggagagaagcaggaggagaagcaaattggtaaatcggtaaagcaggaggaccggcagaccccacgctcccctgactccacggccaacgttcgcattgaggagaaacatgtccggaggagctcagtgaagaagattgagaagatgaaggagaagcgtcatggccaagtacacggagaatgaagctgaaggctgatcaaagcccggaatgagtacttgctggctttggaggcaaccaatgcatctgtcttcaagtactacatccatgacctatctgaccttattgatcagtgttgtgacttaggctaccatgcaagtctgaaccgggctctacgcaccttcctctctgctgagttaaacctggaacagtcgaagcatgagggtctggatgccatcgagaatgcagtagaaaacctggatgccaccagtgacaagcagcgcctcatggagatgtacaacaacgtcttctgcccccctatgaagtttgagtttcagccccacatgggggatatggcttcccagctctgtgcccagcagcctgtccagagtgagctggtacagagatgccaacaactgcagtctcgcttatccactctaaagattgaaaacgaagaggtaaagaagacaatggaggccaccctgcaaaccatccaggacattgtgactgtcgaggactttgatgtgtctgactgcttccagtacagcaactccatggagtccgtcaagtccacggtctctgaaaccttcatgagcaagcccagcattgctaagaggagagccaaccagcaagagacagagcagttttatttcacaaaaatgaaagagtacctggagggcaggaacctcatcaccaagttacaagccaagcatgaccttctgcagaaaaccctgggagaaagtcagcggacagattgcagtctagccaggcgcagctcaactgtgaggaaacaggactccagccaggcaattcctctggtggtggaaagctgtatccggtttatcagcagacacggactacagcatgaaggaattttccgggtgtcaggatcccaggtggaagtgaatgacatcaaaaatgcctttgagagaggagaggaccccctggctggggaccagaacgaccatgacatggattccatagctggtgtcctgaagctttacttccgggggctggaacaccctctcttccccaaggacatctttcatgacctgatggcctgcgtcacaatggacaacctgcaggagagagctctgcacatccggaaagtcctcctagtcctgcccaaaaccactctgattatcatgagatacctctttgccttcctcaatcatttatcacagttcagtgaagagaacatgatggacccctacaacctcgccatctgcttcgggccctcgctaatgtcagtgccagagggccacgaccaggtgtcctgccaagcccacgtgaatgagctgatcaaaaccatcatcatccagcatgagaacatcttcccaagccccagggagctggagggccctgtctacagcagaggaggaagcatggaggattactgtgatagccctcatggagagactaccccggttgaagactcaacccaggatgtgaccgcagagcaccacacgagcgatgacgaatgtgagcccatcgaggccattgccaagtttgactacgtgggccggacagcccgagagctgtcctttaagaagggagcatccctgctgctttaccagcgggcttccgacgactggtgggaaggccggcacaatggcatcgacggactcatcccccatcagtacatcgtggtccaagacaccgaggacggtgtcgtggagaggtccagccccaagtctgagattgaggtcatttctgagccacctgaagaaaaggtgacagccagagcgggggccagctgtcccagtgggggtcatgtagccgatatttatcttgcaaacatcaacaagcaaaggaagcgtccagaatctgggagcatccggaaaacttttcggagtgacagccatgggctgagcagttccctgactgactcctcctccccaggggtgggggctagctgccgcccatcctcccagcccatcatgagccagagcctccccaaagaagggccagataagtgttccatcagtgggcacgggagcctcaactccatcagccgccactcatccctgaagaatcggctggatagtccacagatccggaagactgccacagcgggaaggtcaaaaagcttcaataaccatcggcccatggaccctgaggtcattgctcaggatattgaggcaacaatgaactcggccctgaatgagctacgggaactagaacggcagagcagtgtcaaacacacccctgacgtggttctggacaccttggagcccctcaaaacctccccagtggtggcccccacgtcagagccctccagccctctgcacacccagctcctcaaggaccccgagcccgccttccagcgcagcgccagtactgctggggacatcgcctgcgccttccggcctgtcaagtctgtcaagatggctgccccggtcaaaccaccagccacacggcccaagcccactgtcttccccaaaacaaatgccactagccctggtgtcaactcatcaacttccccacagtctactgacaagtcttgtactgtctgagggataataatttaattgttctagacaaggggactatagggactgactgttattaaaatcttcctatttaactagcttggggacttcagttgaaaattaggttctaagttgttcttgcaggaattagcctccccgtctcccaaaaccttgagaatgaagcccttggtatcgcctctcccttcccactgccctctgcttcccccagtcgtcgtaattcagccagctgcagtccgtaccgttcttaggttagccagagacaggttttcattatcaggtcactgtgaaatctggtaaggcagtcctgaggacatgggctcaagtctcagtcccctcagaccacggtgatgccttgaccagatggttggctactgccatccagctttcagtggcatcttgttttgggaactgattatagagaatcatatatagtccagtcttcattttacatacacacacatattttacacacacacacattttacacacacacacacacacacacacacacacatatgtttttctagtctctggcatgtgtagcctctcctggtcatagaccagtctctttgtaagttattgtggcagttcacacagtagccaccaggggtctctgtttccattacaaactttgttctgtctgggccagagaacctagcctttgaaatctctccatcatgtgaaacataacgggatgggacaatcccgtaacctgtttggggttgggggctttctctctgtgttctttccattgatgtgaattggtcattggtgtttgctcttgcctctcctccatcccctagaagtacacccccgtcttattaaggagcttttaaagtttttctgaatgtatagacatttctcgggttcctacctttgtctctgatggaccattttccatttaagacattttcctgtataagacagttttatagctggttccttttagggtaaagagtcttaagagagttttattgtgtctatggcaggtttgggaaaggtaagaaatgggtcctttttcctcctaatgtttttggcacttaaaacataaaattcattatcctattaaaaaattaaattcagctttgctaatccagaaattgttcccaaatgaaaacttgttttaagtccaccccttagtttccttattttacaaggtctctcttcagggaccaacaggggcttagagagccttagttagattaaagggagaccctacctcttaaaaccagttttcatttatgcaaacaaggacaattaagggaaccctgaccccacaggctctcaagtcttcccaaggccagaatcgaaagaaaattaaaatttgaatgctgaatattctggctctactctggccttttttctggttcccttccaaaatgcacaaatcatacccttgtctgctccaattcagtctccaaacctggtgcctgtgctcctggcccccctagcatcatgctatcccaggagtatcaggaccagacacatccacagccaggctcatgggtctcagacagcaacttgagttaaagctgaaactcatccttcttctctgtgttttctggtttaaaagctgcacttatattttagccttattattttctgtagttccggagagatggtgggttgccattctggtaggaaaatctgagttttcttatctttgacctagaagagattctttttggaccaacctgcgaaattggtagttaggtctatggaaagtggtaggatttttttttttttaatcctgtgcaaaggaaaagaggtgctttgtgggaaatcactaatgagaaggctaacctgcagcaccagagaaacctttccaagtgctaggcaggagaactgaagaactctttcagtgaagtgagtcagcctagaagaggcaacccacagtcttgatttttgttgctgtttcctgacctgttcttgcctgtcacctgggcctacacaggtcccgagccaacggggctttcatacccaaggatctgtttccttgctgaaaatgaaaccctatctttcactttacattcctttcaatccaactgatcaaaactggtacccacacttgccctttctccctctctccagcacactcccctctaagaaagtaaaagcaaagctttcttaatggcaacactttgggcctgttctgttgctcctgccttatttctctttcaaccctgtacatgactcgtgttcaccatccccttgatcagtgtccatccgcgctaatttgcatcatgaactgaacagtgtgtgagtggtcacctactaaacccagctctgggggcagagctgtcttccccatctctggtgctcctaacacctgtgagatggtcctgtcgagaggactaggaaccgataggaggagagtccttctcggcagagctcactgcaaacaactggaattgaggttgcacactgtgatttttacaccgaaaagccaaaaggagctggccatccagggcctagggagaccagccttcctcagctatgcttgccgaaaccagcatgatgcttcaaagagccctgctccacccctcatggcatggatccttttcctggtgtggactctgaagggtcagtcttcggggaagagaggtggggtggggctactagcatcccaatttagaaaatagaggagtttgtagccagcagcctgtaaactggaaacactggtctcagccaacctcctcagggcgccctggcttctccccaaggagatgaggagcggtgatgccagcaccgggatgcgcagagcactggaagggctggtgcagatctacttcccatgcagaagagaagtcacatcttccagggaatcgcaatgttgtggcgtctgacttgtatgtcacatttgtgtaaaatggtatattctttaaaatagtgttgataactggaatattgtatgtatgcttggagatgctttgtgtgaacctaagactgtcactcaacagatgttggattggggaaaatccaaagcacaacttcaaaataaaatacatttttaggtttcgaaaaaaaaaaaaaaaaaaaaaaaaaaaaaaaaaaaaaaaaaaaaaaaaaaaaaaaaaaaaaaaaaaaaaaaaacaacaaaaaaaaaaaaaacccagggggggccccccaaaaaaatcccccgggggccccaacttaaccggaccccatttttttggcaaaaagggcccccttaatggccccccatttataacccccgcctcgcccgccatctttcaaccgggggaactgggaaaactcatccacttttgagaatctttctgaaaaaacctctactccgtcgggggcgacactttttcgccaatcccccccaacaaacaatctaacctctctcgggtttgcctaccacctcccttcgccctcccctccctccctatctactctcctcttccctgcctccttcacagcccttacccttctctcctactctcactctcgaacactctcctttctcccgtccgctcctacgcccccctccatctctcttcgcctaccactccttacctattcctatcccctaccttcctccctgtccccactccccacacccaccgatgccccccctccctctccctctacctcgccagcttactacataaatccccctactgctatcgatcatttctgattaccaccattaaagcctcctactctccaccctctcctccagcacactcacctctcagcactttatcctacaacctccctctgctcctccataccgccactcctatgctcaaccccatcgctttcatccttcatccatattgcgctcacctgttcatgtctgtgctacacttttcttcacagaccacgctcttactccttctcctcctatatcatcacctacgacgccacgcacgaggcannagaactcgctagatcccctcggtctcacacatcatctcgctgctgaacgttctcctctgtgatcgaccctcattatcccccccctatccctctctccccccctatactctc

SEQ ID NO: 7169 - DNA, 1124 bp, Homo sapiens
agcggcacgagggcggtcccgggtgctgctggttagtgtgctctgagggagggtccgagccagccgctgttttgccggaggagcccctcaggccgtagtaagcattaataatgtctttcatctttgagtggatctacaatggcttcagcagtgtgctccagttcctaggactgtacaagaaatctggaaaacttgtattcttaggtttggataatgcaggcaaaaccactcttcttcacatgctcaaagatgacagattgggccaacatgttccaacactacatccgacatcagaagagctaacaattgctggaatgacctttacaacttttgatcttggtgggcacgagcaagcacgtcgcgtttggaaaaattatctcccagcaattaatgggattgtctttctggtggactgtgcagatcattctcgcctcgtggaatccaaagttgagcttaatgctttaatgactgatgaaacaatatccaatgtgccaatccttatcttgggtaacaaaattgacagaacagatgcaatcagtgaagaaaaactccgtgagatatttgggctttatggacagaccacaggaaaggggaatgtgaccctgaaggagctgaatgctcgccccatggaagtgttcatgtgcagtgtgctcaagaggcaaggttacggcgagggtttccgctggctctcccagtatattgactgatgtttggacggtgaaaataaaagagttttacttctctggactgatcctattcaaagcttcctcatgaacttttctaatagaacaaggaaagctctccaaccatgtctggcgttgagaagccaagagtctctgtcaactctctcattgcccagtggtgacatgtgctcttctccacactgttgggaggtaatgctgccccacgtgctggtgcaggtcagtatcctgggacttggaagctggcaggatttgccgggtaaagctgtatgccatcatggggcacctgaaaagaaaaacacgtctcaccactgtggttgattcaaaagaaagtgattctattttttaaagaaagcgttgttaatgtaaaaaaaaaaaaaaaaaaaaaaaaaaaaaaaaaaaaaaaaaaaaaaaaaaaaaaaa

SEQ ID NO: 7170 - DNA, 2086 bp, Homo sapiens
ttaatacgggtaaagagctaggtctatgttaactgaaaataaatttacagggccgggcgctgtgattcacacctgtaatcccagcactttgggaggccgagatgggtggatcacatgaggtgaggagtttgagaccagcctggccaacatggtaaaacctcatatctactaaaaatacaagaaagaaaaagttagccaggcatggtggtatgcacctgtagtcccagctactcggggggctgaggcatgagaactgcttgaacccaggaggcagagattgcagtgagccaagatcacaccactgcactccagcctaggtggcacagtgagactctgtctcaaaaagaatcataaaataaaataaaataaatttacaggcacttgctctatggacccacacaactcaggaagctcagggtctggttccctcctataagagggaggaaataaggcagccgccagtgttgggctcctttcctgtgtaatcacagtccctcctccccacaaccccaagagggggcatttcatacccaatttagtacacgaggacacatagggcgagggtgcctttcggtgggcttaaaccacaccgaaaccgatgcccatcaatgcccgccccgggtcctctctagaccagggttgctcaaccttaacctattcacatttggggttgagcaattctgttttgttgggagctgtcttgtgtattgcggcatgcttggtaccagccctggctctacccactgtttgcaccccacaaattatgacaattaaaaaagtctcctgacattgctgaatgtccccgggggcaaagtcacccctcattgagaaccgccggtctatactaacagtgtaacatggtggcttatttactttttgcccaagtgatctttttaaaattgtgtgtttttgaataggcagtaagtatattcacatttcaaatggtccaaaagatacctactgaacaatctccttttccgcttgtcccccagggtcctagcttccctttccagaggcctccaatgaatccactggtttttgaactgtattttagctttaaaccctttcctttacatgaaatcttacctgtagacccactacatggaagtgagaatgatgataaacacagtatgggctgggctctgttctaagtgccttgcatatattaatgggtttaatcctcgcacaaccctatggggcaggaactactgtgatctccattttaaagaggaggaggcagagacacagagaggttaagtaacttgcccaaggtctcacagcttgtaagtgatggagctgggccgaagtgggactcagctgaaaatgttcccctaactctgccctcttcctttccttaccaatcatggtatccccactggcctgggagtcgctcaggcctgtctcctttcttctccctcactcatactcaacaccagtggttctcaaagtgtggttcccccggccagcagcatcagcaacacctgggaacttgttagaaatgcactttctaccatgcctcgccccagaggaactgaagcagaacctcaggagcagagcccagagcctgtgttttaaccagctctccagatgcttctgatgcacctggagttggagagccactgcctcccacctcccctctgtgctcctgagaactgttgacctgcccctggctccagaaaactcctggaagacccgatcctcacccatgcagaatagcaagagtgggcgtcagaaccagggcacaataaatggtgtgattggctccatccctccaggctctcattgtggaaagacctgtcggcacagacccctccagaggtctcgctcgcaggcaggcagacacccacctgcagctcaggaacatacacagctctcccctcgggtacgagggccagtgttgcccttaggcagaatcctcggggagattcgggagtgcttccttgtcttggattccaggaaaatggaccctgagatgaggatttaaggatcagtgtgtttggtgctgatccaggaacctctgctgggggagtaggaggcgaatctgcaaagggaataaagagtatgttgtcaagcaaaaaaaaaaaaa

SEQ ID NO: 7171 - DNA, 5077 bp, Homo sapiens
acggctgcgagaagacgacagaagggcatgctgatagataggaatttgtgcttacaaagcaggagaattaaaaagacgctttcctctcctcttccctcctgtcttctccgttctttttacaatcatcttacacgcacagcctgagacagctggcatagtttttggaattatagtattgatatttccaaacgtgctctcagacagtggataataaacacctcattaggaaaccgatctcagaatgaactctggagtatgaaaaagatcatttctttttgttcctgtaacctagcattccttctaggcttcttctcctttaattggaccacagcttagctcatgtattcttttattaacaccctgctctcatgtccataagattcaggaatttaggacccagggacagaaaagtgaataagccagtgaccagatttcccccagatgtcttgaggattagaagtacaaattgttgacagccattaaagagggtgaggaagggaaaaggaatattagaagatctggtatttcttacttttttcttgcctcagaaagtacaaagtttaaaaaatagaataaagaatctgctggggaaagatagagtaccaggtcctaggtcagtagtccctggaagttttggtgatgaggacatggaagggcaggcagaggcactttgtacttgctccaaagccataggaattttcatcttccagagcctttatgagtcacttctctatccacagtcttgagcctgtggctatcccgctgagcttctcactgtcctccaaaaacaccccgctgagcacccggaccactttgtacacattaacactacaggacataaaatgcagaggccctgagattgttgccctcccatattggaaggagggtctgcgatggcaagggtcttctatatcaccagaaagagtcgcgcagtgagtcactgccgttgccatctggctgtaattttctatgttatcaaggtaggagggagtgtttctcttctagctgttagatagaactgataaaagcaagtgtcctacagcatttcccaaatgaaggcattaggaaatagaaaagcacggtctttttggctccctggtctagtcacattggtactagggtgacctttcacccaagggacagctgctaaagggagtaattcagagacatggagcttctggttatgggtttgttttgggtttgtttttaactcctgcctccacacatgttcttgactgataactgactcatgtccctgaattaaaatgactgacctatgacagcatcaagcattctttgtaagcagagtgatatatctgagagggcgttgacctgttgtgtagaatacatatcctttcccccttcagaatcctgtctcgcctcgtaactgggagagaggctgtgcctgaaactaggggcgatgtcaaggaagctagaggcctcgatgcaattattactgactctggggaggaagacagagaataaggggacaccaactgcccagtccactggccatttttaagggtccccccaccccaagccaaagtttggtttgttgctgttaagacaatttttgttgtatgtatataaatattttagttagaggagcggggaatgggatgcgggctttcacagttctagggaatgggggcagggaggattttgcttttgcttttgctttgagggagaactttagctgactaaaaaaacagaagtttggggtcatgatcacaaaggggccattcccaaaagatggcaagccacgtattcagtggagactaggccaaattctaaatggttttatccatagcaggggagaataggagaatgagtttaagagtttttctcttcttttttcctagaaagaggtaaggataatgggaaaggtagagaaggcggctcccacagaccttttaagagaggcagaatcttgagcttgaggcaccttgagtgcatctcagttcagctggttctggctgaggcctccaaaggcaagctctgtgctttccagtggtttctgctgcatttccagggatggtgtttaacaccgcttcctccagctcccttttctaagaaagaataaatggagttctgctttttatgaaagggtctttggttttcagtgtcaacactgagaattggggctcttgcaagcatctggatttcacagtatcaacctccccgtcaccttttgaactttgagactccgtacggtcaacttcaccagaggcaggttgctcgaagcagcactgcttgtctgttcctgactctggttctcactgtattaaaaaagagagtcagaggagtctggcatttcgtgagtttgttagaggatgctggctgataattccagaaaacttactgatgctaaatcacagtacatgcatgattctttttcagctttactatagttcatgacctggactttctgtactcttggaagctgggctccttaaaggaggcctctagtgaacacctttatctccatgtccctcttagagcccagagagctgcccataggcattttccagaattcctcatgtcacctagttcaatttccattaactcagatcagccattgtgattcaccatttgtcaggctctcaggtttaacaaaacctactatcaccatcatccttcaacagccacagtctgaattgagccaacatttttttttctttgagaaagaagtggactggggcacaacttttagtctgaggggagctagtggaaatctagacaatagaagtcatcgatagcagcttttcctcaaatgtgtgactcctcaggggctaaactgctcttagcttagaattatgctttactagagatctagcagataagtgggttaatcactaccatcctgtaactagttatatagcttccagacatgagggagacatcaaacagggatggaagcaaccccaaggatatgcaagaagggcatgatgaacccccttccctctggcaggagaacaaggccaaccaagggacagactggaaagcacttagatgtttaaggaggagaaaggggaagctttgaccagtccttgccttttgccaagttcagccagttctccgctgcttgcaacctctagcgcagtaacatttgcagaattgcagattttcccccagatactaggaggaaagggactttggggggtggggaaggggtcgtggtgttttaaaagcataagttacctgtttgcactgttttaagataggaaaaaaaaatagtgggcaaggtgaacatcagacgtaaatttgtgtgtttttattttgtcatgctcttgaaaatgtttgaccatttgtagtatacacagtgaaacttgattctctgttgcataaaacatattttttgtgggaatgttactgtccaaaagcctcttccctccctttccttttcctatgtacttccttcatacttgctttactgatcagccaggcaatagccatccaagagctagagcatgaaacagggccctttccaagtaggctctgggtgtcctaagccagcgtgtgccctctggtttagtgagtgtaatagagtccctggcacctttctttgcaaatgaggctaacagaccagactgcagcaagttatcagattcctcaatcagatgcactaggagtgaggagcccagggatggagggggttcctgaagtattgcagttggctgtagtagctgagttcttttccatgttaccgaaactgtagccagttacagtttactcaggaaaacggtagatcaattcagccatggtagtgctggttggcagggattggtaacggagagaactgctcatcagccaaaactcaagccttgccttttaggaggccaccagcagagggacttggtcctccttgtctggtacttgtgtacatgccggtgacctgaggactccactcacactggcgagcaaaaagggagcagtgattctcttttctctccccaccccctgccctttgttaccaacaccagtttcccagggggtacatgagtttctgaatttttaaaaaatgtttttggtttggtttttctggggactgataagtgctttaagcaatgtccataccccgtcaagactcccagcttagtcattttcttgtatttttctgttcacagtatttgtgtgtgtgcttgttttggcagctcattttggctgtattatatattgagtgatgaattgatcctcttttttccctaagggatatgaattgtttttcttgtgttatattctgcttgtgaatagctggagcaaacctggggctgacacgcgtaagctagggctgcaaagcgagaagagagccggtggagtgtacttgtccctgacaggctgacctacctgagtctctgagcttttcagtccaaatctttgcaaggctcaaaatgccacagaacctctcctcttctccccactccccatggcagggaccggaccatccctacatgcaacatgctgttcctccagcccctcccattgccatggcaaaacaggtacctttggggcatgggggcattacatgggatgcttgtgtaatcgaccacctagccttctctctcccctcccgtcctcccccagaatcacttcctaggacacccgagctgcttgcccagggtcctgtttccctgctaactccagagaagcatcccagggctttgtgacagtctctaattcccttcccttctcgttaagaatcatattgtatagtagctttcagaccatacagtattcattgggttactcctattattatcaagtagctggaattgtgaaggtcggagtagttagatctttagcttttattccttatttttttgtattactctccatgtgtataaattattgatcatgttgctggcttttataaactctaagcgaaggaggagcactgcctcagcctttgcacatggtaatgaagcactgtttttaaataaaagagagaaacaccaaaaaaaaaaaaaaaaaaaaaacaggggggggctaaattccgagggccgagtaacgtcccggttttgaaaggcgtaagggggaaaaaagacggcggaaaccgagggaagcacggttgagagcc

SEQ ID NO: 7172 - DNA, 735 bp, Homo sapiens
catgattacggattttaatccgcctcattatagggaatttggccctcgaggccaagaattcggcccccaggcacagaagagacgattcacagaggagctaccagatgaacgggaatttggactgcttggataccaggttaaataaaataccctgttttcctatcttcaccttattcttctactatattctccctttaaaaaagataaattcacatcattctcccagtactaggatttctgctttctggaattcattttggttaggttttttatcctattcaacagactcttgaaagcctctgagagttcttactttcttatacatctcactcaaagctcttgatctaccagtatgtggtttgtatttaaaaccttggctttcagtggtgctctctcttttaccctccacctaaaaaagagagtgatatctccctccagtctccccacccctcaagactgctagaaaaggagtgattctgtacatgtaattgtaaagttagccactaaagttaaaaagattcttaatttgtagttttggtgcaattttatcagaagtacctttccattttgccagaatccttgaatcattctttaaaccaaagcatttttttatagtttctagctaggtttatagaaactagtggagctatgggcagtcagttaaaaacaggccatagatagcataatgaattataacacccctgtccaagtcctatagagaaaaaaaaaaaaaaa

SEQ ID NO: 7173 - DNA, 2330 bp, Homo sapiens
tgcagagctcggagcggcggaggcagagaccgaggctgcaccggcagaggctgcggggcggacgcgcgggccggcgcagccatggtgaagattagcttccagcccgccgtggctggcatcaagggcgacaaggctgacaaggcgtcggcgtcggcccctgcgccggcctcggccaccgagatcctgctgacgccggctagggaggagcagcccccacaacatcgatccaagagggggagctcagtgggcggcgtgtgctacctgtcgatgggcatggtcgtgctgctcatgggcctcgtgttcgcctctgtctacatctacagatacttctttcttgcacagctggcccgagataacttcttccgctgtggtgtgctgtatgaggactccctgtcctcccaggtccggactcagatggagctggaagaggatgtgaaaatctacctcgacgagaactacgagcgcatcaacgtgcctgtgccccagtttggcggcggtgaccctgcagacatcatccatgacttccagcggagggggacctacctgccgcagacgtacatcatccaggaggagatggtggtcacggagcatgtcagtgacaaggaggccctggggtccttcatctaccacctgtgcaacgggaaagacacctaccggctccggcgccgggcaacgcggaggcggatcaacaagcgtggggccaagaactgcaatgccatccgccacttcgagaacaccttcgtggtggagacgctcatctgcggggtggtgtgaggccctcctcccccagaaccccctgccgtgttcctcttttcttctttccagctgctctctggccctcctccttccccctgcttagcttgtactttggacgcgtttctatagaggtgacatgtctctccattcctctccaaccctgcccacctccctgtaccagagctgtgatctctcggtggggggcccatctctgctgacctgggtgtggcggagggagaggcgatgctgcaaagtgttttctgtgtcccactgtcttgaagctgggcctgccaaagcctgggcccacagctgcaccggcagcccaaggggaaggaccggttgggggagccgggcatgtgaggccctgggcaaggggatggggctgtgggggcggggcggcatgggcttcagaagtatctgcacaattagaaaagtcctcagaagcttttcttggagggtacactttcttcactgtccctattcctagacctggggcttgagctgaggatgggacgatgtgcccagggagggacccaccagagcacaagagaaggtggctacctgggggtgtcccagggactctgtcagtgccttcagcccaccagcaggagcttggagtttggggagtggggatgagtccgtcaagcacaactgttctctgagtggaaccaaagaagcaaggagctaggacccccagtcctgccccccaggagcacaagcagggtcccctcagtcaaggcagtgggatgggcggctgaggaacggggcaggcaaggtcactgctcagtcacgtccacgggggacgagccgtgggttctgctgagtaggtggagctcattgctttctccaagcttggaactgttttgaaagataacacagagggaaagggagagccacctggtacttgtccaccctgcctcctctgttctgaaattccatccccctcagcttaggggaatgcacctttttccctttccttctcacttttgcatgtttttactgatcattcgatatgctaaccgttctcagccctgagccttggagaggagggctgtaacgccttcagtcagtctctggggatgaaactcttaaatgctttgtatattttctcaattagatctcttttcagaagtgtctatagaacaataaaaatcttttacttctgaaaaaaaaaaaaaaaaaaaaaaaaaaaaaaaaaaaaaaaaaaaaaaaaaaaaaaaaaaaaaaaaaaaaaaaaaaaaaaaaaaaaaaaaaaaaaaaaaaaaaaaaaaaaaacaaaaggagaacgacgacaagaaagacagcggactacagataaagcaaaaaacgaagagaagagggggggggggggtgagagacaaatagcactcggtggcgagggagaaagtaagaagacgcagatgcagacggtaggagtggacgaggcgtcagcgcaggaatgagggcagttatgtacagctcggagtggcgcggcggatgaagaaaacaaatccacactgcgaacagagcaaggacaagggtagtttcgcacgagcggacaaaagatgggaagagaaggaacggcgcagccaagc

SEQ ID NO: 7174 - DNA, 2396 bp, Homo sapiens
  misc_feature (1817)..(1820): n is a, c, g, or t
  misc_feature (1825)..(1825): n is a, c, g, or t
  misc_feature (1831)..(1833): n is a, c, g, or t
  misc_feature (1836)..(1838): n is a, c, g, or t
  misc_feature (1844)..(1844): n is a, c, g, or t
  misc_feature (1848)..(1848): n is a, c, g, or t
  misc_feature (1857)..(1859): n is a, c, g, or t
  misc_feature (1864)..(1867): n is a, c, g, or t
  misc_feature (1870)..(1871): n is a, c, g, or t
  misc_feature (1876)..(1878): n is a, c, g, or t
  misc_feature (1891)..(1891): n is a, c, g, or t
  misc_feature (1895)..(1895): n is a, c, g, or t
  misc_feature (1899)..(1899): n is a, c, g, or t
gaaaaagcaggaaggcacggagtccctcgccttcgccctggctgcgctgtccccttcgcgcgcgggatgggtttgaggctgcctcgctcgggtgacgtcagcgccccggtccccgccgcagccgctgcatcctccgtgcccggcctgagctggagtcccccgcgccccccgcgttccgcccggccatggctgcggtggcgctgatgccaccgccgctgctgctgctgctgctgttggcgtcgccgcccgccgcctccgcgccgtccgcccgcgatcccttcgccccccagctcggggacacgcagaactgccagctgcggtgccgcgaccgcgacctcggcccgcagccctcgcaggcggggctggagggcgcctccgagtctccctatgacagagccgttctgatcagcgcttgcgagcgtggctgccgcctcttctccatctgccgatttgtggccagaagctccaagcccaatgccacccaaactgagtgtgaagcagcctgcgtggaagcctatgtgaaggaggcagagcagcaggcctgtagccacggctgctggagccagcccgcggagcctgagccggagcagaagagaaaggtcctggaggctccaagtggggccctctccctcttggacttgttttccaccctctgcaatgacctcgtcaactcagcccagggatttgtctcctccacctggacatactacttgcagactgacaatgggaaagtggtggtgtttcagactcagcccatagtggagagcctcggcttccaggggggccgtctgcagcgcgtggaggtgacctggcgaggctcccaccctgaagccctggaggtgcacgtggaccctgtaggccccctggacaaggtgaggaaggccaagatccgagtcaagaccagcagcaaggccaaggtggagtctgaagagccacaggacaatgacttcctcagttgcatgtcccggcgctcgggtctgcctcgctggatcctggcctgctgcctcttcctctccgtgctggtgatgctgtggctgagctgctccaccctggtgaccgcgcctggccagcacctcaagttccagcctctgaccctggagcagcacaagggcttcatgatggagcccgattggcccctgtacccgccgccgtcccacgcctgtgaggacagcctaccaccctacaagctgaagctggacctgaccaagctgtaggcctccactggccccatcactgccaactgcagggggcccctcgggcctcacttgccctgagcccaggagtccaagggcagggtgggtccagccttgagcccctccacccccaaatccttcctctcctcccagtcccaccccttgccccacggagtcctggggacgcagtgccccagctgggaagagggcgggatcgggcactggttcctccttgtccccgctttcttgggggcttgctactttttgtcttctattgtgtggctttctgagtatttgaaccccagtcctgtgtcaccttcctttttccttctatgtcccctctctgcgggggggcgctgaggctgagggggagctgcgtcttgctagggcttcccccttctccccatcccggtctccagagacccagcttctgagagacagggtgtgggcatctccatgcccctataaagcgtgcctggggcttgtctggggctggggaggaataaaccatataatataaaagaaaaaaaaaaaaaaaaaaaaaaaaaaaaaaaaaaaaaaaaaaaaaaaaaaaaaaaaaaaaaaaaaaaaaaaaaaaaaaaaaaaaaaaaaaaaaaaaaaaannnnaaaanaaaaannnaannnaaaaanaaanaaaaaaaannnccccnnnnggnnggcannnaaaaaaaaataancccnaccnggggcccccacacatacaaccgcccccacgatttttataacccgaaagggttgccctaaattttgggaaaaataaatcataaagtgcgggcggcggggcgccttttttttgaacccgccgtggcttaagggaaaaaaaaaacacggtctctggggcgcctcttttagaaaacacctcctcctcttttttagagggggggtcccttcctcgttggcaccccccccctcccccccataataatttttcccgccctggggggagaaaaaaaatttttttttttccggggttaagtaagcgggggaaatataacgccctcccgcaattcttgttgtggggctaaataaaaaaattctcccccccgccgccgggggtctcttttatgaaggacaacatctataaccccccgcaggagggggcgggttttctccccgccgttgtgtgtggtggaataatcaaaaaaacaccctccccccgccgcgtggggattctttctctcc

SEQ ID NO: 7175 - DNA, 2646 bp, Homo sapiens
gcacaatctctctctcacacacacacacacacacacacacacacacactcactcactctattttgtgctgtcgtaaaacccacgtgtccagccgggaagctgccagagcgtggaaccaaggagccaggacgcggcagcggccaagcgcagcagcccacggcggttgagtcgggcgcccaggtccgtccgcactctcgcgccctccgcgggcctcccaattttctcgcttgcaggtcgggaggtttccgggcggcacaatctctaggactctcctcccgcgctgctcaggggcatgtagcgcacgcagggcgcacactctcgcgcacccgcacgctcaccgagacacccgcgctggctggtctctcggccctgccggtgtcgcagctgccggtgttcgcgcctctagccgccgctgccgtcgccgccgagccgctgccccccaaggaactgtgcctcggcgccacctccggccccgggcccgtcaagtgcggtggtggtggcggcggcggcggggagggtcgcggcgccccgcgcttccgctgcagcgcagaggagctggactattacctgtatggccagcagcgcatggagatcatcccgctcaaccagcacaccagcgaccccaacaaccgttgcgacatgtgcgcggacaaccgcaacggcgagtgccctatgcatgggccactgcactcgctgcgccggcttgtgggcaccagcagcgctgcggccgccgcgcccccgccggagctgccggagtggctgcgggacctgcctcgcgaggtgtgcctctgcaccagtactgtgcccggcctggcctacggcatctgcgcggcgcagaggatccagcaaggcacctggattggacctttccaaggcgtgcttctgcccccagagaaggtgcaggcaggcgccgtgaggaacacgcagcatctctgggagatatatgaccaggatgggacactacagcactttattgatggtggggaacctagtaagtcgagctggatgaggtatatccgatgtgcaaggcactgcggagaacagaatctaacagtagttcagtacaggtcgaatatattctaccgagcctgtatagatatccctaggggcaccgagcttctggtgtggtacaatgacagctatacgtctttctttgggatccccttacaatgcattgcccaggatgaaaacttaaatgtcccttcaacggtaatggaagccatgtgcagacaagacgccctgcagcccttcaacaaaagcagcaaactcgcccctaccacccagcagcgctccgttgttttcccccagactccgtgcagcaggaacttctctcttctggataagtctgggcccattgaatcaggatttaatcaaatcaacgtgaaaaaccagcgagtcctggcaagcccaacttccacaagccagctccactcggagttcagtgactggcatctttggaaatgtgggcagtgctttaagactttcacccagcggatcctcttacagatgcacgtgtgcacgcagaaccccgacagaccctaccaatgcggccactgctcccagtccttttcccagccttcagaactgaggaaccacgtggtcactcactctagtgaccggcctttcaagtgcggctactgtggtcgtgcctttgccggggccaccaccctcaacaaccacatccgaacccacactggagaaaagcccttcaagtgcgagaggtgtgagaggagcttcacgcaggccacccagctgagccgacaccagcggatgcccaatgagtgcaagccaataactgagagcccagaatcaatcgaagtggattaacggattgactggttggaattaaactgcaaggaaagtcatgattaaatgtcacggacacttaagcaaaaccaaagatttcctctgagcaactttcaatcagtcccagaaaaccaaaagcagtaataaaataagtaagatgttaagagatattgatcctggcatggaagtcagaccaggaaagagattatttatttatgacttagggatgagacttatttcagtggacaactaacctgggatggtaaacattcccagtcccaccatgtattttgctttgtttctaaaaagctttttaaaaactgttatttaataccaaagggaggaatcgtatgggttcttctgcccaccgttgtgactaagaatgcacagggacttggttctcgttgcacctttttttagtaacatgtttcatggggacccactgtacagcccttcattctgctgtgtcagtttggcctggcctgacactggctgccccagcggggaccacggaagcagagtgagagccttcgctgagtcaatgctaccttcagccccagacgcatcccatttccatgtcttccatgctcactgctcatgcactttttacacggtttcttccaaacagcccggtcttgatgcaggagagtctggaaaaggaagaaaatggtttcagtttcaaaattcaaaggaaaaagttgaggacttattttgtcctgtcaagattgcaagaacatgtaaaatgtacggagcttcataatacgttatattgttccgaagcagctcgttgagaaacatttgttttcaataacattttagcttaaaaaaaaaaaaaaaaaa

SEQ ID NO: 7176 - DNA, 8774 bp, Homo sapiens
  misc_feature (4015)..(4029): n is a, c, g, or t
  misc_feature (6561)..(6580): n is a, c, g, or t
gtaaaaatgatgccaactgtgattgtttttctggagacgatggttatgccaaggatgcaaagttaaataccccatcttccttggctgtgtgtgctgatggggagctctacgtggccgaccttgggaacatccgaattcggtttatccggaagaacaagcctttcctcaacacccagaacatgtatgagctgtcttcaccaattgaccaggagctctatctgtttgataccaccggcaagcacctgtacacccaaagcctgcccacaggagactacctgtacaacttcacctacactggggacggcgacatcacactcatcacagacaacaatggcaacatggtaaatgtccgccgagactctactgggatgcccctctggctggtggtcccagatggccaggtgtactgggtgaccatgggcaccaacagtgcactcaagagtgtgaccacacaaggacacgagttggccatgatgacataccatggcaattccggccttctggcaaccaaaagcaatgaaaacggatggacaacattttatgacaacctcagatggcaggaattatcatccacattttttacatatgaagtacagagagattagataacaagcctgaaaccacacggtacgacagctttggccgcctgacaaatgtgaccttccctactggccaggtgagcagtttccgaagtgatacagacagttcagtgcatgtccaggtagagacctccagcaaggatgatgtcaccataaccaccaacctgtctgcctcaggcgccttctacacactgctgcaagaccaagtccggaacagctactacatcggggccgatggctccttgcggctgctgctggccaacggcatggaggtggcgctgcagactgagccccacttgctggctggcaccgtcaaccccaccgtgggcaagaggaatgtcacgctgcccatcgacaacggcctcaacctggtggagtggcgccagcgcaaagagcaggctcggggccaggtcactgtctttgggcgccggctgcgggttcacaaccgaaatctcctatctctggactttgatcgcgtaacacgcacagagaagatctatgatgaccaccgcaagttcacccttcggattctgtacgaccaggcggggcggcccagcctctggtcacccagcagcaggctgaatggtgtcaacgcgacatactcccctgggggttacattgctggcatccagaggggcatcatgtctgaaagaatggaatacgaccaggcgggccgcatcacatccaggatcttcgctgatgggaagacatggagctacacatacttagagaagtccatggtgctgctactacacagccagaggcagtatatctttgagttcgacaagaatgaccgcctctcttctgtgacgatgcccaacgtggcgcggcagacactagagaccatccgctcagtgggctactacagaaacatctatcagccccctgagggcaatgcctcagtcatacaggacttcactgaggatgggcacctccttcacaccttctacctgggcactggccgcagggtgatatacaagtatggcaaactgtcaaagctggcagagacgctctatgacaccaccaaggtcagtttcacctatgacgagacggcaggcatgctgaagaccatcaacctacagaatgagggcttcacctgcaccatccgctaccgtcagattgggccctgatagaccgacagatcttccgcttcactgaggaaggcatggcaacgcccgttttgactacactatgacccagctccgggtgaccagcatgcaggctgtgatcaacgagaccccactgcccattgatctctatcgctatgatgatgtgtcaggcaagacagagcagtttgggaagtttggtgtcatttactatgacattaaccagatcatcaccacagctgtcatgacccacaccaagcattttgatgcatatggcaggatgaaggaagtgcagtatgagatcttccgctcgctcatgtactggatgaccgtccagtatgataacatggggcgagtagtgaagaaggagctgaaggtaggaccctacgccaataccactcgctactcctatgagtatgatgctgacggccagctgcagacagtctccatcaatgacaagccactctggcgctacagctacgacctcaatgggaacctgcacttactgagccctgggaacagtgcacggctcacaccactacggtatgacatccgcgaccgcatcactcggctgggtgacgtgcaatacaagatggatgaggatggcttcctgaggcagcggggcggtgatatctttgagtacaactcagctggcctgctcatcaaggcctacaaccgggctggcagctggagtgtcaggtaccgctacgatggcctggggcggcgcgtgtccagcaagagcagccacagccaccacctgcagttcttctatgcagacctgaccaaccccaccaaggtcacccacctgtacaaccactccagctctgagatcacctccctctactacgacttgcaaggacacctctttgccatggagctgagcagtggtgatgagttttacatagcttgtgacaacatcgggacccctcttgctgtctttagtggaacaggtttgatgatcaagcaaatcctgtacacagcctatggggagatctacatggataccaaccccaactttcagatcatcataggctaccatggtggcctctatgatccactcaccaagcttgtccacatgggccggcgagattatgatgtgctggccggacgctggactagcccagaccacgagctgtggaagcaccttagtagcagcaacgtcatgccttttaatctctatatgttcaaaaacaacaaccccatcagcaactcccaggacatcaagtgcttcatgacagatgttaacagctggctgctcacctttggattccagctacacaacgtgatccctggttatcccaaaccagacatggatgccatggaaccctcctacgagcttatccacacacagatgaaaacgcaggagtgggacaacagcaagtctatcctcggggtacagtgtgaagtacagaagcagctcaaggcctttgtcaccttagaacggtttgaccagctctatggctccacaatcaccagctgcctgcaggctccaaagaccaagaagtttgcatccagcggctcagtctttggcaagggggtcaagtttgccttgaaggatggccgagtgaccacagacatcatcagtgtggccaatgaggatgggcgaagggttgctgccatcttgaaccatgcccactacctagagaacctgcacttcaccattgatggggtggatacccattactttgtgaaaccaggaccttcagaaggtgacctggccatcctgggcctcagtggggggcggcgaaccctggagaatggggtcaacgtcactgtgtcccagatcaacacagtacttaatggcaggactagacgctacacagacatccagctccagtacggggcactgtgcttgaacacacgctacgggacaacgttggatgaggagaaggcacgggtcctggagctggcccggcagagagccgtgcgccaagcgtgggcccgcgagcagcagagactgcgggaaggggaggaaggcctgcgggcctggacagagggggagaagcagcaggtgctgagcacagggcgggtgcaaggctacgacggctttttcgtgatctctgtcgagcagtacccagaactgtcagacagcgccaacaacatccacttcatgagacagagcgagatgggccggaggtgacagagaggaccaaggacttcttgccaaagacagctactcttttgtggccgcatacctgactgtgttgtacttttaaaaaaatgattttttaacaagtgcagaaacaaaaagatactggttgcattgtaactcatgcaacatccttttttttagaaaagaaaaacacagannnnnnnnnnnnnnnttttttgcaaagaacagaaggtatttttttctgtagtgtgatcacaatgaaaactttattgtcttttgttccctttttccttgaggatttttcccttgtcgtttggggtatgtatctcctctctgagatgcatctcctggggtgtgtcctcgtctgtccctaggtacccagtgtgatgtgggacatgaatgtctgtgctaacttgtctcatgtgcaaccctttcttcttcgactggggtcgggcaggagtaaagggagtgatgggccagtacaacaccccttccaagggggcctgggaggagggtctgtaggacctgaggctccttggcagggctcctgcagaagagtggtggatttcttctcaccttgttctctgcctccagaggatcatagatggcttcatcttgctccagggaatttcatggtgttgttcagcaccttttttaagctgccccaaactcctgttcaagctttctattttgatgctgaatgaaaccccctaccacttttgcaaatcctgtgtagttgtcggtgccacccccatgctgggatagagaaagtgtctcccaggtcctttcccccagaccagtgacataacatcctgggctcagagtcccatcctcccgggagggaaagcacccaggatgcctgtgattggttggtcctccatgatgttcctgttcatctcctcctttctcccaaagccagatgtgagaacgagcactgcacagcaagccttcaatgtgggcaccatgtccacagaacagaaggccacccatggcaaaggcatggcagtggtggcgagggcaccagcctgccttccgaggcaaagccctctctctatgactttgagtatcttccctccaccactcagccgccaccactgagacgtaggaatgtggagggaggtgcttggtggcctttgattctggaaaaatgcttaacaaaaaaagccagccaaagagaggaaggcataagctaagcatccttctaaccagttcccaaagtcccatctgcctccatgtaccagctgatcgcagagctggactggggcaggctgggcttccaggaaattcctgaagttctgaaacagcttcccctctagagaagcccacccaatgtgttttttagtgacaggaagaaaggagggaagagctgatgtggtgtggcctgcccatatcatacaaccccaccaggagcagggcagttcccaaggtgggtgcccgtagatctgggaggccaggctggcatgattcctgtgaagaactgtgcctgtgtcgtcagggagaggcctgagccctctcagaagcagggacagcccacacctgaagagcacgcccaagctgaggcagcagccagcaggctgggggagcagtgagggcagggggagtcacagccagagctgggagccccttgttcaaggattccattcctggttcatccgcctaattaccattgtcattaccactcacaggaggctctgggagatgggaggggaagccaaatgcttccttttaagctgggcttcttagaaaatggaacttttatgggttacatttacattaagtgtggaaaatgaattctgagtctgagctattccccgtggaaaccttgttggactgataagctcatggcacctctatagccttactcacatagtcttcagaatattacacaagttaatgaaactgagaaggtctgactgcatgaggatcggagcagcatgtagtctgggttctgcctggcagagggaggcaaccaaaacttcttggggagaggagatttcgccttaacgtcatcccactgggattagaggatgtgtttcgctaagtgctcttcctgtttccaaaaaaaaagccaccctgctgcagcagtgcgctttggcctgcttgtccactggttgcccattgcccctggatccagagctctactgagtcagatacagtgctctgcaggcctgctgtgggaggcatgagctggagatgggggctcccatctggcaggatcattcttggatgagatggaaaacagtttggcctgaagaacacaagttttgtcctccagaagggacttacgcctctcaaaatgtactcttcataccaagggcccttgggcaaagtgctcctgcccagttgatcagtcccatcctggctgcctgacatcagtgaagacctgctggggatgtctgctcagaggtcaggaacggcatgcggtccacaggaaccagctccctacgcttcccccacgccctgtccctcctccacagccccctccccaaaggaatagggtggacttttagggatcaaaaacagaattattgggtgtttcatttctttttttctttctttcttttttttttcatagagatggggtctcactatgttgcccaggctgttctcaaactcctggcctcaggcgatccaccttggcctcctgaagtgctggggttacaggtgtgagccactgcgcctggactgagtgtttgtttctttaaaggatcttatatttttcctgtgctacataccaccacannnnnnnnnnnnnnnnnnnnagagaagttgaaggatcccgaagctttagaaaaaggatctcagctgtggcacaggcagtgttatgcgcctcactgccacattggtgctgttgtattgaaggtggtgcttctggccttggcccttttgagttggtttccatttgggctgcaggtgactcagtgactccctcctcaagctgtcctcctgctaagaccagcagtcacaaacccatggcaagggtgagtgtgaaggcctaaccctgtgcctatgtaataggctccaagcatcgactcccatcctgagaggaccggcccttttgacactcaccaaccaaatctgttcattcgatagagtgaccaggcctccctcacctgcccaggtgtatgatcctacagttcctgccttctctcctaccccgcacagctgccaactggtcctacatcctcagcccctctgccaccaccttaaataggactttactgattccccaactttgtttttttgtaggatgagatttcctttttatcccacccccccacaccccaaacagacattgctggagggcagactggaggaaggggaaggcatgcaggtaaattactgccttgtcagcctctgaccctcatctctcagaattgttggctgagaattaacccaaggaccacaccagtgcctgatttctacttagggagagaggattggaaacgatccctaagaaactgactgagggtgagaatggccaggaggtgtgtgtccaaataaccaggagggggcacagaagatgatggcaaggcagactgggcagtgttttgtagacacagaacaaagaatcagaatttgaaaaaagaagaaaaacaaatcttcgcagctgcaactttaaagtatcacctttatagatggcagggatttccattatgcaaatggaatctaagatttcaatgtgaaatcttagaatgcaggttcacccctcggcagcctgatatcagcggtgccaagtggtgagggcggtgatgctgagctttctgcccaggaggaatgagctttcaagctctcagcagggtgtcaggcttggggatttgagcatccactgctcaaagtccaggctattctccagtcctcacggcagccactaagcccaggagccagacctggcccggggacacatctcctgagggatcccagaaagaacccagtctttcctttcccttggggtccttgttagaatgaaaacctctctatttaaggcacatcattcccagctaggtttatacacttgtctatattttactggaggaaagggaattaaaaaagaactctgcagttcaaggccctttcatttaaccttccaaaaacagcaaactcattttaaagactcattgctgaggtgatagagagaaaccttatcctctccaacctttacattcacaaaaaccatccttgtgtacttgactgccctagacagtggtgactcttaggtttcattacgaatgtggaatatcagagtgtgggaaggcccaggcgagggccaatgttgtgtttcttaccccctctggaatgccaaaggcaaggtactaggtgacctcctggtccccaagaaaatgtgatttattctgagggcgaacagccaagggaggactagtctggagcacgctcggccgtcctggcaggagctgagcctcaggtgtctggcggtgccccagcagccctggattcacccaacaccagaatcccacttttctaaatccacctgttgttctgagcacctctgaacccgcagcttcggcaaaaggagtctgtaccaagctgcttctggatgaccaacactggagactctggccttaccatgtggaaatcattttcctgaagtctggaactaattttgagaagtttttttctcaacacttttgtgtttctaacactgtatcttgactgtgtaaataccaacaaggctgtaaataaatgcagatgtagataccttctagaaaaaaaaaagcataaaaacaaaaccagaagtgatcccgtgtagccttcgttgacaaataaagactattttgtgtttaaaaaaaaaaaaaaaaaattaattattatttaattttatattttttttattttaaaaaaataaaccggcccaagggggggcccgttcccatttgccccttttgggagttgttttacccgccctaattggccgtgtttttaaaacttttgtaatgg

SEQ ID NO: 7177 - DNA, 1516 bp, Homo sapiens
gtgcattctatgctttgctcaacaggaaagagaggaaatcaaatacaaatgatttatatgcattaatttaagagcatctacttagaagaaaccaaatagtctatcgccctcatatcatagtgttttttaacaaaatatttttttaagggaaagaaatgtttcaggagggataaagcttaccattaaagcttttgggtagaattctgaatccaatttcgtttagtcccaacactgtcctctttggctcttagaagatgtgggcaattcagacccttggcaaaaagaggagagcttctcattaaggtggactgcagcagttagctggtttctgccatttggcttgccagtcccaagccctaaatttctattcacccaatagcctcatcacaggttatgtcatgtcgacacatgtagtgttttctatttgatttttggagaatgccacaaaagactctgcaatgggaaggaggacaggagatagaaggagaaaccgggggcaatcttaactactcttgtgtgccaccttcctctgagatttgaatgcacagatctcagatggaggtatgaaattattacagaaaaagagacaaaaaaatccttatatcgtgtcactaaaatcatgctaatagaaatgtttttccttgagattgtttagaggctctggaggagcgtttctcagtttttgtgtgcctgtgtgcacatgtgtgtgcgagcgtgtgtgtgtgtggacttgctcacgcgggcacatatgctgtaagcacatgtgttcattgtgcgtatgtgtgtgcatgtgtgcgcgtattacgcttgctaaaatttgttctgaaacatcagggaatctactattcagaaaaattatttccctcttagatcttttcactttaaatttttccattaagtataaagttcagttagttcttaaatcaaggtcacttgccatggtggggtccgtataaaactcctggacactgtcctagacccatttcctgatgtgaatacctttggagggggatcaacctattggcctcattaatgatatccagtatccataaggtgagttccatccaaggatgtgtgtttattttgaatcatgccctacttaaattattaatacaagacaattaacaaattgacagttaccatttgctttctcatcattctcattaccatttattttatagcaagtctgctatgtgtggaccagggcttcggcttctgtggttagtatgggaagaataaattgttgaaataaaaatacccagactattcagttcacaagaagccccccaaaagaacagtaaattgtgttgtatgttcatttggaataaagcaatatttttaccactgctaaggtgaactgaaacctctcctgaagatttgtctgtttatttaccctcactttcatgggacatatgaggaaattagtgttcacatatccagtctttttccaattattggtggtgttgagttgttatgtttacactgttttaaataaaaaggcaccgtatttgaaagc

SEQ ID NO: 7178 - DNA, 451 bp, Homo sapiens
  misc_feature (445)..(445): n is a, c, g, or t
ttttttttgagatggagtctcaaaaatttaaaaaatatatatttttttaagcatcagataagcttgctctgcaaagatcttagatctttgtagtcaaaaatacctagaattgtttgaattccaattgtgacaattagttgtaggaaccttaaacaagttatttaaaaccccagtcttagctaaaaatggaatctgaggctgcaaagatgacagaagatcataatataaactgcatggtgtacagtctagaacacagtcttagtttcccacaatttattaaaccccaaagaaagaaaagatgggagaggaatgcactttcctttaactcccttcacaaactggtgaatgatgacacccaatgatgactacaacattctcaaatgagggaaattaaaacgaggaagaaaaaaaaactggccctaccaaaagctttcacaactagggncttaac

SEQ ID NO: 7179 - DNA, 10820 bp, Homo sapiens; identical to SEQ ID NO: 7074
  misc_feature (2012)..(2021): n is a, c, g, or t
  misc_feature (2027)..(2041): n is a, c, g, or t
  misc_feature (10123)..(10172): n is a, c, g, or t

SEQ ID NO: 7180 - DNA, 2781 bp, Homo sapiens
  misc_feature (1317)..(1338): n is a, c, g, or t
agcggggctccgggacgggatcccggcctgaggggactgcgcggggaacctctctcccagggaagatcgcagaaccgggcgcggtgcggacctctcagcccaactaccggcctcaaggcatggagggattttgaaatcagatgagaggcagagattggccaaagaaagacgagaagaaagagaaaaatgtctggctgctcgggagcaacagatcctggagaaacagaaaagagccaggctgcagtacgaaaagcaaatggaggagcgatggcgaaaactggaagagcagcggcagcgggaggaccaaaagagagctgctgtggaagagaaaaggaaacagaagctccgggaggaggaggaacggctggaggcgatgatgcgccggtccctggagcgcacacagcagctggagctgaaaaagaagtattcgtggggagcaccactggccattggacccggaggacatgatggtgaatcagaaaataccccaccccctcctctaggtttagcagccagcaccctccctccggatgcagggaccactgccgcagctgccgagtccaccaacgcatgtgacaaactttcaacatcaactatgagtttgccaaagccaacggagcctcccatgaataaacgcctgtcttcatccaccgtggcaatatcctattccccagaccaagcggaaggctgaggaggagctgttgttgaaagaaaagcaagaacaagaaaaacaagagaaagccatgattgaaaagcagaaagaagcagcagaaacaaaggcccgggaggtagctgaacagatgcgtctcgagagagaacagattatgctgcagattgagcaggagagactggagagaaagaagagaatagatgaaatcatgaagagaacaaggaaaagtgatgtgtctccacaagtgaagaaagaagaccccaaagtgggggtccagcctgctgtgtgtgtggaaaagaagacaaaactggttgtccccaacaaaatggaaatcaatggatttaacagtcctggccaagaaactcctctcaacaccttctgttgacaaatacagcatccctttaataaaaggtgtttggagaacccgtaaagctgctgatagtcaaatccgagctactagctgcttgaagaagcttctgtcacccttaccgctggatcccaaattattagctcggaatgtaactgtattcctaggtagtatgtcaaacactggccactcttggtagaaaccttgaaactttcaccttgctgggctttagcaaagtttccttttacagttctgtttatgagcttcagctactgataannnnnnnnnnnnnnnnnnnnnnctattatcatagtgaccctctgaataacctgagtgactggctcggcgattcgctttataaccattcttattcccaaagttggagcacataaacatttagatgtcttttcctgtaaaatattctagacatttacccaaactctagttcaacatatactcaacttgcactgtatatctccctgtcttttttgagacagagaagaaattcaggaggttccccatctccagagtttctctgttggaaagcagtatcaagaagcctttaaaaaattgttgttaagctttgccacctgcagaaatgcattgccccacattattcttctggggttaaagtagtaagtttggttgaggaaggaagtcaaaacagtcagtaatgatttctgttctcttatgcatattcgtgtatacatgggcaactgaatctagcaaggactctttcgtgtcacaccttaaaatcttcatgctgtagtcactccagaccatggagtggctttccagctgaatgaatcctatgtctcgcgtgcaggtggttggttttcaatgttcttgctaattttttttctattggatcttgggagttttctttgtttgctcctgtgtttgcccagctttaataaaaccaggcgcaaacaaaaaccatagcattctgaaacaatagggggcccacattggacccagtatgtcactttaatggacttcaagaaaaaatctgaatgggaaaaatgacactagaatgtatactccacacattttatgccatataatggtgtgttttcttaattttgtttcttgtggcgaaatgtggctttcaaattaaaatgaccttttcttctttgaaactttttgttttgacttgtataattaagggtttggaaagattcataattctgagagaggtttgcaaccaggagatacaaagaagtctcagtagtaatcttgttcatgtgcttttacagccagctacatttaagaatgtattagttacagaaattatatgtctgtgtatgtgtctctactcaataaagtacatgcctccacaaaatgaaaaattgtccatctcggcaaatactggccaagtccctttatgacaggcacacagaaaccatagcatggtctggctttcagaaaatgcctctcatctttcctggaaccttattttgctaaatgtctgttttcttgtgatttgttgtacctcacagcaccattgtgaccatggtgatgcctcatttgcatgatatgtaccttgtgtttaatgtgaaatacattttcattgaagagtctgaaaaaaaaaaaaaaaatttattttttctgtaagctcaatgtgctgaaaccaaaccaggcttttaaaaaccttgtgtagaagaaaaccaaaaaatccttgtgtgggtgtcctttccctgtcaaactcattaaaaattcctttgttgccagtgccaaaaaaaaa

SEQ ID NO: 7181 - DNA, 468 bp, Homo sapiens
  misc_feature (255)..(270): n is a, c, g, or t
ttttttgcattatgtaactatttatagggagtaggctggcaaccatggcctaaaatacattaactagaattcaaaaggaagctagaaaactgtatgcctttttcaatgaaaaagactttaatgatcctttctgtgagtacaagagaaattttcatttcacaaaatcatggagtcttatagactttggattggaaaatattttaaatctcattcatttcaacatcactctggtgcttgcactttaaatacaacctnnnnnnnnnnnnnnnntttgactcacgtttgaacaccttctagggcttcctattagatctcagaatagtgtgaggaaagtctttcacatttgagccgagatcttgttttctgtaatttctgttatttggtcctagtgcttcaattcttcagtgccataaagatcaggaacaatcgcctcaaatgataatcttttttgaaactgcaaaaggagat

SEQ ID NO: 7182 - DNA, 1565 bp, Homo sapiens
  misc_feature (294)..(333): n is a, c, g, or t
atataatgctgtattcattgatcatatttctgtatttaaataagtacattttttaaaacatcataaagtggatcagtaatgctgtaatatcacatttcatgtattatacaacatttttgaaatggagtactccaaagtaatttgcttcttatggttaccaaagtttaaagaataccctaacatgcactccaagattttaagaggaaaggctttgtgtttttcattactgtattatgaaatctgagagtgcaaaactagttttcttaggtaaaccccgtaatcagtttccacatnnnnnnnnnnnnnnnnnnnnnnnnnnnnnnnnnnnnnnnngtagtggcggtacacaatgtgtgttaatatgatttccaaggggtacctagagtaaactttcttaatcacagatctgatctgagcatgccactcctttcttaaaatcttttgttgattttccatttccctaaaaggaaggcccactggagcatgggccttgcaaagtcctctttctggcttctgcctgcctgccttttcagcttcatctctgccatcttccctgaatgaacttttgtcagtggcctcgctctttctacctatgagatgttgtttctgcatgttcttgcatggaattctcttcctcccaaccctgtttcattcctttaatctgtacaactctttcttatcctgaagtctttatgttaaggttgccttttcaggaagacttttaattgtattagctaattaattaattaatagtctgaggtatttggagctgagattctatggggattagttgctggagggtagtttagagccagattgcgaaggactttctaaactgtgctttcaaggttttgaacaggaaaatgatgtagactttctgttttttgtaagtttggaggatggcttgtgtcttaaaagaatatgtaacataaccatctaatttgtgagtagtggactaaggaaacaccactctaacctttttctctctgcgataatcccatcttcagcctctcaagcactgtgaaaaatcactttctcttgttgtattcttggagcccctgctaattcattattgaaaaatacctgctgcctgcatttggccttatgttgtcatttacttggtacttcctaagcgtggctactccaatgaagctttagtatatgtactgaaagaagatcctctcatactgccacagccaagagataaggttgtaaatctttattgggagaagccgtcaaggacagttctgtgaaatgaaaggatctctggatcaccacaaagtctggctcagtgactatggctttgcaaacactaaacattcctgtctcaagtcctgtagatggcttgaaatagtatacataagcatgccttataaacatcttcagtctttatcaactctttggagattcagccattcttttttgtactttagggaattaaatcattttataatgtataaatctgagcatggccgatggcagaagaaattttgtcatacgtttttaaagaaataaaaatgtattatgttttaaaaaaaaaaaaaaaaaaaaaaaaaaaaaaaaaa

SEQ ID NO: 7183 - DNA, 1057 bp, Homo sapiens
cactgtttcggggttagaccccggcaaaatcggcttccaggtgcgccccgctttccatggaaccgagcattcttgcaaggcgagctcacacctggcagtatcgcaccacaggcgatcctgggctaaagcctgtcagaccctaagaccaggggtacaccccaaaatatggagtattttccactccacccttcattggcggagcagcctgccaagaaccaaggcccgcatctcccgatacctcgcaaacaaaatgcaagtattgcctcacgaatcgattgcttctctgaggtgcccacgagtgtattcggggagaagcttcgagaacaagttgaagagcgactgtccttctatgagactggagagataccacgaaagaatctggatgtcatgaaggaagcaatggttcaggcagaggaagcggctgctgagattactaggaagctggagaaacaggagaagaaacgcttaaagaaggaaaagaaacggctggctgcacttgccctcgcgtcttcagaaaacagcagtagtactccagaggagtgtgaggagatgagtgaaaaacccaaaaagaagaaaaagcaaaagccccaggaggttcctcaggagaatggaatggaagacccatctatctctttctccaaacccaagaaaaagaaatctttttccaaggaggagttgatgagtagcgatcttgaagagaccgctggcagcaccagtattcccaagaggaagaagtctacacccaaggaggaaacagttaatgaccctgaggaggcaggccacagaagtggctccaagaaaaagaggaaattctccaaagaggagccggtcagcagtgggcctgaagaggcggttggcaagagcagctccaagaagaagaaaaagttccataaagcatcccaggaagattagaatgcaaatggacattctctgggaggtggggcataccatagcccaaggtgacatttcccaccctgtgccgtgttccccaataaaaacaaattcacaagaaaaaaaaaaaaaaaaaaaaaaaaaaaactggggaaaattcgtacca

SEQ ID NO: 7184 - DNA, 2344 bp, Homo sapiens
  misc_feature (1405)..(1432): n is a, c, g, or t
  misc_feature (1434)..(1434): n is a, c, g, or t
gacccattataggctgctataacaatccattaatctgatgctatgatgaccttggaaataatgtacttttaaaaaatatcctaaagtcctatgacttaaagttcacattatcttccttcataaatgaaaaattttcatttaaaacatggaatcagtttatcaaagtacagtttacaggttttaagtctgttccatttctggttagacaaactcaaatacaatgatcaaactaaaagatttcttaaaagtatgatgactattaattgtctgctaatgaagtctgaaggtctgataagattatccatgaagcaaaagggaggaacaaaaaaactgttacatttctttcttctaatttttgagcctaaaaaccattttttataaacgtggtttcattgttctgacatcttaggtgtggcagttctctgcctcaagaaaatttgtaaaatttatattttagattttagcataatttctgaaacaaacaataacaactacttaccagtttttactgtagatactggactttgcctcttagggtgaatacttgtttgacttcaagcggggagagtatactttttaaccaatgacttgctgattttgcagttaagaaagaaaaacagaatccactgaaaataaaatttctatttgaaagtttcataagtgtaattgactaacggtgagtcctcccccagctgttactggtatttcaatgtttaagaaattattttatttacactaaatagtctcaacaattccctatcttatactggcaggcagaaactgaagaggttgtatcaactggcagtttgcactgaaagaaaacaatcttaaatcacttttaatcttgcagagcatttttgaaggtcaaggttgaaatcactggcaggaaagtaggtgaacaaaatggtttgaccctgcctgaactagacttgcactgatttgtagagctggagtggaagagagctaaaatagtagcgctttccttaaaagacacccacaccccaccacctcaccagcagcacaccagcggcagcagcagtataaccacagacattcgtcactgtgccagatcagggcataattctcttaaggcagctgaggccttcacattagttcttgcctcattcaggcatccagaggtcctctctctttgatactggtgacataaaccagaggggcaagactaggcatagttccttgatgagttcagtggtgcctcaccgtacccttagaaagccagccctgctgtgctaggtcttgtctcacacaaagacatgctcccaggggtgggcaccgtggatcatggtattcaggtcttctgctattttaagttctttcttctctaaatatgtgaataatattttaagcatagtgttatttgttctttttccagaagttcccttcnnnnnnnnnnnnnnnnnnnnnnnnnnnngnaaaaataatcttgacttacttggtccaaagcacattattaactggggattaatttcctagtagtcatctgtcgggagggctgatccaccccgaggcacattaactggcgtgactttcaggacggcggggctgtgggagccactggacacatctgccccccaacccctagcctcttgaattactcaagtccctcagctctgttggcacaaatacgtgctggatgatagaagaaccgtttttcccatggatgaactttttttggcttgaattcttacaaggcctgacttctggatctggagaaagaagacttctttgtgtcccatcttcaaaatgcctcctccacttgttgcagaagcctaaaattcctttagttggggcagaaagcctattattatttaaaaaaaaaaaaaaatgggagggtgtgtggattgaaatcagtcaggggaagaggattgaaatctagtaaatgcaggactccatagggagaacgcacagaactctgtctcctcaggagcacctctctccacgggcatggtgggctccaggccctcagggtgcttcagtagcacacctccctgtgggccctactaccattgcctcatgagggtccagtctgtatgcttgtcttccacacagcaagttaatgaagggtgagatgggcagggactgttactgtttctgtttcaatctctctctaagcttgaaatcgaatagagtactccagccatagtaggcactcagaaaatgaataattaatgaagaaatgtatattatctgggaccttgaaacagaaaaaatggtaaaaatggtaaattcaaatctgaaataatcgtcactttctttttttctggaagtgcctcttcccaaatccctagctcttccttttgttttgttgtgtatgttcccggcc

SEQ ID NO: 7185 - DNA, 3080 bp, Homo sapiens
tggggactgcgacgccaatcgcgacgaggcttcgccccgtgagtgcggcacgaggattttgcggggctcaacggctcgcggagcggctacgcggagtgacatcgccggtgtttgcgggtgattgttgctctcggggccgtgtggagtaggtctggacctggactcacggctgcttggagcgtccgccatgaggagaagtgaggtgctggcggaggagtccatagtatgtctgcagaaagccctaaatcaccttcgggaaatatgggagctaattgggattccagaggaccagcggttacaaagaactgaggtggtaaagaagcatatcaaggaactcctggatatgatgattgctgaagaggaaagcctgaaggaaagactcatcaaaagcatatccgtctgtcagaaagagctgaacactctgtgcagcgagttacatgttgagccatttcaggaagaaggagagacaaccatcttgcaactagaaaaagatttgcgcacccaagtggaattgatgcgaaaacagaaaaaggagagaaaacaggaactgaagctacttcaagagcaagatcaagaactgtgcgaaattctttgtatgccccactatgatattgacagtgcctcagtgcccagcttagaagaactgaaccagttcaggcaacatgtgacaactttgagggaaacaaaggcttctaggcgtgaggagtttgtcagtataaagagacagatcatactgtgtatggaagaattagaccacaccccagacacaagctttgaaagagatgtggtgtgtgaagacgaagatgccttttgtttgtctttggagaatattgcaacactacaaaagttgctacggcagctggaaatgcagaaatcacaaaatgaagcagtgtgtgaggggctgcgtactcaaatccgagagctctgggacaggttgcaaatacctgaagaagaaagacaagctggcgggacccattatgtctgggtcaaaggccaaggtccggaaagcgctgcaattagaagtggatcggttggaagaactgaaaatgcaaaacatgaagaaagtgattgaggcaattcgagtggagctggttcagtactgggaccagtgcttttatagccaggagcagagacaagcttttgcccctttctgtgctgaggactacacagaaagtctgctccagctccacgatgctgagattgtgcggttaaaaaactactatgaagttcacaaggaactctttgaaggtgtccagaagtgggaagaaacctggaggcttttcttagagtttgagagaaaagcttcagatccaaatcgatttacaaaccgaggaggaaatcttctaaaagaagaaaaacaacgagccaagctccagaaattcatggagtatgtggcagaacaatgggagatgcatcgattggagaaagagagagccaagcaggaaagacaactgaagaacaaaaaacagacagagacagagatgctgtatggcagcgctcctcgaacacctagcaagcggcgaggactggctcccaatacaccgggcaaagcacgtaagctgaacactaccaccatgtccaatgctacggccaatagtagcattcggcctatctttggagggacagtctaccactcccccgtgtctcgacttcctccttctggcagcaagccagtcgctgcttccacctgttcagggaagaaaacaccccgtactggcaggcatggagccaacaaggagaacctggagctcaacggcagcatcctgagtggtgggtaccctggctcggcccccctccagcgcaacttcagcattaattctgttgccagcacctattctgagtttgcgcgagaactttcaaaggcttccaaatctgatgctacttctggaatcctcaattcaaccaacatccagtcctgagaagccctgatcagtcaaccagctgtggcttcctgtgcctagactggacctaattatatgggggtgactttagttttttttcagcttaggcgtgcttgaaaccttggccaggttccatgaccatgggcctaacttaaagatgtgaatgagtgttacagttgaaagcccatcataggtttagtggtcctaggagacttggttttgacttatatacatgaaaagtttatggcaagaagtgcaaattttagcatatggggcctgacttctctaccacataattctacttgctgaagcatgatcaaagcttgttttatttcaccactgtaggaaaatgattgactatgcccatccctgggggtaattttggcatgtatacctgtaactagtaattaacatcttttttgtttaggcatgttcaattaatgctgtagctatcatagatttgctcttacctgaagccttgtccccaccacacaggacagccttcctcctgaagagaatgtctttgtgtgtccgaagttgagatggcctgccctactgccaaagaggtgacaggaaggctgggagcagctttgttaaattgtgttcagttctgttacacagtgcattgccctttgttgggggtatgcatgtatgaacacacatgcttgtcggaacgctttctcggcgtttgtcccttggctctcatctcccccattcctgtgcctactttgcctgagttcttctacccccgcagttgccagccacattgggagtctgtttgttccaatgggttgagctgtctttgtcgtggagatctggaactttgcacatgtcactactggggaggtgttcctgctctagcttccacgatgaggcgccctctttacctatcctctcaatcactactcttcttgaagcactattatttattcttccgctgtctgcctgcagcagtactactgtcaacatagtgtaaatggttctcaaaagcttaccagtgtggacttggtgttagccacgctgtttactcatacagtacgtgtcctgtttttaaaatatacaattattcttaaaaataaattaaaatctgtatacttacatttcaaaaaaaaaaaaaaaaaaaaaaaaaaacaaacatttagtaaaaaaaaaaaaaaaaaaaaaaaaaaaaaaaaaaaa

SEQ ID NO: 7186 - DNA, 706 bp, Homo sapiens
  misc_feature (38)..(38): n is a, c, g, or t
  misc_feature (46)..(46): n is a, c, g, or t
  misc_feature (49)..(49): n is a, c, g, or t
  misc_feature (364)..(370): n is a, c, g, or t
aatgtgaattgtaggctgaaacatgaaaatgctatcgnattttttntanagtctttaaaggagagctttaaaggaaagcaatacgaattcaagtatgtttcagtccactcctctctctaaagacaatcaactatggttttcattcaaaatactattactctaacgttaaatatttgagtacagcaatcatttcagatgcattatgaataagttactgaacacgcctcccatctgcttgctttacggttttattttgcctttcgtttgttagctcattttataatttgttacttctgaacaccttccaagtgctggtgctttcagatatctacctcaaagtattatttgtaaatgtcaaaaagtnnnnnnnttcttacatatattgaagctggtacatggtagaatatgatcacaaacttttaaacaattttttaagctgaagaaatactttttctttttataagtatcaaatcaaaatgtaattcagcatccacccataaagcgcaactaaaaacttttcacaatgccattaacaacttgtggttaccatcataagcctacagacctacacactaattatctttaaaacccttattaggctgggcgttgcggctcacgcctgtaatcacagcactttggggggcccaggcgggcagatcacttgaggtcaggagtttgagcccagcctgaaggcgttacggggtac

SEQ ID NO: 7187 - DNA, 3533 bp, Homo sapiens
  misc_feature (525)..(561): n is a, c, g, or t
  misc_feature (1318)..(1318): n is a, c, g, or t
  misc_feature (1320)..(1320): n is a, c, g, or t
ggttcagcttgtgggtagcactcgggccgagccatgcaggcgtcgcgcgtggactacatcgctccctggtgggtcgtgtggctgcacagcgtcccgcacgtcggcctgcgcctgcagcccgtgaacagcaccttcagccccggcgacgagagttaccaggagtcgctgctgttcctggggctggtggccgccgtctgcctgggcctgaacctcatcttccttgtggcttacctggtctgtgcatgccactgccggcgggacgatgcggtgcagaccaagcagcaccactcctgctgcatcacctggacggccgtggtggccgggctcatctgctgtgctgcggtgggcgttggtttctatggaaacagcgagaccaacgatggggcgtaccagctgatgtactccttggacgatgccaaccacaccttctctgggatcgatgctctggtttccggaactacccagaagatgaaggtggacctagagcagcacctggcccggctcagtgagatctttgctgcccgnnnnnnnnnnnnnnnnnnnnnnnnnnnnnnnnnnnnnagatggcgggcagcattgttgttcagctctcaggactgcccgtgtggagggaggtcaccatggagctgaccaagctatccgaccagactggctacgtggagtactacaggtggctctcctacctcctgctctttatcctggacctggtcatctgcctcattgcctgcctgggactggccaagcgctccaagtgtctcctggcctcgatgctgtgctgtggggcactgagcctgctcctcagttgggcatccctggccgctgatggctctgcggcagtggccaccagtgacttctgtgtggctcctgacaccttcatcctgaacgtcacggagggccagatcagcacagaggtgactcgctactacctgtattgcagccagagtggaagcagccccttccagcagaccctgaccaccttccagcgcgcacttaccaccatgcagatccaggtcgcggggctgctgcagtttgccgtgcccctcttctccactgcagaggaagacctgcttgcaatccagctcctgctgaactcctcagagtccagccttcaccagctgaccgccatggtggactgccgagggctgcacaaggattatctggacgctcttgctggcatctgctacgacggcctccagggcttgctgtaccttggcctcttctccttcctggccgccctcgccttctccaccatgatctgtgcagggccaagggcctggaagcacttcaccaccagaaacagagaatacgatgacattgntnatgatgacccctttaacccccaagcctggcgcatggcggctcacagtcccccgaggggacagcttcacagcttctgcagctacagcagtggcctgggaagtcagaccagcctgcagcccccggcccagaccatctccaacgcccctgtctccgagtacatgaaccaagccatgctctttggtaggaacccacgctacgagaacgtgccactaatcgggagagcctcccctccgcctacgtactctcccagcatgagagccacctacctgtctgtggcggatgagcacctgaggcactacgggaatcagtttccagcctaacagactttcgggggttcctgcctcctttttccgttctggtttttaattagtgcaaatacaagctgcgtttctttaatagaaaccaaaggcatctggagcccgagaggcctcctgctgtggcagaggagcagctgggattcccgaccaaagccccagggggtgcagaagactcaccacgcgggccagcctctctcttttgccctgctctccacaccagaaatgcccccaggtgcttggctgcctcagaggtaccatccctgagctggctgcctggccctgctcacccctacgcctcgcccttgccaggaggggagtggcagtgaggagggggccaggtcaggcaccaccatcaagagagctgtgtgttctctctggtcccacaacgatgactctgcctcttgtcagcccagccaagagcccagacgacccctctgtcctcgttccctgtcctcgttccctgcaggtaacatgagaagggctgatcaggagatgctctttaagaagttcgcacccctgctgacaccagaacagcccaaatcagagttcccagggccagacaggctcttcctgggccacagaggggaggcatcaggaaagctctgcagtggggggctggtggctccggggctgggggatcacaggctggtgaaccccggtgggaacagaggtgaaagcctgccacattccgcctgtctccctaaccctccattgcctcgcctctattccagaatcaatgctgcagaatgtgttagctgcagataggcatggtctcaggtatgaacagacactttgaaacgactttaggtctttcttttctccagtgttttaaacatgttgattatccaaagaattgaaactcctagcacatccagtttttacaacagatttgcagctcattccttaccctggttaggtcactacttttgcagattttgctggcactgatctggagatctgcagatctggaggagacgggaaggagtcgattcttaaataaggatcagtgaggcatcctgtcccaagctactgtttggtggggatctgggttcatctcacccacagagggaggatctttaagaggagaaaaaagccaagagggaaagccagagttccctgttctaggggactagccaaatgcctacatcagctgtcccctccctgttgtctccaagtaagtttgccagaaaaggttttagcaaagtgctacaactgtgtctttataggaggataggcctctgccctgccccacccccaccacctgtccccacccagtgtcccaggccacaggagcttattggccaggagggaataatgtcccccaatactgcctgttgagggaccagagttggggtctttggtgcttccaacctcctgccaacctggagttcacaacaccagagccccacggcctcgcacactgaagcaggggcgtgcggtgactcggtgcttctgttttggaagaaccacctgtcatcaaaacatggacagcagggtgttctcagctcccagcgaagcctccacaacagaatggggccacagggcagccgggactccctgtctcacctacattaacccatgcatactgtatgccataaactcactttggtatatccgcgtcacatgcagagaggaactctgcgacgtcaaagtgttgcttcttaaagtttcattattggcaactagagggttgtttttaatgcatggaaactaaacagattcctcggggagttcctgaaggaaccaggtgggcaaacctttgcttatatacatgcggcctcacctggaagagaaataaaccacttgtactaaaaaaaaaaaaaaaaaaaaaaaaagaacggacccgtcgccatgggccgggtgaccggggccagaagaagggccgggtctggtccg

SEQ ID NO: 7188 - DNA, 3245 bp, Homo sapiens
  misc_feature (1641)..(1687): n is a, c, g, or t
cttttctgccgggtaatggctgcttccaagacccagggggctgtcgcccgaatgcaggaagaccgtgatgggagctgcagcacagtcgggggtgtaggttatggggacagtaaggattgtatcctggagccgctttccctgccagaaagtccaggtggcaccaccactttagaaggttctccatctgtgccttgtattttctgtgaagaacattttcctgtggctgaacaagacaaacttctgaagcacatgattattgagcataagattgtcatagctgatgtcaagttggttgctgatttccaaaggtaagttctgtttttgtccttaaaagaattaaatttgaccatgtgtggtggctcatgtctgtaatcctagtactttgggaggccgaagtgggaggatcacccgaggccagtagtagttcaagatgccagctctaaaaacaaaatttaaaaattatctgggatcaatggcatgcgcctgtggttccagctacttgggaggttgaggcaggagggctgcttgcacccatgagttcgaggctgcagtgagttatggttataccattgcactccagcctgggtgacagaatgagaccctgtctcttaagaaagagaattaaatgtattgtttgttaaaggagtgacataatctatatataaaataattcccatacaaatatgaaaattcatattcattttcaggtttctccttagacttaaaaaaaaaaactttacaactcttttgtacttctgagactttttttttttttttgagatggagttttgctattgtcacccaggctggagtgcagtggcacgatctcagcttgttgcaacttctgcctcccatgttcaagcgattctcctgcctcagcctcctgagtagctgggattacaggcgcctgccaccacgcccagctaatttttgtattcttagtagagatggggtttcaccatgttggccaggcctgtctcgaactcctgagctcgggtgatctgcccacctcggcctcccacagtgctgggattacaggcatgagccactgcacccagccaacttctcagactttaaaaaaatctttacattatttttcttgagtctgtaagtttgagaatgtcacatactaatttattttctataagttctctaaagagatgaactttccaaagagtagataatactcactttgcagcattccatgacattgtagatcttattgatgtctcccagattatgtctcatgttttaggccatagacattctctgagtgggtccttccagtaattccagaatagacttggcaacaggacactcaaaaggcagtgtttgggaatgggatccttggagactttcaagccaaaaggatattgcccaaacaaatctcagtttaaatgttgtgatgaggttgattccttttttcccaatttataatttctggaagtagttgtccaagagaaataccttccctgtatagttactgaaagcataaaatttggtgtatctggtaaggtcccattttgaggtattctgtcctgatttccccataaaacattgtagtagcccagacattgaatacccctgcatctaaactctgtttctcccaggccatataaaacattcctagcaaacagcttnnnnnnnnnnnnnnnnnnnnnnnnnnnnnnnnnnnnnnnnnnnnnnngtattattaagagctgactatgaaagtaggaaagcctggggttgagtgcaggctttcacacttcctaatcttgtgatttcctgccaagctacctaactactctaagcattgattttctcatctataaaatgggggtaacaccagccctcatggttattgaatattacataaaacaaagtatggatgtgagggcgatctggctgcgacatctgtcaccccattgatcgccagggttgattcggctgatctggctggctaggcgggtgtccccttcctccctcaccgctccatgtgcgtccctcccgaagctgcgcgctcggtcgaagaggacgaccatccccgatagaggaggaccggtcttcggtcaagggtatacgagtagctgcgctcccctgctagaacctccaaacaagctctcaaggtccatttgtaggagaacgtagggtagtcaagcttccaagactccagacacatccaaatgaggcgctgcatgtggcagtctgcctttcttaaaaaaaaaaatctgaaaaaaagaagaaggtgtgagaccggcccctttctcccatgccttagacagggctccagggactgcttcaggggagatgtcagagggcagcagggaccgggaagggaggaagaaagcagagtgacagtgagaggtgggaaaactacaagaggaattgtttgtacgcttggatctggacttttagaactggtcaggacctgacagatcctccagcccagttctcccggctctcaaacactggcatcatttataattccctggaaaatcaccagcaggtaaatgaaggagaaaagaaaagaacaaaatccaccgggaaccagagacttccaggctccaaagacaggcaatctccaccaggaagtaagtataaaatcaacttacagtacttctttctttagcacttaaaatggattttatctcattaatgtccaacagagacaagggcaactcctggaggagctgtttcctcaccccatacggcagctagttcctcatttgtccttcagaggcatgtagaatcgttcattcactgaatatttattgagcatgtactctgcgctgagcactgttctagatgctcagagtggtgaataaatcagctgagggaggatcctagccagccagagtttacagtgtcttgcatgagggggctcaggatatgccatcccaaactgtgactgtaggagattagcatatgccatcccaaaatatgccctttggcttaaaggattatgttgatttgattattttgagaaactgcagacacaggagaagccctgaaaagttagtcttctggaagagaaatttacatctacaaaggaaatctccatttgtaagtgtgtcttcttctgcactaggaagagaaggatgactaaatcagagaagtctcttgtcagagaaagcacggacttcagtcttcagactgaagagaatataccttcgttttatgatgatttttctggccatctcatcttaactgggtctttccctacactttctttctttgtagtttaaattacacctttgagatct

SEQ ID NO: 7189 - DNA, 6146 bp, Homo sapiens
  misc_feature (917)..(931): n is a, c, g, or t
ttaaggaaatccgggctgctcttccccatctggaagtggctttccccacatcggctcgtaaactgattatgaaacatacgatgttaattcggagctgcatttcccagctgggcactctcgcgcgctggtccccggggcctcgccccccaccccctgcccttccctcccgcgtcctgcccccatcctccaccccccgcgctggccaccccgcctccttggcagcctctggcggcagcgcgctccactcgcctcccgtgctcctctcgcccatggaattaattctggctccacttgttgctcggcccaggttggggagaggacggagggtggccgcagcgggttcctgagtgaattacccaggagggactgagcacagcaccaactagagaggggtcagggggtgcgggactcgagcgagcaggaaggaggcagcgcctggcaccagggctttgactcaacagaattgagacacgtttgtaatcgctggcgtgccccgcgcacaggatcccagcgaaaatcagatttcctggtgaggttgcgtgggtggattaatttggaaaaagaaactgcctatatcttgccatcaaaaaactcacggaggagaagcgcagtcaatcaacagtaaacttaagagacccccgatgctcccctggtttaacttgtatgcttgaaaattatctgagagggaataaacatcttttccttcttccctctccagaagtccattggaatattaagcccaggagttgctttggggatggctggaagtgcaatgtcttccaagttcttcctagtggctttggccatatttttctccttcgcccaggttgtaattgaagccaattcttggtggtcgctaggtatgaataaccctgttcagatgtcagaagtatatattataggagcacagcctctcnnnnnnnnnnnnnnnggactttctcaaggacagaagaaactgtgccacttgtatcaggaccacatgcagtacatcggagaaggcgcgaagacaggcatcaaagaatgccagtatcaattccgacatcgacggtggaactgcagcactgtggataacacctctgtttttggcagggtgatgcagataggcagccgcgagacggccttcacatacgccgtgagcgcagcaggggtggtgaacgccatgagccgggcgtgccgcgagggcgagctgtccacctgcggctgcagccgcgccgcgcgccccaaggacctgccgcgggactggctctggggcggctgcggcgacaacatcgactatggctaccgctttgccaaggagttcgtggacgcccgcgagcgggagcgcatccacgccaagggctcctacgagagtgctcgcatcctcatgaacctgcacaacaacgaggccggccgcaggacggtgtacaacctggctgatgtggcctgcaagtgccatggggtgtccggctcatgtagcctgaagacatgctggctgcagctggcagacttccgcaaggtgggtgatgccctgaaggagaagtacgacagcgcggcggccatgcggctcaacagccggggcaagttggtacaggtcaacagccgcttcaactcgcccaccacacaagacctggtctacatcgaccccagccctgactactgcgtgcgcaatgagagcaccggctcgctgggcacgcagggccgcctgtgcaacaagacgtcggagggcatggatggctgcgagctcatgtgctgcggccgtgggtacgaccagttcaagaccgtgcagacggagcgctgccactgcaagttccactggtgctgctacgtcaagtgcaagaagtgcacggagatcgtggaccagtttgtgtgcaagtagtgggtgccacccagcactcagccccgctcccaggacccgcttatttatagaaagtacagtgattctggtttttggtttttagaaatattttttatttttccccaagaattgcaaccggaaccattttttttcctgttaccatctaagaactctgtggtttattattaatattataattattatttggcaataatgggggtgggaaccacgaaaaatatttattttgtggatctttgaaaaggtaatacaagacttcttttggatagtatagaatgaagggggaaataacacataccctaacttagctgtgtgggacatggtacacatccagaaggtaaagaaatacattttctttttctcaaatatgccatcatatgggatgggtaggttccagttgaaagagggtggtagaaatctattcacaattcagcttctatgaccaaaatgagttgtaaattctctggtgcaagataaaaggtcttgggaaaacaaaacaaaacaaaacaaacctcccttccccagcagggctgctagcttgctttctgcattttcaaaatgataatttacaatggaaggacaagaatgtcatattctcaaggaaaaaaggtatatcacatgtctcattctcctcaaatattccatttgcagacagaccgtcatattctaatagctcatgaaatttgggcagcagggaggaaagtccccagaaattaaaaaatttaaaactcttatgtcaagatgttgatttgaagctgttataagaattgggattccagatttgtaaaaagacccccaatgattctggacactagattttttgtttggggaggttggcttgaacataaatgaaatatcctgtattttcttagggatacttggttagtaaattataatagtagaaataatacatgaatcccattcacaggtttctcagcccaagcaacaaggtaattgcgtgccattcagcactgcaccagagcagacaacctatttgaggaaaaacagtgaaatccaccttcctcttcacactgagccctctctgattcctccgtgttgtgatgtgatgctggccacgtttccaaacggcagctccactgggtcccctttggttgtaggacaggaaatgaaacattaggagctctgcttggaaaacagttcactacttagggatttttgtttcctaaaacttttattttgaggagcagtagttttctatgttttaatgacagaacttggctaatggaattcacagaggtgttgcagcgtatcactgttatgatcctgtgtttagattatccactcatgcttctcctattgtactgcaggtgtaccttaaaactgttcccagtgtacttgaacagttgcatttataaggggggaaatgtggtttaatggtgcctgatatctcaaagtcttttgtacataacatatatatatatatacatatatataaatataaatataaatatatctcattgcagccagtgatttagatttacagcttactctggggttatctctctgtctagagcattgttgtccttcactgcagtccagttgggattattccaaaagttttttgagtcttgagcttgggctgtggccccgctgtgatcataccctgagcacgacgaagcaacctcgtttctgaggaagaagcttgagttctgactcactgaaatgcgtgttgggttgaagatatctttttttcttttctgcctcacccctttgtctccaacctccatttctgttcactttgtggagagggcattacttgttcgttatagacatggacgttaagagatattcaaaactcagaagcatcagcaatgtttctcttttcttagttcattctgcagaatggaaacccatgcctattagaaatgacagtacttattaattgagtccctaaggaatattcagcccactacatagatagctttttttttttttttttttttttaataaggacacctctttccaaacaggccatcaaatatgttcttatctcagacttacgttgttttaaaagtttggaaagatacacatcttttcatacccccccttaggaggttgggctttcatatcacctcagccaactgtggctcttaatttattgcataatgatatccacatcagccaactgtggctctttaatttattgcataatgatattcacatcccctcagttgcagtgaattgtgagcaaaagatcttgaaagcaaaaagcactaattagtttaaaatgtcacttttttggtttttattatacaaaaaccatgaagtactttttttatttgctaaatcagattgttcctttttagtgactcatgtttatgaagagagttgagtttaacaatcctagcttttaaaagaaactatttaatgtaaaatattctacatgtcattcagatattatgtatatcttctagcctttattctgtacttttaatgtacatatttctgtcttgcgtgatttgtatatttcactggtttaaaaaacaaacatcgaaaggcttattccaaatggaagatagaatataaaataaaacgttacttgtatattggtaagtggtttcaattgtccttcagataattcatgtggagatttttggagaaaccatgacggatagtttaggatgactacatgtcaaagtaataaaagagtggtgaattttaccaaaaccaagctatttggaagcttcaaaaggtttctatatgtaatggaacaaaaggggaattctcttttcctatatatgttccttacaaaaaaaaaaaaaaagaaatcaagcagatggcttaaagctggttataggattgctcacattcttttagcattatgcatgtaacttaattgttttagagcgtgttgctgttgtaacatcccagagaagaatgaaaactggttggaaactaaaggttcattgtgttaagtgcaattaatacaagttattgtgcttttcaaaaatgtacacggaaatctggacagtgctgcacagattgatacattagcctttgctttttctctttccggataaccttgtaacatattgaaaccttttaaggatgccaagaatgcattattccacaaaaaaacagcagaccaacatatagagtgtttaaaatagcatttctgggcaaattcaaactcttgtggttctaggactcacatctgtttcagtttttcctcagttgtatattgaccagtgttctttattgcaaaaacatatacccgatttagcagtgtcagcgtattttttcttctcatcctggagcgtattcaagatcttcccaatacaagaaaattaataaaaaatttatatataggcagcagcaaaagagccatgttcaaaatagtcattatgggctcaaatagaaagaagacttttaagttttaatccagtttatctgttgagttctgtgagctactgacatcctgagactggcactgtgtaagttttagttgcctaccctagctcttttctcgtacaattttgccaataccaagtttcaatttgtttttacaaaacattattcaagccactagaattatcaaatatgacgctatagcagagtaaatactctgattaagagaccggtactagctaactccaagagatcgttagcagcatcagtccacaaacacttagtggcccacaatatatagagagatagaaaaggtagttataacttgaagcatgtatttaatgcaaataggcacgaaggcacaggtctaaaatactacattgtcactgtaagctatacttttaaaatatttattttttttaaagtattttctagtcttttctctctctgtggaatggtgaaagagagatgccgtgttttgaaagtaagatgatgaaatgaatttttaattcaagaaacattcagaaacataggaattaaaacttagagaaatgatctaatttccctgttcacacaaactttacactttaatctgatgattggatattttattttagtgaaacatcatcttgttagctaactttaaaaaatggatgtagaatgattaaaggttggtatgatttttttttaatgtatcagtttgaacctagaatattgaattaaaatgctgtctcagtattttaaaagcaaaaaaggaatggaggaaaattgcatcttagaccatttttatatgcagtgtacaatttgctgggctagaaatgagataaagattatttatttttgttcatgtcttgtacttttctattaaaatcattttatgaaatccaaaaaaaaaaaaaaaaaaaaaaaaaaaaaaaaaaaaaaa

SEQ ID NO: 7190 - DNA, 1094 bp, Homo sapiens; identical to SEQ ID NO: 5240

SEQ ID NO: 7191 - DNA, 3837 bp, Homo sapiens
  misc_feature (3805)..(3831): n is a, c, g, or t
ctggagaggatctacccgggctccctgcctggccagtggggaaacaccggtcccccaggcaccttcacctaaccagagcggggatttccaccgcccctcatgccgccctttggaggaaagtgaaagtgaaaggaggaagaggaggcttcatggctgaggaggtcgcagcgccatgaagtccctgtctctgctcctcgctgtggctttgggcctggcgaccgccgtctcagcaggacccgcggtgatcgagtgttggttcgtggaggatgcgagcggaaagggcctggccaagagacccggtgcactgctgttgcgccagggaccgggggaaccgccgccccggccggacctcgaccctgagctctatctcagtgtacacgaccccgcgggcgccctccaggctgccttcaggcggtatccccggggcgcccccgcaccacactgcgagatgagccgcttcgtgcctctccccgcctctgcgaaatgggccagcggcctgacccccgcgcagaactgcccgcgggccctggatggggcttggctgatggtcagcatatccagcccagtcctcagcctctccagcctcttgcgaccacagccagagcctcagcaggagcctgttctcatcaccatggcaacagtggtactgactgtcctcacccacacccctgcccctcgagtgagactgggacaagatgctctgctggacttgagctttgcctacatgccccccacctccgaggccgcctcatctctggctccgggtccccctccctttgggctagagtggcgacgccagcacctgggtaagggacatctgctcctggctgcaactcctgggctgaatggccagatgccagcagcccaagaaggggccgtggcatttgctgcttgggatgatgatgagccatggggcccatggaccggaaatgggaccttctggctgcctagagttcaaccctttcaggagggcacctatctggccaccatacacctgccatacctgcaaggacaggtcaccctggagcttgctgtgtacaaaccccccaaagtgtccctgatgccagcaacccttgcacgggccgccccaggggaggcacccccggaattgctctgccttgtgtcccacttctacccttctgggggcctggaggtggagtgggaactccggggtggcccagggggccgctctcagaaggccgaggggcagaggtggctctcggccctgcgccaccattccgatggctctgtcagcctctctgggcacttgcagccgcccccagtcaccactgagcagcatggggcacgctatgcctgtcgaattcaccatcccagcctgcctgcctcggggcgcagcgctgaggtcaccctggaggtagcaggtctttcagggccctcccttgaggacagcgtaggccttttcctgtctgcctttcttctgcttgggctcttcaaggcactgggctgggctgctgtctacctgtccacctgcaaggattcaaagaagaaagcagagtgagggcactcactgccatcctgtggaagccaccatcatctctggcccaagcttctgtagtagctccctaaaataataccctatcatctgctcctaatccctccaatctctctccactgagtggctggaatgctttttttttttttctttcacttatataagggacgagtgtgcctcagcccgcgcgctcgcagcttctcgctctcgcctgcctgcccgctcccttgcttgctcgcgctttcgctcgccctctcctcgaggatcgaggggactctgaccacagcctgtggctgggaagggagacagaggcggcggcggctcaggggaaacgaggctgcagtggtggtagtaggaagatgtcgggcgaggacgagcaacaggagcaaactatcgctgaggacctggtcgtgaccaagtataagatggggggcgacatcgccaacagggtacttcggtccttggtggaagcatctagctcaggtgtgtcggtactgagcctgtgtgagaaaggtgatgccatgattatggaagaaacagggaaaatcttcaagaaagaaaaggaaatgaagaaaggtattgcttttcccaccagcatttcggtaaataactgtgtatgtcacttctcccctttgaagagcgaccaggattatattctcaaggaaggtgacttggtaaaaattgaccttggggtccatgtggatggcttcatcgctaatgtagctcacacttttgtggttgatgtagctcaggggacccaagtaacagggaggaaagcagatgttattaaggcagctcacctttgtgctgaagctgccctacgcctggtcaaacctggaaatcagaacacacaagtgacagaagcctggaacaaagttgcccactcatttaactgcacgccaatagaaggtatgctgtcacaccagttgaagcagcatgtcatcgatggagaaaaaaccattatccagaatcccacagaccagcagaagaaggaccatgaaaaagctgaatttgaggtacatgaagtatatgctgtggatgttctcgtcagctcaggagagggcaaggccaaggatgcaggacagagaaccactatttacaaacgagacccctctaaacagtatggactgaaaatgaaaacttcacgtgccttcttcagtgaggtggaaaggcgttttgatgccatgccgtttactttaagagcatttgaagatgagaagaaggctcggatgggtgtggtggagtgcgccaaacatgaactgctgcaaccatttaatgttctctatgagaaggagggtgaatttgttgcccagtttaaatttacagttctgctcatgcccaatggccccatgcggataaccagtggtcccttcgagcctgacctctacaagtctgagatggaggtccaggatgcagagctaaaggccctcctccagagttctgcaagtcgaaaaacccagaaaaagaaaaaaaagaaggcctccaagactgcagagaatgccaccagtggggaaacattagaagaaaatgaagctggggactgaggtgggtcccatctccccagcttgctgctcctgcctcatccccttcccaccaaaccccagactctgtgaagtgcagttcttctccacctaggaccgccagcagagcggggggatctccctgcccccaccccagttccccaacccactcccttccaacaacaaccagctccaactgactctggtcttgggaggtgaggcttcccaaccacggaagactactttaaatgaaaaaaagaaattgaataataaaatcaggagtcaaaattcaaaaaaaaaaagcccctctttactagcctttttctactactctctgcttggtcaagggtaagtggcccatacagaagaagggctaactaagccaccaccactgaaaactcagccgaaatatgttataccactctgatgtcagcgatttgtcccatctgtaggggctgttacctcttattgcagctacccaaatattgattctggcttcaacaataaggaggaatatatgcagattgcctaaatccgggggggcgattcctcatagaatcaaggtggccagcagggccacagatttaaggaacggacctatctataaggattctccagcaatggtcgcaaggaaactattgcccatacaccaagtgaaaagaacatcactacccagcggagggggcttctcgcataagccgcgaacccggtgccgcgaatgcctcgagaaacaggcaggaacatcctaacatcagggcacaccggagacagnnnnnnnnnnnnnnnnnnnnnnnnnnntatggg

SEQ ID NO: 7192 - DNA, 2630 bp, Homo sapiens
gtccccgccgtgcgcccttcgccgctgagctcgcagcctccggcgcccacctccacctccagtgtcccgcctcgggccgtcgccctccagcggctcgcgagcgtgggagacgtacctgggcaggcactgtccagcccaggcccaggcacagccgtgaggggcgaggcacggggacatcctggcggccaccatggtggccacgtgcctgcaggtggtgggcttcgtcacgagcttcgtgggctggatcggggtcatcgtgaccacctccaccaatgactgggtggtgacctgcggctacaccatccccacctgccgcaagctggatgagctgggctccaaggggctgtgggccgactgcgtcatggccacggggctgtaccactgcaagcccctggtggacatcctcatcctgccgggctacgtgcaggcctgccgcgccctgatgattgctgcctcggtcctgggtctgccggccattttactgctgctgactgttcttccctgcatccggatgggccaggagcccggtgtggctaagtacaggcgggcccagctggctggtgttttgctcattctgctggctctctgcgcccttgttgccaccatctggttccctgtgtgcgcccaccgtgagaccaccatcgtgagctttggctactccctgtatgcaggctggattggtgctgtgctgtgcctcgtgggtggctgtgtcatcctctgctgcgctggagatgcccaggcctttggtgaaaaccgtttctactacactgcgggctctagctccccgactcatgcgaagagtgcccacgtataagagggctgcccggctgcccacagaggtgctgtagatgctgggcccagggccctaggtttgctcgtcacagtgtggggaagcccattcctctgccaggctctaaagccaaaggtctagaaaagcatcctgtctggcattttgtagtcttaacttctccccatttcccccatcttttggttgccttaaaagaaatctctagctcagataatgcccagacatttttttcccttggtgttgcccctattagctcttttcttgggcattcttctgctgtttattaaaaatatattatatatattttgtttctttaaatttcaaatgttttgcaaacatcactgagttaggtgggggtggggaagagaaatacaagatacttttttttttttttttttaaatagggcctcactctgttgctcaggctggagtgcggtggtgtgatctcggctcatgtagcctcaacctccccggctcaagtgatcctcctgcctcagcctcccaagtagctgggactacaggcgttcactactacacccagctaatttttaagttttttatagagatgagggctccctatgttgcccaggttggtctcgaactcctggactcaaagtatcctcccgcctcggcctcccaaagtgttgggattataggagtgagccaccacaccggccaagatgcttttcaaactgatacagatgacaatgggagcctcataaagatggcttttgtttcttcccttcaaggtcatttacttgtacgagacagaaaaagatagcattggggacatgggatgggggagggagggcaatagtggaacgaactttccatgggaaactttcccttttgtaagttgagggccaggggtagggatattttttagtttgtgattttacatttatctgtacatactttttcaagattgatcatttttataaccatggttttcctgaaatcctcaattcatcaatatgaaggaaatgaaccacatagactttatgcaataaataacagtgcaagtgagtataactctaactgatgttccacaaaacatttttgatttcaggtttgtatgatgtagtttttaatcgtacattttcatatgcttcaaactaacacatttttaaagctttcccctacttttctctctatttgtattgttagccatcttgaagtgatgttgtttaacataaattgtactgttgaatttggctttacgggtgtaaacactgatggtatatcagtatctgagaccccaaactctccaaatactgatggtgcattttattcttgaagtgaaatctgtgcaataaaataacagactgtctgcaaaaaaaaaaaaaaacttctgttttatccagaggtatcattattgatttaaaaaaaatctcattaatctctactggtaatttatagggaatctgatcagtgattcaagaacatattaaaagcattgccttgaataaagggggcggcgcctaaaaaaacactccccgggggggggcgcaatattatagccgcccccccttttttttttataaaagagggcgcccccttaaagggggggggtaattttataagcgggggggggtggcgccgggcttctatttccacacaccgtggtgggtcgaaaaaaaaactccttctcgtcgggtcattatcttacagagaagaaccatcctttctgtgggggggggcgcatatcttgggggaccacacctctcccaacagagatttgacggacccggaggaaagaaaaaaatccttttttcttcagtggtccgcggggcgtgaaaacatactgaccctcctcggggga

SEQ ID NO: 7193 - DNA, 1697 bp, Homo sapiens
aagcttcccgactcccccccccccccccccccagggaattttgaagactccccccccggaacctgctttgcctcaattgggggaaaaaaaacccttttctttaaaaaaaaaaaaaaaaaaaaaaagtaaaggggatctctaatactgcctaaaagtatgctttcactgtcagcagttttaaaggtgaaatcagagcagcactacccctcccacctccaaagcatctgtaaaatcattctatcattgagtatcgtttaatgcaaaaggacaaaaacaactcccgtgatatgattgccaggagattctgtttccccatttctatatttgtggattttatatgtaatcacctatgtcagagaaagaaaacctttcaaccaaatgattggttcaaaaggaaagaatgattcaaagcagaggaatttattatgcacagcaaaatgtgtcttgtattaaatatttttattaaaagaatgtttcattaatgcattgataagaaaactaggttagttgcgagggatgtttctggtttcatttcaaataattaaatttctactgctactaccaagaggactggctcagtggtggcaaaatactggtgatgctccctagagcaggaggcccggaagtgtgacgcagccatcagcctgccaagattgttttttaatcttcacagtgttttaaagaacatgttaaaaaaaaaaaaaaatctagtgctcctgctgtcaagatttctgtcatggaaaccttgtttgagaaaggtgttaataaaattctattgcaaaaatttctttttctagaaaaaataaatacaaaaaaaaaaaagaagaatttccaaagtaattaaaatttttctggagacaaacaaaaaaaaggttggtcttaccatattggattaaattaaaatttactccttaccatttttcttaaagggtatttaaatttttaaagtgggtccccgggggacgtattggtatgatacccataattggtatattttatggtacgaattcaatttttttaaaccaggtacccaattatcttttttggaaaaaattacctttttattggttcttttggtttctaccaatcatttggtcgaataatttggaagtccataatagcgatatggataatggtgggaatggtcctaaagtggtttttattaacctggactttattttaaaccctaacggagcatgtatccagtctacctttccatccagtgggggggagttctgcggaagaaattaaacctaccctttttaattttcaaatcttagccaaagtgtttctcagcggtttacggttccagtcggtcgcacagcaacttcttactaccccttctttaacatctcacctggaactggacaccgagctcccttggtaatataatttcgggactaatttcaccgtggtggcactcttggctctgtgtttcgccgacaattgtgccgcagggcttcaagatataccccttaacactctttgtggtcaccccgggaagcgcaaatgtgttatatcggcgagcccgaagcttaaaagggggaagccttgggcctgaacacggcaaacggccttatggtggttgtcacatacacggccgtggggctctccccgactttataaaacatttgtgaaccatttgggcactaaattaataaatcccctataataaaaaagcgccccaaaaattacgc

SEQ ID NO: 7194 - DNA, 445 bp, Homo sapiens
gttttaaaggcatagacatctttattgggagatatgggcagaaaaattatttcctcagggtggggcatttggctaaacacttgccaatatcctttactgtgtaatttaggtaacacaggcagaaaaggcgtttgaaaagcagaaatcaagtggcaaatatcagatctgagggacgcaatgagggtggagttgaaatccgtggtccttggatttgaaacttaccagcccgtgaacaaggttggtattgcttttggcataagacgacagcctttcttttcattagctcaggaggaatactggctttccaagtgagctcctccaatccagtgatatttgcacatctcacctgggcctttcggttacaaattcaccaccttaaggagccgtgtgaaaaagcaagaacaatcaataagaaggaaaaaaaaaaaacccttcagctataaat

SEQ ID NO: 7195 - DNA, 1573 bp, Homo sapiens
  misc_feature (950)..(951): n is a, c, g, or t
  misc_feature (954)..(954): n is a, c, g, or t
  misc_feature (966)..(968): n is a, c, g, or t
  misc_feature (971)..(971): n is a, c, g, or t
  misc_feature (974)..(974): n is a, c, g, or t
  misc_feature (981)..(983): n is a, c, g, or t
  misc_feature (986)..(987): n is a, c, g, or t
  misc_feature (989)..(996): n is a, c, g, or t
  misc_feature (1001)..(1002): n is a, c, g, or t
  misc_feature (1006)..(1008): n is a, c, g, or t
  misc_feature (1431)..(1432): n is a, c, g, or t
  misc_feature (1434)..(1434): n is a, c, g, or t
atcaagttccctaaattttggtaatccgtgcggtaaaaaaaaaagtgcctggagccttcaaacccaaaccaaaaagccacccccagcaaaaaaaccaagtccaaaacgaatataccctatattcggttaaaattcaaaagggaacgaaaagcatttagctggccagttttgattgcaaatgctgtaaagatatagaatgaagtcctgggaggctttcctatctccaagtctatgtattttctggagacctaaccagataccagataatcacaaagaaagcttttttaataaggcttaaaccaagaccttgtctagatatttttagtttgttgccaaggtagcactgtgagaaatctcacttggatgttatgtaaggggtgagacacaacagtctgactatgagtgaggaaaatatctgggtcttttcgtcagtttggtgcatttgctgctgctgttgctactgtttgcctcaaacgctgtgtttaaacaacgttaaactcttagcctacaaggtggctcttatgtacatagttgttaatacatccaattaatgatgtctgacatgctatttttgtagggagaaaatatgtgctaatgatattttgagttaaaatatcttttggggaggatttgctgaaaagttgcacttttgttacaatgcttatgcttggtacaagcttatgctgtcttaaattattttaaaaaaataaatactgtctgtgagaaaccagctggtttagaaaagtttagtatgtgacgataaactagaaattacctttatattctagtattttcagcactccataaattctattacctaaatattgccacactattttgtgatttaaaaattcttactaaggaataaaaactttaatatacgataaaaaaaaaaaaaaaaaaaaaaaaaaaaaaaaaaaaaaaaaaaaaaaaaaaaaaaaaaaaaaaannaanaaaaaaaaaaannnaanaanaaaaaannnaannannnnnnnnaaaannaaannnaaaggggggggccctccaaagataacctcccgagggggggcccccatttaaacccccccccttttttttgtaaaaaaggggccccccctaaaaggggggggctttatatataacgggccgggccggccccctttataacacccccccgggtgggggaaaacacccgcaccccgggggaatcttgggggaagaacaccacctttttgggggggggggggccaaacattttggcaccccccccccccccccaaagataaatccccctctccggggggaaaacaaaaaatttttttccgggggcaaaaggggggtgaaaccaatataccgcggcttttttttctctgggtgaataaaaaaatttttttctcttttcgggagggaggttttttaaaaaaaaattttctccccccgcgggccgtgggnngncacctccccgggggggggggggggggttttttatacccctccccgccccccccacgaggctttttttttttgggggcgccccccccttttcctctaaaaaaggcgttggtttgtaggtaattataaaaaccgcccccct

SEQ ID NO: 7196 - DNA, 471 bp, Homo sapiens
aggggtaaatattcattttaattttttttggacaaataatttcaaatataattttaaaagaccaaatcagcattacagattccaatttaaattaagcttaataaacacaataaagcctttgaatagttttattttaaaatgatatgacacacttgctattaacatataaggcatcaagtgccctaagacagagctcataaccttaataattgcccttgaaaatatcaaaaagcacataatcaatgtcaaattatttttgtttggcaagaaaagtaaaattaacagcacgatgagaaccacagggtacaaactctcaatacacaatatgtaataattaatctttctttcttatatgacatttgtttggagcctggctaggaagcctgaagatggcagtgaaaaaatagggagagctgttcctgaaacacaggagagttacccaaatttgaaacaaaggaatatactctccat

SEQ ID NO: 7197 - DNA, 1096 bp, Homo sapiens
  misc_feature (9)..(9): n is a, c, g, or t
ctcgtgccngcgcgcagcgctggtaccccgttggtccgcgcgttgctgcgttgtgaggggtgtcagctcagtgcatcccaggcagctcttagtgtggagcagtgaactgtgtgtggttccttctacttggggatcatgcagagagcttcacgtctgaagagagagctgcacatgttagccacagagccacccccaggcatcacatgttggcaagataaagaccaaatggatgacctgcgagctcaaatattaggtggagccaacacaccttatgagaaaggtgtttttaagctagaagttatcattcctgagaggtacccatttgaacctcctcagatccgatttctcactccaatttatcatccaaacattgattctgctggaaggatttgtctggatgttctcaaattgccaccaaaaggtgcttggagaccatccctcaacatcgcaactgtgttgacctctattcagctgctcatgtcagaacccaaccctgatgacccgctcatggctgacatatcctcagaatttaaatataataagccagccttcctcaagaatgccagacagtggacagagaagcatgcaagacagaaacaaaaggctgatgaggaagagatgcttgataatctaccagaggctggtgactccagagtacacaactcaacacagaaaaggaaggccagtcagctagtaggcatagaaaagaaatttcatcctgatgtttaggggacttgtcctggttcatcttagttaatgtgttctttgccaaggtgatctaagttgcctaccttgaatttttttttaaatatatttgatgacataatttttgtgtagtttatttatcttgtacatatgtattttgaaatcttttaaacctgaaaaataaatagtcatttaatgttgaaaaaaaaaaaaaaaaaaaaaaaaaaaaaaacttgagagtatcccctccgaagggggcccaaggctttaagccggatacccagtgttttcttggtcaaaaggggggccctcattagtggagtccgtatttattaggctagggccctgggcccgctctttttatccacgcccgcgacacggggaaaaactg

SEQ ID NO: 7198 - DNA, 662 bp, Homo sapiens
  misc_feature (570)..(570): n is a, c, g, or t
  misc_feature (601)..(601): n is a, c, g, or t
  misc_feature (610)..(610): n is a, c, g, or t
  misc_feature (616)..(616): n is a, c, g, or t
  misc_feature (623)..(623): n is a, c, g, or t
atggacatgggggcccaggctcaccttctcacaatgaggctccctgctcagctcctggggctgctaatgctctgggtcccaggatccagtggggatgttgtgatgactcagtctccactctccctgcccgtcacccttggacagccggcctccatctcctgcaggtctagtcaaagcctcgtacacagtgatggaaacacctacttgaattggtttcagcagaggccaggccaatctccaaggcgcctaatttataaggtttctaaccgggactctggggtcccagacagattcagcggcagtgggtcaggcactgatttcacactgaaaatcagcagggtggaggctgaggatgttggggtttattactgcatgcaaggtacacactggcctccgtacactttcggccaggggaccaagctggagatcaaacgaactgtgggtggcaccccatctgtctttcatcttcccgccatctgatgaggcagtttgaaatctgggaacttgcctctgttgttgttgcctgcttgaataacttcttattccccagagagggcccaaagtacagtnggaagggttggattaacggcccttcccattnggggttaanttcccnggggggnagtttttcacaggggcagggtccagccaagggacaggca

SEQ ID NO: 7199 - DNA, 797 bp, Homo sapiens
  misc_feature (24)..(24): n is a, c, g, or t
  misc_feature (28)..(29): n is a, c, g, or t
atggaacaccattcccatcgaccntccnnggttggatgaaaccttcctcctactgcacagcccgcccccctacagccccggtccccacgcctagaagacagcggaactaagaaaagaagaggcctgtggacagaacaatcatgtctgactccctggtggtgtgcgaggtagacccagagctaacagaaaagctgaggaaattccgcttccgaaaagagacagacaatgcagccatcataatgaaggtggacaaagaccggcagatggtggtgctggaggaagaatttcagaacatttccccagaggagctcaaaatggagttgccggagagacagcccaggttcgtggtttacagctacaagtacgtgcatgacgatggccgagtgtcctaccctttgtgtttcatcttctccagccctgtgggctgcaagccggaacaacagatgatgtatgcagggagtaaaaacaggctggtgcagacagcagagctcacaaaggtgttcgaaatccgcaccactgatgacctcactgaggcctggctccaagaaaagttgtctttctttcgttgatctctgggctggggactgaattcctgatgtctgagtcctcaaggtgactggggacttggaacccctaggacctgaacaaccaagactttaaataaattttaaaatgcaaaaactcagaaaaaaaaaaaaaaaaaaaaaaaaaaaaaaaaaaaaaaaaaaaaaaaaaaaaaaaaaacgggtcaagaaatggccatgggtcatgtgtttccccggacccattttttgtcc

SEQ ID NO: 7200 - DNA, 1781 bp, Homo sapiens
gaattctccggatctcagtcttctgtttctccctaagtgcttctttggatctcaggctctaggtgcaatgtgaaggggagtccctgggcagactgatccctggctcagacagttcagtgggagaatcccaaaggccttttccctccttcctgagcctccgggcaaggagggagggatcttggttccagggtctcagtaccccctgtgccatttgagctgcttgcgctcatcatctctattaataaccaacttccctcccccactgccagtgctgcccccacgcctgcccagctcgtgttctccggtcacagcagctcagtcctccaaagctgctggaccccagggagagctgaccactgcccgagcagccggctgaatccacctccacaatgccgctctcaggaaccccggcccctaataagaagaggaaatccagcaagctgatcatggaactcactggaggtggacaggagagctcaggcttgaacctgggcaaaaagatcagtgtcccaagggatgtgatgttggaggaactgtcgctgcttaccaaccggggctccaaggatgtttgcctgcggcagatgagggtggagaagtttatttatgagaaccaccctgatgttttctctgacagctcaatggatcacttccagaagttccttccaacagtggggggacagctgggcacagctggtcagggattctcatacagcaagagcaacggcagaggcggcagccaggcagggggcagtggctctgccggacagtatggctctgatcagcagcaccatctgggctctgggtctggagctgggggtacaggtggtcccgcgggccaggctggcagaggaggagctgctggcacagcaggggttggtgagacaggatcaggagaccaggcaggcggagaaggaaaacatatcactgtgttcaagacctatatttccccatgggagcgagccatgggggttgacccccagcaaaaaatggaacttggcattgacctgctggcctatggggccaaagctgaacttcccaaatataagtccttcaacaggacggcaatgccctatggtggatatgagaaggcctccaaacgcatgaccttccagatgcccaagtttgacctggggcccttgctgagtgaacccctggtcctctacaaccaaaacctctccaacaggccttctttcaatcgaacccctattccctggctgagctctggggagcctgtagactacaacgtggatattggcatccccttggatggagaaacagaggagctgtgaggtgtttcctcctctgatttgcatcatttcccctctctggctccaatttggagagggaatgctgagcagatagcccccattgttaatccagtatccttatgggaatggagggaaaaaggagagatctacctttccatcctttactccaagtccccactccacgcatccttcctcaccaactcagagctccccttctacttgctccatatggaacctgctcgtttatggaatttgctctgccaccagtaacagtcaataaacttcaaggaaaatgaaaaaaaaaaaaaaaaaaaaaaaaaaaaaaaaaaaaaaaaaaaaaaaaaaaaaaaaaaaaaaaaaaaaaaaaaaaaaaaaaaaaaaaaaaaaaaaaaaaaaaaaaaaaaaaaaaaaaaaaaacccctcccaaaaaattcccccccccgggggggggccccaattttttacccgcgcccccacctttttttttttttttaaaaaagggggccccccaaa

SEQ ID NO: 7201 - DNA, 1331 bp, Homo sapiens
  misc_feature (9)..(9): n is a, c, g, or t
  misc_feature (86)..(136): n is a, c, g, or t
  misc_feature (933)..(933): n is a, c, g, or t
  misc_feature (941)..(941): n is a, c, g, or t
  misc_feature (946)..(947): n is a, c, g, or t
  misc_feature (954)..(954): n is a, c, g, or t
  misc_feature (963)..(963): n is a, c, g, or t
ccccgtggngcacgcgtctatcgcccggtgccgcatcatcgggcgcatgtgtgtggggaacaggcacggtctcctgtacccaacannnnnnnnnnnnnnnnnnnnnnnnnnnnnnnnnnnnnnnnnnnnnnnnnnngtgcagattagggcgggtggaggagcggctctcagccttgggcaatgtcaccacctgcaagtgactacgtggccttggtccacccagacttggacagggagacagaagaaattctggcagatgtgctcaaggtggaagtcttcagacagacagtggccgaccaggtgctagtaggaagctactgtgtcttcagcaatcagggagggctggtgcatcccaagacttcaattgaagaccaggatgagctgtcctctcttcttcaagtcccccttgtggcggggactgtgaaccgaggcagtgaggtgattgctgctgggatggtggtgaatgactggtgtgccttctgtggcctggacacaaccagcacagagctgtcagtggtggagagtgtcttcaagctgaatgaagcccagcctagcaccattgccaccagcatgcgggattccctcattgacagcctcacctgagtcaccttccaagttgttccatgggctcctggctctggactgtggccaaccttctccacattccgcccaatctgtaccggatgctggcagggaggtggcagagagctcactgggactgaggggctgggcacccaacccttttccacctgtgcttatcgcctggatctatcattactgcaaaaacctgctctgttgtgctggctggcaggccctgtggctgctggctgagggttctgctgtcctgtgccaccccattaaagtgcagttccctccggaaaaaaaaaaaaaaaaaaaaaaaaaaaaaaaaaaaaaaaaaaaaaaaaaaaaaanaaaaaaanaaaannaaaaaanaaaaaaaanaaaaaagggggggccgcttctaaagtatcccctcgagggggcccaagttttaccccgtaccccagttttcttgttacaaagggggcccctaatagtggaggcggaattaataacctaagccactggcccgccctttttacaaacgtcggggaagtggaaaaaactggttaccctggggaatcttttgggaaaggaacccttaacttcctggggggggggacataaatttgggacaaacctaccctcacaggaaatatttaaagccctctaaggggaaaataattaaaaatttttataagggggaataatgggggtttaaaaccaagccggcaatatgccttggccgggctttataaaaatttttttct

SEQ ID NO: 7202 - DNA, 676 bp, Homo sapiens
gactcggtacccggatattttcttcttccggactcggaaagtctccctggccaccatccacccctcaggcctggccgccttgcatgaagccgtgctctctggaaacctggaatgcgtgaagctgctggtcaaatacggggctgacattcaccagcgagatgaggcgggctggacacccctgcacattgcctgcagcgatgggtaccctgacatagccaggtaccttatctccctgggagcggacagggatgcaaccaacgacgatggcgacctgccctccgacctcatcgacccggactacaaggagctggtggagctcttcaaagggaccacgatggactgagccagctttgcccgcccgcccccgcgcccagggccgcctccctggagaagccgcgcgtcgcccatgggccagcacgtgccccacccgtgggccaggggcggccggacccgtccctccacgaccccgccacccctcctaggcctggctttgtccccaggtgaattttttactgtgacactttttactttttcaataaacgtgactcccaggtgagggggcctgggtctacacaacgtgaagaagaaagaagacaaagaacaaacaagaacaaaaacacacaaaaaaaacacaaacagacgacacaagaacaacacaacagaaaagaagggggcg

SEQ ID NO: 7203 - DNA, 2816 bp, Homo sapiens
  misc_feature (800)..(818): n is a, c, g, or t
agcgtttgtctcgttaatggagaacacagtcacaggatcaaaagggctaatttcaggataattctcctgaaatcctgctaatttcaggataattcactgcttccagaattttagagtactggtaaagaatgaagtgatcagccagcagctgtgcgtcatcttcacacactgctacgggccctaccccatccccaagctcacagaaatcaaacgggaacagacctcgcgcttggatcctcattttcttaacaataaagaaatgtctgatgttacatttctggtagaaggaagaccattttatgctcacaaagtgctgttatttacagcctctccaaggttcaaagcactcctctccagcaagccgacaaatgatggcacctgcatagagattggttatgtgaaatactccatctttcagctggttatgcagtatctctactatggtggcccagagtcactgctcattaaaaacaatgagatcatggagcttctgtctgctgctaagtttttccagctggaggctttgcagcgacactgtgagattatctgtgcgaaaagcatcaataccgacaactgtgtggatatttacaaccatgccaagtttcttggagtcacagagctcccagcatattgcgaaggctactttctcaaaaacatgatggtcctcattgaaaacgaagcattcaagcagctcctgtatgacaaaaatggtgaagggaccggccaggatgtgctccaggacttacagaggacgttggccatcagaattcagtccatccacttgtcgtcttccaaaggtnnnnnnnnnnnnnnnnnnnagtgcagggaatgcttcccgggaactttccagttctcctgccgcattggctttacacaaacacagacaaattccacctggcacctgtttttggctgggccaaggagctgcctctactgctcccacgtgttcctgttgaaaaacaaaggactttccactggtctgcagatcagatcagctgggtccagagtttaatgggcaactggacaaccaagttaaccccaattgaaagcacccctaggaccattgaacacccactgccggggaccactgtccagtgaatggattgaggccttttaaaggtcactcaggttccaggttgacagttggaggacttcaccgtaccaaccctgaagagattgtattacacattaaggaccttggtagctgtgcttcagcaaacgtcaaccatggtagcaaattggtgaggctgtgaccaataatgaggaaataatctggcaaatttttaggggtgggaacttttttaaatgttcttttaaaaaaaaacaaaaacagggcagtcttgtagtttaaaatatatttctaaaagcttaacagttcgttttcaactaaattgtgtttagggatctgtgtttgagatttttctttatttcttttttttttttaaatagtaagtcacaggtccacactgtgtaaacatgcatctgataagatactgctgatattctaaacaagttgaaataatcttgccttagtgatcatgattacacaaaagaggtgcactgccaataagtatctctaattcaatagttggaaacgcgaacctggcgatgctaatcgtggtttcggggtgagaataaaacacccccacataacatgcatttgcatgggcccgaacctgtgaaatgttacgtttgtgcttcatttttgccaaggtaaaaatgttccatcatttctagctaaaactccatttggtggaaccaacatatccatttcttttcctagttacggatgatttggggatgcttttgcagaaatgtgttcatagatgatgctgaatgggggaggggggcagcacgtcagagaatttactattaatcccagagttttctctgtattctcagaagatgttaatagtttgttactagccagagagtatgactatgttagattatttttaaagatgaaacatgtatgataggatggattctttctgtattctgagagtgtacagtacaggattattataatgaaagtttatatcaacagggtttcgttggctctgccatatattataagcaaaagagattggtaaagtgccacagtattccagataacttttcagttgcggcctttcttctcgttctttaatttgaaacctagatacatgcagtaaaaactaggagaatgacttttacccctggggacagccaagttttgttgataaacctatttcctagcatgccttcaggaagttgtgccagaccctagattgtgaaggacccactgttcttctgttgtacgagctccctgaaccattgttcagaggaccaatgtcacatcgcttcatgggcatggcccatggagcatctgggtgatatctgtctacagtattggctcttctgcgaaggctgataacacaaggcctctcttccacatgatcatttgcaaacctcccccagcccctaccatccaatgtggaaggaaaacaagaactgcctgaagaagagtccaagctacagatacacagcgtgtgcattgcggctgtcaccttcctcctcccacttctgtatcctcagagatgctgcgtggatgtttccttaacctcagctgacttccctgtgaatgtctaatgctagttcagggcctccaggcattgatttgtacagtggtaactcccaatgaggcttctgttatcatttggtgtgctttctctgtcattaaaagaaatgattttcccaggcaaaaaaaaaaaaaaaaagaaaaacactctccgaggaattttaaggggcggaaaaaacgctcacgatggccatgc

SEQ ID NO: 7204 - DNA, 3104 bp, Homo sapiens
aggaaaactgaatcaaagtaaaaatctgtaaggctttgtagtttatggggaaaataatcactagatacataaaatatttacttttttttagcctttttttccccccacagaacatatagaggacagggctttgctctgccttctcactttctccccactcacccccaacctccagagtgtgttttccaagtaaaattttaggccatagagaaattcgcaattgataggccaaggtgactgataaaactctagaggtcaggattggtaatagtggagcgaggaccagatggaatttttgtttaatactgtatctgaaattgaggatgggatagataggaaatgacctatcatttcatgaggagatgacttttctgtgataatgggacagagatgagcttagatgaacgaatatatattttagcacttacctttttccataaaacacaaatagacttggtgcaaaattaccagtctcactccatggtatttctgatgagatcggtaaataatagagagagacatacttctttaggagctagctgactttaacatatgctggagtacaattgacttacaactatttggcgttagaaatgatttttctagggcttggtgggggaaaaatactcgtgaaatacctgccttgacttaaacttcaacatattttaaagtcattttattatcccacaactcagaatgtcttcaattaaaggtaagaaaataaggtgatgggctacagtggcttaatcaggtgttcagttaatgaagtagaagaaggatacagattctaataattcacagttgtagaggttctagactgttcttagtatgaagtcctggcagtgtatgtggcagagtgaataatgtttcacgacctggtgagtcatgtgaggactgtgagtaacttttatcttctgtgtgtcccacatagcatataacagtactatgctagtgatttgcttgacagttattgaatgaatgctaagtttcaaatatttatttgatagtcacttgattaccaagtaatcaaataattacttatagtgttttagggagttttcagaagatatttgtgattaaataaatgattatatatgtatattagcatactgtatgcatttgtcagttgggaaagaggggaatatggagaagtggggaactgcattcagtttttattttataggcaactaatatggtcctttggttttattttaaaatgaaactgagccttgagcattttgagctttcatgtcaaatgccttgaatggaagagtaggaatttcatgtaagtagcttacatctgccctgtatgttggagaatgtgattagatatacttgcttttctgcccaaggcactatttttgtatttatattgctttttgcaggtttacttctgttaacaggggtctgtgagaaataaggcttaaaatatcaatacttctcatttttccacagccttccaaggcttccatctttgtgccagtgtgtggctctgggtgccatctaaccgcaaaagcagcagttgggtttggatgagctgtgtgacatttggcctacacgtaggtctactcaccaccctggtcagggaacctggaacaatcctaaaactcacctactctaatgcaggccatattttttaattaaaattgaaattgtcactgagtattggaataagaagggactttggggtggagtgggtgagcagggcattgtcttacagaggaggtgtggggaccggtaagttttaactttcatcctttcaatctctcagtttcagcaaagatcttataaagaattttgttgctttcttaaattcatgaaagaaatgtaagcaattgaggtgtgtaattttcttgcccgtattctctatattaaaaaaaataagaatatggttctatgaatttcttgtgctatttttgctttccttgaattattaaaatatgttgcatagaactaatattgttttcttttttatttttatacaggaaggagagaaatattgttcatgtaatgtgttacctttttttgtctgtgtgatctacaagagcatggctgaaatgttaccatttttaactagtgttttgactgaagattattatgaaaagttttacttttgttagattcctaattaaaaatgcctatactcttttataggagtttcaacttttgcaatttggtaataacagatttaggtaagtaaaaaatgagaatctcatacagttctgaagatctaagtttggttgagaatttaatgtttcatcaccagtaaattcaattaaagacttttgattcaattaaagactcagttctgcctacacctgcaagaactgagttgatctgtacatcaacatttctgatgtttctttggtagttgctgctgaagtcagaagttaggaacaaatctaatggcctttgtaatgtcctctgtcatttcacggaggaatgacttagaggaacaaagctttcctgtgatttctttcttcaacagatggctaatggcacagcattgcagttagaatcttgtttaagatactaggagcacgtcctggactaaaaatttctacataagctttagcaacaaccttatagcttcctttgacttttttgtagagcttacagaatgtatggctgcctaagtaatagtctctgaattaatgggtaaaaaatatattatgagttttttatcctcacgtatggtgctaggctatactggatttgggctaacaaaagcttgttaacttttttttgtctcattgacagaagtattttatatctcatattttacattacataggtgtgtgtgtgtgtatgaaataaaagtttgaaaataaagtgatatactcttttttaaaataaaaaaaaaaaatctatctttttccataaaaacaatgagatcatgacccaacaaatttatttcagaactcacatatatacctgtagctttttcttttcaggtaatggtcttcagaaatttgacttgtcttctcggagtattgaactatttaaacattttattttaagaagtatacaaagacacataggacattaaacatgttatagttttgttgcttgtctttttcatttgagtaagatattctatgccc

SEQ ID NO: 7205 - DNA, 2052 bp, Homo sapiens
gtcgctgtttctcgtttctctctccctggcgcggcggtcgcttgtttctcgatgtggtcgcgctctgctcgcgtgtgcaccccctcgcttggcgagcgagagcggcacctcctgctttgatgtcgctgccgagagtccaccttccttcttgttgtgtggtgtttcttccaccacgctctcttcggtttggttgcttccccgcgcgcggctctctttttttttttgttgtcggggacgagttacgctccggcgcgcagcggttggttccgtgccgcccatgatgttttcggctgttcgtgggatactcgctttgccttgtggcctcccgctctcctctgctcctccctttttgtgtttcctcgcctctctctcctctctcttttgtgttttttttgttttttttttttgttttttctcttctcgcctctctctctctcttttttttttttttttttttttttttttttttttttttttttttttttttttaatttaaagaaaacttctttattaagtaaatggacagttggtacacagatattgcaaaaatttcgaggcgggtacatgaatgactgaaattcaggagacgcggggagttagcacagaagcactttcctcattcagagctcttttggctgcgagaaacagacacccaatcaaatcagcttcagcaaaatgagagaatgtatcctgacaagggacgctcacagggcctaaaggaagagtgctgggcccctggaggactgagggaagccggcaggtccctggaggcggtgcccggctgctctccaggcgcctgtgattcctctggtccctgccttgctatgcgtatcttccctctgagcagagccattttctctaccacattcatgcaggtgcccatcccccgcaacacacacagacaaacacacacacatggacacagtcacagctccagggtttctatgtgttcaggtaagggacctgcaaagcctgaacagcctccctaaatctagatgcccacctctcatcctttcagctcccatcagaggatcaaggggcccaaattcgcagaaaaggggagggtctaagatgagcagtcaccctgccaagaggtgtctgcctcaacattagtggcgtataacaatcccatgaggtagctttaacctcataggtaatgaccctaagaggtaggaaattcagtgcctggtccctcagcaggaaatgacacagccaagacttgaaccaggcttgtgtgatgctgcactagccaccgggtcgtcccatcagccaagtccagcccacagctaccatcccagactccagcaggttacaggtccatcgagaggcatttctcaaaatcagcaatccggtgtttgcccggtacacaggaaatgagtatcccagcttcacagggacactgactggaaggaaggaagacttctctgaaggagcacagagctctagaaaccagagaagtttcctctgagccccttgggtctgaggctgccaggttcacactgcagatacttgtctcagggcaggagaggaggctcatttgcatatacttgccaaaaatcacaagcagacatctagagatccccaggagaagctgacacctggctgacacctgctgacagtaactgctcctcccacctcctggaagctatgttaggaggaccctcccagagggcaagggaggagagaactgacagacccttctacccaggggcctcatgtacttcccagcccatgtgcctgttcgtatggaagcccctggacatcggggtgtcctggcctggacagctccaattttgccttttttgtttgtttgtttgtttttgacacagagtctcactctgtcgcccaggctggagagcagtggcgtgatctcggctcactgcaagctccgcctcctcccagtagctacagcctatgggactacaggcatgcgccaccacgccaggctaatttttttgtatttttagtagagacggggttttaccatattggtcaggctggtctcaaactcctaacttcaaatgatcggcccacctcagcctcccaaagtac

SEQ ID NO: 7206 - DNA, 562 bp, Homo sapiens
tttttttttttttttttttttccaagaaagataataacttctttattagtgggcaattgtctgtgtacctgacaatgcatcagcgacatccatggaagagccactaggtggccacatagctaacaaaattcttgttagctagaaaactgctccaggctgctgctgtcccttttccaggtagcactaggctgtcaaaatcatgactttaagtaaatttcttaaggaatttgatcaattccattcttgatgattccagatggaaatcttggtgaattgtttcaaacactgctttcgtctctggcagagttgtggatggaaataggcaaacaggaaccatatccctactgcagtcttctgtctggctgaaggaaggaagaaataatctcctaaagtggcacattgtgcaaatctgatgcgtcaatcttgaagcactgccaagcaattcagaagagaaataatcaattcattccatctccttaatgctgccgtgtctaacaggtttctatgctgaaaatatcaccagctggacactgtgacacttaatattgcaccttcagaaatg

SEQ ID NO: 7207 - DNA, 816 bp, Homo sapiens
  misc_feature (248)..(301): n is a, c, g, or t
ggggaccccaccctaatcttgttatgcaaataggcttcccacttggcaggggccgtcttgtccactcgtttctgtaaacatgggtggcaaaaagagaagatggagctgccatttagaacatgcctaatcccagcttcatcttgctgagcaaaaatgaaggagcctggacccaactttgttactgtgagaaagggtcttcattcattcaagatggcatttgttaagcacctactacaaaccttggaaannnnnnnnnnnnnnnnnnnnnnnnnnnnnnnnnnnnnnnnnnnnnnnnnnnnnnccagtatgagtccattcagttcatgccgtgacaattttcttggaactcctttttattgttagttctcacttgtttccatatttagtgaatgtacatttaattgcaaagctgtcattaataaaaattcttatagtaccacacaaaaaaaaaaaaaaaaaaaaaaaaaaaacattttggggcgctgcggcccaaaaaaggatctaaaacacaatctaggtatggcgaccagagggccacaagaatgagaaactacgaaacatgggggcaacaacgggggggcaacaaaagaaacaccggggggaataagaacattgggtggggtttatcaaccaaataataccacgccggggggaacacacgacggttcggaacaaccccacaaggagatcaggggacagaacggggcacaacacgaggtcaagagggccgagataaatagccgagacggtagagagagcagagcgcagaagagaggagaggaaacaacagagacaagaaaaaggaccgaccacgag

SEQ ID NO: 7208 - DNA, 2040 bp, Homo sapiens
ggggcacacattttttacatttgatttaacttgactaaaattaaatgagcaaatgtttattgctatgtccattgttttcctttctctgtcattgttaaaaagaggagccatggcttctgcttcttctgtgtattctccattagaccttcttcatccaccctcttccccatccctttcagctctgaagggtctataaatgaaagtgggtaccaactgattcaataggacttatatcttactaaataacgttttattgtctttgttctatgtatttgcagagaaattgtaagtatctttaaaaccaattaacaaagccctgtgggtctttcaatcaagacctttgtaaacatctctactagcccatactcccccaaacttcttgcacatggtagaagatgacattaaataaagcacattataaggtgcaatgagctttattctaaaaatattgtctggatgtgaaagtaagttcttgttcataaaatgttattagtaaaatgttattagattaaaattatggagtaagcatttggcaaactgattgactcttcactggaaagaccaggctttttagcacacatttctgttcatgcttaaggtcagaagtcaatcaaaggcaaccagaaaaaaaaaaaggcaaataacatgaattagggacataattattttctgttataacataatcaggatcttttcaagtttaattatggggagttgtctgaataggctagttttatgccatgcaaataaaatgtgaatttcaaaaatcttagtgaaactcaaatttatttttacttagcgataataaaatcacaaatacttcttgagctcttgctgtaggccaagtgctgtgctcagtacttaacatggataaactcgattgagtatcacaattcaaagaggtaggcactccaggttacccttgactctgctgatggcagaaacctcacttgtaataaataattatctttgacaagagaaacataaaacaagacctgtaataaatgatttgttcacagatagcggttgtcatagaaactatatagcattgatttttagctatgattttgattcagtttttaaagtatttaatttttattatatcagcccacactgaacattggtttttcagcagataatgcatcttccaagtgctccaaggcgaagagccacagagaagaatactgcatcttgagtcataccctgaaattactgaatgaattacctgtggccatgtaaacactctgcttcagtaggtagagtgcaacagacaatccaatcattcagaactaagtttttagttagcttctgttattcactgaagtagtttggcattacagttgtctctaggtatccatgggggattggttccagaactccctgctgataacaaaattcatggatgctcaagcgccttacataacttggtgtagtatttgcgaataacctatgcacatcctcaagtatactttatatcatctctaaacatataatacttaatatgtaaatgctatgtaattagttgttattactgtatttagtgaataatgacaagaaaaaaaagtgtgtacctgtttagtacagacactactctgtactgatttttttttctgagtattttccatccagggttggttgaatccacagatgtgtaactcacaaatatgaagggctgacggtacctagtagttaattcagatttatcgcagtgatctaaagtaattttgcagtttacaagcatttttttttggttctaaaagaaaaaaacaaaacgaatattggtgatgtgatatttatgtaatgtgatgatattataatggccacgttttaaaacttgagaatgtcctaagttcacacactgttggtttctagatccacaaggcttctgtatacagttcacggtcctcggcattgcttcttgtaatttttccatcccaaaggagagctactgtactgactgtacttgtggaatgcagcgcttcattaaattaagtttattaaaatgcaaaaaaaaaaaaaaaaaatgttccttgtttaaaa

SEQ ID NO: 7209 - DNA, 989 bp, Homo sapiens
  misc_feature (531)..(552): n is a, c, g, or t
gggatgaatgagaagggggagctgtatggatcagtaagtactggagggatttcatccagctttatctccatgtttgatttgaacagctgtcttttctctggattaaaaagggccagaaatgcaactgagtctgtttggaaggaaaaactaacccaagagtgtgtattcagagaacagttcgaagaaaactggtataatacgtactcgtcaaacctatataagcacgtggacactggaaggcgatactatgttgcattaaataaagatgggaccccgagagaagggactaggactaaacggcaccagaaattcacacattttttacctagaccagtggaccccgacaaagtacctgaactgtataaggatattctaagccaaagttgacaaagacaatttcttcacttgagcccttaaaaaagtaaccactataaaggtttcacgcggtgggttcttattgattcgctgtgtcatcacctcagctccactgttgcccaactttgtcgcctgcataatgtatgatggaggctnnnnnnnnnnnnnnnnnnnnnngttctgcacttaaaggcttctcctcctggagggctgcctagggccacttgcttgatttatcatgagagaagaggagagagagagagactgagcgctaggagtgtgtgtatgtgtgtgtgtgtgtgtgtgtgtgtgtgtgtatgtgtgtagcgggagatgtgggcggagcgagagcaaaaggactgcggcctgatgcatgctggaaaaagacacgcttttcatttctgatcagttgtacttcatcctatatcagcacagctgccatacttcgacttatcaggattctggctggtggcctgcgcgagggtgcagtcttacttaaaagactttcagttaattctcactggtatcatccccggggacttaaagcaaagccctttttgtaaaaaaaaaaaaaaataaaaaaaaaaaaaaaaaaaaaaaaaaaaaaaaaaaaa

SEQ ID NO: 7210 - DNA, 1107 bp, Homo sapiens
aacctaaactacaaagggggaactgaggagggaactcaggagaaaggaactaactgcggagcttaatcttggcccagtgttcagccactcggaggtgcgggggctgaggcacatcagaagctgctggtggctgtagtggggtgggatgacctggccagagccaacgaggatactggagccaaagtcaagttagagacagctgggaacgtgaatggggctcttgattttcttatcaaaatcaccactcctcccagcttggactaaatattctttctagcaagcagctttgtgagctccctgaagcccaaggaaacccttcggtgggagaaatttcatttctgtctgagaggattaaggcagcaggtgactccccctcctcgcctgccgtgtcctgctattctcaggcagctctaaggagaattcttatcacagttcaagtgatttccagaagttccagggcttctgagagaccatcaagggaactttaacaacttgacaaatgtccttgaagtaagatgcctcatctttagggaaaaatggggtttggatttctgcttaggcaaagtctcctgcagttcatccttctctgtcctcttcttgcttcaggcttggggaccgtccctgctgtccccactgtggtggcaatcaggacctaaggtgaagcaaacttgaagttctatctgacaagtttaggcagtaagagaaggagggaaatcggagcaaagctccctcactttattgttgagaaactggcatctggaaagaggaaggaatttgcccaaagtcagtcagctgggataaaaacctgggtgtcctgtccagaaagtgcagggtgctttctgctctgtagcaaggcagcagacatctctgagccaggcccaccaacaggcccttatctggtggttggatcatgatcccattttgcttggacatgctctcaggaagataaaaaccatggagaaacactaggccattgacaaatgatctgagacaactttagaaaacaatgtaggatgaatggaaagagaaagaaaggaaagaaaaaaaaaaaaaaaaggaggaaatatgaggaatagtgaggaaggaaggaaaaaaaaaaaaaaaaaa

SEQ ID NO: 7211 - DNA, 420 bp, Homo sapiens
ttttttttttttttttttttttatagttgaaattcactttaatgatacttttgaaacccaatatatctaaaatattatttcaacacataatcaatataaaaattaaggtatttaaagttgttgtcctcttccatgcttcatacctggtgtttcagagtcatgacacacttggtttggctacatctcagtagccacacatggctgggtggctgctgctgtggacagcatggacctaaagtccactcttgtaggtgatgttaagaatgcaaatatatttttctctacataatcctattttttttttttttgagacagggtctcactttattgcctagactggagtgcagtggcatgatcccggcccactgcaacctctgcttcccaggttcaagcaatgctcccgcctcagcctcccaagta

SEQ ID NO: 7212 - DNA, 1969 bp, Homo sapiens
atttagttggatgcctgacttgtttttagttctatgaaactacactgtatggagaagagcgtattgcaagtggtctttaaaaagcaaaacctgaggcagcatgacccaggtccagccatgaagttgaaaaagatgctcttgaatatagtaaacttgaagacctccaactaaaaatccttatactgcacttattccttcaaataagtttgttcgttcaacttatggatttaacgtggcagtgcaccattggaacagaatgacaatccataagccatgcaacttaacaatttaagccattccagtccatcccgagccagtgaatcttccaccacttaagacaaatagtagaacatgaaatatattaagctgcaagtctgaacttgccttttctttctggaaaagagggcagtaataggcaagttttaaaagaatttccttaagagagataactagttttcatttatttaacttttgcaggttggtgattttgctcattatggtcgtggagtgctgattgattcacagtagataaagctggcagtaagaaatgctaagagttgttgaagcagaaggcggctgattgtcaataagtcactacagttgcataagcagtgctgtcagaattggtttggtgcaggcaatagattttgccttcaggggttcctgtggatctgaggaaggcatcagtgttgattaacactcataactagggagtgactggtagttacttaaagcaagtaattgaccaaatggaaaaggggaagtaattaaggaaattggtaagtggaggtagtcaggaagttcttgtggttcttcacatagattttacagctttggctttcattttgtttagctaaagtcatggggacaactcttcaatttagaacttaagttgaattataaaaatgatggatataagtggtagctgtatctagtgaagtgtctgtcagtaagtgaaacattttttggtggtggcttatccacaaacagtttagttgtagaataaaacttatgagtgacatctggaaagtaaccatgctaagatggcaagcacactggaaacaattaggccacttggctttcttttgctgtattgttttataagcctactttacctcccagtcttggaaacaagttttagttttttattggtttggagactagagccaatagtataatgttctcaaaggaaacagacttgagttgttggattagaggaactaacccaacttatatgattttttttttgtttttgtcgtgtagttatggcactgtcttatttggaacatttgcaactagggataatacaacatttttaactctcatttgacaacctactactaatcacagaccacaagggtaatgaccaaatttatgtggtttttgcactccatagttgtcttagcccaatctttctatactcttacgattacttgggttaacgcttctgtgaggaccttctggctcttgagataccctaaatatttaagatatttagatatcttgaagatagtataggatatagagattgtaccaaataggaatataaggagtatgttaaaatgaccagatacctgtttgatagtttactgacctagcagatgtgtggaaaaggaatcagatcttgattcttctgggtttatactggttgtaaaacagaatgatacagaaaatgttttccttgtttaactggtagttgaacatagaacttgggtattatagatcacttttcactttttggaatgttgttgtattgaaacttaataaaactttaacatggccaaaagaacactgacgagaagacagaccaagcatgcaagatatggtgcaacgacaacaaggggggggcgcgccaccgaaaaacacatcgccttcccggggcgccaactcttgtgccccccaaagcccctcttctctttgttcctaacaaaggccccccgaagaggggggcgggagcattcagacgaag

SEQ ID NO: 7213 - DNA, 4522 bp, Homo sapiens; identical to SEQ ID NO: 7106
  misc_feature (4321)..(4321): n is a, c, g, or t
  misc_feature (4371)..(4371): n is a, c, g, or t
  misc_feature (4435)..(4435): n is a, c, g, or t

SEQ ID NO: 7214 - DNA, 517 bp, Homo sapiens
ttttttttttttttttttttttttttggaatcttagagatttattccactggtgtgttaggaccattaaaaagacgtgggcgcccccttccgacagaggctcaccactccaggagaacctgcgggcaggctttcatcctccgcggagctacaggcttccagcggcctggggcctcgtgggtactgagctgcgtgtgggggtccaggacccgatgtcgcctgccattcggccagggcatcggcagatgtattggtccagcccccgagagacccaggaagaaggcaaggaggttcggtacgagccatctcgaatggaagaagaaggcggtcggtctgcgggagccaggccgcagagccatccgccttctgtccatgtcttctttatcttcctcgccataataattagtggtgtggacccccccacacacactttttttcggatttacttgtatggaaccgtaaacttgcaataaagcccggaggcgactgctgcggagggggcaaaagaaggtttcgtt

SEQ ID NO: 7215 - DNA, 709 bp, Homo sapiens
gtgaaagattgtcatttatgatccatggtttatttaaaaaaaaaggaaagaaaatggaaaaatatatttttaagcttacttgaatgaacaacgtaatgtgaaaaccaagactcttcctgcatgtcttttttgcattgtgttgataagattatatatagtttatagatatattatattactagtacagtgcatggtgctgtcacttggaaagcctttcaatgttgtcttcagattgttgtgatgaatatgaaacatgcagaccctcctttataaagaaaaagaccttaaaacttgaatatgagataattttacattttaaaagtttatttgattttcatattattcactttcaaagccctttcaaatagaaaaggtatgaacttttggggggataatttatgtatcgtaaacttattagaacaaaatattcctgatgtataatgagttgttttatttatacaactttttcaatggtagtttgcactattctttattatgctacaggtttatttattatgaaacaaaggaatatgtattttatgtattttaccatgcataggttaactctttgccacagatttattggttcttgatacacctaaaataaaaaaaaatgtgtacctccaatagagagcaagcaagaatgattatgaagtaacaaatttaataaaggtattcttgttattaaagaaaaaaaaaaaaaaagggc

SEQ ID NO: 7216 - DNA, 3729 bp, Homo sapiens
tgctcgagatggaggacaacctaaaaagcagtttcagaaggatgaagagggccagaaggaagaagataagccaagaaaagagccggataaaaaagaggggaagaaagaagttgaatcaaaaaggaaaaatttagctaaaacaggggttacttcaacctccgattctgaagaagaaggagatgatcaagaaggtgaaaagaagagaaaaggtgggaggaactttcagactgctcacagaaggaatatgctgaaaggccaacatgagaaagaagcagcagatcgaaaacgcaagcaagaggaacaaatggaaactgagcagtaagtatttttttttttctaaattttgggttctttttaaaggctagcatggaatttttaaataatagactttcattttccagactttatgaagccttttgaagaagtgacttttcccatgtgttagaaaaatcttcaatatatgatgatgatcttatttcaggcttcattctcttctgagaggatgaaattgactgaggcagtcactctgtgaattatttttgaatttaaacgaagtgcagataggatttaattgatactggctttgcaagaagtgtactcatcctcaaccatttgtttgtataatataatacatatagatagaggggcgataatatactggtagacaaagaatgcaggaaatgcccttattcatcacaccaccaagcaggcctcaccctaaagaccagcaaaagtaacaaaagcacatttggaaacccaggaagccagtaaaagtaaatctaaaggctgacagggtgtacattattatgtatgtgcaatataaatcaaattcaaagctgttttctcttaaattttgatacttatagagacaggacttgccatggggaatttctttccccttactatataattttattactagaaggaaaagtaatagcaatgataataatgaacagacttcgtgtctttattacatttgctttcctagttacctttagactgtcacttctgagttctttctctgacatgcttttcttttctcgtgaagcgtcttacattctgactaaattttgtttttttgttgttgttttagtgaggtgatttttaaaacatgctctaggtcaataagacaaagttaatgatgagcagtaaaacaattcttgaacaattttgtactttttttctttatataatatatccgtaagccaaagtctttcttgacaagtacagcgttttactctgctttcttagtttggaggatatacaagtagttttagctccttgagggagtaatttaaataacttatctaaagctcaaaaatattattccctctaatgttagactttaagcacttctgtaaatatttaagttattctttgtcacctatcattttctattctatcttttcactgaaaagctgttggactgtttgttgcttttgactttattgtgatctcaaaattaagatataaaattagttgttactagtatatgtagcccaacccttctttagtatcttaaagttatctttatgtatttcagtttcttttgaatgtcctccaatgtaactttctcaaattctaatatttgtgttttctttccttctcctgttattacaaaactttgtacttggacagttttgctctgtaaagcatttcagatgcagcttgtgtgaaatgcattatgcaaaataaagtttattgtattgtattcccagccaaacaacatgtaatctacagtaataaaaaatatatctcattttgggctcaaagcattaatccagttactgaaaagagaatacaagtggagcaaacaagagatgaagatcttgatacagactcattggactgaatttcccccttccccccattgatggaagaatgttccagattctaaattgaggacttcattattaatggcattactgtgttatgattaacaaatttcctgtaaggtacacactacatactaaggtcggccatcattcctgtttttttttttttttttttttttaaccaagcttaaaatgaagctttgtgtttgaaagtaataacaagctcagacgaagatggtggttgtacattattcatctagaaaatataaaaattcattttgttttgaagctagttattaaactggaatagcagttatatccctgagaatggggcccttctcttgacattcctttgttgtttaattctttagaatcttaataaatgtttttttaatcctgagagattaaacagtagtagacttgttaagaatgaaactgtaaccaaaattttaaaataaagttttttttaaaaaaaaaacctgatttttagatattttttgttcttgtctatttgaattggttcataatatggcctgaactctaagccaaggtactagaaattaagatttcaattttaagtggttattttgtgattgacaataaaatggtaccttttgtgaaatgttagtgaatgttactggacgtcattcaagtttgatgaattggccaaaattttaaaaacagtgttatcttaagtctatttaactttaaagctaacttcagaactcattaatctgcttgttacatgcacaatgattaaattggtctattttaagatgcagctttaaaaaagaatggatgtagaagccattaaacatttataggtgtcatcttcccattgtggcctgtttgtccagtgaccctgaaattgctcttctagcaacacactatttgtgatgtcactgaaaagccagatatgatttaatctagcatgttaattagagttttgcttatatttatgctacggaactgcaccattctaagagctacagtcagttcctttgcagtctaggctattgacttattttaaggaaaacatttttagcttttacatagggattgtgggcatttagtcacaaaattccaatgtgttgaaatatttttgttaacatttgataggcagaataaagatgaaggaaagaagccagaagttaagaaagtggagaagaagcgaggttagttatttcactttctaagatacataaaattatacatggaaaagaagttatatagacataacttttcatgtattggttttggaataattttatactcatatcctacaaatagaatttttcaaatccctaatgggctttatataaattgcattgtattttaagcataatcaagtgaacttgcttgagttgtttatgtttactgctcattaattatttgatggtgtcaaattttagtacacttgctgaaagctggatgctttcccatttcagacaaatcccttggttaaacataaggaaaagcaggtgtttggggactggagagcagaggagttatcatatgcagactatttattttaggaaaaacgcagccaagtggtggttttgtgcttttacactgcatgttgcttttctcaaccactaaaaatggcaataagtacttattcttagttaagctattgtgcatatctttgagcttcttagtaaagattactaagaacattttttttttaagtccactaattcattatacttagcctgtatatagaaatactggttttggaaaaactgttcactgtttttcacatattttaatttgtagaaacatcaatggattctcgacttcaaaggatacatgctgagattaaaaattcactcaaaattgataatcttgtaagtgtttaacttcatctaatacttcggtattcacatatagcaat

SEQ ID NO: 7217 - DNA, 3894 bp, Homo sapiens; identical to SEQ ID NO: 6189
  misc_feature (119)..(133): n is a, c, g, or t
